United States Patent Application Publication US 2007/0214517 A1 - sequence listing, part 72

SEQ ID NO: 93869 - protein, 654 aa, Arabidopsis thaliana; identical to SEQ ID NO: 90113
  peptide (1)..(654): Ceres Seq. ID no. 12722186
  misc_feature (1)..(654): Homolog of NCBI NO: 15235063 NR Description: receptor kinase-like protein; protein id:
  misc_feature (1)..(452): Homolog of NCBI NO: 30686865 NR Description: protein kinase family [Arabidopsis thaliana]
  misc_feature (605)..(654): Homolog of NCBI NO: 30686865 NR Description: protein kinase family [Arabidopsis thaliana]
  misc_feature (159)..(651): Homolog of NCBI NO: 37531832 NR Description: putative protein kinase [Oryza sativa (japonica group)] >gi|22725985|gb|AAN04985.1| putative protein kinase
  misc_feature (1)..(144): Homolog of NCBI NO: 37531832 NR Description: putative protein kinase [Oryza sativa (japonica group)] >gi|22725985|gb|AAN04985.1| putative protein kinase
  misc_feature (222)..(651): Homolog of NCBI NO: 15225518 NR Description: putative protein kinase; protein id: At2g45590.1 thaliana] >gi|7485626|pir||T00872 probable protein kinase
  misc_feature (1)..(316): Homolog of NCBI NO: 15225518 NR Description: putative protein kinase; protein id: At2g45590.1 thaliana] >gi|7485626|pir||T00872 probable protein kinase
  misc_feature (78)..(284): Homolog of NCBI NO: 11994703 NR Description: somatic embryogenesis receptor kinase-like
  misc_feature (505)..(638): Homolog of NCBI NO: 11994703 NR Description: somatic embryogenesis receptor kinase-like
  misc_feature (54)..(284): Homolog of NCBI NO: 15225520 NR Description: putative protein kinase; protein id: At2g39660.1, by cDNA: gi_13272430, supported by cDNA: gi_17064833, supported cDNA: gi_18086423, supported by cDNA: gi_20259859, supported by

SEQ ID NO: 93870 - protein, 532 aa, Arabidopsis thaliana; identical to SEQ ID NO: 90114
  peptide (1)..(532): Ceres Seq. ID no. 12722187
  misc_feature (1)..(532): Homolog of NCBI NO: 15235063 NR Description: receptor kinase-like protein; protein id:
  misc_feature (1)..(330): Homolog of NCBI NO: 30686865 NR Description: protein kinase family [Arabidopsis thaliana]
  misc_feature (483)..(532): Homolog of NCBI NO: 30686865 NR Description: protein kinase family [Arabidopsis thaliana]
  misc_feature (37)..(529): Homolog of NCBI NO: 37531832 NR Description: putative protein kinase [Oryza sativa (japonica group)] >gi|22725985|gb|AAN04985.1| putative protein kinase
  misc_feature (1)..(22): Homolog of NCBI NO: 37531832 NR Description: putative protein kinase [Oryza sativa (japonica group)] >gi|22725985|gb|AAN04985.1| putative protein kinase
  misc_feature (100)..(529): Homolog of NCBI NO: 15225518 NR Description: putative protein kinase; protein id: At2g45590.1 thaliana] >gi|7485626|pir||T00872 probable protein kinase
  misc_feature (1)..(194): Homolog of NCBI NO: 15225518 NR Description: putative protein kinase; protein id: At2g45590.1 thaliana] >gi|7485626|pir||T00872 probable protein kinase
  misc_feature (1)..(162): Homolog of NCBI NO: 11994703 NR Description: somatic embryogenesis receptor kinase-like
  misc_feature (383)..(516): Homolog of NCBI NO: 11994703 NR Description: somatic embryogenesis receptor kinase-like
  misc_feature (1)..(162): Homolog of NCBI NO: 15225520 NR Description: putative protein kinase; protein id: At2g39660.1, by cDNA: gi_13272430, supported by cDNA: gi_17064833, supported cDNA: gi_18086423, supported by cDNA: gi_20259859, supported by

SEQ ID NO: 93871 - protein, 485 aa, Arabidopsis thaliana; identical to SEQ ID NO: 90115
  peptide (1)..(485): Ceres Seq. ID no. 12722188
  misc_feature (1)..(485): Homolog of NCBI NO: 15235063 NR Description: receptor kinase-like protein; protein id:
  misc_feature (1)..(283): Homolog of NCBI NO: 30686865 NR Description: protein kinase family [Arabidopsis thaliana]
  misc_feature (436)..(485): Homolog of NCBI NO: 30686865 NR Description: protein kinase family [Arabidopsis thaliana]
  misc_feature (1)..(482): Homolog of NCBI NO: 37531832 NR Description: putative protein kinase [Oryza sativa (japonica group)] >gi|22725985|gb|AAN04985.1| putative protein kinase
  misc_feature (53)..(482): Homolog of NCBI NO: 15225518 NR Description: putative protein kinase; protein id: At2g45590.1 thaliana] >gi|7485626|pir||T00872 probable protein kinase
  misc_feature (1)..(147): Homolog of NCBI NO: 15225518 NR Description: putative protein kinase; protein id: At2g45590.1 thaliana] >gi|7485626|pir||T00872 probable protein kinase
  misc_feature (1)..(115): Homolog of NCBI NO: 11994703 NR Description: somatic embryogenesis receptor kinase-like
  misc_feature (336)..(469): Homolog of NCBI NO: 11994703 NR Description: somatic embryogenesis receptor kinase-like
  misc_feature (1)..(115): Homolog of NCBI NO: 15225520 NR Description: putative protein kinase; protein id: At2g39660.1, by cDNA: gi_13272430, supported by cDNA: gi_17064833, supported cDNA: gi_18086423, supported by cDNA: gi_20259859, supported by
  misc_feature (336)..(474): Homolog of NCBI NO: 15225520 NR Description: putative protein kinase; protein id: At2g39660.1, by cDNA: gi_13272430, supported by cDNA: gi_17064833, supported cDNA: gi_18086423, supported by cDNA: gi_20259859, supported by

SEQ ID NO: 93872 - DNA, 1938 bp, Arabidopsis thaliana; identical to SEQ ID NO: 90116
  misc_feature (1)..(1938): Ceres Seq. ID no. 12722213
  misc_feature: MA Experiment ID: 20000184 Result: Down-regulated in Transcription
  misc_feature: MA Experiment 20000184 PARAMETER Experiment Name: At_Shoots__P Parameter: Age (day) Value: 7
  misc_feature: MA Experiment 20000184 PARAMETER Experiment Name: At_Shoots__P Parameter: Tissue Value: Shoots vs. Whole Plant
  misc_feature: MA Experiment ID: 20000234 Result: Up-regulated in Transcription
  misc_feature: MA Experiment 20000234 PARAMETER Experiment Name: At_Siliques_P Parameter: Age (day) Value: 21
  misc_feature: MA Experiment 20000234 PARAMETER Experiment Name: At_Siliques_P Parameter: Organism Value: A. thaliana
  misc_feature: MA Experiment 20000234 PARAMETER Experiment Name: At_Siliques_P Parameter: Plant Line Value: WS
  misc_feature: MA Experiment 20000234 PARAMETER Experiment Name: At_Siliques_P Parameter: Tissue Value: Less Than 5mm Siliques vs. Whole Plant
  misc_feature: MA Experiment ID: 20000235 Result: Up-regulated in Transcription
  misc_feature: MA Experiment 20000235 PARAMETER Experiment Name: At_Siliques_P Parameter: Age (day) Value: 21
  misc_feature: MA Experiment 20000235 PARAMETER Experiment Name: At_Siliques_P Parameter: Organism Value: A. thaliana
  misc_feature: MA Experiment 20000235 PARAMETER Experiment Name: At_Siliques_P Parameter: Plant Line Value: WS
  misc_feature: MA Experiment 20000235 PARAMETER Experiment Name: At_Siliques_P Parameter: Tissue Value: 5-10mm Siliques vs. Whole Plant
  misc_feature: MA Experiment ID: 20000264 Result: Up-regulated in Transcription
  misc_feature: MA Experiment 20000264 PARAMETER Experiment Name: At_Open_Flower_P Parameter: Age (day) Value: 21
  misc_feature: MA Experiment 20000264 PARAMETER Experiment Name: At_Open_Flower_P Parameter: Plant Line Value: WS
  misc_feature: MA Experiment 20000264 PARAMETER Experiment Name: At_Open_Flower_P Parameter: Tissue Value: Open Flower vs. Whole Plant
  misc_feature: MA Experiment ID: 20000286 Result: Up-regulated in Transcription
  misc_feature: MA Experiment 20000286 PARAMETER Experiment Name: At_Open_Flower_P Parameter: Age (day) Value: 21
  misc_feature: MA Experiment 20000286 PARAMETER Experiment Name: At_Open_Flower_P Parameter: Plant Line Value: WS
  misc_feature: MA Experiment 20000286 PARAMETER Experiment Name: At_Open_Flower_P Parameter: Tissue Value: Half Open vs. Whole Plant
  misc_feature: MA Experiment ID: 20000438 Result: Down-regulated in Transcription
  misc_feature: MA Experiment 20000438 PARAMETER Experiment Name: At_Shoots__P Parameter: Age (day) Value: 14
  misc_feature: MA Experiment 20000438 PARAMETER Experiment Name: At_Shoots__P Parameter: Tissue Value: Shoots vs. Whole Plant
  misc_feature: MA Experiment ID: 20001760 Result: Up-regulated in Transcription
  misc_feature: MA Experiment 20001760 PARAMETER Experiment Name: At_50mM_NH4NO3_L-to-H_P Parameter: Timepoint (hr) Value: 2
  misc_feature: MA Experiment 20001760 PARAMETER Experiment Name: At_50mM_NH4NO3_L-to-H_P Parameter: Tissue Value: Siliques
  misc_feature: MA Experiment 20001760 PARAMETER Experiment Name: At_50mM_NH4NO3_L-to-H_P Parameter: Treatment Value: 50mM NH4NO3 vs 100mM Mannitol
  misc_feature: MA Experiment ID: 20001768 Result: Up-regulated in Transcription
  misc_feature: MA Experiment 20001768 PARAMETER Experiment Name: At_Far-red-enriched-adult_P Parameter: Age (day) Value: 28
  misc_feature: MA Experiment 20001768 PARAMETER Experiment Name: At_Far-red-enriched-adult_P Parameter: Light Value: Far-red enriched vs. White
  misc_feature: MA Experiment 20001768 PARAMETER Experiment Name: At_Far-red-enriched-adult_P Parameter: Organism Value: A. thaliana
  misc_feature: MA Experiment 20001768 PARAMETER Experiment Name: At_Far-red-enriched-adult_P Parameter: Plant Line Value: Columbia
  misc_feature: MA Experiment 20001768 PARAMETER Experiment Name: At_Far-red-enriched-adult_P Parameter: Timepoint (hr) Value: 1
  misc_feature: MA Experiment 20001768 PARAMETER Experiment Name: At_Far-red-enriched-adult_P Parameter: Tissue Value: Aerial
  misc_feature: MA Experiment ID: 20001771 Result: Up-regulated in Transcription
  misc_feature: MA Experiment 20001771 PARAMETER Experiment Name: At_Far-red-enriched-adult_P Parameter: Age (day) Value: 28
  misc_feature: MA Experiment 20001771 PARAMETER Experiment Name: At_Far-red-enriched-adult_P Parameter: Light Value: Far-red enriched vs. White
  misc_feature: MA Experiment 20001771 PARAMETER Experiment Name: At_Far-red-enriched-adult_P Parameter: Organism Value: A. thaliana
  misc_feature: MA Experiment 20001771 PARAMETER Experiment Name: At_Far-red-enriched-adult_P Parameter: Plant Line Value: Columbia
  misc_feature: MA Experiment 20001771 PARAMETER Experiment Name: At_Far-red-enriched-adult_P Parameter: Timepoint (hr) Value: 16
  misc_feature: MA Experiment 20001771 PARAMETER Experiment Name: At_Far-red-enriched-adult_P Parameter: Tissue Value: Aerial
  misc_feature: MA Experiment ID: 20001910 Result: Down-regulated in Transcription
  misc_feature: MA Experiment 20001910 PARAMETER Experiment Name: At_Drought_Reproduction_P Parameter: Age (day) Value: 37
  misc_feature: MA Experiment 20001910 PARAMETER Experiment Name: At_Drought_Reproduction_P Parameter: Organism Value: A. thaliana
  misc_feature: MA Experiment 20001910 PARAMETER Experiment Name: At_Drought_Reproduction_P Parameter: Plant Line Value: WS
  misc_feature: MA Experiment 20001910 PARAMETER Experiment Name: At_Drought_Reproduction_P Parameter: Timepoint (day) Value: 7
  misc_feature: MA Experiment 20001910 PARAMETER Experiment Name: At_Drought_Reproduction_P Parameter: Tissue Value: Flowers
  misc_feature: MA Experiment 20001910 PARAMETER Experiment Name: At_Drought_Reproduction_P Parameter: Treatment Value: Drought vs. No Drought

SEQ ID NO: 93873 - protein, 586 aa, Arabidopsis thaliana; identical to SEQ ID NO: 90117
  peptide (1)..(586): Ceres Seq. ID no. 12722214
  misc_feature (46)..(313): Pfam Name: GMC oxidoreductase Pfam Description: GMC oxidoreductase
  misc_feature (1)..(566): Homolog of NCBI NO: 10177730 NR Description: mandelonitrile lyase-like protein [Arabidopsis
  misc_feature (1)..(585): Homolog of NCBI NO: 18410417 NR Description: mandelonitrile lyase-like protein; protein id: supported by cDNA: gi_15982754 [Arabidopsis thaliana]
  misc_feature (1)..(566): Homolog of NCBI NO: 11358498 NR Description: mandelonitrile lyase homolog - Arabidopsis
  misc_feature (32)..(566): Homolog of NCBI NO: 10177728 NR Description: mandelonitrile lyase-like protein [Arabidopsis
  misc_feature (32)..(566): Homolog of NCBI NO: 15242234 NR Description: mandelonitrile lyase-like protein; protein id:
  misc_feature (159)..(585): Homolog of NCBI NO: 24417440 NR Description: unknown [Arabidopsis thaliana]
  misc_feature (7)..(576): Homolog of NCBI NO: 17978954 NR Description: At1g12570/T12C24_9 [Arabidopsis thaliana]
  misc_feature (7)..(576): Homolog of NCBI NO: 22329512 NR Description: hypothetical protein; protein id: At1g12570.1,
  misc_feature (31)..(576): Homolog of NCBI NO: 9502391 NR Description: T12C24.11 [Arabidopsis thaliana]
  misc_feature (1)..(343): Homolog of NCBI NO: 15982976 NR Description: R-oxynitrile lyase isoenzyme 1 precursor [Prunus

SEQ ID NO: 93874 - protein, 553 aa, Arabidopsis thaliana; identical to SEQ ID NO: 90118
  peptide (1)..(553): Ceres Seq. ID no. 12722215
  misc_feature (13)..(280): Pfam Name: GMC oxidoreductase Pfam Description: GMC oxidoreductase
  misc_feature (1)..(533): Homolog of NCBI NO: 10177730 NR Description: mandelonitrile lyase-like protein [Arabidopsis
  misc_feature (1)..(552): Homolog of NCBI NO: 18410417 NR Description: mandelonitrile lyase-like protein; protein id: supported by cDNA: gi_15982754 [Arabidopsis thaliana]
  misc_feature (1)..(533): Homolog of NCBI NO: 11358498 NR Description: mandelonitrile lyase homolog - Arabidopsis
  misc_feature (1)..(533): Homolog of NCBI NO: 10177728 NR Description: mandelonitrile lyase-like protein [Arabidopsis
  misc_feature (1)..(533): Homolog of NCBI NO: 15242234 NR Description: mandelonitrile lyase-like protein; protein id:
  misc_feature (126)..(552): Homolog of NCBI NO: 24417440 NR Description: unknown [Arabidopsis thaliana]
  misc_feature (1)..(543): Homolog of NCBI NO: 17978954 NR Description: At1g12570/T12C24_9 [Arabidopsis thaliana]
  misc_feature (1)..(543): Homolog of NCBI NO: 22329512 NR Description: hypothetical protein; protein id: At1g12570.1,
  misc_feature (1)..(543): Homolog of NCBI NO: 9502391 NR Description: T12C24.11 [Arabidopsis thaliana]
  misc_feature (1)..(310): Homolog of NCBI NO: 15982976 NR Description: R-oxynitrile lyase isoenzyme 1 precursor [Prunus

SEQ ID NO: 93875 - protein, 545 aa, Arabidopsis thaliana; identical to SEQ ID NO: 90119
  peptide (1)..(545): Ceres Seq. ID no. 12722216
  misc_feature (5)..(272): Pfam Name: GMC oxidoreductase Pfam Description: GMC oxidoreductase
  misc_feature (1)..(525): Homolog of NCBI NO: 10177730 NR Description: mandelonitrile lyase-like protein [Arabidopsis
  misc_feature (1)..(544): Homolog of NCBI NO: 18410417 NR Description: mandelonitrile lyase-like protein; protein id: supported by cDNA: gi_15982754 [Arabidopsis thaliana]
  misc_feature (1)..(525): Homolog of NCBI NO: 11358498 NR Description: mandelonitrile lyase homolog - Arabidopsis
  misc_feature (1)..(525): Homolog of NCBI NO: 10177728 NR Description: mandelonitrile lyase-like protein [Arabidopsis
  misc_feature (1)..(525): Homolog of NCBI NO: 15242234 NR Description: mandelonitrile lyase-like protein; protein id:
  misc_feature (118)..(544): Homolog of NCBI NO: 24417440 NR Description: unknown [Arabidopsis thaliana]
  misc_feature (1)..(535): Homolog of NCBI NO: 17978954 NR Description: At1g12570/T12C24_9 [Arabidopsis thaliana]
  misc_feature (1)..(535): Homolog of NCBI NO: 22329512 NR Description: hypothetical protein; protein id: At1g12570.1,
  misc_feature (1)..(535): Homolog of NCBI NO: 9502391 NR Description: T12C24.11 [Arabidopsis thaliana]
  misc_feature (1)..(302): Homolog of NCBI NO: 15982976 NR Description: R-oxynitrile lyase isoenzyme 1 precursor [Prunus

SEQ ID NO: 93876 - DNA, 675 bp, Arabidopsis thaliana; identical to SEQ ID NO: 90120
  misc_feature (1)..(675): Ceres Seq. ID no. 12722221
  misc_feature: MA Experiment ID: 20000437 Result: Up-regulated in Transcription
  misc_feature: MA Experiment 20000437 PARAMETER Experiment Name: At_Drought_P Parameter: Age (day) Value: 8
  misc_feature: MA Experiment 20000437 PARAMETER Experiment Name: At_Drought_P Parameter: Organism Value: A. thaliana
  misc_feature: MA Experiment 20000437 PARAMETER Experiment Name: At_Drought_P Parameter: Plant Line Value: WS
  misc_feature: MA Experiment 20000437 PARAMETER Experiment Name: At_Drought_P Parameter: Timepoint (hr) Value: 24
  misc_feature: MA Experiment 20000437 PARAMETER Experiment Name: At_Drought_P Parameter: Tissue Value: Whole Plant
  misc_feature: MA Experiment 20000437 PARAMETER Experiment Name: At_Drought_P Parameter: Treatment Value: Drought vs. No Drought
  misc_feature: MA Experiment ID: 20000495 Result: Down-regulated in Transcription
  misc_feature: MA Experiment 20000495 PARAMETER Experiment Name: At_Guard_Cells_P Parameter: Harvest Date Value: 8/2/2002
  misc_feature: MA Experiment 20000495 PARAMETER Experiment Name: At_Guard_Cells_P Parameter: Organism Value: A. thaliana
  misc_feature: MA Experiment 20000495 PARAMETER Experiment Name: At_Guard_Cells_P Parameter: Tissue Value: Guard Cells vs. Leaves
  misc_feature: MA Experiment ID: 20001756 Result: Up-regulated in Transcription
  misc_feature: MA Experiment 20001756 PARAMETER Experiment Name: At_50mM_NH4NO3_L-to-H_P Parameter: Timepoint (hr) Value: 4
  misc_feature: MA Experiment 20001756 PARAMETER Experiment Name: At_50mM_NH4NO3_L-to-H_P Parameter: Tissue Value: Leaf
  misc_feature: MA Experiment 20001756 PARAMETER Experiment Name: At_50mM_NH4NO3_L-to-H_P Parameter: Treatment Value: 50mM NH4NO3 vs 100mM Mannitol
  misc_feature: MA Experiment ID: 20001905 Result: Up-regulated in Transcription
  misc_feature: MA Experiment 20001905 PARAMETER Experiment Name: At_Drought_Reproduction_P Parameter: Age (day) Value: 40
  misc_feature: MA Experiment 20001905 PARAMETER Experiment Name: At_Drought_Reproduction_P Parameter: Organism Value: A. thaliana
  misc_feature: MA Experiment 20001905 PARAMETER Experiment Name: At_Drought_Reproduction_P Parameter: Plant Line Value: WS
  misc_feature: MA Experiment 20001905 PARAMETER Experiment Name: At_Drought_Reproduction_P Parameter: Timepoint (day) Value: 10
  misc_feature: MA Experiment 20001905 PARAMETER Experiment Name: At_Drought_Reproduction_P Parameter: Tissue Value: Rosettes
  misc_feature: MA Experiment 20001905 PARAMETER Experiment Name: At_Drought_Reproduction_P Parameter: Treatment Value: Drought vs. No Drought
  misc_feature: MA Experiment ID: 20001911 Result: Up-regulated in Transcription
  misc_feature: MA Experiment 20001911 PARAMETER Experiment Name: At_Drought_Reproduction_P Parameter: Age (day) Value: 40
  misc_feature: MA Experiment 20001911 PARAMETER Experiment Name: At_Drought_Reproduction_P Parameter: Organism Value: A. thaliana
  misc_feature: MA Experiment 20001911 PARAMETER Experiment Name: At_Drought_Reproduction_P Parameter: Plant Line Value: WS
  misc_feature: MA Experiment 20001911 PARAMETER Experiment Name: At_Drought_Reproduction_P Parameter: Timepoint (day) Value: 10
  misc_feature: MA Experiment 20001911 PARAMETER Experiment Name: At_Drought_Reproduction_P Parameter: Tissue Value: Flowers
  misc_feature: MA Experiment 20001911 PARAMETER Experiment Name: At_Drought_Reproduction_P Parameter: Treatment Value: Drought vs. No Drought

SEQ ID NO: 93877 - protein, 224 aa, Arabidopsis thaliana; identical to SEQ ID NO: 90121
  peptide (1)..(224): Ceres Seq. ID no. 12722222
  misc_feature (51)..(115): Pfam Name: AP2 domain Pfam Description: AP2 domain
  misc_feature (1)..(224): Homolog of NCBI NO: 15242244 NR Description: DRE binding protein; protein id: At5g51990.1
  misc_feature (1)..(222): Homolog of NCBI NO: 18416557 NR Description: DRE binding protein (DREB1C); protein id: supported by cDNA: gi_3738227, supported by cDNA: gi_4322227
  misc_feature (5)..(222): Homolog of NCBI NO: 5616086 NR Description: dehydration responsive element binding protein
  misc_feature (6)..(222): Homolog of NCBI NO: 4091984 NR Description: CRT/DRE binding factor 2 [Arabidopsis thaliana]
  misc_feature (5)..(222): Homolog of NCBI NO: 20303013 NR Description: CBF-like protein CBF7 [Brassica napus]
  misc_feature (1)..(222): Homolog of NCBI NO: 18416562 NR Description: C-repeat/DRE binding factor 1 (CBF1) (DREB1B); id: At4g25490.1, supported by cDNA: gi_1899057, supported by gi_3738225 [Arabidopsis thaliana] >gi|7488377|pir||JE0298
  misc_feature (1)..(222): Homolog of NCBI NO: 1899058 NR Description: transcriptional activator CBF1 [Arabidopsis >gi|4091982|gb|AAC99369.1| CRT/CRE binding factor 1 [Arabidopsis
  misc_feature (16)..(222): Homolog of NCBI NO: 38426954 NR Description: DREB2-19 [Brassica napus]
  misc_feature (5)..(222): Homolog of NCBI NO: 20303015 NR Description: CBF-like protein CBF16 [Brassica napus]
  misc_feature (1)..(222): Homolog of NCBI NO: 7484941 NR Description: DRE/CRT-binding protein DREB1A - Arabidopsis

SEQ ID NO: 93878 - protein, 137 aa, Arabidopsis thaliana; identical to SEQ ID NO: 90122
  peptide (1)..(137): Ceres Seq. ID no. 12722223
  misc_feature (1)..(137): Homolog of NCBI NO: 15242244 NR Description: DRE binding protein; protein id: At5g51990.1
  misc_feature (1)..(135): Homolog of NCBI NO: 18416557 NR Description: DRE binding protein (DREB1C); protein id: supported by cDNA: gi_3738227, supported by cDNA: gi_4322227
  misc_feature (1)..(135): Homolog of NCBI NO: 5616086 NR Description: dehydration responsive element binding protein
  misc_feature (1)..(135): Homolog of NCBI NO: 4091984 NR Description: CRT/DRE binding factor 2 [Arabidopsis thaliana]
  misc_feature (1)..(135): Homolog of NCBI NO: 20303013 NR Description: CBF-like protein CBF7 [Brassica napus]
  misc_feature (1)..(135): Homolog of NCBI NO: 18416562 NR Description: C-repeat/DRE binding factor 1 (CBF1) (DREB1B); id: At4g25490.1, supported by cDNA: gi_1899057, supported by gi_3738225 [Arabidopsis thaliana] >gi|7488377|pir||JE0298
  misc_feature (1)..(135): Homolog of NCBI NO: 1899058 NR Description: transcriptional activator CBF1 [Arabidopsis >gi|4091982|gb|AAC99369.1| CRT/CRE binding factor 1 [Arabidopsis
  misc_feature (1)..(135): Homolog of NCBI NO: 38426954 NR Description: DREB2-19 [Brassica napus]
  misc_feature (1)..(135): Homolog of NCBI NO: 20303015 NR Description: CBF-like protein CBF16 [Brassica napus]
  misc_feature (1)..(135): Homolog of NCBI NO: 7484941 NR Description: DRE/CRT-binding protein DREB1A - Arabidopsis

SEQ ID NO: 93879 - DNA, 777 bp, Arabidopsis thaliana; identical to SEQ ID NO: 90123
  misc_feature (1)..(777): Ceres Seq. ID no. 12722228
  misc_feature: MA Experiment ID: 20000794 Result: Up-regulated in Transcription
  misc_feature: MA Experiment 20000794 PARAMETER Experiment Name: At_Petals_P Parameter: Age (day) Value: 23-25 days
  misc_feature: MA Experiment 20000794 PARAMETER Experiment Name: At_Petals_P Parameter: Plant Line Value: WS
  misc_feature: MA Experiment 20000794 PARAMETER Experiment Name: At_Petals_P Parameter: Tissue Value: Petals vs. Whole plant
  misc_feature: MA Experiment ID: 20001557 Result: Down-regulated in Transcription
  misc_feature: MA Experiment 20001557 PARAMETER Experiment Name: At_Drought_Soil_Dry_P Parameter: Age (day) Value: 27
  misc_feature: MA Experiment 20001557 PARAMETER Experiment Name: At_Drought_Soil_Dry_P Parameter: Organism Value: A. thaliana
  misc_feature: MA Experiment 20001557 PARAMETER Experiment Name: At_Drought_Soil_Dry_P Parameter: Plant Line Value: WS
  misc_feature: MA Experiment 20001557 PARAMETER Experiment Name: At_Drought_Soil_Dry_P Parameter: Post Timepoint (hr) Value: 3
  misc_feature: MA Experiment 20001557 PARAMETER Experiment Name: At_Drought_Soil_Dry_P Parameter: Post-Treatment Value: Re-Water vs. No Drought
  misc_feature: MA Experiment 20001557 PARAMETER Experiment Name: At_Drought_Soil_Dry_P Parameter: Timepoint (day) Value: 13
  misc_feature: MA Experiment 20001557 PARAMETER Experiment Name: At_Drought_Soil_Dry_P Parameter: Treatment Value: Drought vs. No Drought

SEQ ID NO: 93880 - protein, 258 aa, Arabidopsis thaliana; identical to SEQ ID NO: 84911
  peptide (1)..(258): Ceres Seq. ID no. 12722229
  misc_feature (1)..(204): Pfam Name: TraB family Pfam Description: TraB family
  misc_feature (1)..(258): Homolog of NCBI NO: 10177738 NR Description: gene_id:MSG15.11~pir||C69291~similar to unknown
  misc_feature (1)..(258): Homolog of NCBI NO: 19699285 NR Description: AT5g52030/MSG15_11 [Arabidopsis thaliana]
  misc_feature (1)..(258): Homolog of NCBI NO: 22327748 NR Description: putative protein; protein id: At5g52030.1,
  misc_feature (46)..(191): Homolog of NCBI NO: 30679206 NR Description: expressed protein [Arabidopsis thaliana] unknown protein [Arabidopsis thaliana]
  misc_feature (40)..(191): Homolog of NCBI NO: 23111275 NR Description: hypothetical protein [Desulfitobacterium
  misc_feature (44)..(192): Homolog of NCBI NO: 28828782 NR Description: similar to Plasmodium falciparum (isolate 3D7).
  misc_feature (46)..(192): Homolog of NCBI NO: 24217187 NR Description: pheromone shutdown protein [Leptospira serovar lai str. 56601] >gi|24202233|gb|AAN51685.1|AE011601_8
  misc_feature (47)..(192): Homolog of NCBI NO: 21227421 NR Description: Pheromone shutdown protein [Methanosarcina mazei >gi|20905787|gb|AAM31015.1| Pheromone shutdown protein
  misc_feature (47)..(192): Homolog of NCBI NO: 20088907 NR Description: TraB family protein [Methanosarcina acetivorans C2A] >gi|19913750|gb|AAM03462.1| TraB family protein
  misc_feature (47)..(191): Homolog of NCBI NO: 23049850 NR Description: hypothetical protein [Methanosarcina barkeri]

SEQ ID NO: 93881 - protein, 150 aa, Arabidopsis thaliana; identical to SEQ ID NO: 90125
  peptide (1)..(150): Ceres Seq. ID no. 12722230
  misc_feature (1)..(96): Pfam Name: TraB family Pfam Description: TraB family
  misc_feature (1)..(150): Homolog of NCBI NO: 10177738 NR Description: gene_id:MSG15.11~pir||C69291~similar to unknown
  misc_feature (1)..(150): Homolog of NCBI NO: 22327748 NR Description: putative protein; protein id: At5g52030.1,
  misc_feature (1)..(150): Homolog of NCBI NO: 19699285 NR Description: AT5g52030/MSG15_11 [Arabidopsis thaliana]
  misc_feature (1)..(83): Homolog of NCBI NO: 30679206 NR Description: expressed protein [Arabidopsis thaliana] unknown protein [Arabidopsis thaliana]
  misc_feature (1)..(83): Homolog of NCBI NO: 23111275 NR Description: hypothetical protein [Desulfitobacterium
  misc_feature (1)..(84): Homolog of NCBI NO: 28828782 NR Description: similar to Plasmodium falciparum (isolate 3D7).
  misc_feature (1)..(84): Homolog of NCBI NO: 24217187 NR Description: pheromone shutdown protein [Leptospira serovar lai str. 56601] >gi|24202233|gb|AAN51685.1|AE011601_8
  misc_feature (1)..(84): Homolog of NCBI NO: 21227421 NR Description: Pheromone shutdown protein [Methanosarcina mazei >gi|20905787|gb|AAM31015.1| Pheromone shutdown protein
  misc_feature (1)..(84): Homolog of NCBI NO: 20088907 NR Description: TraB family protein [Methanosarcina acetivorans C2A] >gi|19913750|gb|AAM03462.1| TraB family protein
  misc_feature (1)..(83): Homolog of NCBI NO: 23049850 NR Description: hypothetical protein [Methanosarcina barkeri]

SEQ ID NO: 93882 - DNA, 1209 bp, Arabidopsis thaliana; identical to SEQ ID NO: 90126
  misc_feature (1)..(1209): Ceres Seq. ID no. 12722247
  misc_feature: MA Experiment ID: 20000184 Result: Down-regulated in Transcription
  misc_feature: MA Experiment 20000184 PARAMETER Experiment Name: At_Shoots__P Parameter: Age (day) Value: 7
  misc_feature: MA Experiment 20000184 PARAMETER Experiment Name: At_Shoots__P Parameter: Tissue Value: Shoots vs. Whole Plant
  misc_feature: MA Experiment ID: 20000227 Result: Down-regulated in Transcription
  misc_feature: MA Experiment 20000227 PARAMETER Experiment Name: At_Root-Tips-vs-Tops_P Parameter: Tissue Value: Root Tips vs. Root Tops
  misc_feature: MA Experiment ID: 20000234 Result: Down-regulated in Transcription
  misc_feature: MA Experiment 20000234 PARAMETER Experiment Name: At_Siliques_P Parameter: Age (day) Value: 21
  misc_feature: MA Experiment 20000234 PARAMETER Experiment Name: At_Siliques_P Parameter: Organism Value: A. thaliana
  misc_feature: MA Experiment 20000234 PARAMETER Experiment Name: At_Siliques_P Parameter: Plant Line Value: WS
  misc_feature: MA Experiment 20000234 PARAMETER Experiment Name: At_Siliques_P Parameter: Tissue Value: Less Than 5mm Siliques vs. Whole Plant
  misc_feature: MA Experiment ID: 20000235 Result: Down-regulated in Transcription
  misc_feature: MA Experiment 20000235 PARAMETER Experiment Name: At_Siliques_P Parameter: Age (day) Value: 21
  misc_feature: MA Experiment 20000235 PARAMETER Experiment Name: At_Siliques_P Parameter: Organism Value: A. thaliana
  misc_feature: MA Experiment 20000235 PARAMETER Experiment Name: At_Siliques_P Parameter: Plant Line Value: WS
  misc_feature: MA Experiment 20000235 PARAMETER Experiment Name: At_Siliques_P Parameter: Tissue Value: 5-10mm Siliques vs. Whole Plant
  misc_feature: MA Experiment ID: 20000264 Result: Down-regulated in Transcription
  misc_feature: MA Experiment 20000264 PARAMETER Experiment Name: At_Open_Flower_P Parameter: Age (day) Value: 21
  misc_feature: MA Experiment 20000264 PARAMETER Experiment Name: At_Open_Flower_P Parameter: Plant Line Value: WS
  misc_feature: MA Experiment 20000264 PARAMETER Experiment Name: At_Open_Flower_P Parameter: Tissue Value: Open Flower vs. Whole Plant
  misc_feature: MA Experiment ID: 20000265 Result: Down-regulated in Transcription
  misc_feature: MA Experiment 20000265 PARAMETER Experiment Name: At_Open_Flower_P Parameter: Age (day) Value: 21
  misc_feature: MA Experiment 20000265 PARAMETER Experiment Name: At_Open_Flower_P Parameter: Plant Line Value: WS
  misc_feature: MA Experiment 20000265 PARAMETER Experiment Name: At_Open_Flower_P Parameter: Tissue Value: Closed Flower vs. Whole Plant
  misc_feature: MA Experiment ID: 20000286 Result: Down-regulated in Transcription
  misc_feature: MA Experiment 20000286 PARAMETER Experiment Name: At_Open_Flower_P Parameter: Age (day) Value: 21
  misc_feature: MA Experiment 20000286 PARAMETER Experiment Name: At_Open_Flower_P Parameter: Plant Line Value: WS
  misc_feature: MA Experiment 20000286 PARAMETER Experiment Name: At_Open_Flower_P Parameter: Tissue Value: Half Open vs. Whole Plant
  misc_feature: MA Experiment ID: 20001555 Result: Down-regulated in Transcription
  misc_feature: MA Experiment 20001555 PARAMETER Experiment Name: At_Drought_Soil_Dry_P Parameter: Age (day) Value: 24
  misc_feature: MA Experiment 20001555 PARAMETER Experiment Name: At_Drought_Soil_Dry_P Parameter: Organism Value: A. thaliana
  misc_feature: MA Experiment 20001555 PARAMETER Experiment Name: At_Drought_Soil_Dry_P Parameter: Plant Line Value: WS
  misc_feature: MA Experiment 20001555 PARAMETER Experiment Name: At_Drought_Soil_Dry_P Parameter: Post Timepoint (hr) Value: None
  misc_feature: MA Experiment 20001555 PARAMETER Experiment Name: At_Drought_Soil_Dry_P Parameter: Post-Treatment Value: None
  misc_feature: MA Experiment 20001555 PARAMETER Experiment Name: At_Drought_Soil_Dry_P Parameter: Timepoint (day) Value: 10
  misc_feature: MA Experiment 20001555 PARAMETER Experiment Name: At_Drought_Soil_Dry_P Parameter: Treatment Value: Drought vs. No Drought
  misc_feature: MA Experiment ID: 20001556 Result: Down-regulated in Transcription
  misc_feature: MA Experiment 20001556 PARAMETER Experiment Name: At_Drought_Soil_Dry_P Parameter: Age (day) Value: 26
  misc_feature: MA Experiment 20001556 PARAMETER Experiment Name: At_Drought_Soil_Dry_P Parameter: Organism Value: A. thaliana
  misc_feature: MA Experiment 20001556 PARAMETER Experiment Name: At_Drought_Soil_Dry_P Parameter: Plant Line Value: WS
  misc_feature: MA Experiment 20001556 PARAMETER Experiment Name: At_Drought_Soil_Dry_P Parameter: Post Timepoint (hr) Value: None
  misc_feature: MA Experiment 20001556 PARAMETER Experiment Name: At_Drought_Soil_Dry_P Parameter: Post-Treatment Value: None
  misc_feature: MA Experiment 20001556 PARAMETER Experiment Name: At_Drought_Soil_Dry_P Parameter: Timepoint (day) Value: 12
  misc_feature: MA Experiment 20001556 PARAMETER Experiment Name: At_Drought_Soil_Dry_P Parameter: Treatment Value: Drought vs. No Drought
  misc_feature: MA Experiment ID: 20001557 Result: Down-regulated in Transcription
  misc_feature: MA Experiment 20001557 PARAMETER Experiment Name: At_Drought_Soil_Dry_P Parameter: Age (day) Value: 27
  misc_feature: MA Experiment 20001557 PARAMETER Experiment Name: At_Drought_Soil_Dry_P Parameter: Organism Value: A. thaliana
  misc_feature: MA Experiment 20001557 PARAMETER Experiment Name: At_Drought_Soil_Dry_P Parameter: Plant Line Value: WS
  misc_feature: MA Experiment 20001557 PARAMETER Experiment Name: At_Drought_Soil_Dry_P Parameter: Post Timepoint (hr) Value: 3
  misc_feature: MA Experiment 20001557 PARAMETER Experiment Name: At_Drought_Soil_Dry_P Parameter: Post-Treatment Value: Re-Water vs. No Drought
  misc_feature: MA Experiment 20001557 PARAMETER Experiment Name: At_Drought_Soil_Dry_P Parameter: Timepoint (day) Value: 13
  misc_feature: MA Experiment 20001557 PARAMETER Experiment Name: At_Drought_Soil_Dry_P Parameter: Treatment Value: Drought vs. No Drought
  misc_feature: MA Experiment ID: 20001558 Result: Down-regulated in Transcription
  misc_feature: MA Experiment 20001558 PARAMETER Experiment Name: At_Drought_Soil_Dry_P Parameter: Age (day) Value: 27
  misc_feature: MA Experiment 20001558 PARAMETER Experiment Name: At_Drought_Soil_Dry_P Parameter: Organism Value: A. thaliana
  misc_feature: MA Experiment 20001558 PARAMETER Experiment Name: At_Drought_Soil_Dry_P Parameter: Plant Line Value: WS
  misc_feature: MA Experiment 20001558 PARAMETER Experiment Name: At_Drought_Soil_Dry_P Parameter: Post Timepoint (hr) Value: 6
  misc_feature: MA Experiment 20001558 PARAMETER Experiment Name: At_Drought_Soil_Dry_P Parameter: Post-Treatment Value: Re-Water vs. No Drought
  misc_feature: MA Experiment 20001558 PARAMETER Experiment Name: At_Drought_Soil_Dry_P Parameter: Timepoint (day) Value: 13
  misc_feature: MA Experiment 20001558 PARAMETER Experiment Name: At_Drought_Soil_Dry_P Parameter: Treatment Value: Drought vs. No Drought
  misc_feature: MA Experiment ID: 20001560 Result: Down-regulated in Transcription
  misc_feature: MA Experiment 20001560 PARAMETER Experiment Name: At_Drought_Soil_Dry_P Parameter: Age (day) Value: 28
  misc_feature: MA Experiment 20001560 PARAMETER Experiment Name: At_Drought_Soil_Dry_P Parameter: Organism Value: A. thaliana
  misc_feature: MA Experiment 20001560 PARAMETER Experiment Name: At_Drought_Soil_Dry_P Parameter: Plant Line Value: WS
  misc_feature: MA Experiment 20001560 PARAMETER Experiment Name: At_Drought_Soil_Dry_P Parameter: Post Timepoint (hr) Value: None
  misc_feature: MA Experiment 20001560 PARAMETER Experiment Name: At_Drought_Soil_Dry_P Parameter: Post-Treatment Value: None
  misc_feature: MA Experiment 20001560 PARAMETER Experiment Name: At_Drought_Soil_Dry_P Parameter: Timepoint (day) Value: 14
  misc_feature: MA Experiment 20001560 PARAMETER Experiment Name: At_Drought_Soil_Dry_P Parameter: Treatment Value: Drought vs. No Drought
  misc_feature: MA Experiment ID: 20001904 Result: Down-regulated in Transcription
  misc_feature: MA Experiment 20001904 PARAMETER Experiment Name: At_Drought_Reproduction_P Parameter: Age (day) Value: 37
  misc_feature: MA Experiment 20001904 PARAMETER Experiment Name: At_Drought_Reproduction_P Parameter: Organism Value: A. thaliana
  misc_feature: MA Experiment 20001904 PARAMETER Experiment Name: At_Drought_Reproduction_P Parameter: Plant Line Value: WS
  misc_feature: MA Experiment 20001904 PARAMETER Experiment Name: At_Drought_Reproduction_P Parameter: Timepoint (day) Value: 7
  misc_feature: MA Experiment 20001904 PARAMETER Experiment Name: At_Drought_Reproduction_P Parameter: Tissue Value: Rosettes
  misc_feature: MA Experiment 20001904 PARAMETER Experiment Name: At_Drought_Reproduction_P Parameter: Treatment Value: Drought vs. No Drought
  misc_feature: MA Experiment ID: 20001905 Result: Down-regulated in Transcription
  misc_feature: MA Experiment 20001905 PARAMETER Experiment Name: At_Drought_Reproduction_P Parameter: Age (day) Value: 40
  misc_feature: MA Experiment 20001905 PARAMETER Experiment Name: At_Drought_Reproduction_P Parameter: Organism Value: A. thaliana
  misc_feature: MA Experiment 20001905 PARAMETER Experiment Name: At_Drought_Reproduction_P Parameter: Plant Line Value: WS
  misc_feature: MA Experiment 20001905 PARAMETER Experiment Name: At_Drought_Reproduction_P Parameter: Timepoint (day) Value: 10
  misc_feature: MA Experiment 20001905 PARAMETER Experiment Name: At_Drought_Reproduction_P Parameter: Tissue Value: Rosettes
  misc_feature: MA Experiment 20001905 PARAMETER Experiment Name: At_Drought_Reproduction_P Parameter: Treatment Value: Drought vs. No Drought

SEQ ID NO: 93883 - protein, 291 aa, Arabidopsis thaliana; identical to SEQ ID NO: 90127
  peptide (1)..(291): Ceres Seq. ID no. 12722248
  misc_feature (1)..(291): Homolog of NCBI NO: 15242282 NR Description: putative protein; protein id: At5g52120.1, by cDNA: gi_18175687, supported by cDNA: gi_20465820 [Arabidopsis >gi|18175688|gb|AAL59911.1| unknown protein [Arabidopsis
  misc_feature (1)..(282): Homolog of NCBI NO: 30695337 NR Description: F-box protein (lectin-related) [Arabidopsis
  misc_feature (21)..(282): Homolog of NCBI NO: 23397334 NR Description: unknown protein [Arabidopsis thaliana]
  misc_feature (24)..(284): Homolog of NCBI NO: 38567911 NR Description: OSJNBa0088I22.7 [Oryza sativa (japonica
  misc_feature (20)..(280): Homolog of NCBI NO: 37536186 NR Description: unknown protein [Oryza sativa (japonica
  misc_feature (20)..(280): Homolog of NCBI NO: 15221677 NR Description: unknown protein; protein id: At1g63090.1
  misc_feature (20)..(288): Homolog of NCBI NO: 15222051 NR Description: hypothetical protein; protein id: At1g12710.1 thaliana] >gi|9502385|gb|AAF88092.1|AC025417_20 T12C24.23 thaliana] >gi|26450401|dbj|BAC42315.1| unknown protein
  misc_feature (20)..(280): Homolog of NCBI NO: 15231726 NR Description: putative protein; protein id: At3g53000.1
  misc_feature (104)..(280): Homolog of NCBI NO: 27754673 NR Description: unknown protein [Arabidopsis thaliana]
  misc_feature (22)..(190): Homolog of NCBI NO: 15226911 NR Description: lectin-like protein; protein id: At2g02250.1

SEQ ID NO: 93884 - protein, 260 aa, Arabidopsis thaliana; identical to SEQ ID NO: 90128
  peptide (1)..(260): Ceres Seq. ID no. 12722249
  misc_feature (1)..(260): Homolog of NCBI NO: 15242282 NR Description: putative protein; protein id: At5g52120.1, by cDNA: gi_18175687, supported by cDNA: gi_20465820 [Arabidopsis >gi|18175688|gb|AAL59911.1| unknown protein [Arabidopsis
  misc_feature (1)..(251): Homolog of NCBI NO: 30695337 NR Description: F-box protein (lectin-related) [Arabidopsis
  misc_feature (1)..(251): Homolog of NCBI NO: 23397334 NR Description: unknown protein [Arabidopsis thaliana]
  misc_feature (1)..(253): Homolog of NCBI NO: 38567911 NR Description: OSJNBa0088I22.7 [Oryza sativa (japonica
  misc_feature (1)..(249): Homolog of NCBI NO: 37536186 NR Description: unknown protein [Oryza sativa (japonica
  misc_feature (1)..(249): Homolog of NCBI NO: 15221677 NR Description: unknown protein; protein id: At1g63090.1
  misc_feature (1)..(257): Homolog of NCBI NO: 15222051 NR Description: hypothetical protein; protein id: At1g12710.1 thaliana] >gi|9502385|gb|AAF88092.1|AC025417_20 T12C24.23 thaliana] >gi|26450401|dbj|BAC42315.1| unknown protein
  misc_feature (1)..(249): Homolog of NCBI NO: 15231726 NR Description: putative protein; protein id: At3g53000.1
  misc_feature (73)..(249): Homolog of NCBI NO: 27754673 NR Description: unknown protein [Arabidopsis thaliana]
  misc_feature (1)..(159): Homolog of NCBI NO: 15226911 NR Description: lectin-like protein; protein id: At2g02250.1

SEQ ID NO: 93885 - protein, 258 aa, Arabidopsis thaliana; identical to SEQ ID NO: 90129
  peptide (1)..(258): Ceres Seq. ID no. 12722250
  misc_feature (1)..(258): Homolog of NCBI NO: 15242282 NR Description: putative protein; protein id: At5g52120.1, by cDNA: gi_18175687, supported by cDNA: gi_20465820 [Arabidopsis >gi|18175688|gb|AAL59911.1| unknown protein [Arabidopsis
  misc_feature (1)..(249): Homolog of NCBI NO: 30695337 NR Description: F-box protein (lectin-related) [Arabidopsis
  misc_feature (1)..(249): Homolog of NCBI NO: 23397334 NR Description: unknown protein [Arabidopsis thaliana]
  misc_feature (1)..(251): Homolog of NCBI NO: 38567911 NR Description: OSJNBa0088I22.7 [Oryza sativa (japonica
  misc_feature (1)..(247): Homolog of NCBI NO: 37536186 NR Description: unknown protein [Oryza sativa (japonica
  misc_feature (1)..(247): Homolog of NCBI NO: 15221677 NR Description: unknown protein; protein id: At1g63090.1
  misc_feature (1)..(255): Homolog of NCBI NO: 15222051 NR Description: hypothetical protein; protein id: At1g12710.1 thaliana] >gi|9502385|gb|AAF88092.1|AC025417_20 T12C24.23 thaliana] >gi|26450401|dbj|BAC42315.1| unknown protein
  misc_feature (1)..(247): Homolog of NCBI NO: 15231726 NR Description: putative protein; protein id: At3g53000.1
  misc_feature (71)..(247): Homolog of NCBI NO: 27754673 NR Description: unknown protein [Arabidopsis thaliana]
  misc_feature (1)..(157): Homolog of NCBI NO: 15226911 NR Description: lectin-like protein; protein id: At2g02250.1

SEQ ID NO: 93886 - DNA, 858 bp, Arabidopsis thaliana; identical to SEQ ID NO: 90130
  misc_feature (1)..(858): Ceres Seq. ID no. 12722257
  misc_feature: MA Experiment ID: 20000184 Result: Up-regulated in Transcription
  misc_feature: MA Experiment 20000184 PARAMETER Experiment Name: At_Shoots__P Parameter: Age (day) Value: 7
  misc_feature: MA Experiment 20000184 PARAMETER Experiment Name: At_Shoots__P Parameter: Tissue Value: Shoots vs. Whole Plant
  misc_feature: MA Experiment ID: 20000185 Result: Up-regulated in Transcription
  misc_feature: MA Experiment 20000185 PARAMETER Experiment Name: At_Roots__P Parameter: Age (day) Value: 7 vs. 21
  misc_feature: MA Experiment 20000185 PARAMETER Experiment Name: At_Roots__P Parameter: Organism Value: A. thaliana
  misc_feature: MA Experiment 20000185 PARAMETER Experiment Name: At_Roots__P Parameter: Tissue Value: Roots vs. Whole Plant
  misc_feature: MA Experiment ID: 20000439 Result: Up-regulated in Transcription
  misc_feature: MA Experiment 20000439 PARAMETER Experiment Name: At_Roots__P Parameter: Age (day) Value: 14 vs. 21
  misc_feature: MA Experiment 20000439 PARAMETER Experiment Name: At_Roots__P Parameter: Organism Value: A. thaliana
  misc_feature: MA Experiment 20000439 PARAMETER Experiment Name: At_Roots__P Parameter: Tissue Value: Roots vs. Whole Plant

SEQ ID NO: 93887 - protein, 268 aa, Arabidopsis thaliana; identical to SEQ ID NO: 90131
  peptide (1)..(268): Ceres Seq. ID no. 12722258
  misc_feature (14)..(61): Pfam Name: Myb-like DNA-binding domain Pfam Description: Myb-like DNA-binding domain
  misc_feature (1)..(268): Homolog of NCBI NO: 15242947 NR Description: myb family transcription factor(MYB19); protein At5g52260.1 [Arabidopsis thaliana] >gi|8885539|dbj|BAA97469.1|
  misc_feature (54)..(268): Homolog of NCBI NO: 11358531 NR Description: myb-related transcription factor MYB19 [imported] Arabidopsis thaliana (fragment) >gi|3941428|gb|AAC83590.1|
  misc_feature (2)..(248): Homolog of NCBI NO: 15235149 NR Description: myb family transcription factor; protein id:
  misc_feature (2)..(248): Homolog of NCBI NO: 25387539 NR Description: myb-like protein [imported] - Arabidopsis thaliana
  misc_feature (54)..(248): Homolog of NCBI NO: 11358530 NR Description: myb-related transcription factor MYB18 [imported] Arabidopsis thaliana (fragment) >gi|3941426|gb|AAC83589.1|
  misc_feature (7)..(180): Homolog of NCBI NO: 15229055 NR Description: myb family transcription factor; protein id:
  misc_feature (9)..(233): Homolog of NCBI NO: 15223612 NR Description: myb family transcription factor; protein id: supported by cDNA: 250386. [Arabidopsis thaliana]
  misc_feature (9)..(151): Homolog of NCBI NO: 34902542 NR Description: putative transcription factor (myb) [Oryza sativa
  misc_feature (1)..(115): Homolog of NCBI NO: 28927688 NR Description: putative Myb-like DNA-binding protein [Oryza
  misc_feature (1)..(115): Homolog of NCBI NO: 34913340 NR Description: contains ESTs to Oryza sativa chromosome 1, OSJNBa0026J14.1~unknown protein

SEQ ID NO: 93888 - DNA, 1560 bp, Arabidopsis thaliana; identical to SEQ ID NO: 90132
  misc_feature (1)..(1560): Ceres Seq. ID no. 12722285
  misc_feature: MA Experiment ID: 20000286 Result: Up-regulated in Transcription
  misc_feature: MA Experiment 20000286 PARAMETER Experiment Name: At_Open_Flower_P Parameter: Age (day) Value: 21
  misc_feature: MA Experiment 20000286 PARAMETER Experiment Name: At_Open_Flower_P Parameter: Plant Line Value: WS
  misc_feature: MA Experiment 20000286 PARAMETER Experiment Name: At_Open_Flower_P Parameter: Tissue Value: Half Open vs. Whole Plant

SEQ ID NO: 93889 - protein, 519 aa, Arabidopsis thaliana; identical to SEQ ID NO: 90133
  peptide (1)..(519): Ceres Seq. ID no. 12722286
  misc_feature (1)..(519): Homolog of NCBI NO: 22327780 NR Description: cytochrome p450 family; protein id: At5g52400.1
  misc_feature (1)..(519): Homolog of NCBI NO: 10177406 NR Description: cytochrome P-450-like protein [Arabidopsis
  misc_feature (211)..(519): Homolog of NCBI NO: 10799820 NR Description: putative cytochrome P-450 [Persea americana]
  misc_feature (16)..(519): Homolog of NCBI NO: 15240917 NR Description: cytochrome p450, putative; protein id: At5g38450.1
  misc_feature (16)..(519): Homolog of NCBI NO: 15219831 NR Description: cytochrome P450, putative; protein id: [Arabidopsis thaliana] >gi|25282618|pir||A96695 hypothetical
  misc_feature (6)..(519): Homolog of NCBI NO: 38112707 NR Description: cytochrome P450 [Triticum aestivum]
  misc_feature (17)..(519): Homolog of NCBI NO: 13661756 NR Description: putative cytochrome P450 [Lolium rigidum]
  misc_feature (18)..(519): Homolog of NCBI NO: 13661758 NR Description: putative cytochrome P450 [Lolium rigidum]
  misc_feature (34)..(519): Homolog of NCBI NO: 22324446 NR Description: putative cytochrome P450 [Oryza sativa (japonica
  misc_feature (6)..(519): Homolog of NCBI NO: 18407219 NR Description: cytochrome P450, putative; protein id: supported by cDNA: gi_13605860, supported by cDNA: gi_20147140 thaliana] >gi|13605861|gb|AAK32916.1|AF367329_1

SEQ ID NO: 93890 - protein, 514 aa, Arabidopsis thaliana; identical to SEQ ID NO: 90134
  peptide (1)..(514): Ceres Seq. ID no. 12722287
  misc_feature (1)..(514): Homolog of NCBI NO: 22327780 NR Description: cytochrome p450 family; protein id: At5g52400.1
  misc_feature (1)..(514): Homolog of NCBI NO: 10177406 NR Description: cytochrome P-450-like protein [Arabidopsis
  misc_feature (206)..(514): Homolog of NCBI NO: 10799820 NR Description: putative cytochrome P-450 [Persea americana]
  misc_feature (11)..(514): Homolog of NCBI NO: 15240917 NR Description: cytochrome p450, putative; protein id: At5g38450.1
  misc_feature (11)..(514): Homolog of NCBI NO: 15219831 NR Description: cytochrome P450, putative; protein id: [Arabidopsis thaliana] >gi|25282618|pir||A96695 hypothetical
  misc_feature (1)..(514): Homolog of NCBI NO: 38112707 NR Description: cytochrome P450 [Triticum aestivum]
  misc_feature (12)..(514): Homolog of NCBI NO: 13661756 NR Description: putative cytochrome P450 [Lolium rigidum]
  misc_feature (13)..(514): Homolog of NCBI NO: 13661758 NR Description: putative cytochrome P450 [Lolium rigidum]
  misc_feature (29)..(514): Homolog of NCBI NO: 22324446 NR Description: putative cytochrome P450 [Oryza sativa (japonica
  misc_feature (1)..(514): Homolog of NCBI NO: 18407219 NR Description: cytochrome P450, putative; protein id: supported by cDNA: gi_13605860, supported by cDNA: gi_20147140 thaliana] >gi|13605861|gb|AAK32916.1|AF367329_1

SEQ ID NO: 93891 - protein, 496 aa, Arabidopsis thaliana; identical to SEQ ID NO: 90135
  peptide (1)..(496): Ceres Seq. ID no. 12722288
  misc_feature (1)..(496): Homolog of NCBI NO: 22327780 NR Description: cytochrome p450 family; protein id: At5g52400.1
  misc_feature (1)..(496): Homolog of NCBI NO: 10177406 NR Description: cytochrome P-450-like protein [Arabidopsis
  misc_feature (188)..(496): Homolog of NCBI NO: 10799820 NR Description: putative cytochrome P-450 [Persea americana]
  misc_feature (1)..(496): Homolog of NCBI NO: 15240917 NR Description: cytochrome p450, putative; protein id: At5g38450.1
  misc_feature (1)..(496): Homolog of NCBI NO: 15219831 NR Description: cytochrome P450, putative; protein id: [Arabidopsis thaliana] >gi|25282618|pir||A96695 hypothetical
  misc_feature (1)..(496): Homolog of NCBI NO: 38112707 NR Description: cytochrome P450 [Triticum aestivum]
  misc_feature (1)..(496): Homolog of NCBI NO: 13661756 NR Description: putative cytochrome P450 [Lolium rigidum]
  misc_feature (1)..(496): Homolog of NCBI NO: 13661758 NR Description: putative cytochrome P450 [Lolium rigidum]
  misc_feature (11)..(496): Homolog of NCBI NO: 22324446 NR Description: putative cytochrome P450 [Oryza sativa (japonica
  misc_feature (1)..(496): Homolog of NCBI NO: 18407219 NR Description: cytochrome P450, putative; protein id: supported by cDNA: gi_13605860, supported by cDNA: gi_20147140 thaliana] >gi|13605861|gb|AAK32916.1|AF367329_1

SEQ ID NO: 93892 - DNA, 1018 bp, Arabidopsis thaliana; identical to SEQ ID NO: 90136
  misc_feature (1)..(1018): Ceres Seq. ID no. 12722293
  misc_feature: MA Experiment ID: 20000166 Result: Up-regulated in Transcription
  misc_feature: MA Experiment 20000166 PARAMETER Experiment Name: At_100uM_ABA_P Parameter: Age (day) Value: 14
  misc_feature: MA Experiment 20000166 PARAMETER Experiment Name: At_100uM_ABA_P Parameter: Organism Value: A. thaliana
  misc_feature: MA Experiment 20000166 PARAMETER Experiment Name: At_100uM_ABA_P Parameter: Plant Line Value: WS
  misc_feature: MA Experiment 20000166 PARAMETER Experiment Name: At_100uM_ABA_P Parameter: Timepoint (hr) Value: 1
  misc_feature: MA Experiment 20000166 PARAMETER Experiment Name: At_100uM_ABA_P Parameter: Tissue Value: Aerial
  misc_feature: MA Experiment 20000166 PARAMETER Experiment Name: At_100uM_ABA_P Parameter: Treatment Value: 100uM ABA vs. No Treatment
  misc_feature: MA Experiment ID: 20000171 Result: Down-regulated in Transcription
  misc_feature: MA Experiment 20000171 PARAMETER Experiment Name: At_42deg_Heat_P Parameter: Age (day) Value: 14
  misc_feature: MA Experiment 20000171 PARAMETER Experiment Name: At_42deg_Heat_P Parameter: Organism Value: A. thaliana
  misc_feature: MA Experiment 20000171 PARAMETER Experiment Name: At_42deg_Heat_P Parameter: Plant Line Value: WS
  misc_feature: MA Experiment 20000171 PARAMETER Experiment Name: At_42deg_Heat_P Parameter: Temperature (deg C) Value: 42 vs. 22
  misc_feature: MA Experiment 20000171 PARAMETER Experiment Name: At_42deg_Heat_P Parameter: Timepoint (hr) Value: 1
  misc_feature: MA Experiment 20000171 PARAMETER Experiment Name: At_42deg_Heat_P Parameter: Tissue Value: Aerial
  misc_feature: MA Experiment ID: 20000180 Result: Down-regulated in Transcription
  misc_feature: MA Experiment 20000180 PARAMETER Experiment Name: At_Germinating_Seeds_P Parameter: Age (hr) Value: 24 vs. 0
  misc_feature: MA Experiment 20000180 PARAMETER Experiment Name: At_Germinating_Seeds_P Parameter: Tissue Value: Germinating Seeds
  misc_feature: MA Experiment ID: 20000184 Result: Up-regulated in Transcription
  misc_feature: MA Experiment 20000184 PARAMETER Experiment Name: At_Shoots__P Parameter: Age (day) Value: 7
  misc_feature: MA Experiment 20000184 PARAMETER Experiment Name: At_Shoots__P Parameter: Tissue Value: Shoots vs. Whole Plant
  misc_feature: MA Experiment ID: 20000227 Result: Down-regulated in Transcription
  misc_feature: MA Experiment 20000227 PARAMETER Experiment Name: At_Root-Tips-vs-Tops_P Parameter: Tissue Value: Root Tips vs. Root Tops
  misc_feature: MA Experiment ID: 20000438 Result: Up-regulated in Transcription
  misc_feature: MA Experiment 20000438 PARAMETER Experiment Name: At_Shoots__P Parameter: Age (day) Value: 14
  misc_feature: MA Experiment 20000438 PARAMETER Experiment Name: At_Shoots__P Parameter: Tissue Value: Shoots vs. Whole Plant
  misc_feature: MA Experiment ID: 20001248 Result: Down-regulated in Transcription
  misc_feature: MA Experiment 20001248 PARAMETER Experiment Name: At_Far-red-induction_P Parameter: Age (day) Value: 7
  misc_feature: MA Experiment 20001248 PARAMETER Experiment Name: At_Far-red-induction_P Parameter: Light Value: Far-red vs. White
  misc_feature: MA Experiment 20001248 PARAMETER Experiment Name: At_Far-red-induction_P Parameter: Organism Value: A. thaliana
  misc_feature: MA Experiment 20001248 PARAMETER Experiment Name: At_Far-red-induction_P Parameter: Plant Line Value: Columbia
  misc_feature: MA Experiment 20001248 PARAMETER Experiment Name: At_Far-red-induction_P Parameter: Timepoint (hr) Value: 4
  misc_feature: MA Experiment 20001248 PARAMETER Experiment Name: At_Far-red-induction_P Parameter: Tissue Value: Whole Plant
  misc_feature: MA Experiment ID: 20001555 Result: Up-regulated in Transcription
  misc_feature: MA Experiment 20001555 PARAMETER Experiment Name: At_Drought_Soil_Dry_P Parameter: Age (day) Value: 24
  misc_feature: MA Experiment 20001555 PARAMETER Experiment Name: At_Drought_Soil_Dry_P Parameter: Organism Value: A. thaliana
  misc_feature: MA Experiment 20001555 PARAMETER Experiment Name: At_Drought_Soil_Dry_P Parameter: Plant Line Value: WS
  misc_feature: MA Experiment 20001555 PARAMETER Experiment Name: At_Drought_Soil_Dry_P Parameter: Post Timepoint (hr) Value: None
  misc_feature: MA Experiment 20001555 PARAMETER Experiment Name: At_Drought_Soil_Dry_P Parameter: Post-Treatment Value: None
  misc_feature: MA Experiment 20001555 PARAMETER Experiment Name: At_Drought_Soil_Dry_P Parameter: Timepoint (day) Value: 10
  misc_feature: MA Experiment 20001555 PARAMETER Experiment Name: At_Drought_Soil_Dry_P Parameter: Treatment Value: Drought vs. No Drought
  misc_feature: MA Experiment ID: 20001556 Result: Up-regulated in Transcription
  misc_feature: MA Experiment 20001556 PARAMETER Experiment Name: At_Drought_Soil_Dry_P Parameter: Age (day) Value: 26
  misc_feature: MA Experiment 20001556 PARAMETER Experiment Name: At_Drought_Soil_Dry_P Parameter: Organism Value: A. thaliana
  misc_feature: MA Experiment 20001556 PARAMETER Experiment Name: At_Drought_Soil_Dry_P Parameter: Plant Line Value: WS
  misc_feature: MA Experiment 20001556 PARAMETER Experiment Name: At_Drought_Soil_Dry_P Parameter: Post Timepoint (hr) Value: None
  misc_feature: MA Experiment 20001556 PARAMETER Experiment Name: At_Drought_Soil_Dry_P Parameter: Post-Treatment Value: None
  misc_feature: MA Experiment 20001556 PARAMETER Experiment Name: At_Drought_Soil_Dry_P Parameter: Timepoint (day) Value: 12
  misc_feature: MA Experiment 20001556 PARAMETER Experiment Name: At_Drought_Soil_Dry_P Parameter: Treatment Value: Drought vs. No Drought
  misc_feature: MA Experiment ID: 20001757 Result: Up-regulated in Transcription
  misc_feature: MA Experiment 20001757 PARAMETER Experiment Name: At_50mM_NH4NO3_L-to-H_P Parameter: Timepoint (hr) Value: 6
  misc_feature: MA Experiment 20001757 PARAMETER Experiment Name: At_50mM_NH4NO3_L-to-H_P Parameter: Tissue Value: Leaf
  misc_feature: MA Experiment 20001757 PARAMETER Experiment Name: At_50mM_NH4NO3_L-to-H_P Parameter: Treatment Value: 50mM NH4NO3 vs 100mM Mannitol
  misc_feature: MA Experiment ID: 20001911 Result: Up-regulated in Transcription
  misc_feature: MA Experiment 20001911 PARAMETER Experiment Name: At_Drought_Reproduction_P Parameter: Age (day) Value: 40
  misc_feature: MA Experiment 20001911 PARAMETER Experiment Name: At_Drought_Reproduction_P Parameter: Organism Value: A. thaliana
  misc_feature: MA Experiment 20001911 PARAMETER Experiment Name: At_Drought_Reproduction_P Parameter: Plant Line Value: WS
  misc_feature: MA Experiment 20001911 PARAMETER Experiment Name: At_Drought_Reproduction_P Parameter: Timepoint (day) Value: 10
  misc_feature: MA Experiment 20001911 PARAMETER Experiment Name: At_Drought_Reproduction_P Parameter: Tissue Value: Flowers
  misc_feature: MA Experiment 20001911 PARAMETER Experiment Name: At_Drought_Reproduction_P Parameter: Treatment Value: Drought vs. No Drought

SEQ ID NO: 93893 - protein, 256 aa, Arabidopsis thaliana; identical to SEQ ID NO: 90137
  peptide (1)..(256): Ceres Seq. ID no. 12722294
  misc_feature (15)..(256): Homolog of NCBI NO: 18423389 NR Description: expressed protein; protein id: At5g52420.1, by cDNA: gi_15146255, supported by cDNA: gi_19699159 [Arabidopsis >gi|10177408|dbj|BAB10539.1| gene_id:K24M7.17~unknown protein
  misc_feature (15)..(256): Homolog of NCBI NO: 15146256 NR Description: AT5g52420/K24M7_17 [Arabidopsis thaliana]
  misc_feature (15)..(256): Homolog of NCBI NO: 37536624 NR Description: unknown protein [Oryza sativa (japonica
  misc_feature (28)..(256): Homolog of NCBI NO: 15237854 NR Description: unknown protein; protein id: At5g23920.1 thaliana] >gi|10176859|dbj|BAB10065.1| gene_id:MRO11.4~unknown [Arabidopsis thaliana] >gi|29028832|gb|AAO64795.1| At5g23920
  misc_feature (15)..(250): Homolog of NCBI NO: 15217782 NR Description: unknown protein; protein id: At1g27990.1
  misc_feature (15)..(250): Homolog of NCBI NO: 38347228 NR Description: OSJNBa0044M19.10 [Oryza sativa (japonica

SEQ ID NO: 93894 - protein, 242 aa, Arabidopsis thaliana; identical to SEQ ID NO: 90138
  peptide (1)..(242): Ceres Seq. ID no. 12722295
  misc_feature (1)..(242): Homolog of NCBI NO: 18423389 NR Description: expressed protein; protein id: At5g52420.1, by cDNA: gi_15146255, supported by cDNA: gi_19699159 [Arabidopsis >gi|10177408|dbj|BAB10539.1| gene_id:K24M7.17~unknown protein
  misc_feature (1)..(242): Homolog of NCBI NO: 15146256 NR Description: AT5g52420/K24M7_17 [Arabidopsis thaliana]
  misc_feature (1)..(242): Homolog of NCBI NO: 37536624 NR Description: unknown protein [Oryza sativa (japonica
  misc_feature (14)..(242): Homolog of NCBI NO: 15237854 NR Description: unknown protein; protein id: At5g23920.1 thaliana] >gi|10176859|dbj|BAB10065.1| gene_id:MRO11.4~unknown [Arabidopsis thaliana] >gi|29028832|gb|AAO64795.1| At5g23920
  misc_feature (1)..(236): Homolog of NCBI NO: 15217782 NR Description: unknown protein; protein id: At1g27990.1
  misc_feature (1)..(236): Homolog of NCBI NO: 38347228 NR Description: OSJNBa0044M19.10 [Oryza sativa (japonica

SEQ ID NO: 93895 - DNA, 879 bp, Arabidopsis thaliana; identical to SEQ ID NO: 90139
  misc_feature (1)..(879): Ceres Seq. ID no. 12722305
  misc_feature: MA Experiment ID: 20000171 Result: Up-regulated in Transcription
  misc_feature: MA Experiment 20000171 PARAMETER Experiment Name: At_42deg_Heat_P Parameter: Age (day) Value: 14
  misc_feature: MA Experiment 20000171 PARAMETER Experiment Name: At_42deg_Heat_P Parameter: Organism Value: A. thaliana
  misc_feature: MA Experiment 20000171 PARAMETER Experiment Name: At_42deg_Heat_P Parameter: Plant Line Value: WS
  misc_feature: MA Experiment 20000171 PARAMETER Experiment Name: At_42deg_Heat_P Parameter: Temperature (deg C) Value: 42 vs. 22
  misc_feature: MA Experiment 20000171 PARAMETER Experiment Name: At_42deg_Heat_P Parameter: Timepoint (hr) Value: 1
  misc_feature: MA Experiment 20000171 PARAMETER Experiment Name: At_42deg_Heat_P Parameter: Tissue Value: Aerial

SEQ ID NO: 93896 - protein, 292 aa, Arabidopsis thaliana; identical to SEQ ID NO: 90140
  peptide (1)..(292): Ceres Seq. ID no. 12722306
  misc_feature (57)..(289): Pfam Name: Fibrillarin Pfam Description: Fibrillarin
  misc_feature (1)..(292): Homolog of NCBI NO: 18423398 NR Description: fibrillarin 3 (AtFib3); protein id: At5g52490.1
  misc_feature (1)..(292): Homolog of NCBI NO: 30696189 NR Description: fibrillarin 1 (Fib1) (SKIP7) [Arabidopsis >gi|9965653|gb|AAG10103.1|AF233443_1 fibrillarin 1 [Arabidopsis
  misc_feature (7)..(292): Homolog of NCBI NO: 18416588 NR Description: fibrillarin 2 (AtFib2); protein id: At4g25630.1, by cDNA: 11319., supported by cDNA: gi_15028154, supported by
  misc_feature (7)..(292): Homolog of NCBI NO: 15028155 NR Description: putative fibrillarin 2 protein AtFib2
  misc_feature (1)..(292): Homolog of NCBI NO: 6003681 NR Description: fibrillarin homolog [Arabidopsis thaliana]
  misc_feature (52)..(292): Homolog of NCBI NO: 2982266 NR Description: probable fibrillarin [Picea mariana]
  misc_feature (6)..(292): Homolog of NCBI NO: 30353806 NR Description: Unknown (protein for MGC:56145) [Danio rerio]
  misc_feature (6)..(292): Homolog of NCBI NO: 27924365 NR Description: Unknown (protein for IMAGE:5543421) [Xenopus
  misc_feature (6)..(292): Homolog of NCBI NO: 119856 NR Description: Fibrillarin >gi|2134062|pir||I51417 fibrillarin -
  misc_feature (6)..(292): Homolog of NCBI NO: 3399667 NR Description: FBRL_HUMAN; 34 KD NUCLEOLAR SCLERODERMA ANTIGEN

SEQ ID NO: 93897 - DNA, 1116 bp, Arabidopsis thaliana; identical to SEQ ID NO: 90141
  misc_feature (1)..(1116): Ceres Seq. ID no. 12722311
  misc_feature: MA Experiment ID: 20000439 Result: Up-regulated in Transcription
  misc_feature: MA Experiment 20000439 PARAMETER Experiment Name: At_Roots__P Parameter: Age (day) Value: 14 vs. 21
  misc_feature: MA Experiment 20000439 PARAMETER Experiment Name: At_Roots__P Parameter: Organism Value: A. thaliana
  misc_feature: MA Experiment 20000439 PARAMETER Experiment Name: At_Roots__P Parameter: Tissue Value: Roots vs. Whole Plant
  misc_feature: MA Experiment ID: 20000794 Result: Up-regulated in Transcription
  misc_feature: MA Experiment 20000794 PARAMETER Experiment Name: At_Petals_P Parameter: Age (day) Value: 23-25 days
  misc_feature: MA Experiment 20000794 PARAMETER Experiment Name: At_Petals_P Parameter: Plant Line Value: WS
  misc_feature: MA Experiment 20000794 PARAMETER Experiment Name: At_Petals_P Parameter: Tissue Value: Petals vs. Whole plant
  misc_feature: MA Experiment ID: 20001905 Result: Up-regulated in Transcription
  misc_feature: MA Experiment 20001905 PARAMETER Experiment Name: At_Drought_Reproduction_P Parameter: Age (day) Value: 40
  misc_feature: MA Experiment 20001905 PARAMETER Experiment Name: At_Drought_Reproduction_P Parameter: Organism Value: A. thaliana
  misc_feature: MA Experiment 20001905 PARAMETER Experiment Name: At_Drought_Reproduction_P Parameter: Plant Line Value: WS
  misc_feature: MA Experiment 20001905 PARAMETER Experiment Name: At_Drought_Reproduction_P Parameter: Timepoint (day) Value: 10
  misc_feature: MA Experiment 20001905 PARAMETER Experiment Name: At_Drought_Reproduction_P Parameter: Tissue Value: Rosettes
  misc_feature: MA Experiment 20001905 PARAMETER Experiment Name: At_Drought_Reproduction_P Parameter: Treatment Value: Drought vs. No Drought

SEQ ID NO: 93898 - protein, 371 aa, Arabidopsis thaliana; identical to SEQ ID NO: 90142
  peptide (1)..(371): Ceres Seq. ID no. 12722312
  misc_feature (1)..(282): Pfam Name: GRAS family transcription factor Pfam Description: GRAS family transcription factor
  misc_feature (1)..(371): Homolog of NCBI NO: 11358830 NR Description: scarecrow-like protein 8 [imported] - Arabidopsis
  misc_feature (1)..(371): Homolog of NCBI NO: 20466440 NR Description: SCARECROW transcriptional regulator-like
  misc_feature (1)..(371): Homolog of NCBI NO: 30696193 NR Description: scarecrow-like transcription factor 8 (SCL8)
  misc_feature (100)..(371): Homolog of NCBI NO: 38345865 NR Description: OSJNBa0064M23.7 [Oryza sativa (japonica
  misc_feature (2)..(123): Homolog of NCBI NO: 38345865 NR Description: OSJNBa0064M23.7 [Oryza sativa (japonica
  misc_feature (2)..(371): Homolog of NCBI NO: 29367345 NR Description: scarecrow transcriptional regulator-like protein
  misc_feature (2)..(371): Homolog of NCBI NO: 34907424 NR Description: scarecrow-like protein [Oryza sativa (japonica
  misc_feature (4)..(371): Homolog of NCBI NO: 15218990 NR Description: scarecrow-like 1; protein id: At1g21450.1, by cDNA: 109490., supported by cDNA: gi_15027952, supported by
  misc_feature (24)..(371): Homolog of NCBI NO: 11358822 NR Description: scarecrow-like protein 1 [imported] - Arabidopsis
  misc_feature (4)..(371): Homolog of NCBI NO: 15238903 NR Description: SCARECROW gene regulator-like; protein id: supported by cDNA: gi_8132288 [Arabidopsis thaliana] phytochrome A signal transduction 1 protein [Arabidopsis

SEQ ID NO: 93899 - protein, 332 aa, Arabidopsis thaliana; identical to SEQ ID NO: 90143
  peptide (1)..(332): Ceres Seq. ID no. 12722313
  misc_feature (1)..(243): Pfam Name: GRAS family transcription factor Pfam Description: GRAS family transcription factor
  misc_feature (1)..(332): Homolog of NCBI NO: 11358830 NR Description: scarecrow-like protein 8 [imported] - Arabidopsis
  misc_feature (1)..(332): Homolog of NCBI NO: 20466440 NR Description: SCARECROW transcriptional regulator-like
  misc_feature (1)..(332): Homolog of NCBI NO: 30696193 NR Description: scarecrow-like transcription factor 8 (SCL8)
  misc_feature (61)..(332): Homolog of NCBI NO: 38345865 NR Description: OSJNBa0064M23.7 [Oryza sativa (japonica
  misc_feature (1)..(84): Homolog of NCBI NO: 38345865 NR Description: OSJNBa0064M23.7 [Oryza sativa (japonica
  misc_feature (1)..(332): Homolog of NCBI NO: 29367345 NR Description: scarecrow transcriptional regulator-like protein
  misc_feature (1)..(332): Homolog of NCBI NO: 34907424 NR Description: scarecrow-like protein [Oryza sativa (japonica
  misc_feature (1)..(332): Homolog of NCBI NO: 15218990 NR Description: scarecrow-like 1; protein id: At1g21450.1, by cDNA: 109490., supported by cDNA: gi_15027952, supported by
  misc_feature (1)..(332): Homolog of NCBI NO: 11358822 NR Description: scarecrow-like protein 1 [imported] - Arabidopsis
  misc_feature (1)..(332): Homolog of NCBI NO: 15238903 NR Description: SCARECROW gene regulator-like; protein id: supported by cDNA: gi_8132288 [Arabidopsis thaliana] phytochrome A signal transduction 1 protein [Arabidopsis

SEQ ID NO: 93900 - protein, 276 aa, Arabidopsis thaliana; identical to SEQ ID NO: 90144
  peptide (1)..(276): Ceres Seq. ID no. 12722314
  misc_feature (1)..(187): Pfam Name: GRAS family transcription factor Pfam Description: GRAS family transcription factor
  misc_feature (1)..(276): Homolog of NCBI NO: 11358830 NR Description: scarecrow-like protein 8 [imported] - Arabidopsis
  misc_feature (1)..(276): Homolog of NCBI NO: 20466440 NR Description: SCARECROW transcriptional regulator-like
  misc_feature (1)..(276): Homolog of NCBI NO: 30696193 NR Description: scarecrow-like transcription factor 8 (SCL8)
  misc_feature (5)..(276): Homolog of NCBI NO: 38345865 NR Description: OSJNBa0064M23.7 [Oryza sativa (japonica
  misc_feature (1)..(28): Homolog of NCBI NO: 38345865 NR Description: OSJNBa0064M23.7 [Oryza sativa (japonica
  misc_feature (1)..(276): Homolog of NCBI NO: 29367345 NR Description: scarecrow transcriptional regulator-like protein
  misc_feature (1)..(276): Homolog of NCBI NO: 34907424 NR Description: scarecrow-like protein [Oryza sativa (japonica
  misc_feature (1)..(276): Homolog of NCBI NO: 15218990 NR Description: scarecrow-like 1; protein id: At1g21450.1, by cDNA: 109490., supported by cDNA: gi_15027952, supported by
  misc_feature (1)..(276): Homolog of NCBI NO: 11358822 NR Description: scarecrow-like protein 1 [imported] - Arabidopsis
  misc_feature (1)..(276): Homolog of NCBI NO: 15238903 NR Description: SCARECROW gene regulator-like; protein id: supported by cDNA: gi_8132288 [Arabidopsis thaliana] phytochrome A signal transduction 1 protein [Arabidopsis

SEQ ID NO: 93901 - DNA, 1767 bp, Arabidopsis thaliana; identical to SEQ ID NO: 90145
  misc_feature (1)..(1767): Ceres Seq. ID no. 12722327
  misc_feature: MA Experiment ID: 20000173 Result: Down-regulated in Transcription
  misc_feature: MA Experiment 20000173 PARAMETER Experiment Name: At_42deg_Heat_P Parameter: Age (day) Value: 14
  misc_feature: MA Experiment 20000173 PARAMETER Experiment Name: At_42deg_Heat_P Parameter: Organism Value: A. thaliana
  misc_feature: MA Experiment 20000173 PARAMETER Experiment Name: At_42deg_Heat_P Parameter: Plant Line Value: WS
  misc_feature: MA Experiment 20000173 PARAMETER Experiment Name: At_42deg_Heat_P Parameter: Temperature (deg C) Value: 42 vs. 22
  misc_feature: MA Experiment 20000173 PARAMETER Experiment Name: At_42deg_Heat_P Parameter: Timepoint (hr) Value: 6
  misc_feature: MA Experiment 20000173 PARAMETER Experiment Name: At_42deg_Heat_P Parameter: Tissue Value: Aerial
  misc_feature: MA Experiment ID: 20001248 Result: Up-regulated in Transcription
  misc_feature: MA Experiment 20001248 PARAMETER Experiment Name: At_Far-red-induction_P Parameter: Age (day) Value: 7
  misc_feature: MA Experiment 20001248 PARAMETER Experiment Name: At_Far-red-induction_P Parameter: Light Value: Far-red vs. White
  misc_feature: MA Experiment 20001248 PARAMETER Experiment Name: At_Far-red-induction_P Parameter: Organism Value: A. thaliana
  misc_feature: MA Experiment 20001248 PARAMETER Experiment Name: At_Far-red-induction_P Parameter: Plant Line Value: Columbia
  misc_feature: MA Experiment 20001248 PARAMETER Experiment Name: At_Far-red-induction_P Parameter: Timepoint (hr) Value: 4
  misc_feature: MA Experiment 20001248 PARAMETER Experiment Name: At_Far-red-induction_P Parameter: Tissue Value: Whole Plant

SEQ ID NO: 93902 - protein, 588 aa, Arabidopsis thaliana; identical to SEQ ID NO: 90146
  peptide (1)..(588): Ceres Seq. ID no. 12722328
  misc_feature (82)..(116): Pfam Name: PPR repeat Pfam Description: PPR repeat
  misc_feature (18)..(588): Homolog of NCBI NO: 34911828 NR Description: selenium-binding protein-like [Oryza sativa
  misc_feature (21)..(587): Homolog of NCBI NO: 37534806 NR Description: putative PPR-repeat containing protein [Oryza
  misc_feature (32)..(588): Homolog of NCBI NO: 15229561 NR Description: hypothetical protein; protein id: At3g24000.1 thaliana] >gi|9294669|dbj|BAB03018.1| contains similarity to
  misc_feature (54)..(588): Homolog of NCBI NO: 15235498 NR Description: hypothetical protein; protein id: At4g02750.1
  misc_feature (24)..(588): Homolog of NCBI NO: 37535570 NR Description: hypothetical protein [Oryza sativa (japonica group)] >gi|16905194|gb|AAL31064.1| hypothetical protein [Oryza >gi|31432781|gb|AAP54374.1| hypothetical protein [Oryza sativa
  misc_feature (26)..(588): Homolog of NCBI NO: 34365551 NR Description: At4g14850 [Arabidopsis thaliana]
  misc_feature (14)..(573): Homolog of NCBI NO: 15238326 NR Description: putative protein; protein id: At5g04780.1
  misc_feature (70)..(588): Homolog of NCBI NO: 22093801 NR Description: hypothetical protein~predicted by
  misc_feature (36)..(588): Homolog of NCBI NO: 15226200 NR Description: putative selenium-binding protein; protein id:
  misc_feature (34)..(588): Homolog of NCBI NO: 34915012 NR Description: P0458A05.10 [Oryza sativa (japonica

SEQ ID NO: 93903 - protein, 490 aa, Arabidopsis thaliana; identical to SEQ ID NO: 90147
  peptide (1)..(490): Ceres Seq. ID no. 12722329
  misc_feature (1)..(490): Homolog of NCBI NO: 34911828 NR Description: selenium-binding protein-like [Oryza sativa
  misc_feature (1)..(489): Homolog of NCBI NO: 37534806 NR Description: putative PPR-repeat containing protein [Oryza
  misc_feature (1)..(490): Homolog of NCBI NO: 15229561 NR Description: hypothetical protein; protein id: At3g24000.1 thaliana] >gi|9294669|dbj|BAB03018.1| contains similarity to
  misc_feature (1)..(490): Homolog of NCBI NO: 15235498 NR Description: hypothetical protein; protein id: At4g02750.1
  misc_feature (1)..(490): Homolog of NCBI NO: 37535570 NR Description: hypothetical protein [Oryza sativa (japonica group)] >gi|16905194|gb|AAL31064.1| hypothetical protein [Oryza >gi|31432781|gb|AAP54374.1| hypothetical protein [Oryza sativa
  misc_feature (1)..(490): Homolog of NCBI NO: 34365551 NR Description: At4g14850 [Arabidopsis thaliana]
  misc_feature (1)..(475): Homolog of NCBI NO: 15238326 NR Description: putative protein; protein id: At5g04780.1
  misc_feature (1)..(490): Homolog of NCBI NO: 22093801 NR Description: hypothetical protein~predicted by
  misc_feature (1)..(490): Homolog of NCBI NO: 15226200 NR Description: putative selenium-binding protein; protein id:
  misc_feature (1)..(490): Homolog of NCBI NO: 34915012 NR Description: P0458A05.10 [Oryza sativa (japonica

SEQ ID NO: 93904 - protein, 482 aa, Arabidopsis thaliana; identical to SEQ ID NO: 90148
  peptide (1)..(482): Ceres Seq. ID no. 12722330
  misc_feature (1)..(482): Homolog of NCBI NO: 34911828 NR Description: selenium-binding protein-like [Oryza sativa
  misc_feature (1)..(481): Homolog of NCBI NO: 37534806 NR Description: putative PPR-repeat containing protein [Oryza
  misc_feature (1)..(482): Homolog of NCBI NO: 15229561 NR Description: hypothetical protein; protein id: At3g24000.1 thaliana] >gi|9294669|dbj|BAB03018.1| contains similarity to
  misc_feature (1)..(482): Homolog of NCBI NO: 15235498 NR Description: hypothetical protein; protein id: At4g02750.1
  misc_feature (1)..(482): Homolog of NCBI NO: 37535570 NR Description: hypothetical protein [Oryza sativa (japonica group)] >gi|16905194|gb|AAL31064.1| hypothetical protein [Oryza >gi|31432781|gb|AAP54374.1| hypothetical protein [Oryza sativa
  misc_feature (1)..(482): Homolog of NCBI NO: 34365551 NR Description: At4g14850 [Arabidopsis thaliana]
  misc_feature (1)..(467): Homolog of NCBI NO: 15238326 NR Description: putative protein; protein id: At5g04780.1
  misc_feature (1)..(482): Homolog of NCBI NO: 22093801 NR Description: hypothetical protein~predicted by
  misc_feature (1)..(482): Homolog of NCBI NO: 15226200 NR Description: putative selenium-binding protein; protein id:
  misc_feature (1)..(482): Homolog of NCBI NO: 34915012 NR Description: P0458A05.10 [Oryza sativa (japonica

SEQ ID NO: 93905 - DNA, 2682 bp, Arabidopsis thaliana; identical to SEQ ID NO: 90149
  misc_feature (1)..(2682): Ceres Seq. ID no. 12722353
  misc_feature: MA Experiment ID: 20000315 Result: Down-regulated in Transcription
  misc_feature: MA Experiment 20000315 PARAMETER Experiment Name: At_14day_Shoots-Roots_Sub_P Parameter: Age (day) Value: 14
  misc_feature: MA Experiment 20000315 PARAMETER Experiment Name: At_14day_Shoots-Roots_Sub_P Parameter: Organism Value: A. thaliana
  misc_feature: MA Experiment 20000315 PARAMETER Experiment Name: At_14day_Shoots-Roots_Sub_P Parameter: Plant Line Value: WS
  misc_feature: MA Experiment 20000315 PARAMETER Experiment Name: At_14day_Shoots-Roots_Sub_P Parameter: Tissue Value: Shoots vs. Whole Plant
  misc_feature: MA Experiment ID: 20000328 Result: Down-regulated in Transcription
  misc_feature: MA Experiment 20000328 PARAMETER Experiment Name: At_42deg_Heat_Sub_P Parameter: Age (day) Value: 14
  misc_feature: MA Experiment 20000328 PARAMETER Experiment Name: At_42deg_Heat_Sub_P Parameter: Organism Value: A. thaliana
  misc_feature: MA Experiment 20000328 PARAMETER Experiment Name: At_42deg_Heat_Sub_P Parameter: Plant Line Value: WS
  misc_feature: MA Experiment 20000328 PARAMETER Experiment Name: At_42deg_Heat_Sub_P Parameter: Temperature (deg C) Value: 42 vs. 22
  misc_feature: MA Experiment 20000328 PARAMETER Experiment Name: At_42deg_Heat_Sub_P Parameter: Timepoint (hr) Value: 6
  misc_feature: MA Experiment 20000328 PARAMETER Experiment Name: At_42deg_Heat_Sub_P Parameter: Tissue Value: Aerial

SEQ ID NO: 93906 - protein, 893 aa, Arabidopsis thaliana; identical to SEQ ID NO: 90150
  peptide (1)..(893): Ceres Seq. ID no. 12722354
  misc_feature (393)..(427): Pfam Name: PPR repeat Pfam Description: PPR repeat
  misc_feature (42)..(885): Homolog of NCBI NO: 38606535 NR Description: OSJNBa0016O02.23 [Oryza sativa (japonica
  misc_feature (30)..(886): Homolog of NCBI NO: 15236324 NR Description: putative protein; protein id: At4g13650.1
  misc_feature (36)..(886): Homolog of NCBI NO: 15228590 NR Description: hypothetical protein; protein id: At3g03580.1 thaliana] >gi|6091764|gb|AAF03474.1|AC009327_13 hypothetical [Arabidopsis thaliana] >gi|28393735|gb|AAO42278.1| unknown
  misc_feature (170)..(885): Homolog of NCBI NO: 15234095 NR Description: putative protein; protein id: At4g33170.1
  misc_feature (36)..(236): Homolog of NCBI NO: 15234095 NR Description: putative protein; protein id: At4g33170.1
  misc_feature (92)..(885): Homolog of NCBI NO: 30694644 NR Description: pentatricopeptide (PPR) repeat-containing protein
  misc_feature (92)..(885): Homolog of NCBI NO: 30794008 NR Description: unknown protein [Arabidopsis thaliana]
  misc_feature (79)..(807): Homolog of NCBI NO: 15229419 NR Description: putative protein; protein id: At3g63370.1
  misc_feature (45)..(886): Homolog of NCBI NO: 34903762 NR Description: unnamed protein product [Oryza sativa (japonica group)] >gi|7340873|dbj|BAA92963.1| unnamed protein product
  misc_feature (45)..(806): Homolog of NCBI NO: 15235115 NR Description: putative protein; protein id: At4g39530.1

SEQ ID NO: 93907 - protein, 810 aa, Arabidopsis thaliana; identical to SEQ ID NO: 90151
  peptide (1)..(810): Ceres Seq. ID no. 12722355
  misc_feature (310)..(344): Pfam Name: PPR repeat Pfam Description: PPR repeat
  misc_feature (1)..(802): Homolog of NCBI NO: 38606535 NR Description: OSJNBa0016O02.23 [Oryza sativa (japonica
  misc_feature (1)..(803): Homolog of NCBI NO: 15236324 NR Description: putative protein; protein id: At4g13650.1
  misc_feature (1)..(803): Homolog of NCBI NO: 15228590 NR Description: hypothetical protein; protein id: At3g03580.1 thaliana] >gi|6091764|gb|AAF03474.1|AC009327_13 hypothetical [Arabidopsis thaliana] >gi|28393735|gb|AAO42278.1| unknown
  misc_feature (87)..(802): Homolog of NCBI NO: 15234095 NR Description: putative protein; protein id: At4g33170.1
  misc_feature (1)..(153): Homolog of NCBI NO: 15234095 NR Description: putative protein; protein id: At4g33170.1
  misc_feature (9)..(802): Homolog of NCBI NO: 30694644 NR Description: pentatricopeptide (PPR) repeat-containing protein
  misc_feature (9)..(802): Homolog of NCBI NO: 30794008 NR Description: unknown protein [Arabidopsis thaliana]
  misc_feature (1)..(724): Homolog of NCBI NO: 15229419 NR Description: putative protein; protein id: At3g63370.1
  misc_feature (1)..(803): Homolog of NCBI NO: 34903762 NR Description: unnamed protein product [Oryza sativa (japonica group)] >gi|7340873|dbj|BAA92963.1| unnamed protein product
  misc_feature (1)..(723): Homolog of NCBI NO: 15235115 NR Description: putative protein; protein id: At4g39530.1

SEQ ID NO: 93908 - protein, 799 aa, Arabidopsis thaliana; identical to SEQ ID NO: 90152
  peptide (1)..(799): Ceres Seq. ID no. 12722356
  misc_feature (299)..(333): Pfam Name: PPR repeat Pfam Description: PPR repeat
  misc_feature (1)..(791): Homolog of NCBI NO: 38606535 NR Description: OSJNBa0016O02.23 [Oryza sativa (japonica
  misc_feature (1)..(792): Homolog of NCBI NO: 15236324 NR Description: putative protein; protein id: At4g13650.1
  misc_feature (1)..(792): Homolog of NCBI NO: 15228590 NR Description: hypothetical protein; protein id: At3g03580.1 thaliana] >gi|6091764|gb|AAF03474.1|AC009327_13 hypothetical [Arabidopsis thaliana] >gi|28393735|gb|AAO42278.1| unknown
  misc_feature (76)..(791): Homolog of NCBI NO: 15234095 NR Description: putative protein; protein id: At4g33170.1
  misc_feature (1)..(142): Homolog of NCBI NO: 15234095 NR Description: putative protein; protein id: At4g33170.1
  misc_feature (1)..(791): Homolog of NCBI NO: 30694644 NR Description: pentatricopeptide (PPR) repeat-containing protein
  misc_feature (1)..(791): Homolog of NCBI NO: 30794008 NR Description: unknown protein [Arabidopsis thaliana]
  misc_feature (1)..(713): Homolog of NCBI NO: 15229419 NR Description: putative protein; protein id: At3g63370.1
  misc_feature (1)..(792): Homolog of NCBI NO: 34903762 NR Description: unnamed protein product [Oryza sativa (japonica group)] >gi|7340873|dbj|BAA92963.1| unnamed protein product
  misc_feature (1)..(712): Homolog of NCBI NO: 15235115 NR Description: putative protein; protein id: At4g39530.1

SEQ ID NO: 93909 - DNA, 2616 bp, Arabidopsis thaliana; identical to SEQ ID NO: 90153
  misc_feature (1)..(2616): Ceres Seq. ID no. 12722373
  misc_feature: MA Experiment ID: 20000184 Result: Down-regulated in Transcription
  misc_feature: MA Experiment 20000184 PARAMETER Experiment Name: At_Shoots__P Parameter: Age (day) Value: 7
  misc_feature: MA Experiment 20000184 PARAMETER Experiment Name: At_Shoots__P Parameter: Tissue Value: Shoots vs. Whole Plant
  misc_feature: MA Experiment ID: 20000185 Result: Down-regulated in Transcription
  misc_feature: MA Experiment 20000185 PARAMETER Experiment Name: At_Roots__P Parameter: Age (day) Value: 7 vs. 21
  misc_feature: MA Experiment 20000185 PARAMETER Experiment Name: At_Roots__P Parameter: Organism Value: A. thaliana
  misc_feature: MA Experiment 20000185 PARAMETER Experiment Name: At_Roots__P Parameter: Tissue Value: Roots vs. Whole Plant
  misc_feature: MA Experiment ID: 20000439 Result: Down-regulated in Transcription
  misc_feature: MA Experiment 20000439 PARAMETER Experiment Name: At_Roots__P Parameter: Age (day) Value: 14 vs. 21
  misc_feature: MA Experiment 20000439 PARAMETER Experiment Name: At_Roots__P Parameter: Organism Value: A. thaliana
  misc_feature: MA Experiment 20000439 PARAMETER Experiment Name: At_Roots__P Parameter: Tissue Value: Roots vs. Whole Plant

SEQ ID NO: 93910 - protein, 716 aa, Arabidopsis thaliana; identical to SEQ ID NO: 90154
  peptide (1)..(716): Ceres Seq. ID no. 12722374
  misc_feature (135)..(403): Pfam Name: Ion transport protein Pfam Description: Ion transport protein
  misc_feature (1)..(716): Homolog of NCBI NO: 6969231 NR Description: cyclic nucleotide-gated calmodulin-binding ion
  misc_feature (152)..(716): Homolog of NCBI NO: 24943196 NR Description: cyclic nucleotide-gated channel C [Phaseolus
  misc_feature (4)..(716): Homolog of NCBI NO: 7489415 NR Description: probable calmodulin binding transport protein - >gi|3169012|emb|CAA05637.1| putative calmodulin binding
  misc_feature (5)..(714): Homolog of NCBI NO: 6969229 NR Description: cyclic nucleotide-gated calmodulin-binding ion
  misc_feature (1)..(713): Homolog of NCBI NO: 22328204 NR Description: cyclic nucleotide-regulated ion channel,
  misc_feature (61)..(715): Homolog of NCBI NO: 18378827 NR Description: cyclic nucleotide-regulated ion channel; protein
  misc_feature (64)..(713): Homolog of NCBI NO: 7484881 NR Description: cyclic nucleotide gated channel homolog F3I3.30 -
  misc_feature (1)..(716): Homolog of NCBI NO: 25408996 NR Description: hypothetical protein At2g46430 [imported] -
  misc_feature (1)..(716): Homolog of NCBI NO: 18407073 NR Description: cyclic nucleotide-regulated ion channel (CNGC3); id: At2g46430.1, supported by cDNA: gi_16648780, supported by
  misc_feature (1)..(716): Homolog of NCBI NO: 18400426 NR Description: cyclic nucleotide-regulated ion channel (CNGC6); id: At2g23980.1, supported by cDNA: gi_14532659 [Arabidopsis

SEQ ID NO: 93911 - protein, 585 aa, Arabidopsis thaliana; identical to SEQ ID NO: 90155
  peptide (1)..(585): Ceres Seq. ID no. 12722375
  misc_feature (4)..(272): Pfam Name: Ion transport protein Pfam Description: Ion transport protein
  misc_feature (1)..(585): Homolog of NCBI NO: 6969231 NR Description: cyclic nucleotide-gated calmodulin-binding ion
  misc_feature (21)..(585): Homolog of NCBI NO: 24943196 NR Description: cyclic nucleotide-gated channel C [Phaseolus
  misc_feature (1)..(585): Homolog of NCBI NO: 7489415 NR Description: probable calmodulin binding transport protein - >gi|3169012|emb|CAA05637.1| putative calmodulin binding
  misc_feature (1)..(583): Homolog of NCBI NO: 6969229 NR Description: cyclic nucleotide-gated calmodulin-binding ion
  misc_feature (1)..(582): Homolog of NCBI NO: 22328204 NR Description: cyclic nucleotide-regulated ion channel,
  misc_feature (1)..(584): Homolog of NCBI NO: 18378827 NR Description: cyclic nucleotide-regulated ion channel; protein
  misc_feature (1)..(582): Homolog of NCBI NO: 7484881 NR Description: cyclic nucleotide gated channel homolog F3I3.30 -
  misc_feature (1)..(585): Homolog of NCBI NO: 25408996 NR Description: hypothetical protein At2g46430 [imported] -
  misc_feature (1)..(585): Homolog of NCBI NO: 18407073 NR Description: cyclic nucleotide-regulated ion channel (CNGC3); id: At2g46430.1, supported by cDNA: gi_16648780, supported by
  misc_feature (1)..(585): Homolog of NCBI NO: 18400426 NR Description: cyclic nucleotide-regulated ion channel (CNGC6); id: At2g23980.1, supported by cDNA: gi_14532659 [Arabidopsis

SEQ ID NO: 93912 - protein, 516 aa, Arabidopsis thaliana; identical to SEQ ID NO: 90156
  peptide (1)..(516): Ceres Seq. ID no. 12722376
  misc_feature (1)..(203): Pfam Name: Ion transport protein Pfam Description: Ion transport protein
  misc_feature (1)..(516): Homolog of NCBI NO: 6969231 NR Description: cyclic nucleotide-gated calmodulin-binding ion
  misc_feature (1)..(516): Homolog of NCBI NO: 24943196 NR Description: cyclic nucleotide-gated channel C [Phaseolus
  misc_feature (1)..(516): Homolog of NCBI NO: 7489415 NR Description: probable calmodulin binding transport protein - >gi|3169012|emb|CAA05637.1| putative calmodulin binding
  misc_feature (1)..(514): Homolog of NCBI NO: 6969229 NR Description: cyclic nucleotide-gated calmodulin-binding ion
  misc_feature (1)..(513): Homolog of NCBI NO: 22328204 NR Description: cyclic nucleotide-regulated ion channel,
  misc_feature (1)..(515): Homolog of NCBI NO: 18378827 NR Description: cyclic nucleotide-regulated ion channel; protein
  misc_feature (1)..(513): Homolog of NCBI NO: 7484881 NR Description: cyclic nucleotide gated channel homolog F3I3.30 -
  misc_feature (1)..(516): Homolog of NCBI NO: 25408996 NR Description: hypothetical protein At2g46430 [imported] -
  misc_feature (1)..(516): Homolog of NCBI NO: 18407073 NR Description: cyclic nucleotide-regulated ion channel (CNGC3); id: At2g46430.1, supported by cDNA: gi_16648780, supported by
  misc_feature (1)..(516): Homolog of NCBI NO: 18400426 NR Description: cyclic nucleotide-regulated ion channel (CNGC6); id: At2g23980.1, supported by cDNA: gi_14532659 [Arabidopsis

SEQ ID NO: 93913 - DNA, 1951 bp, Arabidopsis thaliana; identical to SEQ ID NO: 90157
  misc_feature (1)..(1951): Ceres Seq. ID no. 12722399
  misc_feature: MA Experiment ID: 20000234 Result: Down-regulated in Transcription
  misc_feature: MA Experiment 20000234 PARAMETER Experiment Name: At_Siliques_P Parameter: Age (day) Value: 21
  misc_feature: MA Experiment 20000234 PARAMETER Experiment Name: At_Siliques_P Parameter: Organism Value: A. thaliana
  misc_feature: MA Experiment 20000234 PARAMETER Experiment Name: At_Siliques_P Parameter: Plant Line Value: WS
  misc_feature: MA Experiment 20000234 PARAMETER Experiment Name: At_Siliques_P Parameter: Tissue Value: Less Than 5mm Siliques vs. Whole Plant
  misc_feature: MA Experiment ID: 20000264 Result: Down-regulated in Transcription
  misc_feature: MA Experiment 20000264 PARAMETER Experiment Name: At_Open_Flower_P Parameter: Age (day) Value: 21
  misc_feature: MA Experiment 20000264 PARAMETER Experiment Name: At_Open_Flower_P Parameter: Plant Line Value: WS
  misc_feature: MA Experiment 20000264 PARAMETER Experiment Name: At_Open_Flower_P Parameter: Tissue Value: Open Flower vs. Whole Plant
  misc_feature: MA Experiment ID: 20000286 Result: Down-regulated in Transcription
  misc_feature: MA Experiment 20000286 PARAMETER Experiment Name: At_Open_Flower_P Parameter: Age (day) Value: 21
  misc_feature: MA Experiment 20000286 PARAMETER Experiment Name: At_Open_Flower_P Parameter: Plant Line Value: WS
  misc_feature: MA Experiment 20000286 PARAMETER Experiment Name: At_Open_Flower_P Parameter: Tissue Value: Half Open vs. Whole Plant
  misc_feature: MA Experiment ID: 20000439 Result: Down-regulated in Transcription
  misc_feature: MA Experiment 20000439 PARAMETER Experiment Name: At_Roots__P Parameter: Age (day) Value: 14 vs. 21
  misc_feature: MA Experiment 20000439 PARAMETER Experiment Name: At_Roots__P Parameter: Organism Value: A. thaliana
  misc_feature: MA Experiment 20000439 PARAMETER Experiment Name: At_Roots__P Parameter: Tissue Value: Roots vs. Whole Plant
  misc_feature: MA Experiment ID: 20000527 Result: Down-regulated in Transcription
  misc_feature: MA Experiment 20000527 PARAMETER Experiment Name: At_10percent_PEG_P Parameter: Age (day) Value: 20
  misc_feature: MA Experiment 20000527 PARAMETER Experiment Name: At_10percent_PEG_P Parameter: Organism Value: A. thaliana
  misc_feature: MA Experiment 20000527 PARAMETER Experiment Name: At_10percent_PEG_P Parameter: Plant Line Value: WS
  misc_feature: MA Experiment 20000527 PARAMETER Experiment Name: At_10percent_PEG_P Parameter: Timepoint (day) Value: 20
  misc_feature: MA Experiment 20000527 PARAMETER Experiment Name: At_10percent_PEG_P Parameter: Tissue Value: Whole Plant
  misc_feature: MA Experiment 20000527 PARAMETER Experiment Name: At_10percent_PEG_P Parameter: Treatment Value: 10percent PEG vs. No Treatment
  misc_feature: MA Experiment ID: 20001248 Result: Down-regulated in Transcription
  misc_feature: MA Experiment 20001248 PARAMETER Experiment Name: At_Far-red-induction_P Parameter: Age (day) Value: 7
  misc_feature: MA Experiment 20001248 PARAMETER Experiment Name: At_Far-red-induction_P Parameter: Light Value: Far-red vs. White
  misc_feature: MA Experiment 20001248 PARAMETER Experiment Name: At_Far-red-induction_P Parameter: Organism Value: A. thaliana
  misc_feature: MA Experiment 20001248 PARAMETER Experiment Name: At_Far-red-induction_P Parameter: Plant Line Value: Columbia
  misc_feature: MA Experiment 20001248 PARAMETER Experiment Name: At_Far-red-induction_P Parameter: Timepoint (hr) Value: 4
  misc_feature: MA Experiment 20001248 PARAMETER Experiment Name: At_Far-red-induction_P Parameter: Tissue Value: Whole Plant
  misc_feature: MA Experiment ID: 20001556 Result: Down-regulated in Transcription
  misc_feature: MA Experiment 20001556 PARAMETER Experiment Name: At_Drought_Soil_Dry_P Parameter: Age (day) Value: 26
  misc_feature: MA Experiment 20001556 PARAMETER Experiment Name: At_Drought_Soil_Dry_P Parameter: Organism Value: A. thaliana
  misc_feature: MA Experiment 20001556 PARAMETER Experiment Name: At_Drought_Soil_Dry_P Parameter: Plant Line Value: WS
  misc_feature: MA Experiment 20001556 PARAMETER Experiment Name: At_Drought_Soil_Dry_P Parameter: Post Timepoint (hr) Value: None
  misc_feature: MA Experiment 20001556 PARAMETER Experiment Name: At_Drought_Soil_Dry_P Parameter: Post-Treatment Value: None
  misc_feature: MA Experiment 20001556 PARAMETER Experiment Name: At_Drought_Soil_Dry_P Parameter: Timepoint (day) Value: 12
  misc_feature: MA Experiment 20001556 PARAMETER Experiment Name: At_Drought_Soil_Dry_P Parameter: Treatment Value: Drought vs. No Drought
  misc_feature: MA Experiment ID: 20001905 Result: Down-regulated in Transcription
  misc_feature: MA Experiment 20001905 PARAMETER Experiment Name: At_Drought_Reproduction_P Parameter: Age (day) Value: 40
  misc_feature: MA Experiment 20001905 PARAMETER Experiment Name: At_Drought_Reproduction_P Parameter: Organism Value: A. thaliana
  misc_feature: MA Experiment 20001905 PARAMETER Experiment Name: At_Drought_Reproduction_P Parameter: Plant Line Value: WS
  misc_feature: MA Experiment 20001905 PARAMETER Experiment Name: At_Drought_Reproduction_P Parameter: Timepoint (day) Value: 10
  misc_feature: MA Experiment 20001905 PARAMETER Experiment Name: At_Drought_Reproduction_P Parameter: Tissue Value: Rosettes
  misc_feature: MA Experiment 20001905 PARAMETER Experiment Name: At_Drought_Reproduction_P Parameter: Treatment Value: Drought vs. No Drought
  misc_feature: MA Experiment ID: 20001906 Result: Down-regulated in Transcription
  misc_feature: MA Experiment 20001906 PARAMETER Experiment Name: At_Drought_Reproduction_P Parameter: Age (day) Value: 35
  misc_feature: MA Experiment 20001906 PARAMETER Experiment Name: At_Drought_Reproduction_P Parameter: Organism Value: A. thaliana
  misc_feature: MA Experiment 20001906 PARAMETER Experiment Name: At_Drought_Reproduction_P Parameter: Plant Line Value: WS
  misc_feature: MA Experiment 20001906 PARAMETER Experiment Name: At_Drought_Reproduction_P Parameter: Timepoint (day) Value: 5
  misc_feature: MA Experiment 20001906 PARAMETER Experiment Name: At_Drought_Reproduction_P Parameter: Tissue Value: Siliques
  misc_feature: MA Experiment 20001906 PARAMETER Experiment Name: At_Drought_Reproduction_P Parameter: Treatment Value: Drought vs. No Drought
  misc_feature: MA Experiment ID: 20001908 Result: Down-regulated in Transcription
  misc_feature: MA Experiment 20001908 PARAMETER Experiment Name: At_Drought_Reproduction_P Parameter: Age (day) Value: 40
  misc_feature: MA Experiment 20001908 PARAMETER Experiment Name: At_Drought_Reproduction_P Parameter: Organism Value: A. thaliana
  misc_feature: MA Experiment 20001908 PARAMETER Experiment Name: At_Drought_Reproduction_P Parameter: Plant Line Value: WS
  misc_feature: MA Experiment 20001908 PARAMETER Experiment Name: At_Drought_Reproduction_P Parameter: Timepoint (day) Value: 10
  misc_feature: MA Experiment 20001908 PARAMETER Experiment Name: At_Drought_Reproduction_P Parameter: Tissue Value: Siliques
  misc_feature: MA Experiment 20001908 PARAMETER Experiment Name: At_Drought_Reproduction_P Parameter: Treatment Value: Drought vs. No Drought

SEQ ID NO: 93914 - protein, 601 aa, Arabidopsis thaliana; identical to SEQ ID NO: 90158
  peptide (1)..(601): Ceres Seq. ID no. 12722400
  misc_feature (287)..(585): Pfam Name: Pectinesterase Pfam Description: Pectinesterase
  misc_feature (15)..(600): Homolog of NCBI NO: 15229105 NR Description: pectinesterase - like protein; protein id: supported by cDNA: gi_16648928 [Arabidopsis thaliana]
  misc_feature (110)..(600): Homolog of NCBI NO: 34904380 NR Description: unnamed protein product [Oryza sativa (japonica group)] >gi|8467996|dbj|BAA96597.1| unnamed protein product
  misc_feature (43)..(599): Homolog of NCBI NO: 8671350 NR Description: pectin methylesterase [Nicotiana tabacum]
  misc_feature (43)..(599): Homolog of NCBI NO: 29602797 NR Description: pectin methyl-esterase [Nicotiana benthamiana]
  misc_feature (43)..(599): Homolog of NCBI NO: 6689892 NR Description: pectin methyl esterase [Solanum tuberosum]
  misc_feature (43)..(595): Homolog of NCBI NO: 15220955 NR Description: pectin methylesterase (PMEU1), putative; protein At1g53830.1, supported by cDNA: gi_13605622 [Arabidopsis >gi|17865767|sp|Q42534|PME2_ARATH Pectinesterase 2 precursor
  misc_feature (43)..(599): Homolog of NCBI NO: 2098711 NR Description: pectinesterase [Citrus sinensis]
  misc_feature (43)..(599): Homolog of NCBI NO: 6174912 NR Description: Pectinesterase 1.1 precursor (Pectin
  misc_feature (43)..(599): Homolog of NCBI NO: 6093740 NR Description: Pectinesterase U1 precursor (Pectin
  misc_feature (43)..(595): Homolog of NCBI NO: 2129667 NR Description: pectinesterase (EC 3.1.1.11) 2 precursor - thaliana (fragment) >gi|903894|gb|AAC50023.1| ATPME2 precursor

SEQ ID NO: 93915 - protein, 587 aa, Arabidopsis thaliana; identical to SEQ ID NO: 90159
  peptide (1)..(587): Ceres Seq. ID no. 12722401
  misc_feature (273)..(571): Pfam Name: Pectinesterase Pfam Description: Pectinesterase
  misc_feature (1)..(586): Homolog of NCBI NO: 15229105 NR Description: pectinesterase - like protein; protein id: supported by cDNA: gi_16648928 [Arabidopsis thaliana]
  misc_feature (96)..(586): Homolog of NCBI NO: 34904380 NR Description: unnamed protein product [Oryza sativa (japonica group)] >gi|8467996|dbj|BAA96597.1| unnamed protein product
  misc_feature (29)..(585): Homolog of NCBI NO: 8671350 NR Description: pectin methylesterase [Nicotiana tabacum]
  misc_feature (29)..(585): Homolog of NCBI NO: 29602797 NR Description: pectin methyl-esterase [Nicotiana benthamiana]
  misc_feature (29)..(585): Homolog of NCBI NO: 6689892 NR Description: pectin methyl esterase [Solanum tuberosum]
  misc_feature (29)..(581): Homolog of NCBI NO: 15220955 NR Description: pectin methylesterase (PMEU1), putative; protein At1g53830.1, supported by cDNA: gi_13605622 [Arabidopsis >gi|17865767|sp|Q42534|PME2_ARATH Pectinesterase 2 precursor
  misc_feature (29)..(585): Homolog of NCBI NO: 2098711 NR Description: pectinesterase [Citrus sinensis]
  misc_feature (29)..(585): Homolog of NCBI NO: 6174912 NR Description: Pectinesterase 1.1 precursor (Pectin
  misc_feature (29)..(585): Homolog of NCBI NO: 6093740 NR Description: Pectinesterase U1 precursor (Pectin
  misc_feature (29)..(581): Homolog of NCBI NO: 2129667 NR Description: pectinesterase (EC 3.1.1.11) 2 precursor - thaliana (fragment) >gi|903894|gb|AAC50023.1| ATPME2 precursor

SEQ ID NO: 93916 - protein, 455 aa, Arabidopsis thaliana; identical to SEQ ID NO: 90160
  peptide (1)..(455): Ceres Seq. ID no. 12722402
  misc_feature (141)..(439): Pfam Name: Pectinesterase Pfam Description: Pectinesterase
  misc_feature (1)..(454): Homolog of NCBI NO: 15229105 NR Description: pectinesterase - like protein; protein id: supported by cDNA: gi_16648928 [Arabidopsis thaliana]
  misc_feature (1)..(454): Homolog of NCBI NO: 34904380 NR Description: unnamed protein product [Oryza sativa (japonica group)] >gi|8467996|dbj|BAA96597.1| unnamed protein product
  misc_feature (1)..(453): Homolog of NCBI NO: 8671350 NR Description: pectin methylesterase [Nicotiana tabacum]
  misc_feature (1)..(453): Homolog of NCBI NO: 29602797 NR Description: pectin methyl-esterase [Nicotiana benthamiana]
  misc_feature (1)..(453): Homolog of NCBI NO: 6689892 NR Description: pectin methyl esterase [Solanum tuberosum]
  misc_feature (1)..(449): Homolog of NCBI NO: 15220955 NR Description: pectin methylesterase (PMEU1), putative; protein At1g53830.1, supported by cDNA: gi_13605622 [Arabidopsis >gi|17865767|sp|Q42534|PME2_ARATH Pectinesterase 2 precursor
  misc_feature (1)..(453): Homolog of NCBI NO: 2098711 NR Description: pectinesterase [Citrus sinensis]
  misc_feature (1)..(453): Homolog of NCBI NO: 6174912 NR Description: Pectinesterase 1.1 precursor (Pectin
  misc_feature (1)..(453): Homolog of NCBI NO: 6093740 NR Description: Pectinesterase U1 precursor (Pectin
  misc_feature (1)..(449): Homolog of NCBI NO: 2129667 NR Description: pectinesterase (EC 3.1.1.11) 2 precursor - thaliana (fragment) >gi|903894|gb|AAC50023.1| ATPME2 precursor

SEQ ID NO: 93917 - DNA, 1357 bp, Arabidopsis thaliana; identical to SEQ ID NO: 90161
  misc_feature (1)..(1357): Ceres Seq. ID no. 12722652
  misc_feature: MA Experiment ID: 108573 Result: Up-regulated in Transcription
  misc_feature: MA Experiment 108573 PARAMETER Experiment Name: At_Drought_cDNA_P Parameter: Timepoint (hr) Value: 6
  misc_feature: MA Experiment 108573 PARAMETER Experiment Name: At_Drought_cDNA_P Parameter: Tissue Value: Aerial
  misc_feature: MA Experiment 108573 PARAMETER Experiment Name: At_Drought_cDNA_P Parameter: Treatment Value: Drought vs. No Drought
  misc_feature: MA Experiment ID: 108576 Result: Up-regulated in Transcription
  misc_feature: MA Experiment 108576 PARAMETER Experiment Name: At_42deg_Heat_cDNA_P Parameter: Temperature (deg C) Value: 42 vs. 22
  misc_feature: MA Experiment 108576 PARAMETER Experiment Name: At_42deg_Heat_cDNA_P Parameter: Timepoint (hr) Value: 1
  misc_feature: MA Experiment 108576 PARAMETER Experiment Name: At_42deg_Heat_cDNA_P Parameter: Tissue Value: Aerial
  misc_feature: MA Experiment ID: 108577 Result: Up-regulated in Transcription
  misc_feature: MA Experiment 108577 PARAMETER Experiment Name: At_42deg_Heat_cDNA_P Parameter: Temperature (deg C) Value: 42 vs. 22
  misc_feature: MA Experiment 108577 PARAMETER Experiment Name: At_42deg_Heat_cDNA_P Parameter: Timepoint (hr) Value: 6
  misc_feature: MA Experiment 108577 PARAMETER Experiment Name: At_42deg_Heat_cDNA_P Parameter: Tissue Value: Aerial
  misc_feature: MA Experiment ID: 108579 Result: Down-regulated in Transcription
  misc_feature: MA Experiment 108579 PARAMETER Experiment Name: At_4deg_Cold_cDNA_P Parameter: Temperature (deg C) Value: 4 vs. 22
  misc_feature: MA Experiment 108579 PARAMETER Experiment Name: At_4deg_Cold_cDNA_P Parameter: Timepoint (hr) Value: 6
  misc_feature: MA Experiment 108579 PARAMETER Experiment Name: At_4deg_Cold_cDNA_P Parameter: Tissue Value: Aerial
  misc_feature: MA Experiment ID: 20000093 Result: Up-regulated in Transcription
  misc_feature: MA Experiment 20000093 PARAMETER Experiment Name: At_42deg_Heat_cDNA_P Parameter: Temperature (deg C) Value: 42 vs. 22
  misc_feature: MA Experiment 20000093 PARAMETER Experiment Name: At_42deg_Heat_cDNA_P Parameter: Timepoint (hr) Value: 0.5
  misc_feature: MA Experiment 20000093 PARAMETER Experiment Name: At_42deg_Heat_cDNA_P Parameter: Tissue Value: Aerial
  misc_feature: MA Experiment ID: 20000112 Result: Up-regulated in Transcription
  misc_feature: MA Experiment 20000112 PARAMETER Experiment Name: At_42deg_Heat_cDNA_P Parameter: Temperature (deg C) Value: 42 vs. 22
  misc_feature: MA Experiment 20000112 PARAMETER Experiment Name: At_42deg_Heat_cDNA_P Parameter: Timepoint (hr) Value: 2
  misc_feature: MA Experiment 20000112 PARAMETER Experiment Name: At_42deg_Heat_cDNA_P Parameter: Tissue Value: Aerial
  misc_feature: MA Experiment ID: 20000171 Result: Up-regulated in Transcription
  misc_feature: MA Experiment 20000171 PARAMETER Experiment Name: At_42deg_Heat_P Parameter: Age (day) Value: 14
  misc_feature: MA Experiment 20000171 PARAMETER Experiment Name: At_42deg_Heat_P Parameter: Organism Value: A. thaliana
  misc_feature: MA Experiment 20000171 PARAMETER Experiment Name: At_42deg_Heat_P Parameter: Plant Line Value: WS
  misc_feature: MA Experiment 20000171 PARAMETER Experiment Name: At_42deg_Heat_P Parameter: Temperature (deg C) Value: 42 vs. 22
  misc_feature: MA Experiment 20000171 PARAMETER Experiment Name: At_42deg_Heat_P Parameter: Timepoint (hr) Value: 1
  misc_feature: MA Experiment 20000171 PARAMETER Experiment Name: At_42deg_Heat_P Parameter: Tissue Value: Aerial
  misc_feature: MA Experiment ID: 20000173 Result: Up-regulated in Transcription
  misc_feature: MA Experiment 20000173 PARAMETER Experiment Name: At_42deg_Heat_P Parameter: Age (day) Value: 14
  misc_feature: MA Experiment 20000173 PARAMETER Experiment Name: At_42deg_Heat_P Parameter: Organism Value: A. thaliana
  misc_feature: MA Experiment 20000173 PARAMETER Experiment Name: At_42deg_Heat_P Parameter: Plant Line Value: WS
  misc_feature: MA Experiment 20000173 PARAMETER Experiment Name: At_42deg_Heat_P Parameter: Temperature (deg C) Value: 42 vs. 22
  misc_feature: MA Experiment 20000173 PARAMETER Experiment Name: At_42deg_Heat_P Parameter: Timepoint (hr) Value: 6
  misc_feature: MA Experiment 20000173 PARAMETER Experiment Name: At_42deg_Heat_P Parameter: Tissue Value: Aerial
  misc_feature: MA Experiment ID: 20000234 Result: Down-regulated in Transcription
  misc_feature: MA Experiment 20000234 PARAMETER Experiment Name: At_Siliques_P Parameter: Age (day) Value: 21
  misc_feature: MA Experiment 20000234 PARAMETER Experiment Name: At_Siliques_P Parameter: Organism Value: A. thaliana
  misc_feature: MA Experiment 20000234 PARAMETER Experiment Name: At_Siliques_P Parameter: Plant Line Value: WS
  misc_feature: MA Experiment 20000234 PARAMETER Experiment Name: At_Siliques_P Parameter: Tissue Value: Less Than 5mm Siliques vs. Whole Plant
  misc_feature: MA Experiment ID: 20000235 Result: Down-regulated in Transcription
  misc_feature: MA Experiment 20000235 PARAMETER Experiment Name: At_Siliques_P Parameter: Age (day) Value: 21
  misc_feature: MA Experiment 20000235 PARAMETER Experiment Name: At_Siliques_P Parameter: Organism Value: A. thaliana
  misc_feature: MA Experiment 20000235 PARAMETER Experiment Name: At_Siliques_P Parameter: Plant Line Value: WS
  misc_feature: MA Experiment 20000235 PARAMETER Experiment Name: At_Siliques_P Parameter: Tissue Value: 5-10mm Siliques vs. Whole Plant
  misc_feature: MA Experiment ID: 20000264 Result: Down-regulated in Transcription
  misc_feature: MA Experiment 20000264 PARAMETER Experiment Name: At_Open_Flower_P Parameter: Age (day) Value: 21
  misc_feature: MA Experiment 20000264 PARAMETER Experiment Name: At_Open_Flower_P Parameter: Plant Line Value: WS
  misc_feature: MA Experiment 20000264 PARAMETER Experiment Name: At_Open_Flower_P Parameter: Tissue Value: Open Flower vs. Whole Plant
  misc_feature: MA Experiment ID: 20000265 Result: Down-regulated in Transcription
  misc_feature: MA Experiment 20000265 PARAMETER Experiment Name: At_Open_Flower_P Parameter: Age (day) Value: 21
  misc_feature: MA Experiment 20000265 PARAMETER Experiment Name: At_Open_Flower_P Parameter: Plant Line Value: WS
  misc_feature: MA Experiment 20000265 PARAMETER Experiment Name: At_Open_Flower_P Parameter: Tissue Value: Closed Flower vs. Whole Plant
  misc_feature: MA Experiment ID: 20000286 Result: Down-regulated in Transcription
  misc_feature: MA Experiment 20000286 PARAMETER Experiment Name: At_Open_Flower_P Parameter: Age (day) Value: 21
  misc_feature: MA Experiment 20000286 PARAMETER Experiment Name: At_Open_Flower_P Parameter: Plant Line Value: WS
  misc_feature: MA Experiment 20000286 PARAMETER Experiment Name: At_Open_Flower_P Parameter: Tissue Value: Half Open vs. Whole Plant
  misc_feature: MA Experiment ID: 20001450 Result: Up-regulated in Transcription
  misc_feature: MA Experiment 20001450 PARAMETER Experiment Name: At_Far-red-induction_P Parameter: Age (day) Value: 7
  misc_feature: MA Experiment 20001450 PARAMETER Experiment Name: At_Far-red-induction_P Parameter: Light Value: Far-red vs. White
  misc_feature: MA Experiment 20001450 PARAMETER Experiment Name: At_Far-red-induction_P Parameter: Organism Value: A. thaliana
  misc_feature: MA Experiment 20001450 PARAMETER Experiment Name: At_Far-red-induction_P Parameter: Plant Line Value: Columbia
  misc_feature: MA Experiment 20001450 PARAMETER Experiment Name: At_Far-red-induction_P Parameter: Timepoint (hr) Value: 8
  misc_feature: MA Experiment 20001450 PARAMETER Experiment Name: At_Far-red-induction_P Parameter: Tissue Value: Whole Plant
  misc_feature: MA Experiment ID: 20001557 Result: Down-regulated in Transcription
  misc_feature: MA Experiment 20001557 PARAMETER Experiment Name: At_Drought_Soil_Dry_P Parameter: Age (day) Value: 27
  misc_feature: MA Experiment 20001557 PARAMETER Experiment Name: At_Drought_Soil_Dry_P Parameter: Organism Value: A. thaliana
  misc_feature: MA Experiment 20001557 PARAMETER Experiment Name: At_Drought_Soil_Dry_P Parameter: Plant Line Value: WS
  misc_feature: MA Experiment 20001557 PARAMETER Experiment Name: At_Drought_Soil_Dry_P Parameter: Post Timepoint (hr) Value: 3
  misc_feature: MA Experiment 20001557 PARAMETER Experiment Name: At_Drought_Soil_Dry_P Parameter: Post-Treatment Value: Re-Water vs. No Drought
  misc_feature: MA Experiment 20001557 PARAMETER Experiment Name: At_Drought_Soil_Dry_P Parameter: Timepoint (day) Value: 13
  misc_feature: MA Experiment 20001557 PARAMETER Experiment Name: At_Drought_Soil_Dry_P Parameter: Treatment Value: Drought vs. No Drought
  misc_feature: MA Experiment ID: 20001558 Result: Down-regulated in Transcription
  misc_feature: MA Experiment 20001558 PARAMETER Experiment Name: At_Drought_Soil_Dry_P Parameter: Age (day) Value: 27
  misc_feature: MA Experiment 20001558 PARAMETER Experiment Name: At_Drought_Soil_Dry_P Parameter: Organism Value: A. thaliana
  misc_feature: MA Experiment 20001558 PARAMETER Experiment Name: At_Drought_Soil_Dry_P Parameter: Plant Line Value: WS
  misc_feature: MA Experiment 20001558 PARAMETER Experiment Name: At_Drought_Soil_Dry_P Parameter: Post Timepoint (hr) Value: 6
  misc_feature: MA Experiment 20001558 PARAMETER Experiment Name: At_Drought_Soil_Dry_P Parameter: Post-Treatment Value: Re-Water vs. No Drought
  misc_feature: MA Experiment 20001558 PARAMETER Experiment Name: At_Drought_Soil_Dry_P Parameter: Timepoint (day) Value: 13
  misc_feature: MA Experiment 20001558 PARAMETER Experiment Name: At_Drought_Soil_Dry_P Parameter: Treatment Value: Drought vs. No Drought
  misc_feature: MA Experiment ID: 20001560 Result: Down-regulated in Transcription
  misc_feature: MA Experiment 20001560 PARAMETER Experiment Name: At_Drought_Soil_Dry_P Parameter: Age (day) Value: 28
  misc_feature: MA Experiment 20001560 PARAMETER Experiment Name: At_Drought_Soil_Dry_P Parameter: Organism Value: A. thaliana
  misc_feature: MA Experiment 20001560 PARAMETER Experiment Name: At_Drought_Soil_Dry_P Parameter: Plant Line Value: WS
  misc_feature: MA Experiment 20001560 PARAMETER Experiment Name: At_Drought_Soil_Dry_P Parameter: Post Timepoint (hr) Value: None
  misc_feature: MA Experiment 20001560 PARAMETER Experiment Name: At_Drought_Soil_Dry_P Parameter: Post-Treatment Value: None
  misc_feature: MA Experiment 20001560 PARAMETER Experiment Name: At_Drought_Soil_Dry_P Parameter: Timepoint (day) Value: 14
  misc_feature: MA Experiment 20001560 PARAMETER Experiment Name: At_Drought_Soil_Dry_P Parameter: Treatment Value: Drought vs. No Drought
  misc_feature: MA Experiment ID: 20001911 Result: Up-regulated in Transcription
  misc_feature: MA Experiment 20001911 PARAMETER Experiment Name: At_Drought_Reproduction_P Parameter: Age (day) Value: 40
  misc_feature: MA Experiment 20001911 PARAMETER Experiment Name: At_Drought_Reproduction_P Parameter: Organism Value: A. thaliana
  misc_feature: MA Experiment 20001911 PARAMETER Experiment Name: At_Drought_Reproduction_P Parameter: Plant Line Value: WS
  misc_feature: MA Experiment 20001911 PARAMETER Experiment Name: At_Drought_Reproduction_P Parameter: Timepoint (day) Value: 10
  misc_feature: MA Experiment 20001911 PARAMETER Experiment Name: At_Drought_Reproduction_P Parameter: Tissue Value: Flowers
  misc_feature: MA Experiment 20001911 PARAMETER Experiment Name: At_Drought_Reproduction_P Parameter: Treatment Value: Drought vs. No Drought

SEQ ID NO: 93918 - protein, 398 aa, Arabidopsis thaliana; identical to SEQ ID NO: 22998
  peptide (1)..(398): Ceres Seq. ID no. 12722653
  misc_feature (22)..(398): Homolog of NCBI NO: 18390898 NR Description: expressed protein; protein id: At1g08460.1, by cDNA: gi_15294161, supported by cDNA: gi_20453296 [Arabidopsis >gi|15294162|gb|AAK95258.1|AF410272_1 At1g08460/T27G7_7
  misc_feature (22)..(298): Homolog of NCBI NO: 25407044 NR Description: protein T27G7.14 [imported] - Arabidopsis >gi|6664310|gb|AAF22892.1|AC006932_9 T27G7.14 [Arabidopsis
  misc_feature (299)..(398): Homolog of NCBI NO: 25407044 NR Description: protein T27G7.14 [imported] - Arabidopsis >gi|6664310|gb|AAF22892.1|AC006932_9 T27G7.14 [Arabidopsis
  misc_feature (70)..(398): Homolog of NCBI NO: 16226923 NR Description: At1g08460/T27G7_7 [Arabidopsis thaliana]
  misc_feature (60)..(377): Homolog of NCBI NO: 15598969 NR Description: probable acetylpolyamine aminohydrolase aeruginosa PA01] >gi|11350855|pir||D83174 probable
  misc_feature (60)..(377): Homolog of NCBI NO: 32038919 NR Description: hypothetical protein [Pseudomonas aeruginosa
  misc_feature (4)..(367): Homolog of NCBI NO: 22959308 NR Description: hypothetical protein [Rhodobacter sphaeroides]
  misc_feature (30)..(367): Homolog of NCBI NO: 37526255 NR Description: hypothetical protein [Photorhabdus luminescens laumondii TTO1] >gi|36785685|emb|CAE14646.1| unnamed protein
  misc_feature (60)..(391): Homolog of NCBI NO: 11497747 NR Description: acetylpolyamine aminohydrolase (aphA) fulgidus] >gi|3024859|sp|O30107|Y130_ARCFU Hypothetical protein >gi|7430157|pir||B69266 acetylpolyamine aminohydrolase (aphA)
  misc_feature (58)..(398): Homolog of NCBI NO: 18401915 NR Description: histone deacetylase, putative; protein id:

SEQ ID NO: 93919 - protein, 377 aa, Arabidopsis thaliana; identical to SEQ ID NO: 22999
  peptide (1)..(377): Ceres Seq. ID no. 12722654
  misc_feature (1)..(377): Homolog of NCBI NO: 18390898 NR Description: expressed protein; protein id: At1g08460.1, by cDNA: gi_15294161, supported by cDNA: gi_20453296 [Arabidopsis >gi|15294162|gb|AAK95258.1|AF410272_1 At1g08460/T27G7_7
  misc_feature (1)..(277): Homolog of NCBI NO: 25407044 NR Description: protein T27G7.14 [imported] - Arabidopsis >gi|6664310|gb|AAF22892.1|AC006932_9 T27G7.14 [Arabidopsis
  misc_feature (278)..(377): Homolog of NCBI NO: 25407044 NR Description: protein T27G7.14 [imported] - Arabidopsis >gi|6664310|gb|AAF22892.1|AC006932_9 T27G7.14 [Arabidopsis
  misc_feature (49)..(377): Homolog of NCBI NO: 16226923 NR Description: At1g08460/T27G7_7 [Arabidopsis thaliana]
  misc_feature (39)..(356): Homolog of NCBI NO: 15598969 NR Description: probable acetylpolyamine aminohydrolase aeruginosa PA01] >gi|11350855|pir||D83174 probable
  misc_feature (39)..(356): Homolog of NCBI NO: 32038919 NR Description: hypothetical protein [Pseudomonas aeruginosa
  misc_feature (1)..(346): Homolog of NCBI NO: 22959308 NR Description: hypothetical protein [Rhodobacter sphaeroides]
  misc_feature (9)..(346): Homolog of NCBI NO: 37526255 NR Description: hypothetical protein [Photorhabdus luminescens laumondii TTO1] >gi|36785685|emb|CAE14646.1| unnamed protein
  misc_feature (39)..(370): Homolog of NCBI NO: 11497747 NR Description: acetylpolyamine aminohydrolase (aphA) fulgidus] >gi|3024859|sp|O30107|Y130_ARCFU Hypothetical protein >gi|7430157|pir||B69266 acetylpolyamine aminohydrolase (aphA)
  misc_feature (37)..(377): Homolog of NCBI NO: 18401915 NR Description: histone deacetylase, putative; protein id:

SEQ ID NO: 93920 - protein, 364 aa, Arabidopsis thaliana; identical to SEQ ID NO: 23000
  peptide (1)..(364): Ceres Seq. ID no. 12722655
  misc_feature (1)..(364): Homolog of NCBI NO: 18390898 NR Description: expressed protein; protein id: At1g08460.1, by cDNA: gi_15294161, supported by cDNA: gi_20453296 [Arabidopsis >gi|15294162|gb|AAK95258.1|AF410272_1 At1g08460/T27G7_7
  misc_feature (1)..(264): Homolog of NCBI NO: 25407044 NR Description: protein T27G7.14 [imported] - Arabidopsis >gi|6664310|gb|AAF22892.1|AC006932_9 T27G7.14 [Arabidopsis
  misc_feature (265)..(364): Homolog of NCBI NO: 25407044 NR Description: protein T27G7.14 [imported] - Arabidopsis >gi|6664310|gb|AAF22892.1|AC006932_9 T27G7.14 [Arabidopsis
  misc_feature (36)..(364): Homolog of NCBI NO: 16226923 NR Description: At1g08460/T27G7_7 [Arabidopsis thaliana]
  misc_feature (26)..(343): Homolog of NCBI NO: 15598969 NR Description: probable acetylpolyamine aminohydrolase aeruginosa PA01] >gi|11350855|pir||D83174 probable
  misc_feature (26)..(343): Homolog of NCBI NO: 32038919 NR Description: hypothetical protein [Pseudomonas aeruginosa
  misc_feature (1)..(333): Homolog of NCBI NO: 22959308 NR Description: hypothetical protein [Rhodobacter sphaeroides]
  misc_feature (1)..(333): Homolog of NCBI NO: 37526255 NR Description: hypothetical protein [Photorhabdus luminescens laumondii TTO1] >gi|36785685|emb|CAE14646.1| unnamed protein
  misc_feature (26)..(357): Homolog of NCBI NO: 11497747 NR Description: acetylpolyamine aminohydrolase (aphA) fulgidus] >gi|3024859|sp|O30107|Y130_ARCFU Hypothetical protein >gi|7430157|pir||B69266 acetylpolyamine aminohydrolase (aphA)
  misc_feature (24)..(364): Homolog of NCBI NO: 18401915 NR Description: histone deacetylase, putative; protein id:

SEQ ID NO: 93921 - DNA, 1156 bp, Arabidopsis thaliana; identical to SEQ ID NO: 90165
  misc_feature (1)..(1156): Ceres Seq. ID no. 12722660
  misc_feature: MA Experiment ID: 20000185 Result: Down-regulated in Transcription
  misc_feature: MA Experiment 20000185 PARAMETER Experiment Name: At_Roots__P Parameter: Age (day) Value: 7 vs. 21
  misc_feature: MA Experiment 20000185 PARAMETER Experiment Name: At_Roots__P Parameter: Organism Value: A. thaliana
  misc_feature: MA Experiment 20000185 PARAMETER Experiment Name: At_Roots__P Parameter: Tissue Value: Roots vs. Whole Plant
  misc_feature: MA Experiment ID: 20000234 Result: Up-regulated in Transcription
  misc_feature: MA Experiment 20000234 PARAMETER Experiment Name: At_Siliques_P Parameter: Age (day) Value: 21
  misc_feature: MA Experiment 20000234 PARAMETER Experiment Name: At_Siliques_P Parameter: Organism Value: A. thaliana
  misc_feature: MA Experiment 20000234 PARAMETER Experiment Name: At_Siliques_P Parameter: Plant Line Value: WS
  misc_feature: MA Experiment 20000234 PARAMETER Experiment Name: At_Siliques_P Parameter: Tissue Value: Less Than 5mm Siliques vs. Whole Plant
  misc_feature: MA Experiment ID: 20000235 Result: Up-regulated in Transcription
  misc_feature: MA Experiment 20000235 PARAMETER Experiment Name: At_Siliques_P Parameter: Age (day) Value: 21
  misc_feature: MA Experiment 20000235 PARAMETER Experiment Name: At_Siliques_P Parameter: Organism Value: A. thaliana
  misc_feature: MA Experiment 20000235 PARAMETER Experiment Name: At_Siliques_P Parameter: Plant Line Value: WS
  misc_feature: MA Experiment 20000235 PARAMETER Experiment Name: At_Siliques_P Parameter: Tissue Value: 5-10mm Siliques vs. Whole Plant
  misc_feature: MA Experiment ID: 20000264 Result: Up-regulated in Transcription
  misc_feature: MA Experiment 20000264 PARAMETER Experiment Name: At_Open_Flower_P Parameter: Age (day) Value: 21
  misc_feature: MA Experiment 20000264 PARAMETER Experiment Name: At_Open_Flower_P Parameter: Plant Line Value: WS
  misc_feature: MA Experiment 20000264 PARAMETER Experiment Name: At_Open_Flower_P Parameter: Tissue Value: Open Flower vs. Whole Plant
  misc_feature: MA Experiment ID: 20000265 Result: Up-regulated in Transcription
  misc_feature: MA Experiment 20000265 PARAMETER Experiment Name: At_Open_Flower_P Parameter: Age (day) Value: 21
  misc_feature: MA Experiment 20000265 PARAMETER Experiment Name: At_Open_Flower_P Parameter: Plant Line Value: WS
  misc_feature: MA Experiment 20000265 PARAMETER Experiment Name: At_Open_Flower_P Parameter: Tissue Value: Closed Flower vs. Whole Plant
  misc_feature: MA Experiment ID: 20000439 Result: Down-regulated in Transcription
  misc_feature: MA Experiment 20000439 PARAMETER Experiment Name: At_Roots__P Parameter: Age (day) Value: 14 vs. 21
  misc_feature: MA Experiment 20000439 PARAMETER Experiment Name: At_Roots__P Parameter: Organism Value: A. thaliana
  misc_feature: MA Experiment 20000439 PARAMETER Experiment Name: At_Roots__P Parameter: Tissue Value: Roots vs. Whole Plant
  misc_feature: MA Experiment ID: 20000794 Result: Up-regulated in Transcription
  misc_feature: MA Experiment 20000794 PARAMETER Experiment Name: At_Petals_P Parameter: Age (day) Value: 23-25 days
  misc_feature: MA Experiment 20000794 PARAMETER Experiment Name: At_Petals_P Parameter: Plant Line Value: WS
  misc_feature: MA Experiment 20000794 PARAMETER Experiment Name: At_Petals_P Parameter: Tissue Value: Petals vs. Whole plant

SEQ ID NO: 93922 - protein, 96 aa, Arabidopsis thaliana; identical to SEQ ID NO: 90166
  peptide (1)..(96): Ceres Seq. ID no. 12722661
  misc_feature (1)..(79): Pfam Name: YABBY protein Pfam Description: YABBY protein
  misc_feature (1)..(79): Homolog of NCBI NO: 6664311 NR Description: T27G7.15 [Arabidopsis thaliana]
  misc_feature (1)..(96): Homolog of NCBI NO: 4928751 NR Description: YABBY2 [Arabidopsis thaliana]
  misc_feature (6)..(52): Homolog of NCBI NO: 18411242 NR Description: putative YABBY3 axial regulator; protein id: supported by cDNA: gi_14335013, supported by cDNA: gi_4928752 thaliana] >gi|4928753|gb|AAD33717.1|AF136540_1 YABBY3
  misc_feature (6)..(96): Homolog of NCBI NO: 30683176 NR Description: expressed protein [Arabidopsis thaliana] expressed protein [Arabidopsis thaliana] unknown protein [Arabidopsis thaliana]
  misc_feature (6)..(50): Homolog of NCBI NO: 7486543 NR Description: hypothetical protein F6N15.22 - Arabidopsis >gi|3193331|gb|AAC19313.1| F6N15.22 gene product [Arabidopsis >gi|7267105|emb|CAB80776.1| putative YABBY3 axial regulator
  misc_feature (8)..(96): Homolog of NCBI NO: 11280864 NR Description: hypothetical protein 2 [imported] - rice
  misc_feature (8)..(64): Homolog of NCBI NO: 38605890 NR Description: OSJNBb0020O11.2 [Oryza sativa (japonica
  misc_feature (1)..(96): Homolog of NCBI NO: 11280863 NR Description: hypothetical protein [imported] - rice
  misc_feature (1)..(96): Homolog of NCBI NO: 33146736 NR Description: putative MADS-box transcription factor CDM51
  misc_feature (1)..(61): Homolog of NCBI NO: 37535908 NR Description: hypothetical protein [Oryza sativa (japonica group)] >gi|22267600|gb|AAM94935.1| putative transcription factor

SEQ ID NO: 93923 - protein, 89 aa, Arabidopsis thaliana; identical to SEQ ID NO: 90167
  peptide (1)..(89): Ceres Seq. ID no. 12722662

SEQ ID NO: 93924 - protein, 62 aa, Arabidopsis thaliana; identical to SEQ ID NO: 90168
  peptide (1)..(62): Ceres Seq. ID no. 12722663

SEQ ID NO: 93925 - DNA, 3126 bp, Arabidopsis thaliana; identical to SEQ ID NO: 90169
  misc_feature (1)..(3126): Ceres Seq. ID no. 12722728
  misc_feature: MA Experiment ID: 20000306 Result: Up-regulated in Transcription
  misc_feature: MA Experiment 20000306 PARAMETER Experiment Name: At_Germinating_Seeds_Sub_P Parameter: Age (hr) Value: 6 vs. 0
  misc_feature: MA Experiment 20000306 PARAMETER Experiment Name: At_Germinating_Seeds_Sub_P Parameter: Organism Value: A. thaliana
  misc_feature: MA Experiment 20000306 PARAMETER Experiment Name: At_Germinating_Seeds_Sub_P Parameter: Plant Line Value: WS
  misc_feature: MA Experiment 20000306 PARAMETER Experiment Name: At_Germinating_Seeds_Sub_P Parameter: Tissue Value: Germinating Seeds
  misc_feature: MA Experiment ID: 20000307 Result: Up-regulated in Transcription
  misc_feature: MA Experiment 20000307 PARAMETER Experiment Name: At_Germinating_Seeds_Sub_P Parameter: Age (hr) Value: 24 vs. 0
  misc_feature: MA Experiment 20000307 PARAMETER Experiment Name: At_Germinating_Seeds_Sub_P Parameter: Organism Value: A. thaliana
  misc_feature: MA Experiment 20000307 PARAMETER Experiment Name: At_Germinating_Seeds_Sub_P Parameter: Plant Line Value: WS
  misc_feature: MA Experiment 20000307 PARAMETER Experiment Name: At_Germinating_Seeds_Sub_P Parameter: Tissue Value: Germinating Seeds
  misc_feature: MA Experiment ID: 20000315 Result: Down-regulated in Transcription
  misc_feature: MA Experiment 20000315 PARAMETER Experiment Name: At_14day_Shoots-Roots_Sub_P Parameter: Age (day) Value: 14
  misc_feature: MA Experiment 20000315 PARAMETER Experiment Name: At_14day_Shoots-Roots_Sub_P Parameter: Organism Value: A. thaliana
  misc_feature: MA Experiment 20000315 PARAMETER Experiment Name: At_14day_Shoots-Roots_Sub_P Parameter: Plant Line Value: WS
  misc_feature: MA Experiment 20000315 PARAMETER Experiment Name: At_14day_Shoots-Roots_Sub_P Parameter: Tissue Value: Shoots vs. Whole Plant

SEQ ID NO: 93926 - protein, 818 aa, Arabidopsis thaliana; identical to SEQ ID NO: 90170
  peptide (1)..(818): Ceres Seq. ID no. 12722729
  misc_feature (88)..(149): Pfam Name: SacI homology domain Pfam Description: SacI homology domain
  misc_feature (15)..(810): Homolog of NCBI NO: 18400310 NR Description: Expressed protein; protein id: At3g14205.1, by cDNA: gi_15215805, supported by cDNA: gi_20334797 [Arabidopsis >gi|15215806|gb|AAK91448.1| At3g14201 [Arabidopsis thaliana]
  misc_feature (15)..(438): Homolog of NCBI NO: 15217295 NR Description: Putative phosphoinositide phosphatase [Oryza
  misc_feature (442)..(818): Homolog of NCBI NO: 15217295 NR Description: Putative phosphoinositide phosphatase [Oryza
  misc_feature (15)..(810): Homolog of NCBI NO: 9294649 NR Description: gb|AAC25523.1~gene_id:MAG2.20~similar to unknown
  misc_feature (1)..(613): Homolog of NCBI NO: 22329733 NR Description: unknown protein; protein id: At1g22620.1,
  misc_feature (15)..(423): Homolog of NCBI NO: 22329625 NR Description: unknown protein; protein id: At1g17340.1, by cDNA: gi_20147340 [Arabidopsis thaliana] At1g17340/F28G4_6 [Arabidopsis thaliana]
  misc_feature (476)..(639): Homolog of NCBI NO: 22329625 NR Description: unknown protein; protein id: At1g17340.1, by cDNA: gi_20147340 [Arabidopsis thaliana] At1g17340/F28G4_6 [Arabidopsis thaliana]
  misc_feature (1)..(433): Homolog of NCBI NO: 6587828 NR Description: Hypothetical protein [Arabidopsis thaliana]
  misc_feature (1)..(433): Homolog of NCBI NO: 7487361 NR Description: hypothetical protein T22J18.20 - Arabidopsis >gi|3287695|gb|AAC25523.1|AAC25523 Similar to hypothetical C34B7.2 gb|1729503 from C. elegans cosmid gb|Z83220. [Arabidopsis
  misc_feature (188)..(411): Homolog of NCBI NO: 7662034 NR Description: Sac domain-containing inositol phosphatase 3; gene product [Homo sapiens] >gi|2497367|sp|Q92562|Y274_HUMAN protein KIAA0274 >gi|1665813|dbj|BAA13403.1| Similar

SEQ ID NO: 93927 - protein, 790 aa, Arabidopsis thaliana; identical to SEQ ID NO: 90171
  peptide (1)..(790): Ceres Seq. ID no. 12722730
  misc_feature (60)..(121): Pfam Name: SacI homology domain Pfam Description: SacI homology domain
  misc_feature (1)..(782): Homolog of NCBI NO: 18400310 NR Description: Expressed protein; protein id: At3g14205.1, by cDNA: gi_15215805, supported by cDNA: gi_20334797 [Arabidopsis >gi|15215806|gb|AAK91448.1| At3g14201 [Arabidopsis thaliana]
  misc_feature (1)..(410): Homolog of NCBI NO: 15217295 NR Description: Putative phosphoinositide phosphatase [Oryza
  misc_feature (414)..(790): Homolog of NCBI NO: 15217295 NR Description: Putative phosphoinositide phosphatase [Oryza
  misc_feature (1)..(782): Homolog of NCBI NO: 9294649 NR Description: gb|AAC25523.1~gene_id:MAG2.20~similar to unknown
  misc_feature (1)..(585): Homolog of NCBI NO: 22329733 NR Description: unknown protein; protein id: At1g22620.1,
  misc_feature (1)..(395): Homolog of NCBI NO: 22329625 NR Description: unknown protein; protein id: At1g17340.1, by cDNA: gi_20147340 [Arabidopsis thaliana] At1g17340/F28G4_6 [Arabidopsis thaliana]
  misc_feature (448)..(611): Homolog of NCBI NO: 22329625 NR Description: unknown protein; protein id: At1g17340.1, by cDNA: gi_20147340 [Arabidopsis thaliana] At1g17340/F28G4_6 [Arabidopsis thaliana]
  misc_feature (1)..(405): Homolog of NCBI NO: 6587828 NR Description: Hypothetical protein [Arabidopsis thaliana]
  misc_feature (1)..(405): Homolog of NCBI NO: 7487361 NR Description: hypothetical protein T22J18.20 - Arabidopsis >gi|3287695|gb|AAC25523.1|AAC25523 Similar to hypothetical C34B7.2 gb|1729503 from C. elegans cosmid gb|Z83220. [Arabidopsis
  misc_feature (160)..(383): Homolog of NCBI NO: 7662034 NR Description: Sac domain-containing inositol phosphatase 3; gene product [Homo sapiens] >gi|2497367|sp|Q92562|Y274_HUMAN protein KIAA0274 >gi|1665813|dbj|BAA13403.1| Similar

SEQ ID NO: 93928 - protein, 716 aa, Arabidopsis thaliana; identical to SEQ ID NO: 90172
  peptide (1)..(716): Ceres Seq. ID no. 12722731
  misc_feature (63)..(292): Pfam Name: SacI homology domain Pfam Description: SacI homology domain
  misc_feature (1)..(708): Homolog of NCBI NO: 18400310 NR Description: Expressed protein; protein id: At3g14205.1, by cDNA: gi_15215805, supported by cDNA: gi_20334797 [Arabidopsis >gi|15215806|gb|AAK91448.1| At3g14201 [Arabidopsis thaliana]
  misc_feature (1)..(336): Homolog of NCBI NO: 15217295 NR Description: Putative phosphoinositide phosphatase [Oryza
  misc_feature (340)..(716): Homolog of NCBI NO: 15217295 NR Description: Putative phosphoinositide phosphatase [Oryza
  misc_feature (1)..(708): Homolog of NCBI NO: 9294649 NR Description: gb|AAC25523.1~gene_id:MAG2.20~similar to unknown
  misc_feature (1)..(511): Homolog of NCBI NO: 22329733 NR Description: unknown protein; protein id: At1g22620.1,
  misc_feature (1)..(321): Homolog of NCBI NO: 22329625 NR Description: unknown protein; protein id: At1g17340.1, by cDNA: gi_20147340 [Arabidopsis thaliana] At1g17340/F28G4_6 [Arabidopsis thaliana]
  misc_feature (374)..(537): Homolog of NCBI NO: 22329625 NR Description: unknown protein; protein id: At1g17340.1, by cDNA: gi_20147340 [Arabidopsis thaliana] At1g17340/F28G4_6 [Arabidopsis thaliana]
  misc_feature (1)..(331): Homolog of NCBI NO: 6587828 NR Description: Hypothetical protein [Arabidopsis thaliana]
  misc_feature (1)..(331): Homolog of NCBI NO: 7487361 NR Description: hypothetical protein T22J18.20 - Arabidopsis >gi|3287695|gb|AAC25523.1|AAC25523 Similar to hypothetical C34B7.2 gb|1729503 from C. elegans cosmid gb|Z83220. [Arabidopsis
  misc_feature (86)..(309): Homolog of NCBI NO: 7662034 NR Description: Sac domain-containing inositol phosphatase 3; gene product [Homo sapiens] >gi|2497367|sp|Q92562|Y274_HUMAN protein KIAA0274 >gi|1665813|dbj|BAA13403.1| Similar

SEQ ID NO: 93929 - DNA, 3690 bp, Arabidopsis thaliana; identical to SEQ ID NO: 90173
  misc_feature (1)..(3690): Ceres Seq. ID no. 12722872
  misc_feature: MA Experiment ID: 20000180 Result: Up-regulated in Transcription
  misc_feature: MA Experiment 20000180 PARAMETER Experiment Name: At_Germinating_Seeds_P Parameter: Age (hr) Value: 24 vs. 0
  misc_feature: MA Experiment 20000180 PARAMETER Experiment Name: At_Germinating_Seeds_P Parameter: Tissue Value: Germinating Seeds
  misc_feature: MA Experiment ID: 20000185 Result: Up-regulated in Transcription
  misc_feature: MA Experiment 20000185 PARAMETER Experiment Name: At_Roots__P Parameter: Age (day) Value: 7 vs. 21
  misc_feature: MA Experiment 20000185 PARAMETER Experiment Name: At_Roots__P Parameter: Organism Value: A. thaliana
  misc_feature: MA Experiment 20000185 PARAMETER Experiment Name: At_Roots__P Parameter: Tissue Value: Roots vs. Whole Plant
  misc_feature: MA Experiment ID: 20000227 Result: Up-regulated in Transcription
  misc_feature: MA Experiment 20000227 PARAMETER Experiment Name: At_Root-Tips-vs-Tops_P Parameter: Tissue Value: Root Tips vs. Root Tops
  misc_feature: MA Experiment ID: 20000234 Result: Up-regulated in Transcription
  misc_feature: MA Experiment 20000234 PARAMETER Experiment Name: At_Siliques_P Parameter: Age (day) Value: 21
  misc_feature: MA Experiment 20000234 PARAMETER Experiment Name: At_Siliques_P Parameter: Organism Value: A. thaliana
  misc_feature: MA Experiment 20000234 PARAMETER Experiment Name: At_Siliques_P Parameter: Plant Line Value: WS
  misc_feature: MA Experiment 20000234 PARAMETER Experiment Name: At_Siliques_P Parameter: Tissue Value: Less Than 5mm Siliques vs. Whole Plant
  misc_feature: MA Experiment ID: 20000235 Result: Up-regulated in Transcription
  misc_feature: MA Experiment 20000235 PARAMETER Experiment Name: At_Siliques_P Parameter: Age (day) Value: 21
  misc_feature: MA Experiment 20000235 PARAMETER Experiment Name: At_Siliques_P Parameter: Organism Value: A. thaliana
  misc_feature: MA Experiment 20000235 PARAMETER Experiment Name: At_Siliques_P Parameter: Plant Line Value: WS
  misc_feature: MA Experiment 20000235 PARAMETER Experiment Name: At_Siliques_P Parameter: Tissue Value: 5-10mm Siliques vs. Whole Plant
  misc_feature: MA Experiment ID: 20000264 Result: Up-regulated in Transcription
  misc_feature: MA Experiment 20000264 PARAMETER Experiment Name: At_Open_Flower_P Parameter: Age (day) Value: 21
  misc_feature: MA Experiment 20000264 PARAMETER Experiment Name: At_Open_Flower_P Parameter: Plant Line Value: WS
  misc_feature: MA Experiment 20000264 PARAMETER Experiment Name: At_Open_Flower_P Parameter: Tissue Value: Open Flower vs. Whole Plant
  misc_feature: MA Experiment ID: 20000265 Result: Up-regulated in Transcription
  misc_feature: MA Experiment 20000265 PARAMETER Experiment Name: At_Open_Flower_P Parameter: Age (day) Value: 21
  misc_feature: MA Experiment 20000265 PARAMETER Experiment Name: At_Open_Flower_P Parameter: Plant Line Value: WS
  misc_feature: MA Experiment 20000265 PARAMETER Experiment Name: At_Open_Flower_P Parameter: Tissue Value: Closed Flower vs. Whole Plant
  misc_feature: MA Experiment ID: 20000286 Result: Up-regulated in Transcription
  misc_feature: MA Experiment 20000286 PARAMETER Experiment Name: At_Open_Flower_P Parameter: Age (day) Value: 21
  misc_feature: MA Experiment 20000286 PARAMETER Experiment Name: At_Open_Flower_P Parameter: Plant Line Value: WS
  misc_feature: MA Experiment 20000286 PARAMETER Experiment Name: At_Open_Flower_P Parameter: Tissue Value: Half Open vs. Whole Plant

SEQ ID NO: 93930 - protein, 1229 aa, Arabidopsis thaliana; identical to SEQ ID NO: 90174
  peptide (1)..(1229): Ceres Seq. ID no. 12722873
  misc_feature (505)..(1209): Pfam Name: Myosin tail Pfam Description: Myosin tail
  misc_feature (75)..(1196): Homolog of NCBI NO: 40539007 NR Description: kinesin-like protein [Oryza sativa (japonica
  misc_feature (80)..(1220): Homolog of NCBI NO: 9280323 NR Description: kinesin (centromeric protein)-like protein
  misc_feature (16)..(1153): Homolog of NCBI NO: 27261081 NR Description: OJ1340_C08.3 [Oryza sativa (japonica
  misc_feature (80)..(1229): Homolog of NCBI NO: 22331168 NR Description: kinesin-related protein; protein id: At3g19050.1
  misc_feature (411)..(1064): Homolog of NCBI NO: 11994553 NR Description: kinesin-related centromere protein-like
  misc_feature (5)..(410): Homolog of NCBI NO: 11994553 NR Description: kinesin-related centromere protein-like
  misc_feature (80)..(880): Homolog of NCBI NO: 15229030 NR Description: kinesin-related protein; protein id: At3g17360.1
  misc_feature (94)..(1204): Homolog of NCBI NO: 9887310 NR Description: kinesin-like protein KRP180 [Strongylocentrotus
  misc_feature (94)..(1220): Homolog of NCBI NO: 40644653 NR Description: kinesin family member 15 [Mus musculus]
  misc_feature (94)..(1220): Homolog of NCBI NO: 39930325 NR Description: kinesin-like 7; kinesin 15; kinesin family member N-10 kinesin [Mus musculus] >gi|38173736|gb|AAH60710.1| Knsl7

SEQ ID NO: 93931 - protein, 1172 aa, Arabidopsis thaliana; identical to SEQ ID NO: 90175
  peptide (1)..(1172): Ceres Seq. ID no. 12722874
  misc_feature (448)..(1152): Pfam Name: Myosin tail Pfam Description: Myosin tail
  misc_feature (18)..(1139): Homolog of NCBI NO: 40539007 NR Description: kinesin-like protein [Oryza sativa (japonica
  misc_feature (23)..(1163): Homolog of NCBI NO: 9280323 NR Description: kinesin (centromeric protein)-like protein
  misc_feature (1)..(1096): Homolog of NCBI NO: 27261081 NR Description: OJ1340_C08.3 [Oryza sativa (japonica
  misc_feature (23)..(1172): Homolog of NCBI NO: 22331168 NR Description: kinesin-related protein; protein id: At3g19050.1
  misc_feature (354)..(1007): Homolog of NCBI NO: 11994553 NR Description: kinesin-related centromere protein-like
  misc_feature (1)..(353): Homolog of NCBI NO: 11994553 NR Description: kinesin-related centromere protein-like
  misc_feature (23)..(823): Homolog of NCBI NO: 15229030 NR Description: kinesin-related protein; protein id: At3g17360.1
  misc_feature (37)..(1147): Homolog of NCBI NO: 9887310 NR Description: kinesin-like protein KRP180 [Strongylocentrotus
  misc_feature (37)..(1163): Homolog of NCBI NO: 40644653 NR Description: kinesin family member 15 [Mus musculus]
  misc_feature (37)..(1163): Homolog of NCBI NO: 39930325 NR Description: kinesin-like 7; kinesin 15; kinesin family member N-10 kinesin [Mus musculus] >gi|38173736|gb|AAH60710.1| Knsl7

SEQ ID NO: 93932 - protein, 1080 aa, Arabidopsis thaliana; identical to SEQ ID NO: 90176
  peptide (1)..(1080): Ceres Seq. ID no. 12722875
  misc_feature (356)..(1060): Pfam Name: Myosin tail Pfam Description: Myosin tail
  misc_feature (1)..(1047): Homolog of NCBI NO: 40539007 NR Description: kinesin-like protein [Oryza sativa (japonica
  misc_feature (1)..(1071): Homolog of NCBI NO: 9280323 NR Description: kinesin (centromeric protein)-like protein
  misc_feature (1)..(1004): Homolog of NCBI NO: 27261081 NR Description: OJ1340_C08.3 [Oryza sativa (japonica
  misc_feature (1)..(1080): Homolog of NCBI NO: 22331168 NR Description: kinesin-related protein; protein id: At3g19050.1
  misc_feature (262)..(915): Homolog of NCBI NO: 11994553 NR Description: kinesin-related centromere protein-like
  misc_feature (1)..(261): Homolog of NCBI NO: 11994553 NR Description: kinesin-related centromere protein-like
  misc_feature (1)..(731): Homolog of NCBI NO: 15229030 NR Description: kinesin-related protein; protein id: At3g17360.1
  misc_feature (1)..(1055): Homolog of NCBI NO: 9887310 NR Description: kinesin-like protein KRP180 [Strongylocentrotus
  misc_feature (1)..(1071): Homolog of NCBI NO: 40644653 NR Description: kinesin family member 15 [Mus musculus]
  misc_feature (1)..(1071): Homolog of NCBI NO: 39930325 NR Description: kinesin-like 7; kinesin 15; kinesin family member N-10 kinesin [Mus musculus] >gi|38173736|gb|AAH60710.1| Knsl7

SEQ ID NO: 93933 - DNA, 621 bp, Arabidopsis thaliana; identical to SEQ ID NO: 90177
  misc_feature (1)..(621): Ceres Seq. ID no. 12722895
  misc_feature: MA Experiment ID: 20000235 Result: Up-regulated in Transcription
  misc_feature: MA Experiment 20000235 PARAMETER Experiment Name: At_Siliques_P Parameter: Age (day) Value: 21
  misc_feature: MA Experiment 20000235 PARAMETER Experiment Name: At_Siliques_P Parameter: Organism Value: A. thaliana
  misc_feature: MA Experiment 20000235 PARAMETER Experiment Name: At_Siliques_P Parameter: Plant Line Value: WS
  misc_feature: MA Experiment 20000235 PARAMETER Experiment Name: At_Siliques_P Parameter: Tissue Value: 5-10mm Siliques vs. Whole Plant
  misc_feature: MA Experiment ID: 20000495 Result: Up-regulated in Transcription
  misc_feature: MA Experiment 20000495 PARAMETER Experiment Name: At_Guard_Cells_P Parameter: Harvest Date Value: 8/2/2002
  misc_feature: MA Experiment 20000495 PARAMETER Experiment Name: At_Guard_Cells_P Parameter: Organism Value: A. thaliana
  misc_feature: MA Experiment 20000495 PARAMETER Experiment Name: At_Guard_Cells_P Parameter: Tissue Value: Guard Cells vs. Leaves
  misc_feature: MA Experiment ID: 20001556 Result: Down-regulated in Transcription
  misc_feature: MA Experiment 20001556 PARAMETER Experiment Name: At_Drought_Soil_Dry_P Parameter: Age (day) Value: 26
  misc_feature: MA Experiment 20001556 PARAMETER Experiment Name: At_Drought_Soil_Dry_P Parameter: Organism Value: A. thaliana
  misc_feature: MA Experiment 20001556 PARAMETER Experiment Name: At_Drought_Soil_Dry_P Parameter: Plant Line Value: WS
  misc_feature: MA Experiment 20001556 PARAMETER Experiment Name: At_Drought_Soil_Dry_P Parameter: Post Timepoint (hr) Value: None
  misc_feature: MA Experiment 20001556 PARAMETER Experiment Name: At_Drought_Soil_Dry_P Parameter: Post-Treatment Value: None
  misc_feature: MA Experiment 20001556 PARAMETER Experiment Name: At_Drought_Soil_Dry_P Parameter: Timepoint (day) Value: 12
  misc_feature: MA Experiment 20001556 PARAMETER Experiment Name: At_Drought_Soil_Dry_P Parameter: Treatment Value: Drought vs. No Drought
  misc_feature: MA Experiment ID: 20001558 Result: Down-regulated in Transcription
  misc_feature: MA Experiment 20001558 PARAMETER Experiment Name: At_Drought_Soil_Dry_P Parameter: Age (day) Value: 27
  misc_feature: MA Experiment 20001558 PARAMETER Experiment Name: At_Drought_Soil_Dry_P Parameter: Organism Value: A. thaliana
  misc_feature: MA Experiment 20001558 PARAMETER Experiment Name: At_Drought_Soil_Dry_P Parameter: Plant Line Value: WS
  misc_feature: MA Experiment 20001558 PARAMETER Experiment Name: At_Drought_Soil_Dry_P Parameter: Post Timepoint (hr) Value: 6
  misc_feature: MA Experiment 20001558 PARAMETER Experiment Name: At_Drought_Soil_Dry_P Parameter: Post-Treatment Value: Re-Water vs. No Drought
  misc_feature: MA Experiment 20001558 PARAMETER Experiment Name: At_Drought_Soil_Dry_P Parameter: Timepoint (day) Value: 13
  misc_feature: MA Experiment 20001558 PARAMETER Experiment Name: At_Drought_Soil_Dry_P Parameter: Treatment Value: Drought vs. No Drought
  misc_feature: MA Experiment ID: 20001773 Result: Up-regulated in Transcription
  misc_feature: MA Experiment 20001773 PARAMETER Experiment Name: At_Far-red-enriched-adult_P Parameter: Age (day) Value: 30
  misc_feature: MA Experiment 20001773 PARAMETER Experiment Name: At_Far-red-enriched-adult_P Parameter: Light Value: Far-red enriched vs. White
  misc_feature: MA Experiment 20001773 PARAMETER Experiment Name: At_Far-red-enriched-adult_P Parameter: Organism Value: A. thaliana
  misc_feature: MA Experiment 20001773 PARAMETER Experiment Name: At_Far-red-enriched-adult_P Parameter: Plant Line Value: Columbia
  misc_feature: MA Experiment 20001773 PARAMETER Experiment Name: At_Far-red-enriched-adult_P Parameter: Timepoint (hr) Value: 48
  misc_feature: MA Experiment 20001773 PARAMETER Experiment Name: At_Far-red-enriched-adult_P Parameter: Tissue Value: Aerial

SEQ ID NO: 93934 - protein, 206 aa, Arabidopsis thaliana; identical to SEQ ID NO: 90178
  peptide (1)..(206): Ceres Seq. ID no. 12722896
  misc_feature (1)..(206): Homolog of NCBI NO: 15229906 NR Description: hairpin-induced protein, putative (HIN1); protein At3g44220.1 [Arabidopsis thaliana] >gi|11282595|pir||T49138
  misc_feature (1)..(206): Homolog of NCBI NO: 22326984 NR Description: similar to hairpin-induced protein, putative
  misc_feature (4)..(206): Homolog of NCBI NO: 15231227 NR Description: hairpin-induced protein, putative (HIN1); protein At3g52470.1, supported by cDNA: 92178., supported by cDNA: supported by cDNA: gi_21281063 [Arabidopsis thaliana]
  misc_feature (4)..(206): Homolog of NCBI NO: 18399308 NR Description: VAMP protein SEC22; protein id: At3g11660.1, by cDNA: 8166., supported by cDNA: gi_9502171 [Arabidopsis
  misc_feature (4)..(206): Homolog of NCBI NO: 28392929 NR Description: putative VAMP protein SEC22 [Arabidopsis thaliana]
  misc_feature (1)..(206): Homolog of NCBI NO: 15227538 NR Description: hairpin-induced protein, putative (HIN1); protein
  misc_feature (1)..(206): Homolog of NCBI NO: 15240001 NR Description: hairpin-induced protein, putative (HIN1); protein
  misc_feature (1)..(205): Homolog of NCBI NO: 15233951 NR Description: hairpin-induced protein, putative (HIN1); protein At4g09590.1 [Arabidopsis thaliana] >gi|25354574|pir||A85098
  misc_feature (1)..(205): Homolog of NCBI NO: 15227540 NR Description: hairpin-induced protein, putative (HIN1); protein
  misc_feature (1)..(206): Homolog of NCBI NO: 38637038 NR Description: harpin-induced protein 1 family (HIN1)-like

SEQ ID NO: 93935 - protein, 191 aa, Arabidopsis thaliana; identical to SEQ ID NO: 90179
  peptide (1)..(191): Ceres Seq. ID no. 12722897
  misc_feature (1)..(191): Homolog of NCBI NO: 15229906 NR Description: hairpin-induced protein, putative (HIN1); protein At3g44220.1 [Arabidopsis thaliana] >gi|11282595|pir||T49138
  misc_feature (1)..(191): Homolog of NCBI NO: 22326984 NR Description: similar to hairpin-induced protein, putative
  misc_feature (1)..(191): Homolog of NCBI NO: 15231227 NR Description: hairpin-induced protein, putative (HIN1); protein At3g52470.1, supported by cDNA: 92178., supported by cDNA: supported by cDNA: gi_21281063 [Arabidopsis thaliana]
  misc_feature (1)..(191): Homolog of NCBI NO: 18399308 NR Description: VAMP protein SEC22; protein id: At3g11660.1, by cDNA: 8166., supported by cDNA: gi_9502171 [Arabidopsis
  misc_feature (1)..(191): Homolog of NCBI NO: 28392929 NR Description: putative VAMP protein SEC22 [Arabidopsis thaliana]
  misc_feature (1)..(191): Homolog of NCBI NO: 15227538 NR Description: hairpin-induced protein, putative (HIN1); protein
  misc_feature (1)..(191): Homolog of NCBI NO: 15240001 NR Description: hairpin-induced protein, putative (HIN1); protein
  misc_feature (1)..(190): Homolog of NCBI NO: 15233951 NR Description: hairpin-induced protein, putative (HIN1); protein At4g09590.1 [Arabidopsis thaliana] >gi|25354574|pir||A85098
  misc_feature (1)..(190): Homolog of NCBI NO: 15227540 NR Description: hairpin-induced protein, putative (HIN1); protein
  misc_feature (1)..(191): Homolog of NCBI NO: 38637038 NR Description: harpin-induced protein 1 family (HIN1)-like

SEQ ID NO: 93936 - DNA, 1500 bp, Arabidopsis thaliana; identical to SEQ ID NO: 90180
  misc_feature (1)..(1500): Ceres Seq. ID no. 12722908
  misc_feature: MA Experiment ID: 20000173 Result: Up-regulated in Transcription
  misc_feature: MA Experiment 20000173 PARAMETER Experiment Name: At_42deg_Heat_P Parameter: Age (day) Value: 14
  misc_feature: MA Experiment 20000173 PARAMETER Experiment Name: At_42deg_Heat_P Parameter: Organism Value: A. thaliana
  misc_feature: MA Experiment 20000173 PARAMETER Experiment Name: At_42deg_Heat_P Parameter: Plant Line Value: WS
  misc_feature: MA Experiment 20000173 PARAMETER Experiment Name: At_42deg_Heat_P Parameter: Temperature (deg C) Value: 42 vs. 22
  misc_feature: MA Experiment 20000173 PARAMETER Experiment Name: At_42deg_Heat_P Parameter: Timepoint (hr) Value: 6
  misc_feature: MA Experiment 20000173 PARAMETER Experiment Name: At_42deg_Heat_P Parameter: Tissue Value: Aerial
  misc_feature: MA Experiment ID: 20000264 Result: Up-regulated in Transcription
  misc_feature: MA Experiment 20000264 PARAMETER Experiment Name: At_Open_Flower_P Parameter: Age (day) Value: 21
  misc_feature: MA Experiment 20000264 PARAMETER Experiment Name: At_Open_Flower_P Parameter: Plant Line Value: WS
  misc_feature: MA Experiment 20000264 PARAMETER Experiment Name: At_Open_Flower_P Parameter: Tissue Value: Open Flower vs. Whole Plant
  misc_feature: MA Experiment ID: 20000265 Result: Up-regulated in Transcription
  misc_feature: MA Experiment 20000265 PARAMETER Experiment Name: At_Open_Flower_P Parameter: Age (day) Value: 21
  misc_feature: MA Experiment 20000265 PARAMETER Experiment Name: At_Open_Flower_P Parameter: Plant Line Value: WS
  misc_feature: MA Experiment 20000265 PARAMETER Experiment Name: At_Open_Flower_P Parameter: Tissue Value: Closed Flower vs. Whole Plant
  misc_feature: MA Experiment ID: 20000286 Result: Up-regulated in Transcription
  misc_feature: MA Experiment 20000286 PARAMETER Experiment Name: At_Open_Flower_P Parameter: Age (day) Value: 21
  misc_feature: MA Experiment 20000286 PARAMETER Experiment Name: At_Open_Flower_P Parameter: Plant Line Value: WS
  misc_feature: MA Experiment 20000286 PARAMETER Experiment Name: At_Open_Flower_P Parameter: Tissue Value: Half Open vs. Whole Plant
  misc_feature: MA Experiment ID: 20000794 Result: Up-regulated in Transcription
  misc_feature: MA Experiment 20000794 PARAMETER Experiment Name: At_Petals_P Parameter: Age (day) Value: 23-25 days
  misc_feature: MA Experiment 20000794 PARAMETER Experiment Name: At_Petals_P Parameter: Plant Line Value: WS
  misc_feature: MA Experiment 20000794 PARAMETER Experiment Name: At_Petals_P Parameter: Tissue Value: Petals vs. Whole plant

SEQ ID NO: 93937 - protein, 499 aa, Arabidopsis thaliana; identical to SEQ ID NO: 90181
  peptide (1)..(499): Ceres Seq. ID no. 12722909
  misc_feature (1)..(499): Homolog of NCBI NO: 15229913 NR Description: cytochrome p450 family; protein id: At3g44250.1
  misc_feature (1)..(499): Homolog of NCBI NO: 30923413 NR Description: Cytochrome P450 71B38
  misc_feature (1)..(499): Homolog of NCBI NO: 15231782 NR Description: cytochrome P450 monooxygenase; protein id: supported by cDNA: gi_3164131 [Arabidopsis thaliana]
  misc_feature (1)..(497): Homolog of NCBI NO: 15231524 NR Description: cytochrome p450 family; protein id: At3g26190.1 thaliana] >gi|13878385|sp|Q9LTM2|C72L_ARATH Cytochrome P450 71B21
  misc_feature (1)..(499): Homolog of NCBI NO: 15231525 NR Description: cytochrome p450 family; protein id: At3g26200.1, by cDNA: gi_13430717 [Arabidopsis thaliana] Cytochrome P450 71B22 >gi|11994439|dbj|BAB02441.1| cytochrome
  misc_feature (2)..(495): Homolog of NCBI NO: 13878369 NR Description: CYTOCHROME P450 71B8
  misc_feature (63)..(499): Homolog of NCBI NO: 15724230 NR Description: AT3g53280/T4D2_200 [Arabidopsis thaliana]
  misc_feature (63)..(499): Homolog of NCBI NO: 22655216 NR Description: cytochrome P450 71B5 [Arabidopsis thaliana]
  misc_feature (1)..(495): Homolog of NCBI NO: 15231786 NR Description: cytochrome p450 family; protein id: At3g53300.1, by cDNA: gi_15810490 [Arabidopsis thaliana] Cytochrome P450 71B31 >gi|11249493|pir||T46176 probable
  misc_feature (1)..(495): Homolog of NCBI NO: 15810491 NR Description: putative cytochrome P450 protein [Arabidopsis

SEQ ID NO: 93938 - protein, 377 aa, Arabidopsis thaliana; identical to SEQ ID NO: 90182
  peptide (1)..(377): Ceres Seq. ID no. 12722910
  misc_feature (1)..(377): Homolog of NCBI NO: 15229913 NR Description: cytochrome p450 family; protein id: At3g44250.1
  misc_feature (1)..(377): Homolog of NCBI NO: 30923413 NR Description: Cytochrome P450 71B38
  misc_feature (1)..(377): Homolog of NCBI NO: 15231782 NR Description: cytochrome P450 monooxygenase; protein id: supported by cDNA: gi_3164131 [Arabidopsis thaliana]
  misc_feature (1)..(375): Homolog of NCBI NO: 15231524 NR Description: cytochrome p450 family; protein id: At3g26190.1 thaliana] >gi|13878385|sp|Q9LTM2|C72L_ARATH Cytochrome P450 71B21
  misc_feature (1)..(377): Homolog of NCBI NO: 15231525 NR Description: cytochrome p450 family; protein id: At3g26200.1, by cDNA: gi_13430717 [Arabidopsis thaliana] Cytochrome P450 71B22 >gi|11994439|dbj|BAB02441.1| cytochrome
  misc_feature (1)..(373): Homolog of NCBI NO: 13878369 NR Description: CYTOCHROME P450 71B8
  misc_feature (1)..(377): Homolog of NCBI NO: 15724230 NR Description: AT3g53280/T4D2_200 [Arabidopsis thaliana]
  misc_feature (1)..(377): Homolog of NCBI NO: 22655216 NR Description: cytochrome P450 71B5 [Arabidopsis thaliana]
  misc_feature (1)..(373): Homolog of NCBI NO: 15231786 NR Description: cytochrome p450 family; protein id: At3g53300.1, by cDNA: gi_15810490 [Arabidopsis thaliana] Cytochrome P450 71B31 >gi|11249493|pir||T46176 probable
  misc_feature (1)..(373): Homolog of NCBI NO: 15810491 NR Description: putative cytochrome P450 protein [Arabidopsis

SEQ ID NO: 93939 - DNA, 1008 bp, Arabidopsis thaliana; identical to SEQ ID NO: 90183
  misc_feature (1)..(1008): Ceres Seq. ID no. 12722911
  misc_feature: MA Experiment ID: 20000179 Result: Down-regulated in Transcription
  misc_feature: MA Experiment 20000179 PARAMETER Experiment Name: At_Germinating_Seeds_P Parameter: Age (hr) Value: 6 vs. 0
  misc_feature: MA Experiment 20000179 PARAMETER Experiment Name: At_Germinating_Seeds_P Parameter: Tissue Value: Germinating Seeds
  misc_feature: MA Experiment ID: 20000180 Result: Down-regulated in Transcription
  misc_feature: MA Experiment 20000180 PARAMETER Experiment Name: At_Germinating_Seeds_P Parameter: Age (hr) Value: 24 vs. 0
  misc_feature: MA Experiment 20000180 PARAMETER Experiment Name: At_Germinating_Seeds_P Parameter: Tissue Value: Germinating Seeds
  misc_feature: MA Experiment ID: 20000437 Result: Up-regulated in Transcription
  misc_feature: MA Experiment 20000437 PARAMETER Experiment Name: At_Drought_P Parameter: Age (day) Value: 8
  misc_feature: MA Experiment 20000437 PARAMETER Experiment Name: At_Drought_P Parameter: Organism Value: A. thaliana
  misc_feature: MA Experiment 20000437 PARAMETER Experiment Name: At_Drought_P Parameter: Plant Line Value: WS
  misc_feature: MA Experiment 20000437 PARAMETER Experiment Name: At_Drought_P Parameter: Timepoint (hr) Value: 24
  misc_feature: MA Experiment 20000437 PARAMETER Experiment Name: At_Drought_P Parameter: Tissue Value: Whole Plant
  misc_feature: MA Experiment 20000437 PARAMETER Experiment Name: At_Drought_P Parameter: Treatment Value: Drought vs. No Drought
  misc_feature: MA Experiment ID: 20001556 Result: Up-regulated in Transcription
  misc_feature: MA Experiment 20001556 PARAMETER Experiment Name: At_Drought_Soil_Dry_P Parameter: Age (day) Value: 26
  misc_feature: MA Experiment 20001556 PARAMETER Experiment Name: At_Drought_Soil_Dry_P Parameter: Organism Value: A. thaliana
  misc_feature: MA Experiment 20001556 PARAMETER Experiment Name: At_Drought_Soil_Dry_P Parameter: Plant Line Value: WS
  misc_feature: MA Experiment 20001556 PARAMETER Experiment Name: At_Drought_Soil_Dry_P Parameter: Post Timepoint (hr) Value: None
  misc_feature: MA Experiment 20001556 PARAMETER Experiment Name: At_Drought_Soil_Dry_P Parameter: Post-Treatment Value: None
  misc_feature: MA Experiment 20001556 PARAMETER Experiment Name: At_Drought_Soil_Dry_P Parameter: Timepoint (day) Value: 12
  misc_feature: MA Experiment 20001556 PARAMETER Experiment Name: At_Drought_Soil_Dry_P Parameter: Treatment Value: Drought vs. No Drought
  misc_feature: MA Experiment ID: 20001905 Result: Up-regulated in Transcription
  misc_feature: MA Experiment 20001905 PARAMETER Experiment Name: At_Drought_Reproduction_P Parameter: Age (day) Value: 40
  misc_feature: MA Experiment 20001905 PARAMETER Experiment Name: At_Drought_Reproduction_P Parameter: Organism Value: A. thaliana
  misc_feature: MA Experiment 20001905 PARAMETER Experiment Name: At_Drought_Reproduction_P Parameter: Plant Line Value: WS
  misc_feature: MA Experiment 20001905 PARAMETER Experiment Name: At_Drought_Reproduction_P Parameter: Timepoint (day) Value: 10
  misc_feature: MA Experiment 20001905 PARAMETER Experiment Name: At_Drought_Reproduction_P Parameter: Tissue Value: Rosettes
  misc_feature: MA Experiment 20001905 PARAMETER Experiment Name: At_Drought_Reproduction_P Parameter: Treatment Value: Drought vs. No Drought
  misc_feature: MA Experiment ID: 20001911 Result: Up-regulated in Transcription
  misc_feature: MA Experiment 20001911 PARAMETER Experiment Name: At_Drought_Reproduction_P Parameter: Age (day) Value: 40
  misc_feature: MA Experiment 20001911 PARAMETER Experiment Name: At_Drought_Reproduction_P Parameter: Organism Value: A. thaliana
  misc_feature: MA Experiment 20001911 PARAMETER Experiment Name: At_Drought_Reproduction_P Parameter: Plant Line Value: WS
  misc_feature: MA Experiment 20001911 PARAMETER Experiment Name: At_Drought_Reproduction_P Parameter: Timepoint (day) Value: 10
  misc_feature: MA Experiment 20001911 PARAMETER Experiment Name: At_Drought_Reproduction_P Parameter: Tissue Value: Flowers
  misc_feature: MA Experiment 20001911 PARAMETER Experiment Name: At_Drought_Reproduction_P Parameter: Treatment Value: Drought vs. No Drought

SEQ ID NO: 93940 - protein, 335 aa, Arabidopsis thaliana; identical to SEQ ID NO: 90184
  peptide (1)..(335): Ceres Seq. ID no. 12722912
  misc_feature (14)..(141): Pfam Name: No apical meristem (NAM) protein Pfam Description: No apical meristem (NAM) protein
  misc_feature (1)..(335): Homolog of NCBI NO: 15229931 NR Description: putative protein; protein id: At3g44290.1
  misc_feature (12)..(334): Homolog of NCBI NO: 9757809 NR Description: NAM (no apical meristem)-like protein
  misc_feature (12)..(334): Homolog of NCBI NO: 18420448 NR Description: NAM (no apical meristem)-like protein; protein At5g22290.1, supported by cDNA: gi_14326464, supported by cDNA: [Arabidopsis thaliana] >gi|14326465|gb|AAK60278.1|AF385685_1
  misc_feature (10)..(264): Homolog of NCBI NO: 15225866 NR Description: NAM (no apical meristem)-like protein; protein At2g27300.1 [Arabidopsis thaliana] >gi|25407881|pir||C84671 NAM
  misc_feature (16)..(158): Homolog of NCBI NO: 37537036 NR Description: putative NAM (no apical meristem) protein [Oryza
  misc_feature (16)..(168): Homolog of NCBI NO: 15237469 NR Description: NAM-like; protein id: At5g46590.1 [Arabidopsis
  misc_feature (16)..(138): Homolog of NCBI NO: 21105751 NR Description: nam-like protein 11 [Petunia x hybrida]
  misc_feature (16)..(153): Homolog of NCBI NO: 15218843 NR Description: jasmonic acid, putative; protein id: At1g65910.1
  misc_feature (16)..(157): Homolog of NCBI NO: 34902214 NR Description: Hypothetical protein [Oryza sativa (japonica group)] >gi|27452910|gb|AAO15294.1| Hypothetical protein [Oryza
  misc_feature (16)..(162): Homolog of NCBI NO: 34902994 NR Description: unnamed protein product [Oryza sativa (japonica group)] >gi|6730946|dbj|BAA89802.1| OsNAC8 protein [Oryza sativa]

SEQ ID NO: 93941 - protein, 300 aa, Arabidopsis thaliana; identical to SEQ ID NO: 90185
  peptide (1)..(300): Ceres Seq. ID no. 12722913
  misc_feature (1)..(106): Pfam Name: No apical meristem (NAM) protein Pfam Description: No apical meristem (NAM) protein
  misc_feature (1)..(300): Homolog of NCBI NO: 15229931 NR Description: putative protein; protein id: At3g44290.1
  misc_feature (1)..(299): Homolog of NCBI NO: 9757809 NR Description: NAM (no apical meristem)-like protein
  misc_feature (1)..(299): Homolog of NCBI NO: 18420448 NR Description: NAM (no apical meristem)-like protein; protein At5g22290.1, supported by cDNA: gi_14326464, supported by cDNA: [Arabidopsis thaliana] >gi|14326465|gb|AAK60278.1|AF385685_1
  misc_feature (1)..(229): Homolog of NCBI NO: 15225866 NR Description: NAM (no apical meristem)-like protein; protein At2g27300.1 [Arabidopsis thaliana] >gi|25407881|pir||C84671 NAM
  misc_feature (1)..(123): Homolog of NCBI NO: 37537036 NR Description: putative NAM (no apical meristem) protein [Oryza
  misc_feature (1)..(133): Homolog of NCBI NO: 15237469 NR Description: NAM-like; protein id: At5g46590.1 [Arabidopsis
  misc_feature (1)..(103): Homolog of NCBI NO: 21105751 NR Description: nam-like protein 11 [Petunia x hybrida]
  misc_feature (1)..(118): Homolog of NCBI NO: 15218843 NR Description: jasmonic acid, putative; protein id: At1g65910.1
  misc_feature (1)..(122): Homolog of NCBI NO: 34902214 NR Description: Hypothetical protein [Oryza sativa (japonica group)] >gi|27452910|gb|AAO15294.1| Hypothetical protein [Oryza
  misc_feature (1)..(127): Homolog of NCBI NO: 34902994 NR Description: unnamed protein product [Oryza sativa (japonica group)] >gi|6730946|dbj|BAA89802.1| OsNAC8 protein [Oryza sativa]

SEQ ID NO: 93942 - protein, 201 aa, Arabidopsis thaliana; identical to SEQ ID NO: 90186
  peptide (1)..(201): Ceres Seq. ID no. 12722914
  misc_feature (1)..(201): Homolog of NCBI NO: 15229931 NR Description: putative protein; protein id: At3g44290.1
  misc_feature (1)..(200): Homolog of NCBI NO: 9757809 NR Description: NAM (no apical meristem)-like protein
  misc_feature (1)..(200): Homolog of NCBI NO: 18420448 NR Description: NAM (no apical meristem)-like protein; protein At5g22290.1, supported by cDNA: gi_14326464, supported by cDNA: [Arabidopsis thaliana] >gi|14326465|gb|AAK60278.1|AF385685_1
  misc_feature (1)..(130): Homolog of NCBI NO: 15225866 NR Description: NAM (no apical meristem)-like protein; protein At2g27300.1 [Arabidopsis thaliana] >gi|25407881|pir||C84671 NAM
  misc_feature (1)..(24): Homolog of NCBI NO: 37537036 NR Description: putative NAM (no apical meristem) protein [Oryza
  misc_feature (1)..(34): Homolog of NCBI NO: 15237469 NR Description: NAM-like; protein id: At5g46590.1 [Arabidopsis
  misc_feature (1)..(19): Homolog of NCBI NO: 15218843 NR Description: jasmonic acid, putative; protein id: At1g65910.1
  misc_feature (1)..(23): Homolog of NCBI NO: 34902214 NR Description: Hypothetical protein [Oryza sativa (japonica group)] >gi|27452910|gb|AAO15294.1| Hypothetical protein [Oryza
  misc_feature (1)..(28): Homolog of NCBI NO: 34902994 NR Description: unnamed protein product [Oryza sativa (japonica group)] >gi|6730946|dbj|BAA89802.1| OsNAC8 protein [Oryza sativa]
  misc_feature (1)..(82): Homolog of NCBI NO: 30689531 NR Description: No apical meristem (NAM) protein family thaliana] >gi|9408601|gb|AAF87300.1|AF281062_1 TIP [Arabidopsis

SEQ ID NO: 93943 - DNA, 2224 bp, Arabidopsis thaliana; identical to SEQ ID NO: 90187
  misc_feature (1)..(2224): Ceres Seq. ID no. 12722933
  misc_feature: MA Experiment ID: 20000180 Result: Down-regulated in Transcription
  misc_feature: MA Experiment 20000180 PARAMETER Experiment Name: At_Germinating_Seeds_P Parameter: Age (hr) Value: 24 vs. 0
  misc_feature: MA Experiment 20000180 PARAMETER Experiment Name: At_Germinating_Seeds_P Parameter: Tissue Value: Germinating Seeds
  misc_feature: MA Experiment ID: 20000184 Result: Down-regulated in Transcription
  misc_feature: MA Experiment 20000184 PARAMETER Experiment Name: At_Shoots__P Parameter: Age (day) Value: 7
  misc_feature: MA Experiment 20000184 PARAMETER Experiment Name: At_Shoots__P Parameter: Tissue Value: Shoots vs. Whole Plant

SEQ ID NO: 93944 - protein, 631 aa, Arabidopsis thaliana; identical to SEQ ID NO: 90188
  peptide (1)..(631): Ceres Seq. ID no. 12722934
  misc_feature (2)..(628): Homolog of NCBI NO: 559713 NR Description: KIAA0073 [Homo sapiens]
  misc_feature (2)..(628): Homolog of NCBI NO: 24308049 NR Description: KIAA0073 protein [Homo sapiens]
  misc_feature (27)..(628): Homolog of NCBI NO: 34853749 NR Description: similar to RIKEN cDNA 4632422M10 [Rattus
  misc_feature (27)..(628): Homolog of NCBI NO: 27370202 NR Description: RIKEN cDNA 4632422M10; hypothetical protein [Mus musculus] >gi|26324484|dbj|BAC25996.1| unnamed protein
  misc_feature (27)..(628): Homolog of NCBI NO: 31211583 NR Description: ENSANGP00000014257 [Anopheles gambiae]
  misc_feature (13)..(626): Homolog of NCBI NO: 19922912 NR Description: CG3511-PA [Drosophila melanogaster]
  misc_feature (2)..(628): Homolog of NCBI NO: 40747323 NR Description: hypothetical protein AN0380.2 [Aspergillus
  misc_feature (31)..(628): Homolog of NCBI NO: 32420051 NR Description: hypothetical protein [Neurospora crassa]
  misc_feature (35)..(628): Homolog of NCBI NO: 17506311 NR Description: CYcloPhilin family CYP-15 (70.8 kD) (cyp-15)
  misc_feature (236)..(628): Homolog of NCBI NO: 23613125 NR Description: cyclophilin, putative [Plasmodium falciparum 3D7]

SEQ ID NO: 93945 - protein, 600 aa, Arabidopsis thaliana; identical to SEQ ID NO: 90189
  peptide (1)..(600): Ceres Seq. ID no. 12722935
  misc_feature (1)..(597): Homolog of NCBI NO: 559713 NR Description: KIAA0073 [Homo sapiens]
  misc_feature (1)..(597): Homolog of NCBI NO: 24308049 NR Description: KIAA0073 protein [Homo sapiens]
  misc_feature (1)..(597): Homolog of NCBI NO: 34853749 NR Description: similar to RIKEN cDNA 4632422M10 [Rattus
  misc_feature (1)..(597): Homolog of NCBI NO: 27370202 NR Description: RIKEN cDNA 4632422M10; hypothetical protein [Mus musculus] >gi|26324484|dbj|BAC25996.1| unnamed protein
  misc_feature (1)..(597): Homolog of NCBI NO: 31211583 NR Description: ENSANGP00000014257 [Anopheles gambiae]
  misc_feature (1)..(595): Homolog of NCBI NO: 19922912 NR Description: CG3511-PA [Drosophila melanogaster]
  misc_feature (1)..(597): Homolog of NCBI NO: 40747323 NR Description: hypothetical protein AN0380.2 [Aspergillus
  misc_feature (1)..(597): Homolog of NCBI NO: 32420051 NR Description: hypothetical protein [Neurospora crassa]
  misc_feature (4)..(597): Homolog of NCBI NO: 17506311 NR Description: CYcloPhilin family CYP-15 (70.8 kD) (cyp-15)
  misc_feature (205)..(597): Homolog of NCBI NO: 23613125 NR Description: cyclophilin, putative [Plasmodium falciparum 3D7]

SEQ ID NO: 93946 - protein, 570 aa, Arabidopsis thaliana; identical to SEQ ID NO: 90190
  peptide (1)..(570): Ceres Seq. ID no. 12722936
  misc_feature (1)..(567): Homolog of NCBI NO: 559713 NR Description: KIAA0073 [Homo sapiens]
  misc_feature (1)..(567): Homolog of NCBI NO: 24308049 NR Description: KIAA0073 protein [Homo sapiens]
  misc_feature (1)..(567): Homolog of NCBI NO: 34853749 NR Description: similar to RIKEN cDNA 4632422M10 [Rattus
  misc_feature (1)..(567): Homolog of NCBI NO: 27370202 NR Description: RIKEN cDNA 4632422M10; hypothetical protein [Mus musculus] >gi|26324484|dbj|BAC25996.1| unnamed protein
  misc_feature (1)..(567): Homolog of NCBI NO: 31211583 NR Description: ENSANGP00000014257 [Anopheles gambiae]
  misc_feature (1)..(565): Homolog of NCBI NO: 19922912 NR Description: CG3511-PA [Drosophila melanogaster]
  misc_feature (1)..(567): Homolog of NCBI NO: 40747323 NR Description: hypothetical protein AN0380.2 [Aspergillus
  misc_feature (1)..(567): Homolog of NCBI NO: 32420051 NR Description: hypothetical protein [Neurospora crassa]
  misc_feature (1)..(567): Homolog of NCBI NO: 17506311 NR Description: CYcloPhilin family CYP-15 (70.8 kD) (cyp-15)
  misc_feature (175)..(567): Homolog of NCBI NO: 23613125 NR Description: cyclophilin, putative [Plasmodium falciparum 3D7]

SEQ ID NO: 93947 - DNA, 3270 bp, Arabidopsis thaliana; identical to SEQ ID NO: 90191
  misc_feature (1)..(3270): Ceres Seq. ID no. 12722955
  misc_feature: MA Experiment ID: 20000234 Result: Up-regulated in Transcription
  misc_feature: MA Experiment 20000234 PARAMETER Experiment Name: At_Siliques_P Parameter: Age (day) Value: 21
  misc_feature: MA Experiment 20000234 PARAMETER Experiment Name: At_Siliques_P Parameter: Organism Value: A. thaliana
  misc_feature: MA Experiment 20000234 PARAMETER Experiment Name: At_Siliques_P Parameter: Plant Line Value: WS
  misc_feature: MA Experiment 20000234 PARAMETER Experiment Name: At_Siliques_P Parameter: Tissue Value: Less Than 5mm Siliques vs. Whole Plant
  misc_feature: MA Experiment ID: 20000439 Result: Up-regulated in Transcription
  misc_feature: MA Experiment 20000439 PARAMETER Experiment Name: At_Roots__P Parameter: Age (day) Value: 14 vs. 21
  misc_feature: MA Experiment 20000439 PARAMETER Experiment Name: At_Roots__P Parameter: Organism Value: A. thaliana
  misc_feature: MA Experiment 20000439 PARAMETER Experiment Name: At_Roots__P Parameter: Tissue Value: Roots vs. Whole Plant
  misc_feature: MA Experiment ID: 20000495 Result: Up-regulated in Transcription
  misc_feature: MA Experiment 20000495 PARAMETER Experiment Name: At_Guard_Cells_P Parameter: Harvest Date Value: 8/2/2002
  misc_feature: MA Experiment 20000495 PARAMETER Experiment Name: At_Guard_Cells_P Parameter: Organism Value: A. thaliana
  misc_feature: MA Experiment 20000495 PARAMETER Experiment Name: At_Guard_Cells_P Parameter: Tissue Value: Guard Cells vs. Leaves
  misc_feature: MA Experiment ID: 20000496 Result: Up-regulated in Transcription
  misc_feature: MA Experiment 20000496 PARAMETER Experiment Name: At_Guard_Cells_P Parameter: Harvest Date Value: 7/19/2002
  misc_feature: MA Experiment 20000496 PARAMETER Experiment Name: At_Guard_Cells_P Parameter: Organism Value: Canola
  misc_feature: MA Experiment 20000496 PARAMETER Experiment Name: At_Guard_Cells_P Parameter: Tissue Value: Guard Cells vs. Leaves
  misc_feature: MA Experiment ID: 20000794 Result: Down-regulated in Transcription
  misc_feature: MA Experiment 20000794 PARAMETER Experiment Name: At_Petals_P Parameter: Age (day) Value: 23-25 days
  misc_feature: MA Experiment 20000794 PARAMETER Experiment Name: At_Petals_P Parameter: Plant Line Value: WS
  misc_feature: MA Experiment 20000794 PARAMETER Experiment Name: At_Petals_P Parameter: Tissue Value: Petals vs. Whole plant

SEQ ID NO: 93948 - protein, 1089 aa, Arabidopsis thaliana; identical to SEQ ID NO: 90192
  peptide (1)..(1089): Ceres Seq. ID no. 12722956
  misc_feature (1)..(110): Pfam Name: Calponin homology (CH) domain Pfam Description: Calponin homology (CH) domain
  misc_feature (1021)..(1065): Homolog of NCBI NO: 2392771 NR Description: putative kinesin-like protein [Arabidopsis
  misc_feature (218)..(744): Homolog of NCBI NO: 28393382 NR Description: putative kinesin [Arabidopsis thaliana]
  misc_feature (4)..(162): Homolog of NCBI NO: 28393382 NR Description: putative kinesin [Arabidopsis thaliana]
  misc_feature (218)..(521): Homolog of NCBI NO: 30690701 NR Description: kinesin-related protein [Arabidopsis thaliana]
  misc_feature (517)..(744): Homolog of NCBI NO: 30690701 NR Description: kinesin-related protein [Arabidopsis thaliana]
  misc_feature (4)..(162): Homolog of NCBI NO: 30690701 NR Description: kinesin-related protein [Arabidopsis thaliana]
  misc_feature (517)..(744): Homolog of NCBI NO: 7487566 NR Description: probable kinesin heavy chain [imported] - thaliana >gi|2529677|gb|AAC62860.1| putative kinesin heavy chain
  misc_feature (312)..(521): Homolog of NCBI NO: 7487566 NR Description: probable kinesin heavy chain [imported] - thaliana >gi|2529677|gb|AAC62860.1| putative kinesin heavy chain
  misc_feature (4)..(162): Homolog of NCBI NO: 7487566 NR Description: probable kinesin heavy chain [imported] - thaliana >gi|2529677|gb|AAC62860.1| putative kinesin heavy chain
  misc_feature (218)..(820): Homolog of NCBI NO: 18421069 NR Description: kinesin-related protein; protein id: At5g27000.1

SEQ ID NO: 93949 - protein, 1084 aa, Arabidopsis thaliana; identical to SEQ ID NO: 90193
  peptide (1)..(1084): Ceres Seq. ID no. 12722957
  misc_feature (1)..(105): Pfam Name: Calponin homology (CH) domain Pfam Description: Calponin homology (CH) domain
  misc_feature (1016)..(1060): Homolog of NCBI NO: 2392771 NR Description: putative kinesin-like protein [Arabidopsis
  misc_feature (213)..(739): Homolog of NCBI NO: 28393382 NR Description: putative kinesin [Arabidopsis thaliana]
  misc_feature (1)..(157): Homolog of NCBI NO: 28393382 NR Description: putative kinesin [Arabidopsis thaliana]
  misc_feature (213)..(516): Homolog of NCBI NO: 30690701 NR Description: kinesin-related protein [Arabidopsis thaliana]
  misc_feature (512)..(739): Homolog of NCBI NO: 30690701 NR Description: kinesin-related protein [Arabidopsis thaliana]
  misc_feature (1)..(157): Homolog of NCBI NO: 30690701 NR Description: kinesin-related protein [Arabidopsis thaliana]
  misc_feature (512)..(739): Homolog of NCBI NO: 7487566 NR Description: probable kinesin heavy chain [imported] - thaliana >gi|2529677|gb|AAC62860.1| putative kinesin heavy chain
  misc_feature (307)..(516): Homolog of NCBI NO: 7487566 NR Description: probable kinesin heavy chain [imported] - thaliana >gi|2529677|gb|AAC62860.1| putative kinesin heavy chain
  misc_feature (1)..(157): Homolog of NCBI NO: 7487566 NR Description: probable kinesin heavy chain [imported] - thaliana >gi|2529677|gb|AAC62860.1| putative kinesin heavy chain
  misc_feature (213)..(815): Homolog of NCBI NO: 18421069 NR Description: kinesin-related protein; protein id: At5g27000.1

SEQ ID NO: 93950 - protein, 1021 aa, Arabidopsis thaliana; identical to SEQ ID NO: 90194
  peptide (1)..(1021): Ceres Seq. ID no. 12722958
  misc_feature (953)..(997): Homolog of NCBI NO: 2392771 NR Description: putative kinesin-like protein [Arabidopsis
  misc_feature (150)..(676): Homolog of NCBI NO: 28393382 NR Description: putative kinesin [Arabidopsis thaliana]
  misc_feature (1)..(94): Homolog of NCBI NO: 28393382 NR Description: putative kinesin [Arabidopsis thaliana]
  misc_feature (150)..(453): Homolog of NCBI NO: 30690701 NR Description: kinesin-related protein [Arabidopsis thaliana]
  misc_feature (449)..(676): Homolog of NCBI NO: 30690701 NR Description: kinesin-related protein [Arabidopsis thaliana]
  misc_feature (1)..(94): Homolog of NCBI NO: 30690701 NR Description: kinesin-related protein [Arabidopsis thaliana]
  misc_feature (449)..(676): Homolog of NCBI NO: 7487566 NR Description: probable kinesin heavy chain [imported] - thaliana >gi|2529677|gb|AAC62860.1| putative kinesin heavy chain
  misc_feature (244)..(453): Homolog of NCBI NO: 7487566 NR Description: probable kinesin heavy chain [imported] - thaliana >gi|2529677|gb|AAC62860.1| putative kinesin heavy chain
  misc_feature (1)..(94): Homolog of NCBI NO: 7487566 NR Description: probable kinesin heavy chain [imported] - thaliana >gi|2529677|gb|AAC62860.1| putative kinesin heavy chain
  misc_feature (150)..(752): Homolog of NCBI NO: 18421069 NR Description: kinesin-related protein; protein id: At5g27000.1

SEQ ID NO: 93951 - DNA, 961 bp, Arabidopsis thaliana; identical to SEQ ID NO: 90195
  misc_feature (1)..(961): Ceres Seq. ID no. 12722959
  misc_feature: MA Experiment ID: 20000180 Result: Down-regulated in Transcription
  misc_feature: MA Experiment 20000180 PARAMETER Experiment Name: At_Germinating_Seeds_P Parameter: Age (hr) Value: 24 vs. 0
  misc_feature: MA Experiment 20000180 PARAMETER Experiment Name: At_Germinating_Seeds_P Parameter: Tissue Value: Germinating Seeds
  misc_feature: MA Experiment ID: 20000227 Result: Up-regulated in Transcription
  misc_feature: MA Experiment 20000227 PARAMETER Experiment Name: At_Root-Tips-vs-Tops_P Parameter: Tissue Value: Root Tips vs. Root Tops
  misc_feature: MA Experiment ID: 20000234 Result: Up-regulated in Transcription
  misc_feature: MA Experiment 20000234 PARAMETER Experiment Name: At_Siliques_P Parameter: Age (day) Value: 21
  misc_feature: MA Experiment 20000234 PARAMETER Experiment Name: At_Siliques_P Parameter: Organism Value: A. thaliana
  misc_feature: MA Experiment 20000234 PARAMETER Experiment Name: At_Siliques_P Parameter: Plant Line Value: WS
  misc_feature: MA Experiment 20000234 PARAMETER Experiment Name: At_Siliques_P Parameter: Tissue Value: Less Than 5mm Siliques vs. Whole Plant
  misc_feature: MA Experiment ID: 20000264 Result: Up-regulated in Transcription
  misc_feature: MA Experiment 20000264 PARAMETER Experiment Name: At_Open_Flower_P Parameter: Age (day) Value: 21
  misc_feature: MA Experiment 20000264 PARAMETER Experiment Name: At_Open_Flower_P Parameter: Plant Line Value: WS
  misc_feature: MA Experiment 20000264 PARAMETER Experiment Name: At_Open_Flower_P Parameter: Tissue Value: Open Flower vs. Whole Plant
  misc_feature: MA Experiment ID: 20000436 Result: Down-regulated in Transcription
  misc_feature: MA Experiment 20000436 PARAMETER Experiment Name: At_Drought_P Parameter: Age (day) Value: 7
  misc_feature: MA Experiment 20000436 PARAMETER Experiment Name: At_Drought_P Parameter: Organism Value: A. thaliana
  misc_feature: MA Experiment 20000436 PARAMETER Experiment Name: At_Drought_P Parameter: Plant Line Value: WS
  misc_feature: MA Experiment 20000436 PARAMETER Experiment Name: At_Drought_P Parameter: Timepoint (hr) Value: 12
  misc_feature: MA Experiment 20000436 PARAMETER Experiment Name: At_Drought_P Parameter: Tissue Value: Whole Plant
  misc_feature: MA Experiment 20000436 PARAMETER Experiment Name: At_Drought_P Parameter: Treatment Value: Drought vs. No Drought
  misc_feature: MA Experiment ID: 20000437 Result: Down-regulated in Transcription
  misc_feature: MA Experiment 20000437 PARAMETER Experiment Name: At_Drought_P Parameter: Age (day) Value: 8
  misc_feature: MA Experiment 20000437 PARAMETER Experiment Name: At_Drought_P Parameter: Organism Value: A. thaliana
  misc_feature: MA Experiment 20000437 PARAMETER Experiment Name: At_Drought_P Parameter: Plant Line Value: WS
  misc_feature: MA Experiment 20000437 PARAMETER Experiment Name: At_Drought_P Parameter: Timepoint (hr) Value: 24
  misc_feature: MA Experiment 20000437 PARAMETER Experiment Name: At_Drought_P Parameter: Tissue Value: Whole Plant
  misc_feature: MA Experiment 20000437 PARAMETER Experiment Name: At_Drought_P Parameter: Treatment Value: Drought vs. No Drought
  misc_feature: MA Experiment ID: 20000453 Result: Down-regulated in Transcription
  misc_feature: MA Experiment 20000453 PARAMETER Experiment Name: At_100uM_ABA_P Parameter: Age (day) Value: 15
  misc_feature: MA Experiment 20000453 PARAMETER Experiment Name: At_100uM_ABA_P Parameter: Organism Value: A. thaliana
  misc_feature: MA Experiment 20000453 PARAMETER Experiment Name: At_100uM_ABA_P Parameter: Plant Line Value: WS
  misc_feature: MA Experiment 20000453 PARAMETER Experiment Name: At_100uM_ABA_P Parameter: Timepoint (hr) Value: 24
  misc_feature: MA Experiment 20000453 PARAMETER Experiment Name: At_100uM_ABA_P Parameter: Tissue Value: Aerial
  misc_feature: MA Experiment 20000453 PARAMETER Experiment Name: At_100uM_ABA_P Parameter: Treatment Value: 100uM ABA vs. No Treatment
  misc_feature: MA Experiment ID: 20000456 Result: Up-regulated in Transcription
  misc_feature: MA Experiment 20000456 PARAMETER Experiment Name: At_100uM_BA_P Parameter: Age (day) Value: 14
  misc_feature: MA Experiment 20000456 PARAMETER Experiment Name: At_100uM_BA_P Parameter: Organism Value: A. thaliana
  misc_feature: MA Experiment 20000456 PARAMETER Experiment Name: At_100uM_BA_P Parameter: Plant Line Value: WS
  misc_feature: MA Experiment 20000456 PARAMETER Experiment Name: At_100uM_BA_P Parameter: Timepoint (hr) Value: 6
  misc_feature: MA Experiment 20000456 PARAMETER Experiment Name: At_100uM_BA_P Parameter: Tissue Value: Aerial
  misc_feature: MA Experiment 20000456 PARAMETER Experiment Name: At_100uM_BA_P Parameter: Treatment Value: 100uM BA vs. No Treatment
  misc_feature: MA Experiment ID: 20000709 Result: Up-regulated in Transcription
  misc_feature: MA Experiment 20000709 PARAMETER Experiment Name: At_15mM_NH4NO3_L-to-H_P Parameter: Age (hr) Value: 14
  misc_feature: MA Experiment 20000709 PARAMETER Experiment Name: At_15mM_NH4NO3_L-to-H_P Parameter: Organism Value: A. thaliana
  misc_feature: MA Experiment 20000709 PARAMETER Experiment Name: At_15mM_NH4NO3_L-to-H_P Parameter: Plant Line Value: WS
  misc_feature: MA Experiment 20000709 PARAMETER Experiment Name: At_15mM_NH4NO3_L-to-H_P Parameter: Timepoint (hr) Value: 4
  misc_feature: MA Experiment 20000709 PARAMETER Experiment Name: At_15mM_NH4NO3_L-to-H_P Parameter: Tissue Value: Aerial
  misc_feature: MA Experiment 20000709 PARAMETER Experiment Name: At_15mM_NH4NO3_L-to-H_P Parameter: Treatment Value: 15mM NH4NO3 vs. 30mM Mannitol
  misc_feature: MA Experiment ID: 20000794 Result: Down-regulated in Transcription
  misc_feature: MA Experiment 20000794 PARAMETER Experiment Name: At_Petals_P Parameter: Age (day) Value: 23-25 days
  misc_feature: MA Experiment 20000794 PARAMETER Experiment Name: At_Petals_P Parameter: Plant Line Value: WS
  misc_feature: MA Experiment 20000794 PARAMETER Experiment Name: At_Petals_P Parameter: Tissue Value: Petals vs. Whole plant
  misc_feature: MA Experiment ID: 20001247 Result: Down-regulated in Transcription
  misc_feature: MA Experiment 20001247 PARAMETER Experiment Name: At_Far-red-induction_P Parameter: Age (day) Value: 7
  misc_feature: MA Experiment 20001247 PARAMETER Experiment Name: At_Far-red-induction_P Parameter: Light Value: Far-red vs. White
  misc_feature: MA Experiment 20001247 PARAMETER Experiment Name: At_Far-red-induction_P Parameter: Organism Value: A. thaliana
  misc_feature: MA Experiment 20001247 PARAMETER Experiment Name: At_Far-red-induction_P Parameter: Plant Line Value: Columbia
  misc_feature: MA Experiment 20001247 PARAMETER Experiment Name: At_Far-red-induction_P Parameter: Timepoint (hr) Value: 1
  misc_feature: MA Experiment 20001247 PARAMETER Experiment Name: At_Far-red-induction_P Parameter: Tissue Value: Whole Plant
  misc_feature: MA Experiment ID: 20001450 Result: Down-regulated in Transcription
  misc_feature: MA Experiment 20001450 PARAMETER Experiment Name: At_Far-red-induction_P Parameter: Age (day) Value: 7
  misc_feature: MA Experiment 20001450 PARAMETER Experiment Name: At_Far-red-induction_P Parameter: Light Value: Far-red vs. White
  misc_feature: MA Experiment 20001450 PARAMETER Experiment Name: At_Far-red-induction_P Parameter: Organism Value: A. thaliana
  misc_feature: MA Experiment 20001450 PARAMETER Experiment Name: At_Far-red-induction_P Parameter: Plant Line Value: Columbia
  misc_feature: MA Experiment 20001450 PARAMETER Experiment Name: At_Far-red-induction_P Parameter: Timepoint (hr) Value: 8
  misc_feature: MA Experiment 20001450 PARAMETER Experiment Name: At_Far-red-induction_P Parameter: Tissue Value: Whole Plant
  misc_feature: MA Experiment ID: 20001458 Result: Up-regulated in Transcription
  misc_feature: MA Experiment 20001458 PARAMETER Experiment Name: At_50mM_NH4NO3_L-to-H_P Parameter: Age (day) Value: Undefined
  misc_feature: MA Experiment 20001458 PARAMETER Experiment Name: At_50mM_NH4NO3_L-to-H_P Parameter: Organism Value: Undefined
  misc_feature: MA Experiment 20001458 PARAMETER Experiment Name: At_50mM_NH4NO3_L-to-H_P Parameter: Plant Line Value: Undefined
  misc_feature: MA Experiment 20001458 PARAMETER Experiment Name: At_50mM_NH4NO3_L-to-H_P Parameter: Timepoint (hr) Value: 2
  misc_feature: MA Experiment 20001458 PARAMETER Experiment Name: At_50mM_NH4NO3_L-to-H_P Parameter: Tissue Value: Siliques
  misc_feature: MA Experiment 20001458 PARAMETER Experiment Name: At_50mM_NH4NO3_L-to-H_P Parameter: Treatment Value: 50mM NH4NO3 vs. 100mM Manitol
  misc_feature: MA Experiment ID: 20001556 Result: Up-regulated in Transcription
  misc_feature: MA Experiment 20001556 PARAMETER Experiment Name: At_Drought_Soil_Dry_P Parameter: Age (day) Value: 26
  misc_feature: MA Experiment 20001556 PARAMETER Experiment Name: At_Drought_Soil_Dry_P Parameter: Organism Value: A. thaliana
  misc_feature: MA Experiment 20001556 PARAMETER Experiment Name: At_Drought_Soil_Dry_P Parameter: Plant Line Value: WS
  misc_feature: MA Experiment 20001556 PARAMETER Experiment Name: At_Drought_Soil_Dry_P Parameter: Post Timepoint (hr) Value: None
  misc_feature: MA Experiment 20001556 PARAMETER Experiment Name: At_Drought_Soil_Dry_P Parameter: Post-Treatment Value: None
  misc_feature: MA Experiment 20001556 PARAMETER Experiment Name: At_Drought_Soil_Dry_P Parameter: Timepoint (day) Value: 12
  misc_feature: MA Experiment 20001556 PARAMETER Experiment Name: At_Drought_Soil_Dry_P Parameter: Treatment Value: Drought vs. No Drought
  misc_feature: MA Experiment ID: 20001557 Result: Up-regulated in Transcription
  misc_feature: MA Experiment 20001557 PARAMETER Experiment Name: At_Drought_Soil_Dry_P Parameter: Age (day) Value: 27
  misc_feature: MA Experiment 20001557 PARAMETER Experiment Name: At_Drought_Soil_Dry_P Parameter: Organism Value: A. thaliana
  misc_feature: MA Experiment 20001557 PARAMETER Experiment Name: At_Drought_Soil_Dry_P Parameter: Plant Line Value: WS
  misc_feature: MA Experiment 20001557 PARAMETER Experiment Name: At_Drought_Soil_Dry_P Parameter: Post Timepoint (hr) Value: 3
  misc_feature: MA Experiment 20001557 PARAMETER Experiment Name: At_Drought_Soil_Dry_P Parameter: Post-Treatment Value: Re-Water vs. No Drought
  misc_feature: MA Experiment 20001557 PARAMETER Experiment Name: At_Drought_Soil_Dry_P Parameter: Timepoint (day) Value: 13
  misc_feature: MA Experiment 20001557 PARAMETER Experiment Name: At_Drought_Soil_Dry_P Parameter: Treatment Value: Drought vs. No Drought
  misc_feature: MA Experiment ID: 20001558 Result: Up-regulated in Transcription
  misc_feature: MA Experiment 20001558 PARAMETER Experiment Name: At_Drought_Soil_Dry_P Parameter: Age (day) Value: 27
  misc_feature: MA Experiment 20001558 PARAMETER Experiment Name: At_Drought_Soil_Dry_P Parameter: Organism Value: A. thaliana
  misc_feature: MA Experiment 20001558 PARAMETER Experiment Name: At_Drought_Soil_Dry_P Parameter: Plant Line Value: WS
  misc_feature: MA Experiment 20001558 PARAMETER Experiment Name: At_Drought_Soil_Dry_P Parameter: Post Timepoint (hr) Value: 6
  misc_feature: MA Experiment 20001558 PARAMETER Experiment Name: At_Drought_Soil_Dry_P Parameter: Post-Treatment Value: Re-Water vs. No Drought
  misc_feature: MA Experiment 20001558 PARAMETER Experiment Name: At_Drought_Soil_Dry_P Parameter: Timepoint (day) Value: 13
  misc_feature: MA Experiment 20001558 PARAMETER Experiment Name: At_Drought_Soil_Dry_P Parameter: Treatment Value: Drought vs. No Drought
  misc_feature: MA Experiment ID: 20001560 Result: Up-regulated in Transcription
  misc_feature: MA Experiment 20001560 PARAMETER Experiment Name: At_Drought_Soil_Dry_P Parameter: Age (day) Value: 28
  misc_feature: MA Experiment 20001560 PARAMETER Experiment Name: At_Drought_Soil_Dry_P Parameter: Organism Value: A. thaliana
  misc_feature: MA Experiment 20001560 PARAMETER Experiment Name: At_Drought_Soil_Dry_P Parameter: Plant Line Value: WS
  misc_feature: MA Experiment 20001560 PARAMETER Experiment Name: At_Drought_Soil_Dry_P Parameter: Post Timepoint (hr) Value: None
  misc_feature: MA Experiment 20001560 PARAMETER Experiment Name: At_Drought_Soil_Dry_P Parameter: Post-Treatment Value: None
  misc_feature: MA Experiment 20001560 PARAMETER Experiment Name: At_Drought_Soil_Dry_P Parameter: Timepoint (day) Value: 14
  misc_feature: MA Experiment 20001560 PARAMETER Experiment Name: At_Drought_Soil_Dry_P Parameter: Treatment Value: Drought vs. No Drought
  misc_feature: MA Experiment ID: 20001756 Result: Up-regulated in Transcription
  misc_feature: MA Experiment 20001756 PARAMETER Experiment Name: At_50mM_NH4NO3_L-to-H_P Parameter: Timepoint (hr) Value: 4
  misc_feature: MA Experiment 20001756 PARAMETER Experiment Name: At_50mM_NH4NO3_L-to-H_P Parameter: Tissue Value: Leaf
  misc_feature: MA Experiment 20001756 PARAMETER Experiment Name: At_50mM_NH4NO3_L-to-H_P Parameter: Treatment Value: 50mM NH4NO3 vs 100mM Mannitol
  misc_feature: MA Experiment ID: 20001757 Result: Up-regulated in Transcription
  misc_feature: MA Experiment 20001757 PARAMETER Experiment Name: At_50mM_NH4NO3_L-to-H_P Parameter: Timepoint (hr) Value: 6
  misc_feature: MA Experiment 20001757 PARAMETER Experiment Name: At_50mM_NH4NO3_L-to-H_P Parameter: Tissue Value: Leaf
  misc_feature: MA Experiment 20001757 PARAMETER Experiment Name: At_50mM_NH4NO3_L-to-H_P Parameter: Treatment Value: 50mM NH4NO3 vs 100mM Mannitol

SEQ ID NO: 93952 - protein, 245 aa, Arabidopsis thaliana; identical to SEQ ID NO: 90196
  peptide (1)..(245): Ceres Seq. ID no. 12722960
  misc_feature (83)..(175): Pfam Name: Nucleoplasmin Pfam Description: Nucleoplasmin
  misc_feature (1)..(245): Homolog of NCBI NO: 18407844 NR Description: putative histone deacetylase; protein id: supported by cDNA: gi_11066134, supported by cDNA: gi_17529219, by cDNA: gi_20466056 [Arabidopsis thaliana]
  misc_feature (1)..(244): Homolog of NCBI NO: 2392769 NR Description: putative histone deacetylase [Arabidopsis
  misc_feature (1)..(243): Homolog of NCBI NO: 30688577 NR Description: histone deacetylase-related protein [Arabidopsis
  misc_feature (1)..(217): Homolog of NCBI NO: 25352191 NR Description: probable histone deacetylase (EC 3.5.1.-) - Arabidopsis thaliana >gi|2854070|gb|AAC02539.1| putative deacetylase [Arabidopsis thaliana]
  misc_feature (1)..(212): Homolog of NCBI NO: 33667906 NR Description: histone deacetylase [Solanum chacoense]
  misc_feature (1)..(216): Homolog of NCBI NO: 7804963 NR Description: putative histone deacetylase HD2c [Arabidopsis >gi|9758002|dbj|BAB08599.1| histone deacetylase HD2c [Arabidopsis >gi|13926268|gb|AAK49605.1|AF372889_1 AT5g03740/F17C15_160
  misc_feature (1)..(216): Homolog of NCBI NO: 30680179 NR Description: histone deacetylase -related protein [Arabidopsis
  misc_feature (1)..(216): Homolog of NCBI NO: 11282318 NR Description: histone deacetylase-like protein - Arabidopsis
  misc_feature (1)..(243): Homolog of NCBI NO: 7716948 NR Description: histone deacetylase 2 isoform b [Zea mays]
  misc_feature (1)..(243): Homolog of NCBI NO: 7489751 NR Description: histone deacetylase (EC 3.5.1.-) HD2-p39,

SEQ ID NO: 93953 - DNA, 1605 bp, Arabidopsis thaliana; identical to SEQ ID NO: 90197
  misc_feature (1)..(1605): Ceres Seq. ID no. 12722978
  misc_feature: MA Experiment ID: 20000495 Result: Down-regulated in Transcription
  misc_feature: MA Experiment 20000495 PARAMETER Experiment Name: At_Guard_Cells_P Parameter: Harvest Date Value: 8/2/2002
  misc_feature: MA Experiment 20000495 PARAMETER Experiment Name: At_Guard_Cells_P Parameter: Organism Value: A. thaliana
  misc_feature: MA Experiment 20000495 PARAMETER Experiment Name: At_Guard_Cells_P Parameter: Tissue Value: Guard Cells vs. Leaves

SEQ ID NO: 93954 - protein, 534 aa, Arabidopsis thaliana; identical to SEQ ID NO: 90198
  peptide (1)..(534): Ceres Seq. ID no. 12722979
  misc_feature (45)..(481): Pfam Name: Protein kinase domain Pfam Description: Protein kinase domain
  misc_feature (1)..(534): Homolog of NCBI NO: 15230526 NR Description: putative protein; protein id: At3g44850.1 thaliana] >gi|9967495|emb|CAC03535.2| putative protein
  misc_feature (107)..(534): Homolog of NCBI NO: 11357701 NR Description: hypothetical protein F28D10_40 - Arabidopsis
  misc_feature (1)..(113): Homolog of NCBI NO: 11357701 NR Description: hypothetical protein F28D10_40 - Arabidopsis
  misc_feature (1)..(534): Homolog of NCBI NO: 21536540 NR Description: serine protein kinase-like protein [Arabidopsis
  misc_feature (1)..(534): Homolog of NCBI NO: 15237143 NR Description: serine protein kinase-like protein; protein id: supported by cDNA: 10218. [Arabidopsis thaliana]
  misc_feature (11)..(534): Homolog of NCBI NO: 18409750 NR Description: serine protein kinase - like; protein id:
  misc_feature (11)..(534): Homolog of NCBI NO: 9843649 NR Description: SRPK4 [Arabidopsis thaliana]
  misc_feature (11)..(534): Homolog of NCBI NO: 15010662 NR Description: AT3g53030/F8J2_200 [Arabidopsis thaliana]
  misc_feature (75)..(534): Homolog of NCBI NO: 11259819 NR Description: serine protein kinase-like - Arabidopsis thaliana
  misc_feature (19)..(309): Homolog of NCBI NO: 630737 NR Description: serine protein kinase SRPK1 - human

SEQ ID NO: 93955 - protein, 448 aa, Arabidopsis thaliana; identical to SEQ ID NO: 90199
  peptide (1)..(448): Ceres Seq. ID no. 12722980
  misc_feature (1)..(395): Pfam Name: Protein kinase domain Pfam Description: Protein kinase domain
  misc_feature (1)..(448): Homolog of NCBI NO: 15230526 NR Description: putative protein; protein id: At3g44850.1 thaliana] >gi|9967495|emb|CAC03535.2| putative protein
  misc_feature (21)..(448): Homolog of NCBI NO: 11357701 NR Description: hypothetical protein F28D10_40 - Arabidopsis
  misc_feature (1)..(27): Homolog of NCBI NO: 11357701 NR Description: hypothetical protein F28D10_40 - Arabidopsis
  misc_feature (1)..(448): Homolog of NCBI NO: 21536540 NR Description: serine protein kinase-like protein [Arabidopsis
  misc_feature (1)..(448): Homolog of NCBI NO: 15237143 NR Description: serine protein kinase-like protein; protein id: supported by cDNA: 10218. [Arabidopsis thaliana]
  misc_feature (1)..(448): Homolog of NCBI NO: 18409750 NR Description: serine protein kinase - like; protein id:
  misc_feature (1)..(448): Homolog of NCBI NO: 9843649 NR Description: SRPK4 [Arabidopsis thaliana]
  misc_feature (1)..(448): Homolog of NCBI NO: 15010662 NR Description: AT3g53030/F8J2_200 [Arabidopsis thaliana]
  misc_feature (1)..(448): Homolog of NCBI NO: 11259819 NR Description: serine protein kinase-like - Arabidopsis thaliana
  misc_feature (1)..(223): Homolog of NCBI NO: 630737 NR Description: serine protein kinase SRPK1 - human

SEQ ID NO: 93956 - protein, 409 aa, Arabidopsis thaliana; identical to SEQ ID NO: 90200
  peptide (1)..(409): Ceres Seq. ID no. 12722981
  misc_feature (1)..(356): Pfam Name: Protein kinase domain Pfam Description: Protein kinase domain
  misc_feature (1)..(409): Homolog of NCBI NO: 15230526 NR Description: putative protein; protein id: At3g44850.1 thaliana] >gi|9967495|emb|CAC03535.2| putative protein
  misc_feature (1)..(409): Homolog of NCBI NO: 11357701 NR Description: hypothetical protein F28D10_40 - Arabidopsis
  misc_feature (1)..(409): Homolog of NCBI NO: 21536540 NR Description: serine protein kinase-like protein [Arabidopsis
  misc_feature (1)..(409): Homolog of NCBI NO: 15237143 NR Description: serine protein kinase-like protein; protein id: supported by cDNA: 10218. [Arabidopsis thaliana]
  misc_feature (1)..(409): Homolog of NCBI NO: 18409750 NR Description: serine protein kinase - like; protein id:
  misc_feature (1)..(409): Homolog of NCBI NO: 9843649 NR Description: SRPK4 [Arabidopsis thaliana]
  misc_feature (1)..(409): Homolog of NCBI NO: 15010662 NR Description: AT3g53030/F8J2_200 [Arabidopsis thaliana]
  misc_feature (1)..(409): Homolog of NCBI NO: 11259819 NR Description: serine protein kinase-like - Arabidopsis thaliana
  misc_feature (1)..(184): Homolog of NCBI NO: 630737 NR Description: serine protein kinase SRPK1 - human
  misc_feature (146)..(357): Homolog of NCBI NO: 630737 NR Description: serine protein kinase SRPK1 - human

SEQ ID NO: 93957 - DNA, 918 bp, Arabidopsis thaliana; identical to SEQ ID NO: 90201
  misc_feature (1)..(918): Ceres Seq. ID no. 12722982
  misc_feature: MA Experiment ID: 108434 Result: Up-regulated in Transcription
  misc_feature: MA Experiment 108434 PARAMETER Experiment Name: At_Root_Tips_cDNA_P Parameter: Tissue Value: Root Tips
  misc_feature: MA Experiment ID: 108463 Result: Down-regulated in Transcription
  misc_feature: MA Experiment 108463 PARAMETER Experiment Name: At_Germinating_Seeds_cDNA_P Parameter: Age (day) Value: 3 vs. 0
  misc_feature: MA Experiment 108463 PARAMETER Experiment Name: At_Germinating_Seeds_cDNA_P Parameter: Tissue Value: Germinating Seeds
  misc_feature: MA Experiment ID: 108464 Result: Down-regulated in Transcription
  misc_feature: MA Experiment 108464 PARAMETER Experiment Name: At_Germinating_Seeds_cDNA_P Parameter: Age (day) Value: 4 vs. 0
  misc_feature: MA Experiment 108464 PARAMETER Experiment Name: At_Germinating_Seeds_cDNA_P Parameter: Tissue Value: Germinating Seeds
  misc_feature: MA Experiment ID: 108474 Result: Up-regulated in Transcription
  misc_feature: MA Experiment 108474 PARAMETER Experiment Name: At_Drought_Flowers_cDNA_P Parameter: Timepoint (hr) Value: null
  misc_feature: MA Experiment 108474 PARAMETER Experiment Name: At_Drought_Flowers_cDNA_P Parameter: Treatment Value: Drought vs. No Drought
  misc_feature: MA Experiment ID: 108488 Result: Up-regulated in Transcription
  misc_feature: MA Experiment ID: 108561 Result: Down-regulated in Transcription
  misc_feature: MA Experiment 108561 PARAMETER Experiment Name: At_100uM_ABA_cDNA_P Parameter: Timepoint (hr) Value: 6
  misc_feature: MA Experiment 108561 PARAMETER Experiment Name: At_100uM_ABA_cDNA_P Parameter: Tissue Value: Aerial
  misc_feature: MA Experiment 108561 PARAMETER Experiment Name: At_100uM_ABA_cDNA_P Parameter: Treatment Value: 100uM ABA vs. No Treatment
  misc_feature: MA Experiment ID: 108573 Result: Down-regulated in Transcription
  misc_feature: MA Experiment 108573 PARAMETER Experiment Name: At_Drought_cDNA_P Parameter: Timepoint (hr) Value: 6
  misc_feature: MA Experiment 108573 PARAMETER Experiment Name: At_Drought_cDNA_P Parameter: Tissue Value: Aerial
  misc_feature: MA Experiment 108573 PARAMETER Experiment Name: At_Drought_cDNA_P Parameter: Treatment Value: Drought vs. No Drought
  misc_feature: MA Experiment ID: 108595 Result: Down-regulated in Transcription
  misc_feature: MA Experiment 108595 PARAMETER Experiment Name: At_Ler-pi_Ovule_cDNA_P Parameter: Plant Line Value: null
  misc_feature: MA Experiment ID: 20000069 Result: Down-regulated in Transcription
  misc_feature: MA Experiment 20000069 PARAMETER Experiment Name: At_100uM_ABA_Mutants_cDNA_P Parameter: Plant Line Value: CS23
  misc_feature: MA Experiment 20000069 PARAMETER Experiment Name: At_100uM_ABA_Mutants_cDNA_P Parameter: Timepoint (hr) Value: 6
  misc_feature: MA Experiment 20000069 PARAMETER Experiment Name: At_100uM_ABA_Mutants_cDNA_P Parameter: Tissue Value: Aerial
  misc_feature: MA Experiment 20000069 PARAMETER Experiment Name: At_100uM_ABA_Mutants_cDNA_P Parameter: Treatment Value: 100uM ABA vs. No Treatment
  misc_feature: MA Experiment ID: 20000070 Result: Down-regulated in Transcription
  misc_feature: MA Experiment 20000070 PARAMETER Experiment Name: At_100uM_ABA_Mutants_cDNA_P Parameter: Plant Line Value: CS24
  misc_feature: MA Experiment 20000070 PARAMETER Experiment Name: At_100uM_ABA_Mutants_cDNA_P Parameter: Timepoint (hr) Value: 6
  misc_feature: MA Experiment 20000070 PARAMETER Experiment Name: At_100uM_ABA_Mutants_cDNA_P Parameter: Tissue Value: Aerial
  misc_feature: MA Experiment 20000070 PARAMETER Experiment Name: At_100uM_ABA_Mutants_cDNA_P Parameter: Treatment Value: 100uM ABA vs. No Treatment
  misc_feature: MA Experiment ID: 20000086 Result: Down-regulated in Transcription
  misc_feature: MA Experiment 20000086 PARAMETER Experiment Name: At_100uM_ABA_Mutants_cDNA_P Parameter: Plant Line Value: CS22
  misc_feature: MA Experiment 20000086 PARAMETER Experiment Name: At_100uM_ABA_Mutants_cDNA_P Parameter: Timepoint (hr) Value: 6
  misc_feature: MA Experiment 20000086 PARAMETER Experiment Name: At_100uM_ABA_Mutants_cDNA_P Parameter: Tissue Value: Aerial
  misc_feature: MA Experiment 20000086 PARAMETER Experiment Name: At_100uM_ABA_Mutants_cDNA_P Parameter: Treatment Value: 100uM ABA vs. No Treatment
  misc_feature: MA Experiment ID: 20000087 Result: Down-regulated in Transcription
  misc_feature: MA Experiment 20000087 PARAMETER Experiment Name: At_100uM_ABA_Mutants_cDNA_P Parameter: Plant Line Value: WS
  misc_feature: MA Experiment 20000087 PARAMETER Experiment Name: At_100uM_ABA_Mutants_cDNA_P Parameter: Timepoint (hr) Value: 6
  misc_feature: MA Experiment 20000087 PARAMETER Experiment Name: At_100uM_ABA_Mutants_cDNA_P Parameter: Tissue Value: Aerial
  misc_feature: MA Experiment 20000087 PARAMETER Experiment Name: At_100uM_ABA_Mutants_cDNA_P Parameter: Treatment Value: 100uM ABA vs. No Treatment
  misc_feature: MA Experiment ID: 20000088 Result: Down-regulated in Transcription
  misc_feature: MA Experiment 20000088 PARAMETER Experiment Name: At_100uM_ABA_Mutants_cDNA_P Parameter: Plant Line Value: Landsberg
  misc_feature: MA Experiment 20000088 PARAMETER Experiment Name: At_100uM_ABA_Mutants_cDNA_P Parameter: Timepoint (hr) Value: 6
  misc_feature: MA Experiment 20000088 PARAMETER Experiment Name: At_100uM_ABA_Mutants_cDNA_P Parameter: Tissue Value: Aerial
  misc_feature: MA Experiment 20000088 PARAMETER Experiment Name: At_100uM_ABA_Mutants_cDNA_P Parameter: Treatment Value: 100uM ABA vs. No Treatment
  misc_feature: MA Experiment ID: 20000117 Result: Down-regulated in Transcription
  misc_feature: MA Experiment 20000117 PARAMETER Experiment Name: At_100uM_ABA_Mutants_cDNA_P Parameter: Plant Line Value: Columbia
  misc_feature: MA Experiment 20000117 PARAMETER Experiment Name: At_100uM_ABA_Mutants_cDNA_P Parameter: Timepoint (hr) Value: 6
  misc_feature: MA Experiment 20000117 PARAMETER Experiment Name: At_100uM_ABA_Mutants_cDNA_P Parameter: Tissue Value: Aerial
  misc_feature: MA Experiment 20000117 PARAMETER Experiment Name: At_100uM_ABA_Mutants_cDNA_P Parameter: Treatment Value: 100uM ABA vs. No Treatment
  misc_feature: MA Experiment ID: 20000185 Result: Down-regulated in Transcription
  misc_feature: MA Experiment 20000185 PARAMETER Experiment Name: At_Roots__P Parameter: Age (day) Value: 7 vs. 21
  misc_feature: MA Experiment 20000185 PARAMETER Experiment Name: At_Roots__P Parameter: Organism Value: A. thaliana
  misc_feature: MA Experiment 20000185 PARAMETER Experiment Name: At_Roots__P Parameter: Tissue Value: Roots vs. Whole Plant
  misc_feature: MA Experiment ID: 20000234 Result: Up-regulated in Transcription
  misc_feature: MA Experiment 20000234 PARAMETER Experiment Name: At_Siliques_P Parameter: Age (day) Value: 21
  misc_feature: MA Experiment 20000234 PARAMETER Experiment Name: At_Siliques_P Parameter: Organism Value: A. thaliana
  misc_feature: MA Experiment 20000234 PARAMETER Experiment Name: At_Siliques_P Parameter: Plant Line Value: WS
  misc_feature: MA Experiment 20000234 PARAMETER Experiment Name: At_Siliques_P Parameter: Tissue Value: Less Than 5mm Siliques vs. Whole Plant
  misc_feature: MA Experiment ID: 20000235 Result: Up-regulated in Transcription
  misc_feature: MA Experiment 20000235 PARAMETER Experiment Name: At_Siliques_P Parameter: Age (day) Value: 21
  misc_feature: MA Experiment 20000235 PARAMETER Experiment Name: At_Siliques_P Parameter: Organism Value: A. thaliana
  misc_feature: MA Experiment 20000235 PARAMETER Experiment Name: At_Siliques_P Parameter: Plant Line Value: WS
  misc_feature: MA Experiment 20000235 PARAMETER Experiment Name: At_Siliques_P Parameter: Tissue Value: 5-10mm Siliques vs. Whole Plant
  misc_feature: MA Experiment ID: 20000437 Result: Down-regulated in Transcription
  misc_feature: MA Experiment 20000437 PARAMETER Experiment Name: At_Drought_P Parameter: Age (day) Value: 8
  misc_feature: MA Experiment 20000437 PARAMETER Experiment Name: At_Drought_P Parameter: Organism Value: A. thaliana
  misc_feature: MA Experiment 20000437 PARAMETER Experiment Name: At_Drought_P Parameter: Plant Line Value: WS
  misc_feature: MA Experiment 20000437 PARAMETER Experiment Name: At_Drought_P Parameter: Timepoint (hr) Value: 24
  misc_feature: MA Experiment 20000437 PARAMETER Experiment Name: At_Drought_P Parameter: Tissue Value: Whole Plant
  misc_feature: MA Experiment 20000437 PARAMETER Experiment Name: At_Drought_P Parameter: Treatment Value: Drought vs. No Drought
  misc_feature: MA Experiment ID: 20000439 Result: Down-regulated in Transcription
  misc_feature: MA Experiment 20000439 PARAMETER Experiment Name: At_Roots__P Parameter: Age (day) Value: 14 vs. 21
  misc_feature: MA Experiment 20000439 PARAMETER Experiment Name: At_Roots__P Parameter: Organism Value: A. thaliana
  misc_feature: MA Experiment 20000439 PARAMETER Experiment Name: At_Roots__P Parameter: Tissue Value: Roots vs. Whole Plant
  misc_feature: MA Experiment ID: 20000794 Result: Down-regulated in Transcription
  misc_feature: MA Experiment 20000794 PARAMETER Experiment Name: At_Petals_P Parameter: Age (day) Value: 23-25 days
  misc_feature: MA Experiment 20000794 PARAMETER Experiment Name: At_Petals_P Parameter: Plant Line Value: WS
  misc_feature: MA Experiment 20000794 PARAMETER Experiment Name: At_Petals_P Parameter: Tissue Value: Petals vs. Whole plant
  misc_feature: MA Experiment ID: 20001450 Result: Down-regulated in Transcription
  misc_feature: MA Experiment 20001450 PARAMETER Experiment Name: At_Far-red-induction_P Parameter: Age (day) Value: 7
  misc_feature: MA Experiment 20001450 PARAMETER Experiment Name: At_Far-red-induction_P Parameter: Light Value: Far-red vs. White
  misc_feature: MA Experiment 20001450 PARAMETER Experiment Name: At_Far-red-induction_P Parameter: Organism Value: A. thaliana
  misc_feature: MA Experiment 20001450 PARAMETER Experiment Name: At_Far-red-induction_P Parameter: Plant Line Value: Columbia
  misc_feature: MA Experiment 20001450 PARAMETER Experiment Name: At_Far-red-induction_P Parameter: Timepoint (hr) Value: 8
  misc_feature: MA Experiment 20001450 PARAMETER Experiment Name: At_Far-red-induction_P Parameter: Tissue Value: Whole Plant
  misc_feature: MA Experiment ID: 20001560 Result: Up-regulated in Transcription
  misc_feature: MA Experiment 20001560 PARAMETER Experiment Name: At_Drought_Soil_Dry_P Parameter: Age (day) Value: 28
  misc_feature: MA Experiment 20001560 PARAMETER Experiment Name: At_Drought_Soil_Dry_P Parameter: Organism Value: A. thaliana
  misc_feature: MA Experiment 20001560 PARAMETER Experiment Name: At_Drought_Soil_Dry_P Parameter: Plant Line Value: WS
  misc_feature: MA Experiment 20001560 PARAMETER Experiment Name: At_Drought_Soil_Dry_P Parameter: Post Timepoint (hr) Value: None
  misc_feature: MA Experiment 20001560 PARAMETER Experiment Name: At_Drought_Soil_Dry_P Parameter: Post-Treatment Value: None
  misc_feature: MA Experiment 20001560 PARAMETER Experiment Name: At_Drought_Soil_Dry_P Parameter: Timepoint (day) Value: 14
  misc_feature: MA Experiment 20001560 PARAMETER Experiment Name: At_Drought_Soil_Dry_P Parameter: Treatment Value: Drought vs. No Drought
  misc_feature: MA Experiment ID: 20001757 Result: Up-regulated in Transcription
  misc_feature: MA Experiment 20001757 PARAMETER Experiment Name: At_50mM_NH4NO3_L-to-H_P Parameter: Timepoint (hr) Value: 6
  misc_feature: MA Experiment 20001757 PARAMETER Experiment Name: At_50mM_NH4NO3_L-to-H_P Parameter: Tissue Value: Leaf
  misc_feature: MA Experiment 20001757 PARAMETER Experiment Name: At_50mM_NH4NO3_L-to-H_P Parameter: Treatment Value: 50mM NH4NO3 vs 100mM Mannitol
  misc_feature: MA Experiment ID: 20001905 Result: Down-regulated in Transcription
  misc_feature: MA Experiment 20001905 PARAMETER Experiment Name: At_Drought_Reproduction_P Parameter: Age (day) Value: 40
  misc_feature: MA Experiment 20001905 PARAMETER Experiment Name: At_Drought_Reproduction_P Parameter: Organism Value: A. thaliana
  misc_feature: MA Experiment 20001905 PARAMETER Experiment Name: At_Drought_Reproduction_P Parameter: Plant Line Value: WS
  misc_feature: MA Experiment 20001905 PARAMETER Experiment Name: At_Drought_Reproduction_P Parameter: Timepoint (day) Value: 10
  misc_feature: MA Experiment 20001905 PARAMETER Experiment Name: At_Drought_Reproduction_P Parameter: Tissue Value: Rosettes
  misc_feature: MA Experiment 20001905 PARAMETER Experiment Name: At_Drought_Reproduction_P Parameter: Treatment Value: Drought vs. No Drought
  misc_feature: MA Experiment ID: 20001906 Result: Down-regulated in Transcription
  misc_feature: MA Experiment 20001906 PARAMETER Experiment Name: At_Drought_Reproduction_P Parameter: Age (day) Value: 35
  misc_feature: MA Experiment 20001906 PARAMETER Experiment Name: At_Drought_Reproduction_P Parameter: Organism Value: A. thaliana
  misc_feature: MA Experiment 20001906 PARAMETER Experiment Name: At_Drought_Reproduction_P Parameter: Plant Line Value: WS
  misc_feature: MA Experiment 20001906 PARAMETER Experiment Name: At_Drought_Reproduction_P Parameter: Timepoint (day) Value: 5
  misc_feature: MA Experiment 20001906 PARAMETER Experiment Name: At_Drought_Reproduction_P Parameter: Tissue Value: Siliques
  misc_feature: MA Experiment 20001906 PARAMETER Experiment Name: At_Drought_Reproduction_P Parameter: Treatment Value: Drought vs. No Drought
  misc_feature: MA Experiment ID: 20001908 Result: Down-regulated in Transcription
  misc_feature: MA Experiment 20001908 PARAMETER Experiment Name: At_Drought_Reproduction_P Parameter: Age (day) Value: 40
  misc_feature: MA Experiment 20001908 PARAMETER Experiment Name: At_Drought_Reproduction_P Parameter: Organism Value: A. thaliana
  misc_feature: MA Experiment 20001908 PARAMETER Experiment Name: At_Drought_Reproduction_P Parameter: Plant Line Value: WS
  misc_feature: MA Experiment 20001908 PARAMETER Experiment Name: At_Drought_Reproduction_P Parameter: Timepoint (day) Value: 10
  misc_feature: MA Experiment 20001908 PARAMETER Experiment Name: At_Drought_Reproduction_P Parameter: Tissue Value: Siliques
  misc_feature: MA Experiment 20001908 PARAMETER Experiment Name: At_Drought_Reproduction_P Parameter: Treatment Value: Drought vs. No Drought

SEQ ID NO: 93958 - protein, 220 aa, Arabidopsis thaliana; identical to SEQ ID NO: 90202
  peptide (1)..(220): Ceres Seq. ID no. 12722983
  misc_feature (134)..(220): Pfam Name: Ribosomal protein L9, C-terminal domain Pfam Description: Ribosomal protein L9, C-terminal domain
  misc_feature (24)..(220): Homolog of NCBI NO: 15230544 NR Description: RP19 gene for chloroplast ribosomal protein CL9; id: At3g44890.1, supported by cDNA: 13554., supported by cDNA: [Arabidopsis thaliana] >gi|133028|sp|P25864|RK9_ARATH 50S
  misc_feature (24)..(220): Homolog of NCBI NO: 1173069 NR Description: 50S RIBOSOMAL PROTEIN L9, CHLOROPLAST PRECURSOR
  misc_feature (24)..(220): Homolog of NCBI NO: 71256 NR Description: ribosomal protein L9 precursor, chloroplast -
  misc_feature (63)..(218): Homolog of NCBI NO: 22204126 NR Description: putative plastid ribosomal protein CL9 [Triticum
  misc_feature (69)..(217): Homolog of NCBI NO: 33862229 NR Description: 50S ribosomal protein L9 [Prochlorococcus marinus pastoris str. CCMP1378] >gi|33634447|emb|CAE20132.1| 50S protein L9 [Prochlorococcus marinus subsp. pastoris str.
  misc_feature (69)..(220): Homolog of NCBI NO: 33241283 NR Description: Ribosomal protein L9 [Prochlorococcus marinus marinus str. CCMP1375] >gi|33238813|gb|AAQ00878.1| Ribosomal
  misc_feature (69)..(217): Homolog of NCBI NO: 33864439 NR Description: 50S ribosomal protein L9 [Prochlorococcus marinus MIT 9313] >gi|33641219|emb|CAE22349.1| 50S ribosomal protein L9
  misc_feature (69)..(217): Homolog of NCBI NO: 7676164 NR Description: 50S RIBOSOMAL PROTEIN L9
  misc_feature (69)..(217): Homolog of NCBI NO: 16330765 NR Description: 50S ribosomal protein L9 [Synechocystis sp. PCC
  misc_feature (74)..(220): Homolog of NCBI NO: 17228075 NR Description: 50S ribosomal protein L9 [Nostoc sp. PCC 7120]

SEQ ID NO: 93959 - protein, 197 aa, Arabidopsis thaliana; identical to SEQ ID NO: 75073
  peptide (1)..(197): Ceres Seq. ID no. 12722984
  misc_feature (111)..(197): Pfam Name: Ribosomal protein L9, C-terminal domain Pfam Description: Ribosomal protein L9, C-terminal domain
  misc_feature (1)..(197): Homolog of NCBI NO: 15230544 NR Description: RP19 gene for chloroplast ribosomal protein CL9; id: At3g44890.1, supported by cDNA: 13554., supported by cDNA: [Arabidopsis thaliana] >gi|133028|sp|P25864|RK9_ARATH 50S
  misc_feature (1)..(197): Homolog of NCBI NO: 1173069 NR Description: 50S RIBOSOMAL PROTEIN L9, CHLOROPLAST PRECURSOR
  misc_feature (1)..(197): Homolog of NCBI NO: 71256 NR Description: ribosomal protein L9 precursor, chloroplast -
  misc_feature (40)..(195): Homolog of NCBI NO: 22204126 NR Description: putative plastid ribosomal protein CL9 [Triticum
  misc_feature (46)..(194): Homolog of NCBI NO: 33862229 NR Description: 50S ribosomal protein L9 [Prochlorococcus marinus pastoris str. CCMP1378] >gi|33634447|emb|CAE20132.1| 50S protein L9 [Prochlorococcus marinus subsp. pastoris str.
  misc_feature (46)..(197): Homolog of NCBI NO: 33241283 NR Description: Ribosomal protein L9 [Prochlorococcus marinus marinus str. CCMP1375] >gi|33238813|gb|AAQ00878.1| Ribosomal
  misc_feature (46)..(194): Homolog of NCBI NO: 33864439 NR Description: 50S ribosomal protein L9 [Prochlorococcus marinus MIT 9313] >gi|33641219|emb|CAE22349.1| 50S ribosomal protein L9
  misc_feature (46)..(194): Homolog of NCBI NO: 7676164 NR Description: 50S RIBOSOMAL PROTEIN L9
  misc_feature (46)..(194): Homolog of NCBI NO: 16330765 NR Description: 50S ribosomal protein L9 [Synechocystis sp. PCC
  misc_feature (51)..(197): Homolog of NCBI NO: 17228075 NR Description: 50S ribosomal protein L9 [Nostoc sp. PCC 7120]

SEQ ID NO: 93960 - protein, 110 aa, Arabidopsis thaliana; identical to SEQ ID NO: 75074
  peptide (1)..(110): Ceres Seq. ID no. 12722985
  misc_feature (24)..(110): Pfam Name: Ribosomal protein L9, C-terminal domain Pfam Description: Ribosomal protein L9, C-terminal domain
  misc_feature (1)..(110): Homolog of NCBI NO: 15230544 NR Description: RP19 gene for chloroplast ribosomal protein CL9; id: At3g44890.1, supported by cDNA: 13554., supported by cDNA: [Arabidopsis thaliana] >gi|133028|sp|P25864|RK9_ARATH 50S
  misc_feature (1)..(110): Homolog of NCBI NO: 1173069 NR Description: 50S RIBOSOMAL PROTEIN L9, CHLOROPLAST PRECURSOR
  misc_feature (1)..(110): Homolog of NCBI NO: 71256 NR Description: ribosomal protein L9 precursor, chloroplast -
  misc_feature (1)..(108): Homolog of NCBI NO: 22204126 NR Description: putative plastid ribosomal protein CL9 [Triticum
  misc_feature (1)..(107): Homolog of NCBI NO: 33862229 NR Description: 50S ribosomal protein L9 [Prochlorococcus marinus pastoris str. CCMP1378] >gi|33634447|emb|CAE20132.1| 50S protein L9 [Prochlorococcus marinus subsp. pastoris str.
  misc_feature (1)..(110): Homolog of NCBI NO: 33241283 NR Description: Ribosomal protein L9 [Prochlorococcus marinus marinus str. CCMP1375] >gi|33238813|gb|AAQ00878.1| Ribosomal
  misc_feature (1)..(107): Homolog of NCBI NO: 33864439 NR Description: 50S ribosomal protein L9 [Prochlorococcus marinus MIT 9313] >gi|33641219|emb|CAE22349.1| 50S ribosomal protein L9
  misc_feature (1)..(107): Homolog of NCBI NO: 7676164 NR Description: 50S RIBOSOMAL PROTEIN L9
  misc_feature (1)..(107): Homolog of NCBI NO: 16330765 NR Description: 50S ribosomal protein L9 [Synechocystis sp. PCC
  misc_feature (1)..(110): Homolog of NCBI NO: 17228075 NR Description: 50S ribosomal protein L9 [Nostoc sp. PCC 7120]

SEQ ID NO: 93961 - DNA, 1896 bp, Arabidopsis thaliana; identical to SEQ ID NO: 90205
  misc_feature (1)..(1896): Ceres Seq. ID no. 12723002
  misc_feature: MA Experiment ID: 20000182 Result: Up-regulated in Transcription
  misc_feature: MA Experiment 20000182 PARAMETER Experiment Name: At_2mM_SA_P Parameter: Age (day) Value: 14
  misc_feature: MA Experiment 20000182 PARAMETER Experiment Name: At_2mM_SA_P Parameter: Organism Value: A. thaliana
  misc_feature: MA Experiment 20000182 PARAMETER Experiment Name: At_2mM_SA_P Parameter: Plant Line Value: WS
  misc_feature: MA Experiment 20000182 PARAMETER Experiment Name: At_2mM_SA_P Parameter: Timepoint (hr) Value: 6
  misc_feature: MA Experiment 20000182 PARAMETER Experiment Name: At_2mM_SA_P Parameter: Tissue Value: Aerial
  misc_feature: MA Experiment 20000182 PARAMETER Experiment Name: At_2mM_SA_P Parameter: Treatment Value: 2mM SA vs. No Treatment
  misc_feature: MA Experiment ID: 20000184 Result: Down-regulated in Transcription
  misc_feature: MA Experiment 20000184 PARAMETER Experiment Name: At_Shoots__P Parameter: Age (day) Value: 7
  misc_feature: MA Experiment 20000184 PARAMETER Experiment Name: At_Shoots__P Parameter: Tissue Value: Shoots vs. Whole Plant
  misc_feature: MA Experiment ID: 20000234 Result: Down-regulated in Transcription
  misc_feature: MA Experiment 20000234 PARAMETER Experiment Name: At_Siliques_P Parameter: Age (day) Value: 21
  misc_feature: MA Experiment 20000234 PARAMETER Experiment Name: At_Siliques_P Parameter: Organism Value: A. thaliana
  misc_feature: MA Experiment 20000234 PARAMETER Experiment Name: At_Siliques_P Parameter: Plant Line Value: WS
  misc_feature: MA Experiment 20000234 PARAMETER Experiment Name: At_Siliques_P Parameter: Tissue Value: Less Than 5mm Siliques vs. Whole Plant
  misc_feature: MA Experiment ID: 20000235 Result: Down-regulated in Transcription
  misc_feature: MA Experiment 20000235 PARAMETER Experiment Name: At_Siliques_P Parameter: Age (day) Value: 21
  misc_feature: MA Experiment 20000235 PARAMETER Experiment Name: At_Siliques_P Parameter: Organism Value: A. thaliana
  misc_feature: MA Experiment 20000235 PARAMETER Experiment Name: At_Siliques_P Parameter: Plant Line Value: WS
  misc_feature: MA Experiment 20000235 PARAMETER Experiment Name: At_Siliques_P Parameter: Tissue Value: 5-10mm Siliques vs. Whole Plant
  misc_feature: MA Experiment ID: 20000264 Result: Down-regulated in Transcription
  misc_feature: MA Experiment 20000264 PARAMETER Experiment Name: At_Open_Flower_P Parameter: Age (day) Value: 21
  misc_feature: MA Experiment 20000264 PARAMETER Experiment Name: At_Open_Flower_P Parameter: Plant Line Value: WS
  misc_feature: MA Experiment 20000264 PARAMETER Experiment Name: At_Open_Flower_P Parameter: Tissue Value: Open Flower vs. Whole Plant
  misc_feature: MA Experiment ID: 20000265 Result: Down-regulated in Transcription
  misc_feature: MA Experiment 20000265 PARAMETER Experiment Name: At_Open_Flower_P Parameter: Age (day) Value: 21
  misc_feature: MA Experiment 20000265 PARAMETER Experiment Name: At_Open_Flower_P Parameter: Plant Line Value: WS
  misc_feature: MA Experiment 20000265 PARAMETER Experiment Name: At_Open_Flower_P Parameter: Tissue Value: Closed Flower vs. Whole Plant
  misc_feature: MA Experiment ID: 20000286 Result: Down-regulated in Transcription
  misc_feature: MA Experiment 20000286 PARAMETER Experiment Name: At_Open_Flower_P Parameter: Age (day) Value: 21
  misc_feature: MA Experiment 20000286 PARAMETER Experiment Name: At_Open_Flower_P Parameter: Plant Line Value: WS
  misc_feature: MA Experiment 20000286 PARAMETER Experiment Name: At_Open_Flower_P Parameter: Tissue Value: Half Open vs. Whole Plant
  misc_feature: MA Experiment ID: 20000437 Result: Up-regulated in Transcription
  misc_feature: MA Experiment 20000437 PARAMETER Experiment Name: At_Drought_P Parameter: Age (day) Value: 8
  misc_feature: MA Experiment 20000437 PARAMETER Experiment Name: At_Drought_P Parameter: Organism Value: A. thaliana
  misc_feature: MA Experiment 20000437 PARAMETER Experiment Name: At_Drought_P Parameter: Plant Line Value: WS
  misc_feature: MA Experiment 20000437 PARAMETER Experiment Name: At_Drought_P Parameter: Timepoint (hr) Value: 24
  misc_feature: MA Experiment 20000437 PARAMETER Experiment Name: At_Drought_P Parameter: Tissue Value: Whole Plant
  misc_feature: MA Experiment 20000437 PARAMETER Experiment Name: At_Drought_P Parameter: Treatment Value: Drought vs. No Drought
  misc_feature: MA Experiment ID: 20000438 Result: Down-regulated in Transcription
  misc_feature: MA Experiment 20000438 PARAMETER Experiment Name: At_Shoots__P Parameter: Age (day) Value: 14
  misc_feature: MA Experiment 20000438 PARAMETER Experiment Name: At_Shoots__P Parameter: Tissue Value: Shoots vs. Whole Plant
  misc_feature: MA Experiment ID: 20001247 Result: Up-regulated in Transcription
  misc_feature: MA Experiment 20001247 PARAMETER Experiment Name: At_Far-red-induction_P Parameter: Age (day) Value: 7
  misc_feature: MA Experiment 20001247 PARAMETER Experiment Name: At_Far-red-induction_P Parameter: Light Value: Far-red vs. White
  misc_feature: MA Experiment 20001247 PARAMETER Experiment Name: At_Far-red-induction_P Parameter: Organism Value: A. thaliana
  misc_feature: MA Experiment 20001247 PARAMETER Experiment Name: At_Far-red-induction_P Parameter: Plant Line Value: Columbia
  misc_feature: MA Experiment 20001247 PARAMETER Experiment Name: At_Far-red-induction_P Parameter: Timepoint (hr) Value: 1
  misc_feature: MA Experiment 20001247 PARAMETER Experiment Name: At_Far-red-induction_P Parameter: Tissue Value: Whole Plant
  misc_feature: MA Experiment ID: 20001248 Result: Up-regulated in Transcription
  misc_feature: MA Experiment 20001248 PARAMETER Experiment Name: At_Far-red-induction_P Parameter: Age (day) Value: 7
  misc_feature: MA Experiment 20001248 PARAMETER Experiment Name: At_Far-red-induction_P Parameter: Light Value: Far-red vs. White
  misc_feature: MA Experiment 20001248 PARAMETER Experiment Name: At_Far-red-induction_P Parameter: Organism Value: A. thaliana
  misc_feature: MA Experiment 20001248 PARAMETER Experiment Name: At_Far-red-induction_P Parameter: Plant Line Value: Columbia
  misc_feature: MA Experiment 20001248 PARAMETER Experiment Name: At_Far-red-induction_P Parameter: Timepoint (hr) Value: 4
  misc_feature: MA Experiment 20001248 PARAMETER Experiment Name: At_Far-red-induction_P Parameter: Tissue Value: Whole Plant
  misc_feature: MA Experiment ID: 20001558 Result: Down-regulated in Transcription
  misc_feature: MA Experiment 20001558 PARAMETER Experiment Name: At_Drought_Soil_Dry_P Parameter: Age (day) Value: 27
  misc_feature: MA Experiment 20001558 PARAMETER Experiment Name: At_Drought_Soil_Dry_P Parameter: Organism Value: A. thaliana
  misc_feature: MA Experiment 20001558 PARAMETER Experiment Name: At_Drought_Soil_Dry_P Parameter: Plant Line Value: WS
  misc_feature: MA Experiment 20001558 PARAMETER Experiment Name: At_Drought_Soil_Dry_P Parameter: Post Timepoint (hr) Value: 6
  misc_feature: MA Experiment 20001558 PARAMETER Experiment Name: At_Drought_Soil_Dry_P Parameter: Post-Treatment Value: Re-Water vs. No Drought
  misc_feature: MA Experiment 20001558 PARAMETER Experiment Name: At_Drought_Soil_Dry_P Parameter: Timepoint (day) Value: 13
  misc_feature: MA Experiment 20001558 PARAMETER Experiment Name: At_Drought_Soil_Dry_P Parameter: Treatment Value: Drought vs. No Drought

SEQ ID NO: 93962 - protein, 569 aa, Arabidopsis thaliana; identical to SEQ ID NO: 90206
  peptide (1)..(569): Ceres Seq. ID no. 12723003
  misc_feature (1)..(569): Homolog of NCBI NO: 22331608 NR Description: putative protein; protein id: At3g45040.1,
  misc_feature (1)..(569): Homolog of NCBI NO: 18389248 NR Description: unknown protein [Arabidopsis thaliana]
  misc_feature (1)..(414): Homolog of NCBI NO: 11357412 NR Description: hypothetical protein F14D17.110 - Arabidopsis >gi|7671405|emb|CAB89319.1| putative protein [Arabidopsis
  misc_feature (413)..(569): Homolog of NCBI NO: 11357412 NR Description: hypothetical protein F14D17.110 - Arabidopsis >gi|7671405|emb|CAB89319.1| putative protein [Arabidopsis
  misc_feature (204)..(567): Homolog of NCBI NO: 7662482 NR Description: KIAA1094 protein [Homo sapiens] Hypothetical protein KIAA1094 >gi|5689525|dbj|BAA83046.1| protein [Homo sapiens] >gi|23272297|gb|AAH35556.1| KIAA1094
  misc_feature (204)..(567): Homolog of NCBI NO: 40789043 NR Description: KIAA1094 protein [Homo sapiens]
  misc_feature (128)..(567): Homolog of NCBI NO: 27706618 NR Description: similar to Hypothetical protein KIAA1094 [Rattus
  misc_feature (128)..(567): Homolog of NCBI NO: 29244058 NR Description: cDNA sequence BC026973 [Mus musculus]
  misc_feature (325)..(569): Homolog of NCBI NO: 24654201 NR Description: CG8311-PA [Drosophila melanogaster]
  misc_feature (297)..(566): Homolog of NCBI NO: 19075483 NR Description: putative dolichol kinase [Schizosaccharomyces

SEQ ID NO: 93963 - protein, 487 aa, Arabidopsis thaliana; identical to SEQ ID NO: 86417
  peptide (1)..(487): Ceres Seq. ID no. 12723004
  misc_feature (1)..(487): Homolog of NCBI NO: 22331608 NR Description: putative protein; protein id: At3g45040.1,
  misc_feature (1)..(487): Homolog of NCBI NO: 18389248 NR Description: unknown protein [Arabidopsis thaliana]
  misc_feature (1)..(332): Homolog of NCBI NO: 11357412 NR Description: hypothetical protein F14D17.110 - Arabidopsis >gi|7671405|emb|CAB89319.1| putative protein [Arabidopsis
  misc_feature (331)..(487): Homolog of NCBI NO: 11357412 NR Description: hypothetical protein F14D17.110 - Arabidopsis >gi|7671405|emb|CAB89319.1| putative protein [Arabidopsis
  misc_feature (122)..(485): Homolog of NCBI NO: 7662482 NR Description: KIAA1094 protein [Homo sapiens] Hypothetical protein KIAA1094 >gi|5689525|dbj|BAA83046.1| protein [Homo sapiens] >gi|23272297|gb|AAH35556.1| KIAA1094
  misc_feature (122)..(485): Homolog of NCBI NO: 40789043 NR Description: KIAA1094 protein [Homo sapiens]
  misc_feature (46)..(485): Homolog of NCBI NO: 27706618 NR Description: similar to Hypothetical protein KIAA1094 [Rattus
  misc_feature (46)..(485): Homolog of NCBI NO: 29244058 NR Description: cDNA sequence BC026973 [Mus musculus]
  misc_feature (243)..(487): Homolog of NCBI NO: 24654201 NR Description: CG8311-PA [Drosophila melanogaster]
  misc_feature (215)..(484): Homolog of NCBI NO: 19075483 NR Description: putative dolichol kinase [Schizosaccharomyces

SEQ ID NO: 93964 - protein, 461 aa, Arabidopsis thaliana; identical to SEQ ID NO: 86418
  peptide (1)..(461): Ceres Seq. ID no. 12723005
  misc_feature (1)..(461): Homolog of NCBI NO: 22331608 NR Description: putative protein; protein id: At3g45040.1,
  misc_feature (1)..(461): Homolog of NCBI NO: 18389248 NR Description: unknown protein [Arabidopsis thaliana]
  misc_feature (1)..(306): Homolog of NCBI NO: 11357412 NR Description: hypothetical protein F14D17.110 - Arabidopsis >gi|7671405|emb|CAB89319.1| putative protein [Arabidopsis
  misc_feature (305)..(461): Homolog of NCBI NO: 11357412 NR Description: hypothetical protein F14D17.110 - Arabidopsis >gi|7671405|emb|CAB89319.1| putative protein [Arabidopsis
  misc_feature (96)..(459): Homolog of NCBI NO: 7662482 NR Description: KIAA1094 protein [Homo sapiens] Hypothetical protein KIAA1094 >gi|5689525|dbj|BAA83046.1| protein [Homo sapiens] >gi|23272297|gb|AAH35556.1| KIAA1094
  misc_feature (96)..(459): Homolog of NCBI NO: 40789043 NR Description: KIAA1094 protein [Homo sapiens]
  misc_feature (20)..(459): Homolog of NCBI NO: 27706618 NR Description: similar to Hypothetical protein KIAA1094 [Rattus
  misc_feature (20)..(459): Homolog of NCBI NO: 29244058 NR Description: cDNA sequence BC026973 [Mus musculus]
  misc_feature (217)..(461): Homolog of NCBI NO: 24654201 NR Description: CG8311-PA [Drosophila melanogaster]
  misc_feature (189)..(458): Homolog of NCBI NO: 19075483 NR Description: putative dolichol kinase [Schizosaccharomyces

SEQ ID NO: 93965 - DNA, 972 bp, Arabidopsis thaliana; identical to SEQ ID NO: 90209
  misc_feature (1)..(972): Ceres Seq. ID no. 12723010
  misc_feature: MA Experiment ID: 20000314 Result: Up-regulated in Transcription
  misc_feature: MA Experiment 20000314 PARAMETER Experiment Name: At_14day_Shoots-Roots_Sub_P Parameter: Age (day) Value: 14
  misc_feature: MA Experiment 20000314 PARAMETER Experiment Name: At_14day_Shoots-Roots_Sub_P Parameter: Organism Value: A. thaliana
  misc_feature: MA Experiment 20000314 PARAMETER Experiment Name: At_14day_Shoots-Roots_Sub_P Parameter: Plant Line Value: WS
  misc_feature: MA Experiment 20000314 PARAMETER Experiment Name: At_14day_Shoots-Roots_Sub_P Parameter: Tissue Value: Roots vs. Whole Plant
  misc_feature: MA Experiment ID: 20000347 Result: Down-regulated in Transcription
  misc_feature: MA Experiment 20000347 PARAMETER Experiment Name: At_2mM_SA_Sub_P Parameter: Age (day) Value: 14
  misc_feature: MA Experiment 20000347 PARAMETER Experiment Name: At_2mM_SA_Sub_P Parameter: Organism Value: A. thaliana
  misc_feature: MA Experiment 20000347 PARAMETER Experiment Name: At_2mM_SA_Sub_P Parameter: Plant Line Value: WS
  misc_feature: MA Experiment 20000347 PARAMETER Experiment Name: At_2mM_SA_Sub_P Parameter: Timepoint (hr) Value: 6
  misc_feature: MA Experiment 20000347 PARAMETER Experiment Name: At_2mM_SA_Sub_P Parameter: Tissue Value: Aerial
  misc_feature: MA Experiment 20000347 PARAMETER Experiment Name: At_2mM_SA_Sub_P Parameter: Treatment Value: 2mM SA vs. No Treatment
  misc_feature: MA Experiment ID: 20000634 Result: Down-regulated in Transcription
  misc_feature: MA Experiment 20000634 PARAMETER Experiment Name: At_10percent_PEG_Sub_P Parameter: Age (day) Value: 12
  misc_feature: MA Experiment 20000634 PARAMETER Experiment Name: At_10percent_PEG_Sub_P Parameter: Organism Value: A. thaliana
  misc_feature: MA Experiment 20000634 PARAMETER Experiment Name: At_10percent_PEG_Sub_P Parameter: Plant Line Value: WS
  misc_feature: MA Experiment 20000634 PARAMETER Experiment Name: At_10percent_PEG_Sub_P Parameter: Timepoint (day) Value: 12
  misc_feature: MA Experiment 20000634 PARAMETER Experiment Name: At_10percent_PEG_Sub_P Parameter: Tissue Value: Whole Plant
  misc_feature: MA Experiment 20000634 PARAMETER Experiment Name: At_10percent_PEG_Sub_P Parameter: Treatment Value: 10% PEG vs. No Treatment

SEQ ID NO: 93966 - protein, 323 aa, Arabidopsis thaliana; identical to SEQ ID NO: 90210
  peptide (1)..(323): Ceres Seq. ID no. 12723011
  misc_feature (59)..(320): Pfam Name: Sulfotransferase domain Pfam Description: Sulfotransferase domain
  misc_feature (1)..(323): Homolog of NCBI NO: 15230602 NR Description: sulfotransferase-like protein; protein id:
  misc_feature (3)..(323): Homolog of NCBI NO: 15230603 NR Description: sulfotransferase-like protein; protein id:
  misc_feature (6)..(323): Homolog of NCBI NO: 15239947 NR Description: steroid sulfotransferase-like; protein id:
  misc_feature (8)..(322): Homolog of NCBI NO: 15222843 NR Description: steroid sulfotransferase, putative; protein id: supported by cDNA: 150484. [Arabidopsis thaliana]
  misc_feature (8)..(322): Homolog of NCBI NO: 21553545 NR Description: steroid sulfotransferase, putative [Arabidopsis
  misc_feature (6)..(323): Homolog of NCBI NO: 15217849 NR Description: steroid sulfotransferase, putative; protein id: [Arabidopsis thaliana] >gi|25288810|pir||F86407 probable
  misc_feature (4)..(323): Homolog of NCBI NO: 15226028 NR Description: putative steroid sulfotransferase; protein id:
  misc_feature (3)..(318): Homolog of NCBI NO: 15236162 NR Description: steroid sulfotransferase - like protein; protein At4g26280.1 [Arabidopsis thaliana] >gi|7434975|pir||T06012
  misc_feature (5)..(323): Homolog of NCBI NO: 18395604 NR Description: putative steroid sulfotransferase; protein id: supported by cDNA: 3964., supported by cDNA: gi_20260123 thaliana] >gi|20197902|gb|AAD20077.2| putative steroid putative
  misc_feature (5)..(323): Homolog of NCBI NO: 38230552 NR Description: steroid sulfotransferase 4 [Brassica napus]

SEQ ID NO: 93967 - protein, 321 aa, Arabidopsis thaliana; identical to SEQ ID NO: 90211
  peptide (1)..(321): Ceres Seq. ID no. 12723012
  misc_feature (57)..(318): Pfam Name: Sulfotransferase domain Pfam Description: Sulfotransferase domain
  misc_feature (1)..(321): Homolog of NCBI NO: 15230602 NR Description: sulfotransferase-like protein; protein id:
  misc_feature (1)..(321): Homolog of NCBI NO: 15230603 NR Description: sulfotransferase-like protein; protein id:
  misc_feature (4)..(321): Homolog of NCBI NO: 15239947 NR Description: steroid sulfotransferase-like; protein id:
  misc_feature (6)..(320): Homolog of NCBI NO: 15222843 NR Description: steroid sulfotransferase, putative; protein id: supported by cDNA: 150484. [Arabidopsis thaliana]
  misc_feature (6)..(320): Homolog of NCBI NO: 21553545 NR Description: steroid sulfotransferase, putative [Arabidopsis
  misc_feature (4)..(321): Homolog of NCBI NO: 15217849 NR Description: steroid sulfotransferase, putative; protein id: [Arabidopsis thaliana] >gi|25288810|pir||F86407 probable
  misc_feature (2)..(321): Homolog of NCBI NO: 15226028 NR Description: putative steroid sulfotransferase; protein id:
  misc_feature (1)..(316): Homolog of NCBI NO: 15236162 NR Description: steroid sulfotransferase - like protein; protein At4g26280.1 [Arabidopsis thaliana] >gi|7434975|pir||T06012
  misc_feature (3)..(321): Homolog of NCBI NO: 18395604 NR Description: putative steroid sulfotransferase; protein id: supported by cDNA: 3964., supported by cDNA: gi_20260123 thaliana] >gi|20197902|gb|AAD20077.2| putative steroid putative
  misc_feature (3)..(321): Homolog of NCBI NO: 38230552 NR Description: steroid sulfotransferase 4 [Brassica napus]

SEQ ID NO: 93968 - DNA, 1050 bp, Arabidopsis thaliana; identical to SEQ ID NO: 90212
  misc_feature (1)..(1050): Ceres Seq. ID no. 12723062
  misc_feature: MA Experiment ID: 20000440 Result: Up-regulated in Transcription
  misc_feature: MA Experiment 20000440 PARAMETER Experiment Name: At_Closed-Flower__Sub_P Parameter: Tissue Value: Closed Flower vs. Whole Plant

SEQ ID NO: 93969 - protein, 349 aa, Arabidopsis thaliana; identical to SEQ ID NO: 90213
  peptide (1)..(349): Ceres Seq. ID no. 12723063
  misc_feature (31)..(340): Pfam Name: GDSL-like Lipase/Acylhydrolase Pfam Description: GDSL-like Lipase/Acylhydrolase
  misc_feature (1)..(349): Homolog of NCBI NO: 18406327 NR Description: proline-rich protein, putative; protein id:
  misc_feature (1)..(349): Homolog of NCBI NO: 15217977 NR Description: proline-rich protein, putative; protein id:
  misc_feature (1)..(229): Homolog of NCBI NO: 15229719 NR Description: putative protein; protein id: At3g43570.1 thaliana] >gi|9967506|emb|CAC05631.1| putative protein
  misc_feature (259)..(349): Homolog of NCBI NO: 15229719 NR Description: putative protein; protein id: At3g43570.1 thaliana] >gi|9967506|emb|CAC05631.1| putative protein
  misc_feature (39)..(229): Homolog of NCBI NO: 22330312 NR Description: similar to proline-rich protein, putative;
  misc_feature (259)..(349): Homolog of NCBI NO: 22330312 NR Description: similar to proline-rich protein, putative;
  misc_feature (39)..(344): Homolog of NCBI NO: 15231934 NR Description: hypothetical protein; protein id: At3g14820.1
  misc_feature (1)..(202): Homolog of NCBI NO: 15229307 NR Description: putative protein; protein id: At3g43550.1
  misc_feature (4)..(347): Homolog of NCBI NO: 15222901 NR Description: family II extracellular lipase 3 (EXL3); protein At1g75900.1, supported by cDNA: gi_15054385 [Arabidopsis >gi|15054386|gb|AAK30018.1| family II lipase EXL3 [Arabidopsis
  misc_feature (4)..(347): Homolog of NCBI NO: 26449364 NR Description: putative family II lipase EXL3 [Arabidopsis

SEQ ID NO: 93970 - protein, 311 aa, Arabidopsis thaliana; identical to SEQ ID NO: 90214
  peptide (1)..(311): Ceres Seq. ID no. 12723064
  misc_feature (1)..(302): Pfam Name: GDSL-like Lipase/Acylhydrolase Pfam Description: GDSL-like Lipase/Acylhydrolase
  misc_feature (1)..(311): Homolog of NCBI NO: 18406327 NR Description: proline-rich protein, putative; protein id:
  misc_feature (1)..(311): Homolog of NCBI NO: 15217977 NR Description: proline-rich protein, putative; protein id:
  misc_feature (1)..(191): Homolog of NCBI NO: 15229719 NR Description: putative protein; protein id: At3g43570.1 thaliana] >gi|9967506|emb|CAC05631.1| putative protein
  misc_feature (221)..(311): Homolog of NCBI NO: 15229719 NR Description: putative protein; protein id: At3g43570.1 thaliana] >gi|9967506|emb|CAC05631.1| putative protein
  misc_feature (1)..(191): Homolog of NCBI NO: 22330312 NR Description: similar to proline-rich protein, putative;
  misc_feature (221)..(311): Homolog of NCBI NO: 22330312 NR Description: similar to proline-rich protein, putative;
  misc_feature (1)..(306): Homolog of NCBI NO: 15231934 NR Description: hypothetical protein; protein id: At3g14820.1
  misc_feature (1)..(164): Homolog of NCBI NO: 15229307 NR Description: putative protein; protein id: At3g43550.1
  misc_feature (1)..(309): Homolog of NCBI NO: 15222901 NR Description: family II extracellular lipase 3 (EXL3); protein At1g75900.1, supported by cDNA: gi_15054385 [Arabidopsis >gi|15054386|gb|AAK30018.1| family II lipase EXL3 [Arabidopsis
  misc_feature (1)..(309): Homolog of NCBI NO: 26449364 NR Description: putative family II lipase EXL3 [Arabidopsis

SEQ ID NO: 93971 - protein, 255 aa, Arabidopsis thaliana; identical to SEQ ID NO: 90215
  peptide (1)..(255): Ceres Seq. ID no. 12723065
  misc_feature (1)..(246): Pfam Name: GDSL-like Lipase/Acylhydrolase Pfam Description: GDSL-like Lipase/Acylhydrolase
  misc_feature (1)..(255): Homolog of NCBI NO: 18406327 NR Description: proline-rich protein, putative; protein id:
  misc_feature (1)..(255): Homolog of NCBI NO: 15217977 NR Description: proline-rich protein, putative; protein id:
  misc_feature (1)..(135): Homolog of NCBI NO: 15229719 NR Description: putative protein; protein id: At3g43570.1 thaliana] >gi|9967506|emb|CAC05631.1| putative protein
  misc_feature (165)..(255): Homolog of NCBI NO: 15229719 NR Description: putative protein; protein id: At3g43570.1 thaliana] >gi|9967506|emb|CAC05631.1| putative protein
  misc_feature (1)..(135): Homolog of NCBI NO: 22330312 NR Description: similar to proline-rich protein, putative;
  misc_feature (165)..(255): Homolog of NCBI NO: 22330312 NR Description: similar to proline-rich protein, putative;
  misc_feature (1)..(250): Homolog of NCBI NO: 15231934 NR Description: hypothetical protein; protein id: At3g14820.1
  misc_feature (1)..(108): Homolog of NCBI NO: 15229307 NR Description: putative protein; protein id: At3g43550.1
  misc_feature (1)..(253): Homolog of NCBI NO: 15222901 NR Description: family II extracellular lipase 3 (EXL3); protein At1g75900.1, supported by cDNA: gi_15054385 [Arabidopsis >gi|15054386|gb|AAK30018.1| family II lipase EXL3 [Arabidopsis
  misc_feature (1)..(253): Homolog of NCBI NO: 26449364 NR Description: putative family II lipase EXL3 [Arabidopsis

SEQ ID NO: 93972 - DNA, 1938 bp, Arabidopsis thaliana; identical to SEQ ID NO: 90216
  misc_feature (1)..(1938): Ceres Seq. ID no. 12723110
  misc_feature: MA Experiment ID: 20000286 Result: Up-regulated in Transcription
  misc_feature: MA Experiment 20000286 PARAMETER Experiment Name: At_Open_Flower_P Parameter: Age (day) Value: 21
  misc_feature: MA Experiment 20000286 PARAMETER Experiment Name: At_Open_Flower_P Parameter: Plant Line Value: WS
  misc_feature: MA Experiment 20000286 PARAMETER Experiment Name: At_Open_Flower_P Parameter: Tissue Value: Half Open vs. Whole Plant
  misc_feature: MA Experiment ID: 20000439 Result: Up-regulated in Transcription
  misc_feature: MA Experiment 20000439 PARAMETER Experiment Name: At_Roots__P Parameter: Age (day) Value: 14 vs. 21
  misc_feature: MA Experiment 20000439 PARAMETER Experiment Name: At_Roots__P Parameter: Organism Value: A. thaliana
  misc_feature: MA Experiment 20000439 PARAMETER Experiment Name: At_Roots__P Parameter: Tissue Value: Roots vs. Whole Plant
  misc_feature: MA Experiment ID: 20000451 Result: Up-regulated in Transcription
  misc_feature: MA Experiment 20000451 PARAMETER Experiment Name: At_CS6879_Shoots-Roots_P Parameter: Age (day) Value: 14
  misc_feature: MA Experiment 20000451 PARAMETER Experiment Name: At_CS6879_Shoots-Roots_P Parameter: Organism Value: A. thaliana
  misc_feature: MA Experiment 20000451 PARAMETER Experiment Name: At_CS6879_Shoots-Roots_P Parameter: Plant Line Value: CS6879 vs. WS
  misc_feature: MA Experiment 20000451 PARAMETER Experiment Name: At_CS6879_Shoots-Roots_P Parameter: Tissue Value: Roots
  misc_feature: MA Experiment ID: 20000495 Result: Up-regulated in Transcription
  misc_feature: MA Experiment 20000495 PARAMETER Experiment Name: At_Guard_Cells_P Parameter: Harvest Date Value: 8/2/2002
  misc_feature: MA Experiment 20000495 PARAMETER Experiment Name: At_Guard_Cells_P Parameter: Organism Value: A. thaliana
  misc_feature: MA Experiment 20000495 PARAMETER Experiment Name: At_Guard_Cells_P Parameter: Tissue Value: Guard Cells vs. Leaves

SEQ ID NO: 93973 - protein, 591 aa, Arabidopsis thaliana; identical to SEQ ID NO: 90217
  peptide (1)..(591): Ceres Seq. ID no. 12723111
  misc_feature (126)..(511): Pfam Name: POT family Pfam Description: POT family
  misc_feature (1)..(591): Homolog of NCBI NO: 15218903 NR Description: oligopeptide transporter, putative; protein id: supported by cDNA: gi_14334727, supported by cDNA: gi_15293214 thaliana] >gi|14334728|gb|AAK59542.1| putative oligopeptide
  misc_feature (126)..(591): Homolog of NCBI NO: 25404224 NR Description: hypothetical protein F23H11.6 [imported] - thaliana >gi|5080808|gb|AAD39317.1|AC007258_6 Similar to nitrate
  misc_feature (23)..(573): Homolog of NCBI NO: 15217546 NR Description: nitrate transporter NTL1, putative; protein id: [Arabidopsis thaliana] >gi|25403523|pir||B86458 probable protein
  misc_feature (27)..(461): Homolog of NCBI NO: 38346577 NR Description: OSJNBa0064D20.8 [Oryza sativa (japonica
  misc_feature (197)..(573): Homolog of NCBI NO: 38346577 NR Description: OSJNBa0064D20.8 [Oryza sativa (japonica
  misc_feature (4)..(591): Homolog of NCBI NO: 34909514 NR Description: putative nitrate transporter [Oryza sativa
  misc_feature (19)..(580): Homolog of NCBI NO: 33411520 NR Description: nitrate transporter [Prunus persica]
  misc_feature (27)..(572): Homolog of NCBI NO: 22329803 NR Description: nitrate transporter, putative; protein id: supported by cDNA: gi_18175947, supported by cDNA: gi_20465362 thaliana] >gi|18175948|gb|AAL59956.1| putative nitrate
  misc_feature (27)..(572): Homolog of NCBI NO: 25403281 NR Description: protein T7N9.10 [imported] - Arabidopsis thaliana
  misc_feature (26)..(578): Homolog of NCBI NO: 15232435 NR Description: peptide transport - like protein; protein id: supported by cDNA: 117581., supported by cDNA: gi_13430485,

SEQ ID NO: 93974 - protein, 547 aa, Arabidopsis thaliana; identical to SEQ ID NO: 90218
  peptide (1)..(547): Ceres Seq. ID no. 12723112
  misc_feature (82)..(467): Pfam Name: POT family Pfam Description: POT family
  misc_feature (1)..(547): Homolog of NCBI NO: 15218903 NR Description: oligopeptide transporter, putative; protein id: supported by cDNA: gi_14334727, supported by cDNA: gi_15293214 thaliana] >gi|14334728|gb|AAK59542.1| putative oligopeptide
  misc_feature (82)..(547): Homolog of NCBI NO: 25404224 NR Description: hypothetical protein F23H11.6 [imported] - thaliana >gi|5080808|gb|AAD39317.1|AC007258_6 Similar to nitrate
  misc_feature (1)..(529): Homolog of NCBI NO: 15217546 NR Description: nitrate transporter NTL1, putative; protein id: [Arabidopsis thaliana] >gi|25403523|pir||B86458 probable protein
  misc_feature (1)..(417): Homolog of NCBI NO: 38346577 NR Description: OSJNBa0064D20.8 [Oryza sativa (japonica
  misc_feature (153)..(529): Homolog of NCBI NO: 38346577 NR Description: OSJNBa0064D20.8 [Oryza sativa (japonica
  misc_feature (1)..(547): Homolog of NCBI NO: 34909514 NR Description: putative nitrate transporter [Oryza sativa
  misc_feature (1)..(536): Homolog of NCBI NO: 33411520 NR Description: nitrate transporter [Prunus persica]
  misc_feature (1)..(528): Homolog of NCBI NO: 22329803 NR Description: nitrate transporter, putative; protein id: supported by cDNA: gi_18175947, supported by cDNA: gi_20465362 thaliana] >gi|18175948|gb|AAL59956.1| putative nitrate
  misc_feature (1)..(528): Homolog of NCBI NO: 25403281 NR Description: protein T7N9.10 [imported] - Arabidopsis thaliana
  misc_feature (1)..(534): Homolog of NCBI NO: 15232435 NR Description: peptide transport - like protein; protein id: supported by cDNA: 117581., supported by cDNA: gi_13430485,

SEQ ID NO: 93975 - protein, 532 aa, Arabidopsis thaliana; identical to SEQ ID NO: 90219
  peptide (1)..(532): Ceres Seq. ID no. 12723113
  misc_feature (67)..(452): Pfam Name: POT family Pfam Description: POT family
  misc_feature (1)..(532): Homolog of NCBI NO: 15218903 NR Description: oligopeptide transporter, putative; protein id: supported by cDNA: gi_14334727, supported by cDNA: gi_15293214 thaliana] >gi|14334728|gb|AAK59542.1| putative oligopeptide
  misc_feature (67)..(532): Homolog of NCBI NO: 25404224 NR Description: hypothetical protein F23H11.6 [imported] - thaliana >gi|5080808|gb|AAD39317.1|AC007258_6 Similar to nitrate
  misc_feature (1)..(514): Homolog of NCBI NO: 15217546 NR Description: nitrate transporter NTL1, putative; protein id: [Arabidopsis thaliana] >gi|25403523|pir||B86458 probable protein
  misc_feature (1)..(402): Homolog of NCBI NO: 38346577 NR Description: OSJNBa0064D20.8 [Oryza sativa (japonica
  misc_feature (138)..(514): Homolog of NCBI NO: 38346577 NR Description: OSJNBa0064D20.8 [Oryza sativa (japonica
  misc_feature (1)..(532): Homolog of NCBI NO: 34909514 NR Description: putative nitrate transporter [Oryza sativa
  misc_feature (1)..(521): Homolog of NCBI NO: 33411520 NR Description: nitrate transporter [Prunus persica]
  misc_feature (1)..(513): Homolog of NCBI NO: 22329803 NR Description: nitrate transporter, putative; protein id: supported by cDNA: gi_18175947, supported by cDNA: gi_20465362 thaliana] >gi|18175948|gb|AAL59956.1| putative nitrate
  misc_feature (1)..(513): Homolog of NCBI NO: 25403281 NR Description: protein T7N9.10 [imported] - Arabidopsis thaliana
  misc_feature (1)..(519): Homolog of NCBI NO: 15232435 NR Description: peptide transport - like protein; protein id: supported by cDNA: 117581., supported by cDNA: gi_13430485,

SEQ ID NO: 93976 - DNA, 1028 bp, Arabidopsis thaliana; identical to SEQ ID NO: 90220
  misc_feature (1)..(1028): Ceres Seq. ID no. 12723139

SEQ ID NO: 93977 - protein, 249 aa, Arabidopsis thaliana; identical to SEQ ID NO: 90221
  peptide (1)..(249): Ceres Seq. ID no. 12723140
  misc_feature (51)..(182): Pfam Name: Response regulator receiver domain Pfam Description: Response regulator receiver domain
  misc_feature (19)..(249): Homolog of NCBI NO: 15218957 NR Description: response regulator 3; protein id: At1g59940.1, by cDNA: gi_3953594 [Arabidopsis thaliana]
  misc_feature (19)..(246): Homolog of NCBI NO: 15218550 NR Description: putative response regulator 3; protein id: supported by cDNA: gi_3273195, supported by cDNA: gi_3323582, by cDNA: gi_3953596 [Arabidopsis thaliana]
  misc_feature (15)..(236): Homolog of NCBI NO: 13173408 NR Description: response regulator protein [Dianthus caryophyllus]
  misc_feature (50)..(241): Homolog of NCBI NO: 33330864 NR Description: type-A response regulator [Catharanthus roseus]
  misc_feature (49)..(195): Homolog of NCBI NO: 15242000 NR Description: response regulator 6 (ARR6); protein id: supported by cDNA: gi_3953600 [Arabidopsis thaliana]
  misc_feature (30)..(193): Homolog of NCBI NO: 11358906 NR Description: two-component response regulator homolog
  misc_feature (30)..(193): Homolog of NCBI NO: 15228338 NR Description: response reactor 2 (ATRR2); protein id: supported by cDNA: gi_18252910, supported by cDNA: gi_3273197, by cDNA: gi_3323580, supported by cDNA: gi_3953598 [Arabidopsis
  misc_feature (30)..(193): Homolog of NCBI NO: 11358763 NR Description: response regulator 5 [imported] - Arabidopsis >gi|3953599|dbj|BAA34727.1| response regulator 5 [Arabidopsis
  misc_feature (50)..(216): Homolog of NCBI NO: 15221927 NR Description: response regulator 5, putative; protein id: supported by cDNA: gi_3953602 [Arabidopsis thaliana]
  misc_feature (48)..(225): Homolog of NCBI NO: 15222035 NR Description: response regulator 7, putative; protein id: supported by cDNA: gi_11870064 [Arabidopsis thaliana]

SEQ ID NO: 93978 - protein, 231 aa, Arabidopsis thaliana; identical to SEQ ID NO: 90222
  peptide (1)..(231): Ceres Seq. ID no. 12723141
  misc_feature (33)..(164): Pfam Name: Response regulator receiver domain Pfam Description: Response regulator receiver domain
  misc_feature (1)..(231): Homolog of NCBI NO: 15218957 NR Description: response regulator 3; protein id: At1g59940.1, by cDNA: gi_3953594 [Arabidopsis thaliana]
  misc_feature (1)..(228): Homolog of NCBI NO: 15218550 NR Description: putative response regulator 3; protein id: supported by cDNA: gi_3273195, supported by cDNA: gi_3323582, by cDNA: gi_3953596 [Arabidopsis thaliana]
  misc_feature (1)..(218): Homolog of NCBI NO: 13173408 NR Description: response regulator protein [Dianthus caryophyllus]
  misc_feature (32)..(223): Homolog of NCBI NO: 33330864 NR Description: type-A response regulator [Catharanthus roseus]
  misc_feature (31)..(177): Homolog of NCBI NO: 15242000 NR Description: response regulator 6 (ARR6); protein id: supported by cDNA: gi_3953600 [Arabidopsis thaliana]
  misc_feature (12)..(175): Homolog of NCBI NO: 11358906 NR Description: two-component response regulator homolog
  misc_feature (12)..(175): Homolog of NCBI NO: 15228338 NR Description: response reactor 2 (ATRR2); protein id: supported by cDNA: gi_18252910, supported by cDNA: gi_3273197, by cDNA: gi_3323580, supported by cDNA: gi_3953598 [Arabidopsis
  misc_feature (12)..(175): Homolog of NCBI NO: 11358763 NR Description: response regulator 5 [imported] - Arabidopsis >gi|3953599|dbj|BAA34727.1| response regulator 5 [Arabidopsis
  misc_feature (32)..(198): Homolog of NCBI NO: 15221927 NR Description: response regulator 5, putative; protein id: supported by cDNA: gi_3953602 [Arabidopsis thaliana]
  misc_feature (30)..(207): Homolog of NCBI NO: 15222035 NR Description: response regulator 7, putative; protein id: supported by cDNA: gi_11870064 [Arabidopsis thaliana]

SEQ ID NO: 93979 - protein, 217 aa, Arabidopsis thaliana; identical to SEQ ID NO: 90223
  peptide (1)..(217): Ceres Seq. ID no. 12723142
  misc_feature (19)..(150): Pfam Name: Response regulator receiver domain Pfam Description: Response regulator receiver domain
  misc_feature (1)..(217): Homolog of NCBI NO: 15218957 NR Description: response regulator 3; protein id: At1g59940.1, by cDNA: gi_3953594 [Arabidopsis thaliana]
  misc_feature (1)..(214): Homolog of NCBI NO: 15218550 NR Description: putative response regulator 3; protein id: supported by cDNA: gi_3273195, supported by cDNA: gi_3323582, by cDNA: gi_3953596 [Arabidopsis thaliana]
  misc_feature (1)..(204): Homolog of NCBI NO: 13173408 NR Description: response regulator protein [Dianthus caryophyllus]
  misc_feature (18)..(209): Homolog of NCBI NO: 33330864 NR Description: type-A response regulator [Catharanthus roseus]
  misc_feature (17)..(163): Homolog of NCBI NO: 15242000 NR Description: response regulator 6 (ARR6); protein id: supported by cDNA: gi_3953600 [Arabidopsis thaliana]
  misc_feature (1)..(161): Homolog of NCBI NO: 11358906 NR Description: two-component response regulator homolog
  misc_feature (1)..(161): Homolog of NCBI NO: 15228338 NR Description: response reactor 2 (ATRR2); protein id: supported by cDNA: gi_18252910, supported by cDNA: gi_3273197, by cDNA: gi_3323580, supported by cDNA: gi_3953598 [Arabidopsis
  misc_feature (1)..(161): Homolog of NCBI NO: 11358763 NR Description: response regulator 5 [imported] - Arabidopsis >gi|3953599|dbj|BAA34727.1| response regulator 5 [Arabidopsis
  misc_feature (18)..(184): Homolog of NCBI NO: 15221927 NR Description: response regulator 5, putative; protein id: supported by cDNA: gi_3953602 [Arabidopsis thaliana]
  misc_feature (16)..(193): Homolog of NCBI NO: 15222035 NR Description: response regulator 7, putative; protein id: supported by cDNA: gi_11870064 [Arabidopsis thaliana]

SEQ ID NO: 93980 - DNA, 1174 bp, Arabidopsis thaliana; identical to SEQ ID NO: 90224
  misc_feature (1)..(1174): Ceres Seq. ID no. 12723147
  misc_feature: MA Experiment ID: 20000169 Result: Down-regulated in Transcription
  misc_feature: MA Experiment 20000169 PARAMETER Experiment Name: At_100uM_ABA_P Parameter: Age (day) Value: 14
  misc_feature: MA Experiment 20000169 PARAMETER Experiment Name: At_100uM_ABA_P Parameter: Organism Value: A. thaliana
  misc_feature: MA Experiment 20000169 PARAMETER Experiment Name: At_100uM_ABA_P Parameter: Plant Line Value: WS
  misc_feature: MA Experiment 20000169 PARAMETER Experiment Name: At_100uM_ABA_P Parameter: Timepoint (hr) Value: 6
  misc_feature: MA Experiment 20000169 PARAMETER Experiment Name: At_100uM_ABA_P Parameter: Tissue Value: Aerial
  misc_feature: MA Experiment 20000169 PARAMETER Experiment Name: At_100uM_ABA_P Parameter: Treatment Value: 100uM ABA vs. No Treatment
  misc_feature: MA Experiment ID: 20000179 Result: Up-regulated in Transcription
  misc_feature: MA Experiment 20000179 PARAMETER Experiment Name: At_Germinating_Seeds_P Parameter: Age (hr) Value: 6 vs. 0
  misc_feature: MA Experiment 20000179 PARAMETER Experiment Name: At_Germinating_Seeds_P Parameter: Tissue Value: Germinating Seeds
  misc_feature: MA Experiment ID: 20000180 Result: Up-regulated in Transcription
  misc_feature: MA Experiment 20000180 PARAMETER Experiment Name: At_Germinating_Seeds_P Parameter: Age (hr) Value: 24 vs. 0
  misc_feature: MA Experiment 20000180 PARAMETER Experiment Name: At_Germinating_Seeds_P Parameter: Tissue Value: Germinating Seeds
  misc_feature: MA Experiment ID: 20000182 Result: Up-regulated in Transcription
  misc_feature: MA Experiment 20000182 PARAMETER Experiment Name: At_2mM_SA_P Parameter: Age (day) Value: 14
  misc_feature: MA Experiment 20000182 PARAMETER Experiment Name: At_2mM_SA_P Parameter: Organism Value: A. thaliana
  misc_feature: MA Experiment 20000182 PARAMETER Experiment Name: At_2mM_SA_P Parameter: Plant Line Value: WS
  misc_feature: MA Experiment 20000182 PARAMETER Experiment Name: At_2mM_SA_P Parameter: Timepoint (hr) Value: 6
  misc_feature: MA Experiment 20000182 PARAMETER Experiment Name: At_2mM_SA_P Parameter: Tissue Value: Aerial
  misc_feature: MA Experiment 20000182 PARAMETER Experiment Name: At_2mM_SA_P Parameter: Treatment Value: 2mM SA vs. No Treatment
  misc_feature: MA Experiment ID: 20000184 Result: Down-regulated in Transcription
  misc_feature: MA Experiment 20000184 PARAMETER Experiment Name: At_Shoots__P Parameter: Age (day) Value: 7
  misc_feature: MA Experiment 20000184 PARAMETER Experiment Name: At_Shoots__P Parameter: Tissue Value: Shoots vs. Whole Plant
  misc_feature: MA Experiment ID: 20000185 Result: Up-regulated in Transcription
  misc_feature: MA Experiment 20000185 PARAMETER Experiment Name: At_Roots__P Parameter: Age (day) Value: 7 vs. 21
  misc_feature: MA Experiment 20000185 PARAMETER Experiment Name: At_Roots__P Parameter: Organism Value: A. thaliana
  misc_feature: MA Experiment 20000185 PARAMETER Experiment Name: At_Roots__P Parameter: Tissue Value: Roots vs. Whole Plant
  misc_feature: MA Experiment ID: 20000234 Result: Down-regulated in Transcription
  misc_feature: MA Experiment 20000234 PARAMETER Experiment Name: At_Siliques_P Parameter: Age (day) Value: 21
  misc_feature: MA Experiment 20000234 PARAMETER Experiment Name: At_Siliques_P Parameter: Organism Value: A. thaliana
  misc_feature: MA Experiment 20000234 PARAMETER Experiment Name: At_Siliques_P Parameter: Plant Line Value: WS
  misc_feature: MA Experiment 20000234 PARAMETER Experiment Name: At_Siliques_P Parameter: Tissue Value: Less Than 5mm Siliques vs. Whole Plant
  misc_feature: MA Experiment ID: 20000264 Result: Down-regulated in Transcription
  misc_feature: MA Experiment 20000264 PARAMETER Experiment Name: At_Open_Flower_P Parameter: Age (day) Value: 21
  misc_feature: MA Experiment 20000264 PARAMETER Experiment Name: At_Open_Flower_P Parameter: Plant Line Value: WS
  misc_feature: MA Experiment 20000264 PARAMETER Experiment Name: At_Open_Flower_P Parameter: Tissue Value: Open Flower vs. Whole Plant
  misc_feature: MA Experiment ID: 20000265 Result: Down-regulated in Transcription
  misc_feature: MA Experiment 20000265 PARAMETER Experiment Name: At_Open_Flower_P Parameter: Age (day) Value: 21
  misc_feature: MA Experiment 20000265 PARAMETER Experiment Name: At_Open_Flower_P Parameter: Plant Line Value: WS
  misc_feature: MA Experiment 20000265 PARAMETER Experiment Name: At_Open_Flower_P Parameter: Tissue Value: Closed Flower vs. Whole Plant
  misc_feature: MA Experiment ID: 20000286 Result: Down-regulated in Transcription
  misc_feature: MA Experiment 20000286 PARAMETER Experiment Name: At_Open_Flower_P Parameter: Age (day) Value: 21
  misc_feature: MA Experiment 20000286 PARAMETER Experiment Name: At_Open_Flower_P Parameter: Plant Line Value: WS
  misc_feature: MA Experiment 20000286 PARAMETER Experiment Name: At_Open_Flower_P Parameter: Tissue Value: Half Open vs. Whole Plant
  misc_feature: MA Experiment ID: 20000437 Result: Down-regulated in Transcription
  misc_feature: MA Experiment 20000437 PARAMETER Experiment Name: At_Drought_P Parameter: Age (day) Value: 8
  misc_feature: MA Experiment 20000437 PARAMETER Experiment Name: At_Drought_P Parameter: Organism Value: A. thaliana
  misc_feature: MA Experiment 20000437 PARAMETER Experiment Name: At_Drought_P Parameter: Plant Line Value: WS
  misc_feature: MA Experiment 20000437 PARAMETER Experiment Name: At_Drought_P Parameter: Timepoint (hr) Value: 24
  misc_feature: MA Experiment 20000437 PARAMETER Experiment Name: At_Drought_P Parameter: Tissue Value: Whole Plant
  misc_feature: MA Experiment 20000437 PARAMETER Experiment Name: At_Drought_P Parameter: Treatment Value: Drought vs. No Drought
  misc_feature: MA Experiment ID: 20000438 Result: Down-regulated in Transcription
  misc_feature: MA Experiment 20000438 PARAMETER Experiment Name: At_Shoots__P Parameter: Age (day) Value: 14
  misc_feature: MA Experiment 20000438 PARAMETER Experiment Name: At_Shoots__P Parameter: Tissue Value: Shoots vs. Whole Plant
  misc_feature: MA Experiment ID: 20000439 Result: Up-regulated in Transcription
  misc_feature: MA Experiment 20000439 PARAMETER Experiment Name: At_Roots__P Parameter: Age (day) Value: 14 vs. 21
  misc_feature: MA Experiment 20000439 PARAMETER Experiment Name: At_Roots__P Parameter: Organism Value: A. thaliana
  misc_feature: MA Experiment 20000439 PARAMETER Experiment Name: At_Roots__P Parameter: Tissue Value: Roots vs. Whole Plant
  misc_feature: MA Experiment ID: 20000452 Result: Up-regulated in Transcription
  misc_feature: MA Experiment 20000452 PARAMETER Experiment Name: At_CS6879_Shoots-Roots_P Parameter: Age (day) Value: 14
  misc_feature: MA Experiment 20000452 PARAMETER Experiment Name: At_CS6879_Shoots-Roots_P Parameter: Organism Value: A. thaliana
  misc_feature: MA Experiment 20000452 PARAMETER Experiment Name: At_CS6879_Shoots-Roots_P Parameter: Plant Line Value: CS6879 vs. WS
  misc_feature: MA Experiment 20000452 PARAMETER Experiment Name: At_CS6879_Shoots-Roots_P Parameter: Tissue Value: Shoots
  misc_feature: MA Experiment ID: 20001904 Result: Down-regulated in Transcription
  misc_feature: MA Experiment 20001904 PARAMETER Experiment Name: At_Drought_Reproduction_P Parameter: Age (day) Value: 37
  misc_feature: MA Experiment 20001904 PARAMETER Experiment Name: At_Drought_Reproduction_P Parameter: Organism Value: A. thaliana
  misc_feature: MA Experiment 20001904 PARAMETER Experiment Name: At_Drought_Reproduction_P Parameter: Plant Line Value: WS
  misc_feature: MA Experiment 20001904 PARAMETER Experiment Name: At_Drought_Reproduction_P Parameter: Timepoint (day) Value: 7
  misc_feature: MA Experiment 20001904 PARAMETER Experiment Name: At_Drought_Reproduction_P Parameter: Tissue Value: Rosettes
  misc_feature: MA Experiment 20001904 PARAMETER Experiment Name: At_Drought_Reproduction_P Parameter: Treatment Value: Drought vs. No Drought

SEQ ID NO: 93981 - protein, 326 aa, Arabidopsis thaliana; identical to SEQ ID NO: 90225
  peptide (1)..(326): Ceres Seq. ID no. 12723148
  misc_feature (1)..(326): Homolog of NCBI NO: 15218960 NR Description: aldo/keto reductase, putative; protein id: supported by cDNA: gi_15451097, supported by cDNA: gi_18377507 thaliana] >gi|25283478|pir||H96623 probable Aldo/keto reductase
  misc_feature (6)..(326): Homolog of NCBI NO: 25283477 NR Description: probable Aldo/keto reductase F23H11.26 [imported] Arabidopsis thaliana >gi|5080825|gb|AAD39334.1|AC007258_23
  misc_feature (16)..(326): Homolog of NCBI NO: 15218958 NR Description: aldo/keto reductase, putative; protein id:
  misc_feature (5)..(325): Homolog of NCBI NO: 40781598 NR Description: reductase 2 [Hydrangea macrophylla]
  misc_feature (16)..(326): Homolog of NCBI NO: 40781599 NR Description: reductase 1 [Hydrangea macrophylla]
  misc_feature (1)..(326): Homolog of NCBI NO: 6478216 NR Description: putative NADPH-dependent oxidoreductase [Papaver
  misc_feature (21)..(326): Homolog of NCBI NO: 27357979 NR Description: Putative NADPH-dependent oxidoreductase [Oryza
  misc_feature (1)..(176): Homolog of NCBI NO: 4249390 NR Description: Similar to gb|AF039182 probable aldo-keto from Fragaria x ananassa. This gene may be cut off. EST gb|U74151
  misc_feature (1)..(323): Homolog of NCBI NO: 6478210 NR Description: NADPH-dependent codeinone reductase [Papaver
  misc_feature (1)..(323): Homolog of NCBI NO: 6478204 NR Description: NADPH-dependent codeinone reductase [Papaver

SEQ ID NO: 93982 - protein, 306 aa, Arabidopsis thaliana; identical to SEQ ID NO: 90226
  peptide (1)..(306): Ceres Seq. ID no. 12723149
  misc_feature (1)..(306): Homolog of NCBI NO: 15218960 NR Description: aldo/keto reductase, putative; protein id: supported by cDNA: gi_15451097, supported by cDNA: gi_18377507 thaliana] >gi|25283478|pir||H96623 probable Aldo/keto reductase
  misc_feature (1)..(306): Homolog of NCBI NO: 25283477 NR Description: probable Aldo/keto reductase F23H11.26 [imported] Arabidopsis thaliana >gi|5080825|gb|AAD39334.1|AC007258_23
  misc_feature (1)..(306): Homolog of NCBI NO: 15218958 NR Description: aldo/keto reductase, putative; protein id:
  misc_feature (1)..(305): Homolog of NCBI NO: 40781598 NR Description: reductase 2 [Hydrangea macrophylla]
  misc_feature (1)..(306): Homolog of NCBI NO: 40781599 NR Description: reductase 1 [Hydrangea macrophylla]
  misc_feature (1)..(306): Homolog of NCBI NO: 6478216 NR Description: putative NADPH-dependent oxidoreductase [Papaver
  misc_feature (1)..(306): Homolog of NCBI NO: 27357979 NR Description: Putative NADPH-dependent oxidoreductase [Oryza
  misc_feature (1)..(156): Homolog of NCBI NO: 4249390 NR Description: Similar to gb|AF039182 probable aldo-keto from Fragaria x ananassa. This gene may be cut off. EST gb|U74151
  misc_feature (1)..(303): Homolog of NCBI NO: 6478210 NR Description: NADPH-dependent codeinone reductase [Papaver
  misc_feature (1)..(303): Homolog of NCBI NO: 6478204 NR Description: NADPH-dependent codeinone reductase [Papaver

SEQ ID NO: 93983 - protein, 289 aa, Arabidopsis thaliana; identical to SEQ ID NO: 90227
  peptide (1)..(289): Ceres Seq. ID no. 12723150
  misc_feature (1)..(289): Homolog of NCBI NO: 15218960 NR Description: aldo/keto reductase, putative; protein id: supported by cDNA: gi_15451097, supported by cDNA: gi_18377507 thaliana] >gi|25283478|pir||H96623 probable Aldo/keto reductase
  misc_feature (1)..(289): Homolog of NCBI NO: 25283477 NR Description: probable Aldo/keto reductase F23H11.26 [imported] Arabidopsis thaliana >gi|5080825|gb|AAD39334.1|AC007258_23
  misc_feature (1)..(289): Homolog of NCBI NO: 15218958 NR Description: aldo/keto reductase, putative; protein id:
  misc_feature (1)..(288): Homolog of NCBI NO: 40781598 NR Description: reductase 2 [Hydrangea macrophylla]
  misc_feature (1)..(289): Homolog of NCBI NO: 40781599 NR Description: reductase 1 [Hydrangea macrophylla]
  misc_feature (1)..(289): Homolog of NCBI NO: 6478216 NR Description: putative NADPH-dependent oxidoreductase [Papaver
  misc_feature (1)..(289): Homolog of NCBI NO: 27357979 NR Description: Putative NADPH-dependent oxidoreductase [Oryza
  misc_feature (1)..(139): Homolog of NCBI NO: 4249390 NR Description: Similar to gb|AF039182 probable aldo-keto from Fragaria x ananassa. This gene may be cut off. EST gb|U74151
  misc_feature (1)..(286): Homolog of NCBI NO: 6478210 NR Description: NADPH-dependent codeinone reductase [Papaver
  misc_feature (1)..(286): Homolog of NCBI NO: 6478204 NR Description: NADPH-dependent codeinone reductase [Papaver

SEQ ID NO: 93984 - DNA, 1539 bp, Arabidopsis thaliana; identical to SEQ ID NO: 90228
  misc_feature (1)..(1539): Ceres Seq. ID no. 12723159
  misc_feature: MA Experiment ID: 20000179 Result: Up-regulated in Transcription
  misc_feature: MA Experiment 20000179 PARAMETER Experiment Name: At_Germinating_Seeds_P Parameter: Age (hr) Value: 6 vs. 0
  misc_feature: MA Experiment 20000179 PARAMETER Experiment Name: At_Germinating_Seeds_P Parameter: Tissue Value: Germinating Seeds
  misc_feature: MA Experiment ID: 20000227 Result: Down-regulated in Transcription
  misc_feature: MA Experiment 20000227 PARAMETER Experiment Name: At_Root-Tips-vs-Tops_P Parameter: Tissue Value: Root Tips vs. Root Tops
  misc_feature: MA Experiment ID: 20001248 Result: Down-regulated in Transcription
  misc_feature: MA Experiment 20001248 PARAMETER Experiment Name: At_Far-red-induction_P Parameter: Age (day) Value: 7
  misc_feature: MA Experiment 20001248 PARAMETER Experiment Name: At_Far-red-induction_P Parameter: Light Value: Far-red vs. White
  misc_feature: MA Experiment 20001248 PARAMETER Experiment Name: At_Far-red-induction_P Parameter: Organism Value: A. thaliana
  misc_feature: MA Experiment 20001248 PARAMETER Experiment Name: At_Far-red-induction_P Parameter: Plant Line Value: Columbia
  misc_feature: MA Experiment 20001248 PARAMETER Experiment Name: At_Far-red-induction_P Parameter: Timepoint (hr) Value: 4
  misc_feature: MA Experiment 20001248 PARAMETER Experiment Name: At_Far-red-induction_P Parameter: Tissue Value: Whole Plant
  misc_feature: Pfam Name: Glyco_hydro_1 Pfam Description: Glycosyl hydrolase family 1

SEQ ID NO: 93985 - protein, 512 aa, Arabidopsis thaliana; identical to SEQ ID NO: 90229
  peptide (1)..(512): Ceres Seq. ID no. 12723160
  misc_feature: Pfam Name: Glyco_hydro_1 Pfam Description: Glycosyl hydrolase family 1
  misc_feature (1)..(512): Homolog of NCBI NO: 22330338 NR Description: glycosyl hydrolase family 1; protein id:
  misc_feature (1)..(512): Homolog of NCBI NO: 25289447 NR Description: hypothetical protein T2K10.15 [imported] - thaliana >gi|4249391|gb|AAD14488.1|AAD14488 Similar to gi|3249076
  misc_feature (1)..(511): Homolog of NCBI NO: 22328869 NR Description: glycosyl hydrolase family 1; protein id:
  misc_feature (1)..(357): Homolog of NCBI NO: 15219037 NR Description: glycosyl hydrolase family 1; protein id:
  misc_feature (378)..(509): Homolog of NCBI NO: 15219037 NR Description: glycosyl hydrolase family 1; protein id:
  misc_feature (1)..(315): Homolog of NCBI NO: 15219036 NR Description: glycosyl hydrolase family 1; protein id:
  misc_feature (356)..(511): Homolog of NCBI NO: 15219036 NR Description: glycosyl hydrolase family 1; protein id:
  misc_feature (43)..(352): Homolog of NCBI NO: 7435457 NR Description: hypothetical protein T13D8.15 - Arabidopsis >gi|3249077|gb|AAC24061.1| Similar to prunasin hydrolase gb|U50201 from Prunus serotina. ESTs gb|T21225 and gb|AA586305
  misc_feature (355)..(511): Homolog of NCBI NO: 7435457 NR Description: hypothetical protein T13D8.15 - Arabidopsis >gi|3249077|gb|AAC24061.1| Similar to prunasin hydrolase gb|U50201 from Prunus serotina. ESTs gb|T21225 and gb|AA586305
  misc_feature (1)..(378): Homolog of NCBI NO: 11264219 NR Description: glucosidase like protein - Arabidopsis thaliana glucosidase like protein [Arabidopsis thaliana]

SEQ ID NO: 93986 - protein, 426 aa, Arabidopsis thaliana; identical to SEQ ID NO: 90230
  peptide (1)..(426): Ceres Seq. ID no. 12723161
  misc_feature: Pfam Name: Glyco_hydro_1 Pfam Description: Glycosyl hydrolase family 1
  misc_feature (1)..(426): Homolog of NCBI NO: 22330338 NR Description: glycosyl hydrolase family 1; protein id:
  misc_feature (1)..(426): Homolog of NCBI NO: 25289447 NR Description: hypothetical protein T2K10.15 [imported] - thaliana >gi|4249391|gb|AAD14488.1|AAD14488 Similar to gi|3249076
  misc_feature (1)..(425): Homolog of NCBI NO: 22328869 NR Description: glycosyl hydrolase family 1; protein id:
  misc_feature (1)..(271): Homolog of NCBI NO: 15219037 NR Description: glycosyl hydrolase family 1; protein id:
  misc_feature (292)..(423): Homolog of NCBI NO: 15219037 NR Description: glycosyl hydrolase family 1; protein id:
  misc_feature (1)..(229): Homolog of NCBI NO: 15219036 NR Description: glycosyl hydrolase family 1; protein id:
  misc_feature (270)..(425): Homolog of NCBI NO: 15219036 NR Description: glycosyl hydrolase family 1; protein id:
  misc_feature (1)..(266): Homolog of NCBI NO: 7435457 NR Description: hypothetical protein T13D8.15 - Arabidopsis >gi|3249077|gb|AAC24061.1| Similar to prunasin hydrolase gb|U50201 from Prunus serotina. ESTs gb|T21225 and gb|AA586305
  misc_feature (269)..(425): Homolog of NCBI NO: 7435457 NR Description: hypothetical protein T13D8.15 - Arabidopsis >gi|3249077|gb|AAC24061.1| Similar to prunasin hydrolase gb|U50201 from Prunus serotina. ESTs gb|T21225 and gb|AA586305
  misc_feature (1)..(292): Homolog of NCBI NO: 11264219 NR Description: glucosidase like protein - Arabidopsis thaliana glucosidase like protein [Arabidopsis thaliana]

SEQ ID NO: 93987 - protein, 354 aa, Arabidopsis thaliana; identical to SEQ ID NO: 90231
  peptide (1)..(354): Ceres Seq. ID no. 12723162
  misc_feature: Pfam Name: Glyco_hydro_1 Pfam Description: Glycosyl hydrolase family 1
  misc_feature (1)..(354): Homolog of NCBI NO: 22330338 NR Description: glycosyl hydrolase family 1; protein id:
  misc_feature (1)..(354): Homolog of NCBI NO: 25289447 NR Description: hypothetical protein T2K10.15 [imported] - thaliana >gi|4249391|gb|AAD14488.1|AAD14488 Similar to gi|3249076
  misc_feature (1)..(353): Homolog of NCBI NO: 22328869 NR Description: glycosyl hydrolase family 1; protein id:
  misc_feature (1)..(199): Homolog of NCBI NO: 15219037 NR Description: glycosyl hydrolase family 1; protein id:
  misc_feature (220)..(351): Homolog of NCBI NO: 15219037 NR Description: glycosyl hydrolase family 1; protein id:
  misc_feature (1)..(157): Homolog of NCBI NO: 15219036 NR Description: glycosyl hydrolase family 1; protein id:
  misc_feature (198)..(353): Homolog of NCBI NO: 15219036 NR Description: glycosyl hydrolase family 1; protein id:
  misc_feature (1)..(194): Homolog of NCBI NO: 7435457 NR Description: hypothetical protein T13D8.15 - Arabidopsis >gi|3249077|gb|AAC24061.1| Similar to prunasin hydrolase gb|U50201 from Prunus serotina. ESTs gb|T21225 and gb|AA586305
  misc_feature (197)..(353): Homolog of NCBI NO: 7435457 NR Description: hypothetical protein T13D8.15 - Arabidopsis >gi|3249077|gb|AAC24061.1| Similar to prunasin hydrolase gb|U50201 from Prunus serotina. ESTs gb|T21225 and gb|AA586305
  misc_feature (1)..(220): Homolog of NCBI NO: 11264219 NR Description: glucosidase like protein - Arabidopsis thaliana glucosidase like protein [Arabidopsis thaliana]

SEQ ID NO: 93988 - DNA, 2586 bp, Arabidopsis thaliana; identical to SEQ ID NO: 90232
  misc_feature (1)..(2586): Ceres Seq. ID no. 12723163
  misc_feature: MA Experiment ID: 20000182 Result: Up-regulated in Transcription
  misc_feature: MA Experiment 20000182 PARAMETER Experiment Name: At_2mM_SA_P Parameter: Age (day) Value: 14
  misc_feature: MA Experiment 20000182 PARAMETER Experiment Name: At_2mM_SA_P Parameter: Organism Value: A. thaliana
  misc_feature: MA Experiment 20000182 PARAMETER Experiment Name: At_2mM_SA_P Parameter: Plant Line Value: WS
  misc_feature: MA Experiment 20000182 PARAMETER Experiment Name: At_2mM_SA_P Parameter: Timepoint (hr) Value: 6
  misc_feature: MA Experiment 20000182 PARAMETER Experiment Name: At_2mM_SA_P Parameter: Tissue Value: Aerial
  misc_feature: MA Experiment 20000182 PARAMETER Experiment Name: At_2mM_SA_P Parameter: Treatment Value: 2mM SA vs. No Treatment
  misc_feature: MA Experiment ID: 20000234 Result: Down-regulated in Transcription
  misc_feature: MA Experiment 20000234 PARAMETER Experiment Name: At_Siliques_P Parameter: Age (day) Value: 21
  misc_feature: MA Experiment 20000234 PARAMETER Experiment Name: At_Siliques_P Parameter: Organism Value: A. thaliana
  misc_feature: MA Experiment 20000234 PARAMETER Experiment Name: At_Siliques_P Parameter: Plant Line Value: WS
  misc_feature: MA Experiment 20000234 PARAMETER Experiment Name: At_Siliques_P Parameter: Tissue Value: Less Than 5mm Siliques vs. Whole Plant
  misc_feature: MA Experiment ID: 20000235 Result: Down-regulated in Transcription
  misc_feature: MA Experiment 20000235 PARAMETER Experiment Name: At_Siliques_P Parameter: Age (day) Value: 21
  misc_feature: MA Experiment 20000235 PARAMETER Experiment Name: At_Siliques_P Parameter: Organism Value: A. thaliana
  misc_feature: MA Experiment 20000235 PARAMETER Experiment Name: At_Siliques_P Parameter: Plant Line Value: WS
  misc_feature: MA Experiment 20000235 PARAMETER Experiment Name: At_Siliques_P Parameter: Tissue Value: 5-10mm Siliques vs. Whole Plant
  misc_feature: MA Experiment ID: 20000264 Result: Down-regulated in Transcription
  misc_feature: MA Experiment 20000264 PARAMETER Experiment Name: At_Open_Flower_P Parameter: Age (day) Value: 21
  misc_feature: MA Experiment 20000264 PARAMETER Experiment Name: At_Open_Flower_P Parameter: Plant Line Value: WS
  misc_feature: MA Experiment 20000264 PARAMETER Experiment Name: At_Open_Flower_P Parameter: Tissue Value: Open Flower vs. Whole Plant
  misc_feature: MA Experiment ID: 20000265 Result: Down-regulated in Transcription
  misc_feature: MA Experiment 20000265 PARAMETER Experiment Name: At_Open_Flower_P Parameter: Age (day) Value: 21
  misc_feature: MA Experiment 20000265 PARAMETER Experiment Name: At_Open_Flower_P Parameter: Plant Line Value: WS
  misc_feature: MA Experiment 20000265 PARAMETER Experiment Name: At_Open_Flower_P Parameter: Tissue Value: Closed Flower vs. Whole Plant
  misc_feature: MA Experiment ID: 20000269 Result: Down-regulated in Transcription
  misc_feature: MA Experiment 20000269 PARAMETER Experiment Name: At_1mM_KNO3_L-vs-H_Roots_P Parameter: Age (day) Value: 7,10,12
  misc_feature: MA Experiment 20000269 PARAMETER Experiment Name: At_1mM_KNO3_L-vs-H_Roots_P Parameter: Organism Value: A. thaliana
  misc_feature: MA Experiment 20000269 PARAMETER Experiment Name: At_1mM_KNO3_L-vs-H_Roots_P Parameter: Plant Line Value: WS
  misc_feature: MA Experiment 20000269 PARAMETER Experiment Name: At_1mM_KNO3_L-vs-H_Roots_P Parameter: Timepoint (day) Value: 7,10,12
  misc_feature: MA Experiment 20000269 PARAMETER Experiment Name: At_1mM_KNO3_L-vs-H_Roots_P Parameter: Tissue Value: Roots
  misc_feature: MA Experiment 20000269 PARAMETER Experiment Name: At_1mM_KNO3_L-vs-H_Roots_P Parameter: Treatment Value: 1mM KNO3 vs. 50mM KNO3
  misc_feature: MA Experiment ID: 20000437 Result: Up-regulated in Transcription
  misc_feature: MA Experiment 20000437 PARAMETER Experiment Name: At_Drought_P Parameter: Age (day) Value: 8
  misc_feature: MA Experiment 20000437 PARAMETER Experiment Name: At_Drought_P Parameter: Organism Value: A. thaliana
  misc_feature: MA Experiment 20000437 PARAMETER Experiment Name: At_Drought_P Parameter: Plant Line Value: WS
  misc_feature: MA Experiment 20000437 PARAMETER Experiment Name: At_Drought_P Parameter: Timepoint (hr) Value: 24
  misc_feature: MA Experiment 20000437 PARAMETER Experiment Name: At_Drought_P Parameter: Tissue Value: Whole Plant
  misc_feature: MA Experiment 20000437 PARAMETER Experiment Name: At_Drought_P Parameter: Treatment Value: Drought vs. No Drought
  misc_feature: MA Experiment ID: 20000573 Result: Up-regulated in Transcription
  misc_feature: MA Experiment 20000573 PARAMETER Experiment Name: At_100uM_ABA_Mutants__P Parameter: Organism Value: A. thaliana
  misc_feature: MA Experiment 20000573 PARAMETER Experiment Name: At_100uM_ABA_Mutants__P Parameter: Plant Line Value: CS22 vs. Ler wt
  misc_feature: MA Experiment 20000573 PARAMETER Experiment Name: At_100uM_ABA_Mutants__P Parameter: Timepoint (hr) Value: N/A
  misc_feature: MA Experiment 20000573 PARAMETER Experiment Name: At_100uM_ABA_Mutants__P Parameter: Tissue Value: Whole Plant
  misc_feature: MA Experiment 20000573 PARAMETER Experiment Name: At_100uM_ABA_Mutants__P Parameter: Treatment Value: None
  misc_feature: MA Experiment ID: 20001248 Result: Up-regulated in Transcription
  misc_feature: MA Experiment 20001248 PARAMETER Experiment Name: At_Far-red-induction_P Parameter: Age (day) Value: 7
  misc_feature: MA Experiment 20001248 PARAMETER Experiment Name: At_Far-red-induction_P Parameter: Light Value: Far-red vs. White
  misc_feature: MA Experiment 20001248 PARAMETER Experiment Name: At_Far-red-induction_P Parameter: Organism Value: A. thaliana
  misc_feature: MA Experiment 20001248 PARAMETER Experiment Name: At_Far-red-induction_P Parameter: Plant Line Value: Columbia
  misc_feature: MA Experiment 20001248 PARAMETER Experiment Name: At_Far-red-induction_P Parameter: Timepoint (hr) Value: 4
  misc_feature: MA Experiment 20001248 PARAMETER Experiment Name: At_Far-red-induction_P Parameter: Tissue Value: Whole Plant
  misc_feature: MA Experiment ID: 20001450 Result: Up-regulated in Transcription
  misc_feature: MA Experiment 20001450 PARAMETER Experiment Name: At_Far-red-induction_P Parameter: Age (day) Value: 7
  misc_feature: MA Experiment 20001450 PARAMETER Experiment Name: At_Far-red-induction_P Parameter: Light Value: Far-red vs. White
  misc_feature: MA Experiment 20001450 PARAMETER Experiment Name: At_Far-red-induction_P Parameter: Organism Value: A. thaliana
  misc_feature: MA Experiment 20001450 PARAMETER Experiment Name: At_Far-red-induction_P Parameter: Plant Line Value: Columbia
  misc_feature: MA Experiment 20001450 PARAMETER Experiment Name: At_Far-red-induction_P Parameter: Timepoint (hr) Value: 8
  misc_feature: MA Experiment 20001450 PARAMETER Experiment Name: At_Far-red-induction_P Parameter: Tissue Value: Whole Plant
  misc_feature: MA Experiment ID: 20001451 Result: Up-regulated in Transcription
  misc_feature: MA Experiment 20001451 PARAMETER Experiment Name: At_Far-red-induction_P Parameter: Age (day) Value: 7
  misc_feature: MA Experiment 20001451 PARAMETER Experiment Name: At_Far-red-induction_P Parameter: Light Value: Far-red vs. White
  misc_feature: MA Experiment 20001451 PARAMETER Experiment Name: At_Far-red-induction_P Parameter: Organism Value: A. thaliana
  misc_feature: MA Experiment 20001451 PARAMETER Experiment Name: At_Far-red-induction_P Parameter: Plant Line Value: Columbia
  misc_feature: MA Experiment 20001451 PARAMETER Experiment Name: At_Far-red-induction_P Parameter: Timepoint (hr) Value: 24
  misc_feature: MA Experiment 20001451 PARAMETER Experiment Name: At_Far-red-induction_P Parameter: Tissue Value: Whole Plant

SEQ ID NO: 93989 - protein, 861 aa, Arabidopsis thaliana; identical to SEQ ID NO: 90233
  peptide (1)..(861): Ceres Seq. ID no. 12723164
  misc_feature (59)..(546): Pfam Name: Glycosyltransferase family 20 Pfam Description: Glycosyltransferase family 20
  misc_feature (1)..(844): Homolog of NCBI NO: 18414960 NR Description: trehalose-6-phosphate synthase like protein;
  misc_feature (1)..(843): Homolog of NCBI NO: 25347119 NR Description: hypothetical protein T23K23.13 [imported] -
  misc_feature (1)..(844): Homolog of NCBI NO: 7488400 NR Description: trehalose-6-phosphate synthase homolog DL4920W -
  misc_feature (1)..(843): Homolog of NCBI NO: 15221478 NR Description: trehalose-6-phosphate synthase, putative; protein At1g06410.1 [Arabidopsis thaliana] >gi|25347117|pir||A86200
  misc_feature (1)..(845): Homolog of NCBI NO: 19568935 NR Description: putative trehalose synthase [Solanum tuberosum]
  misc_feature (1)..(851): Homolog of NCBI NO: 34902280 NR Description: Putative trehalose-6-phosphate synthase [Oryza
  misc_feature (1)..(843): Homolog of NCBI NO: 15224213 NR Description: putative trehalose-6-phosphate synthase; protein
  misc_feature (50)..(847): Homolog of NCBI NO: 34909526 NR Description: putative trehalose-6-phosphate synthase homolog
  misc_feature (58)..(477): Homolog of NCBI NO: 1865677 NR Description: trehalose-6-phosphate synthase [Arabidopsis
  misc_feature (418)..(820): Homolog of NCBI NO: 1865677 NR Description: trehalose-6-phosphate synthase [Arabidopsis

SEQ ID NO: 93990 - protein, 831 aa, Arabidopsis thaliana; identical to SEQ ID NO: 90234
  peptide (1)..(831): Ceres Seq. ID no. 12723165
  misc_feature (29)..(516): Pfam Name: Glycosyltransferase family 20 Pfam Description: Glycosyltransferase family 20
  misc_feature (1)..(814): Homolog of NCBI NO: 18414960 NR Description: trehalose-6-phosphate synthase like protein;
  misc_feature (1)..(813): Homolog of NCBI NO: 25347119 NR Description: hypothetical protein T23K23.13 [imported] -
  misc_feature (1)..(814): Homolog of NCBI NO: 7488400 NR Description: trehalose-6-phosphate synthase homolog DL4920W -
  misc_feature (1)..(813): Homolog of NCBI NO: 15221478 NR Description: trehalose-6-phosphate synthase, putative; protein At1g06410.1 [Arabidopsis thaliana] >gi|25347117|pir||A86200
  misc_feature (1)..(815): Homolog of NCBI NO: 19568935 NR Description: putative trehalose synthase [Solanum tuberosum]
  misc_feature (1)..(821): Homolog of NCBI NO: 34902280 NR Description: Putative trehalose-6-phosphate synthase [Oryza
  misc_feature (1)..(813): Homolog of NCBI NO: 15224213 NR Description: putative trehalose-6-phosphate synthase; protein
  misc_feature (20)..(817): Homolog of NCBI NO: 34909526 NR Description: putative trehalose-6-phosphate synthase homolog
  misc_feature (28)..(447): Homolog of NCBI NO: 1865677 NR Description: trehalose-6-phosphate synthase [Arabidopsis
  misc_feature (388)..(790): Homolog of NCBI NO: 1865677 NR Description: trehalose-6-phosphate synthase [Arabidopsis

SEQ ID NO: 93991 - protein, 701 aa, Arabidopsis thaliana; identical to SEQ ID NO: 90235
  peptide (1)..(701): Ceres Seq. ID no. 12723166
  misc_feature (1)..(386): Pfam Name: Glycosyltransferase family 20 Pfam Description: Glycosyltransferase family 20
  misc_feature (1)..(684): Homolog of NCBI NO: 18414960 NR Description: trehalose-6-phosphate synthase like protein;
  misc_feature (1)..(683): Homolog of NCBI NO: 25347119 NR Description: hypothetical protein T23K23.13 [imported] -
  misc_feature (1)..(684): Homolog of NCBI NO: 7488400 NR Description: trehalose-6-phosphate synthase homolog DL4920W -
  misc_feature (1)..(683): Homolog of NCBI NO: 15221478 NR Description: trehalose-6-phosphate synthase, putative; protein At1g06410.1 [Arabidopsis thaliana] >gi|25347117|pir||A86200
  misc_feature (1)..(685): Homolog of NCBI NO: 19568935 NR Description: putative trehalose synthase [Solanum tuberosum]
  misc_feature (1)..(691): Homolog of NCBI NO: 34902280 NR Description: Putative trehalose-6-phosphate synthase [Oryza
  misc_feature (1)..(683): Homolog of NCBI NO: 15224213 NR Description: putative trehalose-6-phosphate synthase; protein
  misc_feature (1)..(687): Homolog of NCBI NO: 34909526 NR Description: putative trehalose-6-phosphate synthase homolog
  misc_feature (1)..(317): Homolog of NCBI NO: 1865677 NR Description: trehalose-6-phosphate synthase [Arabidopsis
  misc_feature (258)..(660): Homolog of NCBI NO: 1865677 NR Description: trehalose-6-phosphate synthase [Arabidopsis

SEQ ID NO: 93992 - DNA, 1815 bp, Arabidopsis thaliana; identical to SEQ ID NO: 90236
  misc_feature (1)..(1815): Ceres Seq. ID no. 12723177
  misc_feature: MA Experiment ID: 20000184 Result: Down-regulated in Transcription
  misc_feature: MA Experiment 20000184 PARAMETER Experiment Name: At_Shoots__P Parameter: Age (day) Value: 7
  misc_feature: MA Experiment 20000184 PARAMETER Experiment Name: At_Shoots__P Parameter: Tissue Value: Shoots vs. Whole Plant
  misc_feature: MA Experiment ID: 20000794 Result: Up-regulated in Transcription
  misc_feature: MA Experiment 20000794 PARAMETER Experiment Name: At_Petals_P Parameter: Age (day) Value: 23-25 days
  misc_feature: MA Experiment 20000794 PARAMETER Experiment Name: At_Petals_P Parameter: Plant Line Value: WS
  misc_feature: MA Experiment 20000794 PARAMETER Experiment Name: At_Petals_P Parameter: Tissue Value: Petals vs. Whole plant

SEQ ID NO: 93993 - protein, 604 aa, Arabidopsis thaliana; identical to SEQ ID NO: 90237
  peptide (1)..(604): Ceres Seq. ID no. 12723178
  misc_feature (183)..(604): Homolog of NCBI NO: 7486914 NR Description: hypothetical protein T13D8.11 - Arabidopsis
  misc_feature (1)..(106): Homolog of NCBI NO: 7486914 NR Description: hypothetical protein T13D8.11 - Arabidopsis
  misc_feature (126)..(604): Homolog of NCBI NO: 22329476 NR Description: putative protein-tyrosine phosphatase 2; protein At1g10570.1, supported by cDNA: gi_20260163 [Arabidopsis
  misc_feature (4)..(110): Homolog of NCBI NO: 22329476 NR Description: putative protein-tyrosine phosphatase 2; protein At1g10570.1, supported by cDNA: gi_20260163 [Arabidopsis
  misc_feature (30)..(604): Homolog of NCBI NO: 5091551 NR Description: T10O24.20 [Arabidopsis thaliana]
  misc_feature (308)..(603): Homolog of NCBI NO: 34909336 NR Description: OSJNBb0021A09.14 [Oryza sativa (japonica
  misc_feature (303)..(601): Homolog of NCBI NO: 30689748 NR Description: Ulp1 protease family [Arabidopsis thaliana]
  misc_feature (302)..(454): Homolog of NCBI NO: 15218250 NR Description: unknown protein; protein id: At1g09730.1
  misc_feature (498)..(596): Homolog of NCBI NO: 15218250 NR Description: unknown protein; protein id: At1g09730.1
  misc_feature (350)..(486): Homolog of NCBI NO: 7487082 NR Description: hypothetical protein T16L1.110 - Arabidopsis >gi|3549664|emb|CAA20575.1| putative protein [Arabidopsis >gi|7270310|emb|CAB80079.1| putative protein [Arabidopsis

SEQ ID NO: 93994 - protein, 578 aa, Arabidopsis thaliana; identical to SEQ ID NO: 90238
  peptide (1)..(578): Ceres Seq. ID no. 12723179
  misc_feature (157)..(578): Homolog of NCBI NO: 7486914 NR Description: hypothetical protein T13D8.11 - Arabidopsis
  misc_feature (1)..(80): Homolog of NCBI NO: 7486914 NR Description: hypothetical protein T13D8.11 - Arabidopsis
  misc_feature (100)..(578): Homolog of NCBI NO: 22329476 NR Description: putative protein-tyrosine phosphatase 2; protein At1g10570.1, supported by cDNA: gi_20260163 [Arabidopsis
  misc_feature (1)..(84): Homolog of NCBI NO: 22329476 NR Description: putative protein-tyrosine phosphatase 2; protein At1g10570.1, supported by cDNA: gi_20260163 [Arabidopsis
  misc_feature (4)..(578): Homolog of NCBI NO: 5091551 NR Description: T10O24.20 [Arabidopsis thaliana]
  misc_feature (282)..(577): Homolog of NCBI NO: 34909336 NR Description: OSJNBb0021A09.14 [Oryza sativa (japonica
  misc_feature (277)..(575): Homolog of NCBI NO: 30689748 NR Description: Ulp1 protease family [Arabidopsis thaliana]
  misc_feature (276)..(428): Homolog of NCBI NO: 15218250 NR Description: unknown protein; protein id: At1g09730.1
  misc_feature (472)..(570): Homolog of NCBI NO: 15218250 NR Description: unknown protein; protein id: At1g09730.1
  misc_feature (324)..(460): Homolog of NCBI NO: 7487082 NR Description: hypothetical protein T16L1.110 - Arabidopsis >gi|3549664|emb|CAA20575.1| putative protein [Arabidopsis >gi|7270310|emb|CAB80079.1| putative protein [Arabidopsis

SEQ ID NO: 93995 - protein, 491 aa, Arabidopsis thaliana; identical to SEQ ID NO: 90239
  peptide (1)..(491): Ceres Seq. ID no. 12723180
  misc_feature (70)..(491): Homolog of NCBI NO: 7486914 NR Description: hypothetical protein T13D8.11 - Arabidopsis
  misc_feature (13)..(491): Homolog of NCBI NO: 22329476 NR Description: putative protein-tyrosine phosphatase 2; protein At1g10570.1, supported by cDNA: gi_20260163 [Arabidopsis
  misc_feature (1)..(491): Homolog of NCBI NO: 5091551 NR Description: T10O24.20 [Arabidopsis thaliana]
  misc_feature (195)..(490): Homolog of NCBI NO: 34909336 NR Description: OSJNBb0021A09.14 [Oryza sativa (japonica
  misc_feature (190)..(488): Homolog of NCBI NO: 30689748 NR Description: Ulp1 protease family [Arabidopsis thaliana]
  misc_feature (189)..(341): Homolog of NCBI NO: 15218250 NR Description: unknown protein; protein id: At1g09730.1
  misc_feature (385)..(483): Homolog of NCBI NO: 15218250 NR Description: unknown protein; protein id: At1g09730.1
  misc_feature (237)..(373): Homolog of NCBI NO: 7487082 NR Description: hypothetical protein T16L1.110 - Arabidopsis >gi|3549664|emb|CAA20575.1| putative protein [Arabidopsis >gi|7270310|emb|CAB80079.1| putative protein [Arabidopsis
  misc_feature (250)..(409): Homolog of NCBI NO: 28528970 NR Description: similar to SUMO-1-specific protease [Mus musculus]
  misc_feature (146)..(389): Homolog of NCBI NO: 34878121 NR Description: similar to bM573K1.5 (novel Ulp1 protease family

SEQ ID NO: 93996 - DNA, 1350 bp, Arabidopsis thaliana; identical to SEQ ID NO: 90240
  misc_feature (1)..(1350): Ceres Seq. ID no. 12723189
  misc_feature: MA Experiment ID: 20000173 Result: Down-regulated in Transcription
  misc_feature: MA Experiment 20000173 PARAMETER Experiment Name: At_42deg_Heat_P Parameter: Age (day) Value: 14
  misc_feature: MA Experiment 20000173 PARAMETER Experiment Name: At_42deg_Heat_P Parameter: Organism Value: A. thaliana
  misc_feature: MA Experiment 20000173 PARAMETER Experiment Name: At_42deg_Heat_P Parameter: Plant Line Value: WS
  misc_feature: MA Experiment 20000173 PARAMETER Experiment Name: At_42deg_Heat_P Parameter: Temperature (deg C) Value: 42 vs. 22
  misc_feature: MA Experiment 20000173 PARAMETER Experiment Name: At_42deg_Heat_P Parameter: Timepoint (hr) Value: 6
  misc_feature: MA Experiment 20000173 PARAMETER Experiment Name: At_42deg_Heat_P Parameter: Tissue Value: Aerial
  misc_feature: MA Experiment ID: 20000184 Result: Down-regulated in Transcription
  misc_feature: MA Experiment 20000184 PARAMETER Experiment Name: At_Shoots__P Parameter: Age (day) Value: 7
  misc_feature: MA Experiment 20000184 PARAMETER Experiment Name: At_Shoots__P Parameter: Tissue Value: Shoots vs. Whole Plant
  misc_feature: MA Experiment ID: 20000185 Result: Down-regulated in Transcription
  misc_feature: MA Experiment 20000185 PARAMETER Experiment Name: At_Roots__P Parameter: Age (day) Value: 7 vs. 21
  misc_feature: MA Experiment 20000185 PARAMETER Experiment Name: At_Roots__P Parameter: Organism Value: A. thaliana
  misc_feature: MA Experiment 20000185 PARAMETER Experiment Name: At_Roots__P Parameter: Tissue Value: Roots vs. Whole Plant
  misc_feature: MA Experiment ID: 20000211 Result: Up-regulated in Transcription
  misc_feature: MA Experiment 20000211 PARAMETER Experiment Name: At_0.001percent_MeJA__P Parameter: Age (day) Value: 14
  misc_feature: MA Experiment 20000211 PARAMETER Experiment Name: At_0.001percent_MeJA__P Parameter: Organism Value: A. thaliana
  misc_feature: MA Experiment 20000211 PARAMETER Experiment Name: At_0.001percent_MeJA__P Parameter: Plant Line Value: WS
  misc_feature: MA Experiment 20000211 PARAMETER Experiment Name: At_0.001percent_MeJA__P Parameter: Timepoint (hr) Value: 1
  misc_feature: MA Experiment 20000211 PARAMETER Experiment Name: At_0.001percent_MeJA__P Parameter: Tissue Value: Aerial
  misc_feature: MA Experiment 20000211 PARAMETER Experiment Name: At_0.001percent_MeJA__P Parameter: Treatment Value: 0.001percent MeJA vs. No Treatment
  misc_feature: MA Experiment ID: 20000227 Result: Down-regulated in Transcription
  misc_feature: MA Experiment 20000227 PARAMETER Experiment Name: At_Root-Tips-vs-Tops_P Parameter: Tissue Value: Root Tips vs. Root Tops
  misc_feature: MA Experiment ID: 20000265 Result: Up-regulated in Transcription
  misc_feature: MA Experiment 20000265 PARAMETER Experiment Name: At_Open_Flower_P Parameter: Age (day) Value: 21
  misc_feature: MA Experiment 20000265 PARAMETER Experiment Name: At_Open_Flower_P Parameter: Plant Line Value: WS
  misc_feature: MA Experiment 20000265 PARAMETER Experiment Name: At_Open_Flower_P Parameter: Tissue Value: Closed Flower vs. Whole Plant
  misc_feature: MA Experiment ID: 20000439 Result: Down-regulated in Transcription
  misc_feature: MA Experiment 20000439 PARAMETER Experiment Name: At_Roots__P Parameter: Age (day) Value: 14 vs. 21
  misc_feature: MA Experiment 20000439 PARAMETER Experiment Name: At_Roots__P Parameter: Organism Value: A. thaliana
  misc_feature: MA Experiment 20000439 PARAMETER Experiment Name: At_Roots__P Parameter: Tissue Value: Roots vs. Whole Plant
  misc_feature: MA Experiment ID: 20000574 Result: Down-regulated in Transcription
  misc_feature: MA Experiment 20000574 PARAMETER Experiment Name: At_100uM_ABA_Mutants__P Parameter: Organism Value: A. thaliana
  misc_feature: MA Experiment 20000574 PARAMETER Experiment Name: At_100uM_ABA_Mutants__P Parameter: Plant Line Value: CS23 vs. Ler wt
  misc_feature: MA Experiment 20000574 PARAMETER Experiment Name: At_100uM_ABA_Mutants__P Parameter: Timepoint (hr) Value: N/A
  misc_feature: MA Experiment 20000574 PARAMETER Experiment Name: At_100uM_ABA_Mutants__P Parameter: Tissue Value: Whole Plant
  misc_feature: MA Experiment 20000574 PARAMETER Experiment Name: At_100uM_ABA_Mutants__P Parameter: Treatment Value: None
  misc_feature: MA Experiment ID: 20001248 Result: Down-regulated in Transcription
  misc_feature: MA Experiment 20001248 PARAMETER Experiment Name: At_Far-red-induction_P Parameter: Age (day) Value: 7
  misc_feature: MA Experiment 20001248 PARAMETER Experiment Name: At_Far-red-induction_P Parameter: Light Value: Far-red vs. White
  misc_feature: MA Experiment 20001248 PARAMETER Experiment Name: At_Far-red-induction_P Parameter: Organism Value: A. thaliana
  misc_feature: MA Experiment 20001248 PARAMETER Experiment Name: At_Far-red-induction_P Parameter: Plant Line Value: Columbia
  misc_feature: MA Experiment 20001248 PARAMETER Experiment Name: At_Far-red-induction_P Parameter: Timepoint (hr) Value: 4
  misc_feature: MA Experiment 20001248 PARAMETER Experiment Name: At_Far-red-induction_P Parameter: Tissue Value: Whole Plant
  misc_feature: MA Experiment ID: 20001450 Result: Down-regulated in Transcription
  misc_feature: MA Experiment 20001450 PARAMETER Experiment Name: At_Far-red-induction_P Parameter: Age (day) Value: 7
  misc_feature: MA Experiment 20001450 PARAMETER Experiment Name: At_Far-red-induction_P Parameter: Light Value: Far-red vs. White
  misc_feature: MA Experiment 20001450 PARAMETER Experiment Name: At_Far-red-induction_P Parameter: Organism Value: A. thaliana
  misc_feature: MA Experiment 20001450 PARAMETER Experiment Name: At_Far-red-induction_P Parameter: Plant Line Value: Columbia
  misc_feature: MA Experiment 20001450 PARAMETER Experiment Name: At_Far-red-induction_P Parameter: Timepoint (hr) Value: 8
  misc_feature: MA Experiment 20001450 PARAMETER Experiment Name: At_Far-red-induction_P Parameter: Tissue Value: Whole Plant
  misc_feature: MA Experiment ID: 20001451 Result: Down-regulated in Transcription
  misc_feature: MA Experiment 20001451 PARAMETER Experiment Name: At_Far-red-induction_P Parameter: Age (day) Value: 7
  misc_feature: MA Experiment 20001451 PARAMETER Experiment Name: At_Far-red-induction_P Parameter: Light Value: Far-red vs. White
  misc_feature: MA Experiment 20001451 PARAMETER Experiment Name: At_Far-red-induction_P Parameter: Organism Value: A. thaliana
  misc_feature: MA Experiment 20001451 PARAMETER Experiment Name: At_Far-red-induction_P Parameter: Plant Line Value: Columbia
  misc_feature: MA Experiment 20001451 PARAMETER Experiment Name: At_Far-red-induction_P Parameter: Timepoint (hr) Value: 24
  misc_feature: MA Experiment 20001451 PARAMETER Experiment Name: At_Far-red-induction_P Parameter: Tissue Value: Whole Plant
  misc_feature: MA Experiment ID: 20001555 Result: Up-regulated in Transcription
  misc_feature: MA Experiment 20001555 PARAMETER Experiment Name: At_Drought_Soil_Dry_P Parameter: Age (day) Value: 24
  misc_feature: MA Experiment 20001555 PARAMETER Experiment Name: At_Drought_Soil_Dry_P Parameter: Organism Value: A. thaliana
  misc_feature: MA Experiment 20001555 PARAMETER Experiment Name: At_Drought_Soil_Dry_P Parameter: Plant Line Value: WS
  misc_feature: MA Experiment 20001555 PARAMETER Experiment Name: At_Drought_Soil_Dry_P Parameter: Post Timepoint (hr) Value: None
  misc_feature: MA Experiment 20001555 PARAMETER Experiment Name: At_Drought_Soil_Dry_P Parameter: Post-Treatment Value: None
  misc_feature: MA Experiment 20001555 PARAMETER Experiment Name: At_Drought_Soil_Dry_P Parameter: Timepoint (day) Value: 10
  misc_feature: MA Experiment 20001555 PARAMETER Experiment Name: At_Drought_Soil_Dry_P Parameter: Treatment Value: Drought vs. No Drought
  misc_feature: MA Experiment ID: 20001556 Result: Up-regulated in Transcription
  misc_feature: MA Experiment 20001556 PARAMETER Experiment Name: At_Drought_Soil_Dry_P Parameter: Age (day) Value: 26
  misc_feature: MA Experiment 20001556 PARAMETER Experiment Name: At_Drought_Soil_Dry_P Parameter: Organism Value: A. thaliana
  misc_feature: MA Experiment 20001556 PARAMETER Experiment Name: At_Drought_Soil_Dry_P Parameter: Plant Line Value: WS
  misc_feature: MA Experiment 20001556 PARAMETER Experiment Name: At_Drought_Soil_Dry_P Parameter: Post Timepoint (hr) Value: None
  misc_feature: MA Experiment 20001556 PARAMETER Experiment Name: At_Drought_Soil_Dry_P Parameter: Post-Treatment Value: None
  misc_feature: MA Experiment 20001556 PARAMETER Experiment Name: At_Drought_Soil_Dry_P Parameter: Timepoint (day) Value: 12
  misc_feature: MA Experiment 20001556 PARAMETER Experiment Name: At_Drought_Soil_Dry_P Parameter: Treatment Value: Drought vs. No Drought
  misc_feature: MA Experiment ID: 20001557 Result: Down-regulated in Transcription
  misc_feature: MA Experiment 20001557 PARAMETER Experiment Name: At_Drought_Soil_Dry_P Parameter: Age (day) Value: 27
  misc_feature: MA Experiment 20001557 PARAMETER Experiment Name: At_Drought_Soil_Dry_P Parameter: Organism Value: A. thaliana
  misc_feature: MA Experiment 20001557 PARAMETER Experiment Name: At_Drought_Soil_Dry_P Parameter: Plant Line Value: WS
  misc_feature: MA Experiment 20001557 PARAMETER Experiment Name: At_Drought_Soil_Dry_P Parameter: Post Timepoint (hr) Value: 3
  misc_feature: MA Experiment 20001557 PARAMETER Experiment Name: At_Drought_Soil_Dry_P Parameter: Post-Treatment Value: Re-Water vs. No Drought
  misc_feature: MA Experiment 20001557 PARAMETER Experiment Name: At_Drought_Soil_Dry_P Parameter: Timepoint (day) Value: 13
  misc_feature: MA Experiment 20001557 PARAMETER Experiment Name: At_Drought_Soil_Dry_P Parameter: Treatment Value: Drought vs. No Drought
  misc_feature: MA Experiment ID: 20001905 Result: Down-regulated in Transcription
  misc_feature: MA Experiment 20001905 PARAMETER Experiment Name: At_Drought_Reproduction_P Parameter: Age (day) Value: 40
  misc_feature: MA Experiment 20001905 PARAMETER Experiment Name: At_Drought_Reproduction_P Parameter: Organism Value: A. thaliana
  misc_feature: MA Experiment 20001905 PARAMETER Experiment Name: At_Drought_Reproduction_P Parameter: Plant Line Value: WS
  misc_feature: MA Experiment 20001905 PARAMETER Experiment Name: At_Drought_Reproduction_P Parameter: Timepoint (day) Value: 10
  misc_feature: MA Experiment 20001905 PARAMETER Experiment Name: At_Drought_Reproduction_P Parameter: Tissue Value: Rosettes
  misc_feature: MA Experiment 20001905 PARAMETER Experiment Name: At_Drought_Reproduction_P Parameter: Treatment Value: Drought vs. No Drought
  misc_feature: MA Experiment ID: 20001906 Result: Down-regulated in Transcription
  misc_feature: MA Experiment 20001906 PARAMETER Experiment Name: At_Drought_Reproduction_P Parameter: Age (day) Value: 35
  misc_feature: MA Experiment 20001906 PARAMETER Experiment Name: At_Drought_Reproduction_P Parameter: Organism Value: A. thaliana
  misc_feature: MA Experiment 20001906 PARAMETER Experiment Name: At_Drought_Reproduction_P Parameter: Plant Line Value: WS
  misc_feature: MA Experiment 20001906 PARAMETER Experiment Name: At_Drought_Reproduction_P Parameter: Timepoint (day) Value: 5
  misc_feature: MA Experiment 20001906 PARAMETER Experiment Name: At_Drought_Reproduction_P Parameter: Tissue Value: Siliques
  misc_feature: MA Experiment 20001906 PARAMETER Experiment Name: At_Drought_Reproduction_P Parameter: Treatment Value: Drought vs. No Drought
  misc_feature: MA Experiment ID: 20001908 Result: Down-regulated in Transcription
  misc_feature: MA Experiment 20001908 PARAMETER Experiment Name: At_Drought_Reproduction_P Parameter: Age (day) Value: 40
  misc_feature: MA Experiment 20001908 PARAMETER Experiment Name: At_Drought_Reproduction_P Parameter: Organism Value: A. thaliana
  misc_feature: MA Experiment 20001908 PARAMETER Experiment Name: At_Drought_Reproduction_P Parameter: Plant Line Value: WS
  misc_feature: MA Experiment 20001908 PARAMETER Experiment Name: At_Drought_Reproduction_P Parameter: Timepoint (day) Value: 10
  misc_feature: MA Experiment 20001908 PARAMETER Experiment Name: At_Drought_Reproduction_P Parameter: Tissue Value: Siliques
  misc_feature: MA Experiment 20001908 PARAMETER Experiment Name: At_Drought_Reproduction_P Parameter: Treatment Value: Drought vs. No Drought

SEQ ID NO: 93997 - protein, 449 aa, Arabidopsis thaliana; identical to SEQ ID NO: 90241
  peptide (1)..(449): Ceres Seq. ID no. 12723190
  misc_feature (1)..(449): Homolog of NCBI NO: 15219036 NR Description: glycosyl hydrolase family 1; protein id:
  misc_feature (43)..(316): Homolog of NCBI NO: 7435457 NR Description: hypothetical protein T13D8.15 - Arabidopsis >gi|3249077|gb|AAC24061.1| Similar to prunasin hydrolase gb|U50201 from Prunus serotina. ESTs gb|T21225 and gb|AA586305
  misc_feature (306)..(449): Homolog of NCBI NO: 7435457 NR Description: hypothetical protein T13D8.15 - Arabidopsis >gi|3249077|gb|AAC24061.1| Similar to prunasin hydrolase gb|U50201 from Prunus serotina. ESTs gb|T21225 and gb|AA586305
  misc_feature (1)..(315): Homolog of NCBI NO: 22330338 NR Description: glycosyl hydrolase family 1; protein id:
  misc_feature (308)..(448): Homolog of NCBI NO: 22330338 NR Description: glycosyl hydrolase family 1; protein id:
  misc_feature (1)..(315): Homolog of NCBI NO: 25289447 NR Description: hypothetical protein T2K10.15 [imported] - thaliana >gi|4249391|gb|AAD14488.1|AAD14488 Similar to gi|3249076
  misc_feature (345)..(448): Homolog of NCBI NO: 25289447 NR Description: hypothetical protein T2K10.15 [imported] - thaliana >gi|4249391|gb|AAD14488.1|AAD14488 Similar to gi|3249076
  misc_feature (315)..(345): Homolog of NCBI NO: 25289447 NR Description: hypothetical protein T2K10.15 [imported] - thaliana >gi|4249391|gb|AAD14488.1|AAD14488 Similar to gi|3249076
  misc_feature (1)..(315): Homolog of NCBI NO: 15219037 NR Description: glycosyl hydrolase family 1; protein id:
  misc_feature (330)..(449): Homolog of NCBI NO: 15219037 NR Description: glycosyl hydrolase family 1; protein id:

SEQ ID NO: 93998 - protein, 363 aa, Arabidopsis thaliana; identical to SEQ ID NO: 90242
  peptide (1)..(363): Ceres Seq. ID no. 12723191
  misc_feature (1)..(363): Homolog of NCBI NO: 15219036 NR Description: glycosyl hydrolase family 1; protein id:
  misc_feature (1)..(230): Homolog of NCBI NO: 7435457 NR Description: hypothetical protein T13D8.15 - Arabidopsis >gi|3249077|gb|AAC24061.1| Similar to prunasin hydrolase gb|U50201 from Prunus serotina. ESTs gb|T21225 and gb|AA586305
  misc_feature (220)..(363): Homolog of NCBI NO: 7435457 NR Description: hypothetical protein T13D8.15 - Arabidopsis >gi|3249077|gb|AAC24061.1| Similar to prunasin hydrolase gb|U50201 from Prunus serotina. ESTs gb|T21225 and gb|AA586305
  misc_feature (1)..(229): Homolog of NCBI NO: 22330338 NR Description: glycosyl hydrolase family 1; protein id:
  misc_feature (222)..(362): Homolog of NCBI NO: 22330338 NR Description: glycosyl hydrolase family 1; protein id:
  misc_feature (1)..(229): Homolog of NCBI NO: 25289447 NR Description: hypothetical protein T2K10.15 [imported] - thaliana >gi|4249391|gb|AAD14488.1|AAD14488 Similar to gi|3249076
  misc_feature (259)..(362): Homolog of NCBI NO: 25289447 NR Description: hypothetical protein T2K10.15 [imported] - thaliana >gi|4249391|gb|AAD14488.1|AAD14488 Similar to gi|3249076
  misc_feature (229)..(259): Homolog of NCBI NO: 25289447 NR Description: hypothetical protein T2K10.15 [imported] - thaliana >gi|4249391|gb|AAD14488.1|AAD14488 Similar to gi|3249076
  misc_feature (1)..(229): Homolog of NCBI NO: 15219037 NR Description: glycosyl hydrolase family 1; protein id:
  misc_feature (244)..(363): Homolog of NCBI NO: 15219037 NR Description: glycosyl hydrolase family 1; protein id:

SEQ ID NO: 93999 - protein, 292 aa, Arabidopsis thaliana; identical to SEQ ID NO: 90243
  peptide (1)..(292): Ceres Seq. ID no. 12723192
  misc_feature (1)..(292): Homolog of NCBI NO: 15219036 NR Description: glycosyl hydrolase family 1; protein id:
  misc_feature (1)..(159): Homolog of NCBI NO: 7435457 NR Description: hypothetical protein T13D8.15 - Arabidopsis >gi|3249077|gb|AAC24061.1| Similar to prunasin hydrolase gb|U50201 from Prunus serotina. ESTs gb|T21225 and gb|AA586305
  misc_feature (149)..(292): Homolog of NCBI NO: 7435457 NR Description: hypothetical protein T13D8.15 - Arabidopsis >gi|3249077|gb|AAC24061.1| Similar to prunasin hydrolase gb|U50201 from Prunus serotina. ESTs gb|T21225 and gb|AA586305
  misc_feature (1)..(158): Homolog of NCBI NO: 22330338 NR Description: glycosyl hydrolase family 1; protein id:
  misc_feature (151)..(291): Homolog of NCBI NO: 22330338 NR Description: glycosyl hydrolase family 1; protein id:
  misc_feature (1)..(158): Homolog of NCBI NO: 25289447 NR Description: hypothetical protein T2K10.15 [imported] - thaliana >gi|4249391|gb|AAD14488.1|AAD14488 Similar to gi|3249076
  misc_feature (188)..(291): Homolog of NCBI NO: 25289447 NR Description: hypothetical protein T2K10.15 [imported] - thaliana >gi|4249391|gb|AAD14488.1|AAD14488 Similar to gi|3249076
  misc_feature (158)..(188): Homolog of NCBI NO: 25289447 NR Description: hypothetical protein T2K10.15 [imported] - thaliana >gi|4249391|gb|AAD14488.1|AAD14488 Similar to gi|3249076
  misc_feature (1)..(158): Homolog of NCBI NO: 15219037 NR Description: glycosyl hydrolase family 1; protein id:
  misc_feature (173)..(292): Homolog of NCBI NO: 15219037 NR Description: glycosyl hydrolase family 1; protein id:

SEQ ID NO: 94000 - DNA, 1005 bp, Arabidopsis thaliana; identical to SEQ ID NO: 90244
  misc_feature (1)..(1005): Ceres Seq. ID no. 12723239
  misc_feature: MA Experiment ID: 20000171 Result: Up-regulated in Transcription
  misc_feature: MA Experiment 20000171 PARAMETER Experiment Name: At_42deg_Heat_P Parameter: Age (day) Value: 14
  misc_feature: MA Experiment 20000171 PARAMETER Experiment Name: At_42deg_Heat_P Parameter: Organism Value: A. thaliana
  misc_feature: MA Experiment 20000171 PARAMETER Experiment Name: At_42deg_Heat_P Parameter: Plant Line Value: WS
  misc_feature: MA Experiment 20000171 PARAMETER Experiment Name: At_42deg_Heat_P Parameter: Temperature (deg C) Value: 42 vs. 22
  misc_feature: MA Experiment 20000171 PARAMETER Experiment Name: At_42deg_Heat_P Parameter: Timepoint (hr) Value: 1
  misc_feature: MA Experiment 20000171 PARAMETER Experiment Name: At_42deg_Heat_P Parameter: Tissue Value: Aerial
  misc_feature: MA Experiment ID: 20000173 Result: Up-regulated in Transcription
  misc_feature: MA Experiment 20000173 PARAMETER Experiment Name: At_42deg_Heat_P Parameter: Age (day) Value: 14
  misc_feature: MA Experiment 20000173 PARAMETER Experiment Name: At_42deg_Heat_P Parameter: Organism Value: A. thaliana
  misc_feature: MA Experiment 20000173 PARAMETER Experiment Name: At_42deg_Heat_P Parameter: Plant Line Value: WS
  misc_feature: MA Experiment 20000173 PARAMETER Experiment Name: At_42deg_Heat_P Parameter: Temperature (deg C) Value: 42 vs. 22
  misc_feature: MA Experiment 20000173 PARAMETER Experiment Name: At_42deg_Heat_P Parameter: Timepoint (hr) Value: 6
  misc_feature: MA Experiment 20000173 PARAMETER Experiment Name: At_42deg_Heat_P Parameter: Tissue Value: Aerial
  misc_feature: MA Experiment ID: 20000227 Result: Down-regulated in Transcription
  misc_feature: MA Experiment 20000227 PARAMETER Experiment Name: At_Root-Tips-vs-Tops_P Parameter: Tissue Value: Root Tips vs. Root Tops
  misc_feature: MA Experiment ID: 20000267 Result: Up-regulated in Transcription
  misc_feature: MA Experiment 20000267 PARAMETER Experiment Name: At_Drought_P Parameter: Age (day) Value: 7
  misc_feature: MA Experiment 20000267 PARAMETER Experiment Name: At_Drought_P Parameter: Organism Value: A. thaliana
  misc_feature: MA Experiment 20000267 PARAMETER Experiment Name: At_Drought_P Parameter: Plant Line Value: WS
  misc_feature: MA Experiment 20000267 PARAMETER Experiment Name: At_Drought_P Parameter: Timepoint (hr) Value: 6
  misc_feature: MA Experiment 20000267 PARAMETER Experiment Name: At_Drought_P Parameter: Tissue Value: Whole Plant
  misc_feature: MA Experiment 20000267 PARAMETER Experiment Name: At_Drought_P Parameter: Treatment Value: Drought vs. No Drought
  misc_feature: MA Experiment ID: 20000268 Result: Up-regulated in Transcription
  misc_feature: MA Experiment 20000268 PARAMETER Experiment Name: At_100mM_NaCl__P Parameter: Age (day) Value: 14
  misc_feature: MA Experiment 20000268 PARAMETER Experiment Name: At_100mM_NaCl__P Parameter: Organism Value: A. thaliana
  misc_feature: MA Experiment 20000268 PARAMETER Experiment Name: At_100mM_NaCl__P Parameter: Plant Line Value: WS
  misc_feature: MA Experiment 20000268 PARAMETER Experiment Name: At_100mM_NaCl__P Parameter: Timepoint (hr) Value: 6
  misc_feature: MA Experiment 20000268 PARAMETER Experiment Name: At_100mM_NaCl__P Parameter: Tissue Value: Whole Plant
  misc_feature: MA Experiment 20000268 PARAMETER Experiment Name: At_100mM_NaCl__P Parameter: Treatment Value: 100mM NaCl vs. No Treatment
  misc_feature: MA Experiment ID: 20000436 Result: Up-regulated in Transcription
  misc_feature: MA Experiment 20000436 PARAMETER Experiment Name: At_Drought_P Parameter: Age (day) Value: 7
  misc_feature: MA Experiment 20000436 PARAMETER Experiment Name: At_Drought_P Parameter: Organism Value: A. thaliana
  misc_feature: MA Experiment 20000436 PARAMETER Experiment Name: At_Drought_P Parameter: Plant Line Value: WS
  misc_feature: MA Experiment 20000436 PARAMETER Experiment Name: At_Drought_P Parameter: Timepoint (hr) Value: 12
  misc_feature: MA Experiment 20000436 PARAMETER Experiment Name: At_Drought_P Parameter: Tissue Value: Whole Plant
  misc_feature: MA Experiment 20000436 PARAMETER Experiment Name: At_Drought_P Parameter: Treatment Value: Drought vs. No Drought
  misc_feature: MA Experiment ID: 20000437 Result: Up-regulated in Transcription
  misc_feature: MA Experiment 20000437 PARAMETER Experiment Name: At_Drought_P Parameter: Age (day) Value: 8
  misc_feature: MA Experiment 20000437 PARAMETER Experiment Name: At_Drought_P Parameter: Organism Value: A. thaliana
  misc_feature: MA Experiment 20000437 PARAMETER Experiment Name: At_Drought_P Parameter: Plant Line Value: WS
  misc_feature: MA Experiment 20000437 PARAMETER Experiment Name: At_Drought_P Parameter: Timepoint (hr) Value: 24
  misc_feature: MA Experiment 20000437 PARAMETER Experiment Name: At_Drought_P Parameter: Tissue Value: Whole Plant
  misc_feature: MA Experiment 20000437 PARAMETER Experiment Name: At_Drought_P Parameter: Treatment Value: Drought vs. No Drought
  misc_feature: MA Experiment ID: 20000451 Result: Up-regulated in Transcription
  misc_feature: MA Experiment 20000451 PARAMETER Experiment Name: At_CS6879_Shoots-Roots_P Parameter: Age (day) Value: 14
  misc_feature: MA Experiment 20000451 PARAMETER Experiment Name: At_CS6879_Shoots-Roots_P Parameter: Organism Value: A. thaliana
  misc_feature: MA Experiment 20000451 PARAMETER Experiment Name: At_CS6879_Shoots-Roots_P Parameter: Plant Line Value: CS6879 vs. WS
  misc_feature: MA Experiment 20000451 PARAMETER Experiment Name: At_CS6879_Shoots-Roots_P Parameter: Tissue Value: Roots

SEQ ID NO: 94001 - protein, 334 aa, Arabidopsis thaliana; identical to SEQ ID NO: 90245
  peptide (1)..(334): Ceres Seq. ID no. 12723240
  misc_feature (1)..(334): Homolog of NCBI NO: 15219093 NR Description: galactinol synthase, putative; protein id: [Arabidopsis thaliana] >gi|25404266|pir||H96629 hypothetical
  misc_feature (1)..(334): Homolog of NCBI NO: 5608497 NR Description: galactinol synthase, isoform GolS-1 [Ajuga
  misc_feature (1)..(334): Homolog of NCBI NO: 15219087 NR Description: galactinol synthase, putative; protein id:
  misc_feature (23)..(334): Homolog of NCBI NO: 4588376 NR Description: galactinol synthase [Brassica napus]
  misc_feature (23)..(334): Homolog of NCBI NO: 15226522 NR Description: putative galactinol synthase; protein id: supported by cDNA: 124236., supported by cDNA: gi_15810148,
  misc_feature (1)..(334): Homolog of NCBI NO: 18874400 NR Description: galactinol synthase [Cucumis melo]
  misc_feature (1)..(334): Homolog of NCBI NO: 15223567 NR Description: water stress-induced protein, putative; protein At1g56600.1, supported by cDNA: gi_15215761, supported by cDNA:
  misc_feature (1)..(334): Homolog of NCBI NO: 5541885 NR Description: putative galactinol synthase [Pisum sativum]
  misc_feature (1)..(301): Homolog of NCBI NO: 15217486 NR Description: putative galactinol synthase; protein id: supported by cDNA: gi_13899102, supported by cDNA: gi_17298126, by cDNA: gi_20148246 [Arabidopsis thaliana]
  misc_feature (1)..(334): Homolog of NCBI NO: 30089660 NR Description: galactinol synthase [Medicago sativa]

SEQ ID NO: 94002 - protein, 325 aa, Arabidopsis thaliana; identical to SEQ ID NO: 90246
  peptide (1)..(325): Ceres Seq. ID no. 12723241
  misc_feature (1)..(325): Homolog of NCBI NO: 15219093 NR Description: galactinol synthase, putative; protein id: [Arabidopsis thaliana] >gi|25404266|pir||H96629 hypothetical
  misc_feature (1)..(325): Homolog of NCBI NO: 5608497 NR Description: galactinol synthase, isoform GolS-1 [Ajuga
  misc_feature (1)..(325): Homolog of NCBI NO: 15219087 NR Description: galactinol synthase, putative; protein id:
  misc_feature (14)..(325): Homolog of NCBI NO: 4588376 NR Description: galactinol synthase [Brassica napus]
  misc_feature (14)..(325): Homolog of NCBI NO: 15226522 NR Description: putative galactinol synthase; protein id: supported by cDNA: 124236., supported by cDNA: gi_15810148,
  misc_feature (1)..(325): Homolog of NCBI NO: 18874400 NR Description: galactinol synthase [Cucumis melo]
  misc_feature (1)..(325): Homolog of NCBI NO: 15223567 NR Description: water stress-induced protein, putative; protein At1g56600.1, supported by cDNA: gi_15215761, supported by cDNA:
  misc_feature (1)..(325): Homolog of NCBI NO: 5541885 NR Description: putative galactinol synthase [Pisum sativum]
  misc_feature (1)..(292): Homolog of NCBI NO: 15217486 NR Description: putative galactinol synthase; protein id: supported by cDNA: gi_13899102, supported by cDNA: gi_17298126, by cDNA: gi_20148246 [Arabidopsis thaliana]
  misc_feature (1)..(325): Homolog of NCBI NO: 30089660 NR Description: galactinol synthase [Medicago sativa]

SEQ ID NO: 94003 - protein, 276 aa, Arabidopsis thaliana; identical to SEQ ID NO: 90247
  peptide (1)..(276): Ceres Seq. ID no. 12723242
  misc_feature (1)..(276): Homolog of NCBI NO: 15219093 NR Description: galactinol synthase, putative; protein id: [Arabidopsis thaliana] >gi|25404266|pir||H96629 hypothetical
  misc_feature (1)..(276): Homolog of NCBI NO: 5608497 NR Description: galactinol synthase, isoform GolS-1 [Ajuga
  misc_feature (1)..(276): Homolog of NCBI NO: 15219087 NR Description: galactinol synthase, putative; protein id:
  misc_feature (1)..(276): Homolog of NCBI NO: 4588376 NR Description: galactinol synthase [Brassica napus]
  misc_feature (1)..(276): Homolog of NCBI NO: 15226522 NR Description: putative galactinol synthase; protein id: supported by cDNA: 124236., supported by cDNA: gi_15810148,
  misc_feature (1)..(276): Homolog of NCBI NO: 18874400 NR Description: galactinol synthase [Cucumis melo]
  misc_feature (1)..(276): Homolog of NCBI NO: 15223567 NR Description: water stress-induced protein, putative; protein At1g56600.1, supported by cDNA: gi_15215761, supported by cDNA:
  misc_feature (1)..(276): Homolog of NCBI NO: 5541885 NR Description: putative galactinol synthase [Pisum sativum]
  misc_feature (1)..(243): Homolog of NCBI NO: 15217486 NR Description: putative galactinol synthase; protein id: supported by cDNA: gi_13899102, supported by cDNA: gi_17298126, by cDNA: gi_20148246 [Arabidopsis thaliana]
  misc_feature (1)..(276): Homolog of NCBI NO: 30089660 NR Description: galactinol synthase [Medicago sativa]

SEQ ID NO: 94004 - DNA, 1406 bp, Arabidopsis thaliana; identical to SEQ ID NO: 90248
  misc_feature (1)..(1406): Ceres Seq. ID no. 12723259
  misc_feature: MA Experiment ID: 20001911 Result: Up-regulated in Transcription
  misc_feature: MA Experiment 20001911 PARAMETER Experiment Name: At_Drought_Reproduction_P Parameter: Age (day) Value: 40
  misc_feature: MA Experiment 20001911 PARAMETER Experiment Name: At_Drought_Reproduction_P Parameter: Organism Value: A. thaliana
  misc_feature: MA Experiment 20001911 PARAMETER Experiment Name: At_Drought_Reproduction_P Parameter: Plant Line Value: WS
  misc_feature: MA Experiment 20001911 PARAMETER Experiment Name: At_Drought_Reproduction_P Parameter: Timepoint (day) Value: 10
  misc_feature: MA Experiment 20001911 PARAMETER Experiment Name: At_Drought_Reproduction_P Parameter: Tissue Value: Flowers
  misc_feature: MA Experiment 20001911 PARAMETER Experiment Name: At_Drought_Reproduction_P Parameter: Treatment Value: Drought vs. No Drought

SEQ ID NO: 94005 - protein, 385 aa, Arabidopsis thaliana; identical to SEQ ID NO: 90249
  peptide (1)..(385): Ceres Seq. ID no. 12723260
  misc_feature (124)..(268): Pfam Name: RNA polymerase Rpb3/RpoA insert domain Pfam Description: RNA polymerase Rpb3/RpoA insert domain
  misc_feature (1)..(385): Homolog of NCBI NO: 15219773 NR Description: RNA polymerase subunit; protein id: At1g60620.1, by cDNA: gi_14423463, supported by cDNA: gi_514323 [Arabidopsis >gi|25288353|pir||D96631 RNA polymerase subunit (isoform subunit
  misc_feature (9)..(380): Homolog of NCBI NO: 15219820 NR Description: RNA polymerase subunit; protein id: At1g60850.1, by cDNA: 21961., supported by cDNA: gi_514321 [Arabidopsis
  misc_feature (9)..(380): Homolog of NCBI NO: 514322 NR Description: RNA polymerase subunit >gi|1586549|prf||2204246A
  misc_feature (9)..(380): Homolog of NCBI NO: 21592304 NR Description: RNA polymerase subunit [Arabidopsis thaliana]
  misc_feature (37)..(384): Homolog of NCBI NO: 3914807 NR Description: DNA-directed RNA polymerase I 40 kDa polypeptide (RPA39) >gi|2266929|gb|AAC14354.1| RNA polymerase I subunit
  misc_feature (41)..(384): Homolog of NCBI NO: 14198113 NR Description: Unknown (protein for IMAGE:3448039) [Homo sapiens]
  misc_feature (37)..(384): Homolog of NCBI NO: 34874462 NR Description: similar to DNA-directed RNA polymerase I 40 kDa
  misc_feature (37)..(384): Homolog of NCBI NO: 6677787 NR Description: RNA polymerase 1-1; RNA polymerase 1-1 (40 kDa
  misc_feature (37)..(384): Homolog of NCBI NO: 18266895 NR Description: DNA-directed RNA polymerase I 40 kDa polypeptide
  misc_feature (51)..(385): Homolog of NCBI NO: 34193909 NR Description: RNA polymerase 1-1 [Danio rerio]

SEQ ID NO: 94006 - protein, 320 aa, Arabidopsis thaliana; identical to SEQ ID NO: 90250
  peptide (1)..(320): Ceres Seq. ID no. 12723261
  misc_feature (59)..(203): Pfam Name: RNA polymerase Rpb3/RpoA insert domain Pfam Description: RNA polymerase Rpb3/RpoA insert domain
  misc_feature (1)..(320): Homolog of NCBI NO: 15219773 NR Description: RNA polymerase subunit; protein id: At1g60620.1, by cDNA: gi_14423463, supported by cDNA: gi_514323 [Arabidopsis >gi|25288353|pir||D96631 RNA polymerase subunit (isoform subunit
  misc_feature (1)..(315): Homolog of NCBI NO: 15219820 NR Description: RNA polymerase subunit; protein id: At1g60850.1, by cDNA: 21961., supported by cDNA: gi_514321 [Arabidopsis
  misc_feature (1)..(315): Homolog of NCBI NO: 514322 NR Description: RNA polymerase subunit >gi|1586549|prf||2204246A
  misc_feature (1)..(315): Homolog of NCBI NO: 21592304 NR Description: RNA polymerase subunit [Arabidopsis thaliana]
  misc_feature (1)..(319): Homolog of NCBI NO: 3914807 NR Description: DNA-directed RNA polymerase I 40 kDa polypeptide (RPA39) >gi|2266929|gb|AAC14354.1| RNA polymerase I subunit
  misc_feature (1)..(319): Homolog of NCBI NO: 14198113 NR Description: Unknown (protein for IMAGE:3448039) [Homo sapiens]
  misc_feature (1)..(319): Homolog of NCBI NO: 34874462 NR Description: similar to DNA-directed RNA polymerase I 40 kDa
  misc_feature (1)..(319): Homolog of NCBI NO: 6677787 NR Description: RNA polymerase 1-1; RNA polymerase 1-1 (40 kDa
  misc_feature (1)..(319): Homolog of NCBI NO: 18266895 NR Description: DNA-directed RNA polymerase I 40 kDa polypeptide
  misc_feature (1)..(320): Homolog of NCBI NO: 34193909 NR Description: RNA polymerase 1-1 [Danio rerio]

SEQ ID NO: 94007 - protein, 293 aa, Arabidopsis thaliana; identical to SEQ ID NO: 90251
  peptide (1)..(293): Ceres Seq. ID no. 12723262
  misc_feature (32)..(176): Pfam Name: RNA polymerase Rpb3/RpoA insert domain Pfam Description: RNA polymerase Rpb3/RpoA insert domain
  misc_feature (1)..(293): Homolog of NCBI NO: 15219773 NR Description: RNA polymerase subunit; protein id: At1g60620.1, by cDNA: gi_14423463, supported by cDNA: gi_514323 [Arabidopsis >gi|25288353|pir||D96631 RNA polymerase subunit (isoform subunit
  misc_feature (1)..(288): Homolog of NCBI NO: 15219820 NR Description: RNA polymerase subunit; protein id: At1g60850.1, by cDNA: 21961., supported by cDNA: gi_514321 [Arabidopsis
  misc_feature (1)..(288): Homolog of NCBI NO: 514322 NR Description: RNA polymerase subunit >gi|1586549|prf||2204246A
  misc_feature (1)..(288): Homolog of NCBI NO: 21592304 NR Description: RNA polymerase subunit [Arabidopsis thaliana]
  misc_feature (1)..(292): Homolog of NCBI NO: 3914807 NR Description: DNA-directed RNA polymerase I 40 kDa polypeptide (RPA39) >gi|2266929|gb|AAC14354.1| RNA polymerase I subunit
  misc_feature (1)..(292): Homolog of NCBI NO: 14198113 NR Description: Unknown (protein for IMAGE:3448039) [Homo sapiens]
  misc_feature (1)..(292): Homolog of NCBI NO: 34874462 NR Description: similar to DNA-directed RNA polymerase I 40 kDa
  misc_feature (1)..(292): Homolog of NCBI NO: 6677787 NR Description: RNA polymerase 1-1; RNA polymerase 1-1 (40 kDa
  misc_feature (1)..(292): Homolog of NCBI NO: 18266895 NR Description: DNA-directed RNA polymerase I 40 kDa polypeptide
  misc_feature (1)..(293): Homolog of NCBI NO: 34193909 NR Description: RNA polymerase 1-1 [Danio rerio]

SEQ ID NO: 94008 - DNA, 849 bp, Arabidopsis thaliana; identical to SEQ ID NO: 90252
  misc_feature (1)..(849): Ceres Seq. ID no. 12723267
  misc_feature: MA Experiment ID: 20000440 Result: Up-regulated in Transcription
  misc_feature: MA Experiment 20000440 PARAMETER Experiment Name: At_Closed-Flower__Sub_P Parameter: Tissue Value: Closed Flower vs. Whole Plant

SEQ ID NO: 94009 - protein, 282 aa, Arabidopsis thaliana; identical to SEQ ID NO: 90253
  peptide (1)..(282): Ceres Seq. ID no. 12723268
  misc_feature (1)..(273): Pfam Name: GDSL-like Lipase/Acylhydrolase Pfam Description: GDSL-like Lipase/Acylhydrolase
  misc_feature (1)..(282): Homolog of NCBI NO: 22330312 NR Description: similar to proline-rich protein, putative;
  misc_feature (1)..(191): Homolog of NCBI NO: 18406327 NR Description: proline-rich protein, putative; protein id:
  misc_feature (192)..(282): Homolog of NCBI NO: 18406327 NR Description: proline-rich protein, putative; protein id:
  misc_feature (1)..(282): Homolog of NCBI NO: 15229719 NR Description: putative protein; protein id: At3g43570.1 thaliana] >gi|9967506|emb|CAC05631.1| putative protein
  misc_feature (1)..(191): Homolog of NCBI NO: 15217977 NR Description: proline-rich protein, putative; protein id:
  misc_feature (192)..(282): Homolog of NCBI NO: 15217977 NR Description: proline-rich protein, putative; protein id:
  misc_feature (1)..(194): Homolog of NCBI NO: 15231934 NR Description: hypothetical protein; protein id: At3g14820.1
  misc_feature (193)..(277): Homolog of NCBI NO: 15231934 NR Description: hypothetical protein; protein id: At3g14820.1
  misc_feature (1)..(164): Homolog of NCBI NO: 15229307 NR Description: putative protein; protein id: At3g43550.1
  misc_feature (42)..(191): Homolog of NCBI NO: 15238307 NR Description: GDSL-motif lipase/hydrolase-like protein; protein

SEQ ID NO: 94010 - protein, 226 aa, Arabidopsis thaliana; identical to SEQ ID NO: 90254
  peptide (1)..(226): Ceres Seq. ID no. 12723269
  misc_feature (1)..(217): Pfam Name: GDSL-like Lipase/Acylhydrolase Pfam Description: GDSL-like Lipase/Acylhydrolase
  misc_feature (1)..(226): Homolog of NCBI NO: 22330312 NR Description: similar to proline-rich protein, putative;
  misc_feature (1)..(135): Homolog of NCBI NO: 18406327 NR Description: proline-rich protein, putative; protein id:
  misc_feature (136)..(226): Homolog of NCBI NO: 18406327 NR Description: proline-rich protein, putative; protein id:
  misc_feature (1)..(226): Homolog of NCBI NO: 15229719 NR Description: putative protein; protein id: At3g43570.1 thaliana] >gi|9967506|emb|CAC05631.1| putative protein
  misc_feature (1)..(135): Homolog of NCBI NO: 15217977 NR Description: proline-rich protein, putative; protein id:
  misc_feature (136)..(226): Homolog of NCBI NO: 15217977 NR Description: proline-rich protein, putative; protein id:
  misc_feature (1)..(138): Homolog of NCBI NO: 15231934 NR Description: hypothetical protein; protein id: At3g14820.1
  misc_feature (137)..(221): Homolog of NCBI NO: 15231934 NR Description: hypothetical protein; protein id: At3g14820.1
  misc_feature (1)..(108): Homolog of NCBI NO: 15229307 NR Description: putative protein; protein id: At3g43550.1
  misc_feature (1)..(135): Homolog of NCBI NO: 15238307 NR Description: GDSL-motif lipase/hydrolase-like protein; protein

SEQ ID NO: 94011 - protein, 196 aa, Arabidopsis thaliana; identical to SEQ ID NO: 90255
  peptide (1)..(196): Ceres Seq. ID no. 12723270
  misc_feature (1)..(187): Pfam Name: GDSL-like Lipase/Acylhydrolase Pfam Description: GDSL-like Lipase/Acylhydrolase
  misc_feature (1)..(196): Homolog of NCBI NO: 22330312 NR Description: similar to proline-rich protein, putative;
  misc_feature (1)..(105): Homolog of NCBI NO: 18406327 NR Description: proline-rich protein, putative; protein id:
  misc_feature (106)..(196): Homolog of NCBI NO: 18406327 NR Description: proline-rich protein, putative; protein id:
  misc_feature (1)..(196): Homolog of NCBI NO: 15229719 NR Description: putative protein; protein id: At3g43570.1 thaliana] >gi|9967506|emb|CAC05631.1| putative protein
  misc_feature (1)..(105): Homolog of NCBI NO: 15217977 NR Description: proline-rich protein, putative; protein id:
  misc_feature (106)..(196): Homolog of NCBI NO: 15217977 NR Description: proline-rich protein, putative; protein id:
  misc_feature (1)..(108): Homolog of NCBI NO: 15231934 NR Description: hypothetical protein; protein id: At3g14820.1
  misc_feature (107)..(191): Homolog of NCBI NO: 15231934 NR Description: hypothetical protein; protein id: At3g14820.1
  misc_feature (1)..(78): Homolog of NCBI NO: 15229307 NR Description: putative protein; protein id: At3g43550.1
  misc_feature (1)..(105): Homolog of NCBI NO: 15238307 NR Description: GDSL-motif lipase/hydrolase-like protein; protein

SEQ ID NO: 94012 - DNA, 676 bp, Arabidopsis thaliana; identical to SEQ ID NO: 90256
  misc_feature (1)..(676): Ceres Seq. ID no. 12723283
  misc_feature: MA Experiment ID: 108462 Result: Down-regulated in Transcription
  misc_feature: MA Experiment 108462 PARAMETER Experiment Name: At_Germinating_Seeds_cDNA_P Parameter: Age (day) Value: 2 vs. 0
  misc_feature: MA Experiment 108462 PARAMETER Experiment Name: At_Germinating_Seeds_cDNA_P Parameter: Tissue Value: Germinating Seeds
  misc_feature: MA Experiment ID: 108463 Result: Down-regulated in Transcription
  misc_feature: MA Experiment 108463 PARAMETER Experiment Name: At_Germinating_Seeds_cDNA_P Parameter: Age (day) Value: 3 vs. 0
  misc_feature: MA Experiment 108463 PARAMETER Experiment Name: At_Germinating_Seeds_cDNA_P Parameter: Tissue Value: Germinating Seeds
  misc_feature: MA Experiment ID: 108561 Result: Up-regulated in Transcription
  misc_feature: MA Experiment 108561 PARAMETER Experiment Name: At_100uM_ABA_cDNA_P Parameter: Timepoint (hr) Value: 6
  misc_feature: MA Experiment 108561 PARAMETER Experiment Name: At_100uM_ABA_cDNA_P Parameter: Tissue Value: Aerial
  misc_feature: MA Experiment 108561 PARAMETER Experiment Name: At_100uM_ABA_cDNA_P Parameter: Treatment Value: 100uM ABA vs. No Treatment
  misc_feature: MA Experiment ID: 108576 Result: Up-regulated in Transcription
  misc_feature: MA Experiment 108576 PARAMETER Experiment Name: At_42deg_Heat_cDNA_P Parameter: Temperature (deg C) Value: 42 vs. 22
  misc_feature: MA Experiment 108576 PARAMETER Experiment Name: At_42deg_Heat_cDNA_P Parameter: Timepoint (hr) Value: 1
  misc_feature: MA Experiment 108576 PARAMETER Experiment Name: At_42deg_Heat_cDNA_P Parameter: Tissue Value: Aerial
  misc_feature: MA Experiment ID: 108577 Result: Up-regulated in Transcription
  misc_feature: MA Experiment 108577 PARAMETER Experiment Name: At_42deg_Heat_cDNA_P Parameter: Temperature (deg C) Value: 42 vs. 22
  misc_feature: MA Experiment 108577 PARAMETER Experiment Name: At_42deg_Heat_cDNA_P Parameter: Timepoint (hr) Value: 6
  misc_feature: MA Experiment 108577 PARAMETER Experiment Name: At_42deg_Heat_cDNA_P Parameter: Tissue Value: Aerial
  misc_feature: MA Experiment ID: 108594 Result: Down-regulated in Transcription
  misc_feature: MA Experiment 108594 PARAMETER Experiment Name: At_Ler-rhl_Root_cDNA_P Parameter: Plant Line Value: null
  misc_feature: MA Experiment ID: 108595 Result: Up-regulated in Transcription
  misc_feature: MA Experiment 108595 PARAMETER Experiment Name: At_Ler-pi_Ovule_cDNA_P Parameter: Plant Line Value: null
  misc_feature: MA Experiment ID: 20000069 Result: Up-regulated in Transcription
  misc_feature: MA Experiment 20000069 PARAMETER Experiment Name: At_100uM_ABA_Mutants_cDNA_P Parameter: Plant Line Value: CS23
  misc_feature: MA Experiment 20000069 PARAMETER Experiment Name: At_100uM_ABA_Mutants_cDNA_P Parameter: Timepoint (hr) Value: 6
  misc_feature: MA Experiment 20000069 PARAMETER Experiment Name: At_100uM_ABA_Mutants_cDNA_P Parameter: Tissue Value: Aerial
  misc_feature: MA Experiment 20000069 PARAMETER Experiment Name: At_100uM_ABA_Mutants_cDNA_P Parameter: Treatment Value: 100uM ABA vs. No Treatment
  misc_feature: MA Experiment ID: 20000093 Result: Up-regulated in Transcription
  misc_feature: MA Experiment 20000093 PARAMETER Experiment Name: At_42deg_Heat_cDNA_P Parameter: Temperature (deg C) Value: 42 vs. 22
  misc_feature: MA Experiment 20000093 PARAMETER Experiment Name: At_42deg_Heat_cDNA_P Parameter: Timepoint (hr) Value: 0.5
  misc_feature: MA Experiment 20000093 PARAMETER Experiment Name: At_42deg_Heat_cDNA_P Parameter: Tissue Value: Aerial
  misc_feature: MA Experiment ID: 20000112 Result: Up-regulated in Transcription
  misc_feature: MA Experiment 20000112 PARAMETER Experiment Name: At_42deg_Heat_cDNA_P Parameter: Temperature (deg C) Value: 42 vs. 22
  misc_feature: MA Experiment 20000112 PARAMETER Experiment Name: At_42deg_Heat_cDNA_P Parameter: Timepoint (hr) Value: 2
  misc_feature: MA Experiment 20000112 PARAMETER Experiment Name: At_42deg_Heat_cDNA_P Parameter: Tissue Value: Aerial
  misc_feature: MA Experiment ID: 20000113 Result: Up-regulated in Transcription
  misc_feature: MA Experiment 20000113 PARAMETER Experiment Name: At_42deg_Heat_cDNA_P Parameter: Temperature (deg C) Value: 42 vs. 22
  misc_feature: MA Experiment 20000113 PARAMETER Experiment Name: At_42deg_Heat_cDNA_P Parameter: Timepoint (hr) Value: 8
  misc_feature: MA Experiment 20000113 PARAMETER Experiment Name: At_42deg_Heat_cDNA_P Parameter: Tissue Value: Aerial
  misc_feature: MA Experiment ID: 20000117 Result: Up-regulated in Transcription
  misc_feature: MA Experiment 20000117 PARAMETER Experiment Name: At_100uM_ABA_Mutants_cDNA_P Parameter: Plant Line Value: Columbia
  misc_feature: MA Experiment 20000117 PARAMETER Experiment Name: At_100uM_ABA_Mutants_cDNA_P Parameter: Timepoint (hr) Value: 6
  misc_feature: MA Experiment 20000117 PARAMETER Experiment Name: At_100uM_ABA_Mutants_cDNA_P Parameter: Tissue Value: Aerial
  misc_feature: MA Experiment 20000117 PARAMETER Experiment Name: At_100uM_ABA_Mutants_cDNA_P Parameter: Treatment Value: 100uM ABA vs. No Treatment
  misc_feature: MA Experiment ID: 20000144 Result: Up-regulated in Transcription
  misc_feature: MA Experiment 20000144 PARAMETER Experiment Name: At_42deg_Heat_cDNA_P Parameter: Temperature (deg C) Value: 42 vs. 22
  misc_feature: MA Experiment 20000144 PARAMETER Experiment Name: At_42deg_Heat_cDNA_P Parameter: Timepoint (hr) Value: 1
  misc_feature: MA Experiment 20000144 PARAMETER Experiment Name: At_42deg_Heat_cDNA_P Parameter: Tissue Value: Aerial
  misc_feature: MA Experiment ID: 20000314 Result: Up-regulated in Transcription
  misc_feature: MA Experiment 20000314 PARAMETER Experiment Name: At_14day_Shoots-Roots_Sub_P Parameter: Age (day) Value: 14
  misc_feature: MA Experiment 20000314 PARAMETER Experiment Name: At_14day_Shoots-Roots_Sub_P Parameter: Organism Value: A. thaliana
  misc_feature: MA Experiment 20000314 PARAMETER Experiment Name: At_14day_Shoots-Roots_Sub_P Parameter: Plant Line Value: WS
  misc_feature: MA Experiment 20000314 PARAMETER Experiment Name: At_14day_Shoots-Roots_Sub_P Parameter: Tissue Value: Roots vs. Whole Plant
  misc_feature: MA Experiment ID: 20000327 Result: Up-regulated in Transcription
  misc_feature: MA Experiment 20000327 PARAMETER Experiment Name: At_42deg_Heat_Sub_P Parameter: Age (day) Value: 14
  misc_feature: MA Experiment 20000327 PARAMETER Experiment Name: At_42deg_Heat_Sub_P Parameter: Organism Value: A. thaliana
  misc_feature: MA Experiment 20000327 PARAMETER Experiment Name: At_42deg_Heat_Sub_P Parameter: Plant Line Value: WS
  misc_feature: MA Experiment 20000327 PARAMETER Experiment Name: At_42deg_Heat_Sub_P Parameter: Temperature (deg C) Value: 42 vs. 22
  misc_feature: MA Experiment 20000327 PARAMETER Experiment Name: At_42deg_Heat_Sub_P Parameter: Timepoint (hr) Value: 1
  misc_feature: MA Experiment 20000327 PARAMETER Experiment Name: At_42deg_Heat_Sub_P Parameter: Tissue Value: Aerial
  misc_feature: MA Experiment ID: 20000328 Result: Up-regulated in Transcription
  misc_feature: MA Experiment 20000328 PARAMETER Experiment Name: At_42deg_Heat_Sub_P Parameter: Age (day) Value: 14
  misc_feature: MA Experiment 20000328 PARAMETER Experiment Name: At_42deg_Heat_Sub_P Parameter: Organism Value: A. thaliana
  misc_feature: MA Experiment 20000328 PARAMETER Experiment Name: At_42deg_Heat_Sub_P Parameter: Plant Line Value: WS
  misc_feature: MA Experiment 20000328 PARAMETER Experiment Name: At_42deg_Heat_Sub_P Parameter: Temperature (deg C) Value: 42 vs. 22
  misc_feature: MA Experiment 20000328 PARAMETER Experiment Name: At_42deg_Heat_Sub_P Parameter: Timepoint (hr) Value: 6
  misc_feature: MA Experiment 20000328 PARAMETER Experiment Name: At_42deg_Heat_Sub_P Parameter: Tissue Value: Aerial
  misc_feature: MA Experiment ID: 20000329 Result: Down-regulated in Transcription
  misc_feature: MA Experiment 20000329 PARAMETER Experiment Name: At_4deg_Cold_Sub_P Parameter: Age (day) Value: 14
  misc_feature: MA Experiment 20000329 PARAMETER Experiment Name: At_4deg_Cold_Sub_P Parameter: Organism Value: A. thaliana
  misc_feature: MA Experiment 20000329 PARAMETER Experiment Name: At_4deg_Cold_Sub_P Parameter: Plant Line Value: WS
  misc_feature: MA Experiment 20000329 PARAMETER Experiment Name: At_4deg_Cold_Sub_P Parameter: Temperature (deg C) Value: 4 vs. 22
  misc_feature: MA Experiment 20000329 PARAMETER Experiment Name: At_4deg_Cold_Sub_P Parameter: Timepoint (hr) Value: 6
  misc_feature: MA Experiment 20000329 PARAMETER Experiment Name: At_4deg_Cold_Sub_P Parameter: Tissue Value: Aerial
  misc_feature: MA Experiment ID: 20000347 Result: Up-regulated in Transcription
  misc_feature: MA Experiment 20000347 PARAMETER Experiment Name: At_2mM_SA_Sub_P Parameter: Age (day) Value: 14
  misc_feature: MA Experiment 20000347 PARAMETER Experiment Name: At_2mM_SA_Sub_P Parameter: Organism Value: A. thaliana
  misc_feature: MA Experiment 20000347 PARAMETER Experiment Name: At_2mM_SA_Sub_P Parameter: Plant Line Value: WS
  misc_feature: MA Experiment 20000347 PARAMETER Experiment Name: At_2mM_SA_Sub_P Parameter: Timepoint (hr) Value: 6
  misc_feature: MA Experiment 20000347 PARAMETER Experiment Name: At_2mM_SA_Sub_P Parameter: Tissue Value: Aerial
  misc_feature: MA Experiment 20000347 PARAMETER Experiment Name: At_2mM_SA_Sub_P Parameter: Treatment Value: 2mM SA vs. No Treatment
  misc_feature: MA Experiment ID: 20000355 Result: Up-regulated in Transcription
  misc_feature: MA Experiment 20000355 PARAMETER Experiment Name: At_Siliques_Sub_P Parameter: Age (day) Value: 21
  misc_feature: MA Experiment 20000355 PARAMETER Experiment Name: At_Siliques_Sub_P Parameter: Organism Value: A. thaliana
  misc_feature: MA Experiment 20000355 PARAMETER Experiment Name: At_Siliques_Sub_P Parameter: Plant Line Value: WS
  misc_feature: MA Experiment 20000355 PARAMETER Experiment Name: At_Siliques_Sub_P Parameter: Tissue Value: Less Than 5mm Siliques vs. Whole Plant
  misc_feature: MA Experiment ID: 20001807 Result: Down-regulated in Transcription
  misc_feature: MA Experiment 20001807 PARAMETER Experiment Name: At_50mM_NH4NO3_L-to-H_Sub_P Parameter: Timepoint (hr) Value: 6
  misc_feature: MA Experiment 20001807 PARAMETER Experiment Name: At_50mM_NH4NO3_L-to-H_Sub_P Parameter: Tissue Value: Leaf
  misc_feature: MA Experiment 20001807 PARAMETER Experiment Name: At_50mM_NH4NO3_L-to-H_Sub_P Parameter: Treatment Value: 50mM NH4NO3 vs 100mM Mannitol

SEQ ID NO: 94013 - protein, 179 aa, Arabidopsis thaliana; identical to SEQ ID NO: 90257
  peptide (1)..(179): Ceres Seq. ID no. 12723284
  misc_feature (23)..(177): Pfam Name: AhpC/TSA family Pfam Description: AhpC/TSA family
  misc_feature (18)..(179): Homolog of NCBI NO: 18406870 NR Description: peroxiredoxin, putative; protein id: At1g60740.1,
  misc_feature (18)..(179): Homolog of NCBI NO: 15218876 NR Description: type 2 peroxiredoxin, putative; protein id: supported by cDNA: 10862., supported by cDNA: gi_12083333, by cDNA: gi_4704731 [Arabidopsis thaliana]
  misc_feature (18)..(179): Homolog of NCBI NO: 21553913 NR Description: peroxiredoxin, putative [Arabidopsis thaliana]
  misc_feature (18)..(179): Homolog of NCBI NO: 4704732 NR Description: peroxiredoxin TPx2 [Arabidopsis thaliana]
  misc_feature (18)..(179): Homolog of NCBI NO: 15218877 NR Description: type 2 peroxiredoxin, putative; protein id: supported by cDNA: 5476., supported by cDNA: gi_12083335,
  misc_feature (18)..(179): Homolog of NCBI NO: 4928472 NR Description: type 2 peroxiredoxin [Brassica rapa subsp.
  misc_feature (18)..(179): Homolog of NCBI NO: 21593881 NR Description: type 2 peroxiredoxin, putative [Arabidopsis
  misc_feature (18)..(179): Homolog of NCBI NO: 3913633 NR Description: Hypothetical protein At1g60740
  misc_feature (18)..(179): Homolog of NCBI NO: 30841938 NR Description: thioredoxin peroxidase 1 [Lycopersicon esculentum]
  misc_feature (18)..(179): Homolog of NCBI NO: 18654477 NR Description: thioredoxin peroxidase [Capsicum annuum]

SEQ ID NO: 94014 - protein, 162 aa, Arabidopsis thaliana; identical to SEQ ID NO: 90258
  peptide (1)..(162): Ceres Seq. ID no. 12723285
  misc_feature (6)..(160): Pfam Name: AhpC/TSA family Pfam Description: AhpC/TSA family
  misc_feature (1)..(162): Homolog of NCBI NO: 18406870 NR Description: peroxiredoxin, putative; protein id: At1g60740.1,
  misc_feature (1)..(162): Homolog of NCBI NO: 15218876 NR Description: type 2 peroxiredoxin, putative; protein id: supported by cDNA: 10862., supported by cDNA: gi_12083333, by cDNA: gi_4704731 [Arabidopsis thaliana]
  misc_feature (1)..(162): Homolog of NCBI NO: 21553913 NR Description: peroxiredoxin, putative [Arabidopsis thaliana]
  misc_feature (1)..(162): Homolog of NCBI NO: 4704732 NR Description: peroxiredoxin TPx2 [Arabidopsis thaliana]
  misc_feature (1)..(162): Homolog of NCBI NO: 15218877 NR Description: type 2 peroxiredoxin, putative; protein id: supported by cDNA: 5476., supported by cDNA: gi_12083335,
  misc_feature (1)..(162): Homolog of NCBI NO: 4928472 NR Description: type 2 peroxiredoxin [Brassica rapa subsp.
  misc_feature (1)..(162): Homolog of NCBI NO: 21593881 NR Description: type 2 peroxiredoxin, putative [Arabidopsis
  misc_feature (1)..(162): Homolog of NCBI NO: 3913633 NR Description: Hypothetical protein At1g60740
  misc_feature (1)..(162): Homolog of NCBI NO: 30841938 NR Description: thioredoxin peroxidase 1 [Lycopersicon esculentum]
  misc_feature (1)..(162): Homolog of NCBI NO: 18654477 NR Description: thioredoxin peroxidase [Capsicum annuum]

SEQ ID NO: 94015 - protein, 110 aa, Arabidopsis thaliana; identical to SEQ ID NO: 90259
  peptide (1)..(110): Ceres Seq. ID no. 12723286
  misc_feature (1)..(108): Pfam Name: AhpC/TSA family Pfam Description: AhpC/TSA family
  misc_feature (1)..(110): Homolog of NCBI NO: 18406870 NR Description: peroxiredoxin, putative; protein id: At1g60740.1,
  misc_feature (1)..(110): Homolog of NCBI NO: 15218876 NR Description: type 2 peroxiredoxin, putative; protein id: supported by cDNA: 10862., supported by cDNA: gi_12083333, by cDNA: gi_4704731 [Arabidopsis thaliana]
  misc_feature (1)..(110): Homolog of NCBI NO: 21553913 NR Description: peroxiredoxin, putative [Arabidopsis thaliana]
  misc_feature (1)..(110): Homolog of NCBI NO: 4704732 NR Description: peroxiredoxin TPx2 [Arabidopsis thaliana]
  misc_feature (1)..(110): Homolog of NCBI NO: 15218877 NR Description: type 2 peroxiredoxin, putative; protein id: supported by cDNA: 5476., supported by cDNA: gi_12083335,
  misc_feature (1)..(110): Homolog of NCBI NO: 4928472 NR Description: type 2 peroxiredoxin [Brassica rapa subsp.
  misc_feature (1)..(110): Homolog of NCBI NO: 21593881 NR Description: type 2 peroxiredoxin, putative [Arabidopsis
  misc_feature (1)..(110): Homolog of NCBI NO: 3913633 NR Description: Hypothetical protein At1g60740
  misc_feature (1)..(110): Homolog of NCBI NO: 30841938 NR Description: thioredoxin peroxidase 1 [Lycopersicon esculentum]
  misc_feature (1)..(110): Homolog of NCBI NO: 18654477 NR Description: thioredoxin peroxidase [Capsicum annuum]

SEQ ID NO: 94016 - DNA, 993 bp, Arabidopsis thaliana; identical to SEQ ID NO: 90260
  misc_feature (1)..(993): Ceres Seq. ID no. 12723287
  misc_feature: MA Experiment ID: 20000182 Result: Up-regulated in Transcription
  misc_feature: MA Experiment 20000182 PARAMETER Experiment Name: At_2mM_SA_P Parameter: Age (day) Value: 14
  misc_feature: MA Experiment 20000182 PARAMETER Experiment Name: At_2mM_SA_P Parameter: Organism Value: A. thaliana
  misc_feature: MA Experiment 20000182 PARAMETER Experiment Name: At_2mM_SA_P Parameter: Plant Line Value: WS
  misc_feature: MA Experiment 20000182 PARAMETER Experiment Name: At_2mM_SA_P Parameter: Timepoint (hr) Value: 6
  misc_feature: MA Experiment 20000182 PARAMETER Experiment Name: At_2mM_SA_P Parameter: Tissue Value: Aerial
  misc_feature: MA Experiment 20000182 PARAMETER Experiment Name: At_2mM_SA_P Parameter: Treatment Value: 2mM SA vs. No Treatment
  misc_feature: MA Experiment ID: 20000185 Result: Up-regulated in Transcription
  misc_feature: MA Experiment 20000185 PARAMETER Experiment Name: At_Roots__P Parameter: Age (day) Value: 7 vs. 21
  misc_feature: MA Experiment 20000185 PARAMETER Experiment Name: At_Roots__P Parameter: Organism Value: A. thaliana
  misc_feature: MA Experiment 20000185 PARAMETER Experiment Name: At_Roots__P Parameter: Tissue Value: Roots vs. Whole Plant
  misc_feature: MA Experiment ID: 20000451 Result: Down-regulated in Transcription
  misc_feature: MA Experiment 20000451 PARAMETER Experiment Name: At_CS6879_Shoots-Roots_P Parameter: Age (day) Value: 14
  misc_feature: MA Experiment 20000451 PARAMETER Experiment Name: At_CS6879_Shoots-Roots_P Parameter: Organism Value: A. thaliana
  misc_feature: MA Experiment 20000451 PARAMETER Experiment Name: At_CS6879_Shoots-Roots_P Parameter: Plant Line Value: CS6879 vs. WS
  misc_feature: MA Experiment 20000451 PARAMETER Experiment Name: At_CS6879_Shoots-Roots_P Parameter: Tissue Value: Roots
  misc_feature: MA Experiment ID: 20000460 Result: Down-regulated in Transcription
  misc_feature: MA Experiment 20000460 PARAMETER Experiment Name: At_10percent_PEG_P Parameter: Age (day) Value: 12
  misc_feature: MA Experiment 20000460 PARAMETER Experiment Name: At_10percent_PEG_P Parameter: Organism Value: A. thaliana
  misc_feature: MA Experiment 20000460 PARAMETER Experiment Name: At_10percent_PEG_P Parameter: Plant Line Value: WS
  misc_feature: MA Experiment 20000460 PARAMETER Experiment Name: At_10percent_PEG_P Parameter: Timepoint (day) Value: 12
  misc_feature: MA Experiment 20000460 PARAMETER Experiment Name: At_10percent_PEG_P Parameter: Tissue Value: Whole Plant
  misc_feature: MA Experiment 20000460 PARAMETER Experiment Name: At_10percent_PEG_P Parameter: Treatment Value: 10percent PEG vs. No Treatment
  misc_feature: MA Experiment ID: 20000709 Result: Up-regulated in Transcription
  misc_feature: MA Experiment 20000709 PARAMETER Experiment Name: At_15mM_NH4NO3_L-to-H_P Parameter: Age (hr) Value: 14
  misc_feature: MA Experiment 20000709 PARAMETER Experiment Name: At_15mM_NH4NO3_L-to-H_P Parameter: Organism Value: A. thaliana
  misc_feature: MA Experiment 20000709 PARAMETER Experiment Name: At_15mM_NH4NO3_L-to-H_P Parameter: Plant Line Value: WS
  misc_feature: MA Experiment 20000709 PARAMETER Experiment Name: At_15mM_NH4NO3_L-to-H_P Parameter: Timepoint (hr) Value: 4
  misc_feature: MA Experiment 20000709 PARAMETER Experiment Name: At_15mM_NH4NO3_L-to-H_P Parameter: Tissue Value: Aerial
  misc_feature: MA Experiment 20000709 PARAMETER Experiment Name: At_15mM_NH4NO3_L-to-H_P Parameter: Treatment Value: 15mM NH4NO3 vs. 30mM Mannitol

SEQ ID NO: 94017 - protein, 330 aa, Arabidopsis thaliana; identical to SEQ ID NO: 90261
  peptide (1)..(330): Ceres Seq. ID no. 12723288
  misc_feature (1)..(330): Homolog of NCBI NO: 15219805 NR Description: auxin-induced protein, putative; protein id:
  misc_feature (1)..(201): Homolog of NCBI NO: 25316211 NR Description: hypothetical protein F8A5.26 [imported] -
  misc_feature (219)..(330): Homolog of NCBI NO: 25316211 NR Description: hypothetical protein F8A5.26 [imported] -
  misc_feature (4)..(233): Homolog of NCBI NO: 30696459 NR Description: aldo/keto reductase family [Arabidopsis thaliana] At1g60730/F8A5_24 [Arabidopsis thaliana]
  misc_feature (220)..(329): Homolog of NCBI NO: 30696459 NR Description: aldo/keto reductase family [Arabidopsis thaliana] At1g60730/F8A5_24 [Arabidopsis thaliana]
  misc_feature (4)..(231): Homolog of NCBI NO: 18406861 NR Description: auxin-induced protein, putative; protein id: supported by cDNA: gi_15912324, supported by cDNA: gi_20466377, by cDNA: gi_6562979 [Arabidopsis thaliana]
  misc_feature (220)..(329): Homolog of NCBI NO: 18406861 NR Description: auxin-induced protein, putative; protein id: supported by cDNA: gi_15912324, supported by cDNA: gi_20466377, by cDNA: gi_6562979 [Arabidopsis thaliana]
  misc_feature (4)..(231): Homolog of NCBI NO: 6562980 NR Description: auxin-induced atb2 [Arabidopsis thaliana]
  misc_feature (220)..(329): Homolog of NCBI NO: 6562980 NR Description: auxin-induced atb2 [Arabidopsis thaliana]
  misc_feature (4)..(329): Homolog of NCBI NO: 25316216 NR Description: hypothetical protein F8A5.24 [imported] -

SEQ ID NO: 94018 - protein, 320 aa, Arabidopsis thaliana; identical to SEQ ID NO: 90262
  peptide (1)..(320): Ceres Seq. ID no. 12723289
  misc_feature (1)..(320): Homolog of NCBI NO: 15219805 NR Description: auxin-induced protein, putative; protein id:
  misc_feature (1)..(191): Homolog of NCBI NO: 25316211 NR Description: hypothetical protein F8A5.26 [imported] -
  misc_feature (209)..(320): Homolog of NCBI NO: 25316211 NR Description: hypothetical protein F8A5.26 [imported] -
  misc_feature (1)..(223): Homolog of NCBI NO: 30696459 NR Description: aldo/keto reductase family [Arabidopsis thaliana] At1g60730/F8A5_24 [Arabidopsis thaliana]
  misc_feature (210)..(319): Homolog of NCBI NO: 30696459 NR Description: aldo/keto reductase family [Arabidopsis thaliana] At1g60730/F8A5_24 [Arabidopsis thaliana]
  misc_feature (1)..(221): Homolog of NCBI NO: 18406861 NR Description: auxin-induced protein, putative; protein id: supported by cDNA: gi_15912324, supported by cDNA: gi_20466377, by cDNA: gi_6562979 [Arabidopsis thaliana]
  misc_feature (210)..(319): Homolog of NCBI NO: 18406861 NR Description: auxin-induced protein, putative; protein id: supported by cDNA: gi_15912324, supported by cDNA: gi_20466377, by cDNA: gi_6562979 [Arabidopsis thaliana]
  misc_feature (1)..(221): Homolog of NCBI NO: 6562980 NR Description: auxin-induced atb2 [Arabidopsis thaliana]
  misc_feature (210)..(319): Homolog of NCBI NO: 6562980 NR Description: auxin-induced atb2 [Arabidopsis thaliana]
  misc_feature (1)..(319): Homolog of NCBI NO: 25316216 NR Description: hypothetical protein F8A5.24 [imported] -

SEQ ID NO: 94019 - protein, 303 aa, Arabidopsis thaliana; identical to SEQ ID NO: 90263
  peptide (1)..(303): Ceres Seq. ID no. 12723290
  misc_feature (1)..(303): Homolog of NCBI NO: 15219805 NR Description: auxin-induced protein, putative; protein id:
  misc_feature (1)..(174): Homolog of NCBI NO: 25316211 NR Description: hypothetical protein F8A5.26 [imported] -
  misc_feature (192)..(303): Homolog of NCBI NO: 25316211 NR Description: hypothetical protein F8A5.26 [imported] -
  misc_feature (1)..(206): Homolog of NCBI NO: 30696459 NR Description: aldo/keto reductase family [Arabidopsis thaliana] At1g60730/F8A5_24 [Arabidopsis thaliana]
  misc_feature (193)..(302): Homolog of NCBI NO: 30696459 NR Description: aldo/keto reductase family [Arabidopsis thaliana] At1g60730/F8A5_24 [Arabidopsis thaliana]
  misc_feature (1)..(204): Homolog of NCBI NO: 18406861 NR Description: auxin-induced protein, putative; protein id: supported by cDNA: gi_15912324, supported by cDNA: gi_20466377, by cDNA: gi_6562979 [Arabidopsis thaliana]
  misc_feature (193)..(302): Homolog of NCBI NO: 18406861 NR Description: auxin-induced protein, putative; protein id: supported by cDNA: gi_15912324, supported by cDNA: gi_20466377, by cDNA: gi_6562979 [Arabidopsis thaliana]
  misc_feature (1)..(204): Homolog of NCBI NO: 6562980 NR Description: auxin-induced atb2 [Arabidopsis thaliana]
  misc_feature (193)..(302): Homolog of NCBI NO: 6562980 NR Description: auxin-induced atb2 [Arabidopsis thaliana]
  misc_feature (1)..(302): Homolog of NCBI NO: 25316216 NR Description: hypothetical protein F8A5.24 [imported] -

SEQ ID NO: 94020 - DNA, 1689 bp, Arabidopsis thaliana; identical to SEQ ID NO: 90264
  misc_feature (1)..(1689): Ceres Seq. ID no. 12723294
  misc_feature: MA Experiment ID: 20000306 Result: Up-regulated in Transcription
  misc_feature: MA Experiment 20000306 PARAMETER Experiment Name: At_Germinating_Seeds_Sub_P Parameter: Age (hr) Value: 6 vs. 0
  misc_feature: MA Experiment 20000306 PARAMETER Experiment Name: At_Germinating_Seeds_Sub_P Parameter: Organism Value: A. thaliana
  misc_feature: MA Experiment 20000306 PARAMETER Experiment Name: At_Germinating_Seeds_Sub_P Parameter: Plant Line Value: WS
  misc_feature: MA Experiment 20000306 PARAMETER Experiment Name: At_Germinating_Seeds_Sub_P Parameter: Tissue Value: Germinating Seeds
  misc_feature: MA Experiment ID: 20000315 Result: Down-regulated in Transcription
  misc_feature: MA Experiment 20000315 PARAMETER Experiment Name: At_14day_Shoots-Roots_Sub_P Parameter: Age (day) Value: 14
  misc_feature: MA Experiment 20000315 PARAMETER Experiment Name: At_14day_Shoots-Roots_Sub_P Parameter: Organism Value: A. thaliana
  misc_feature: MA Experiment 20000315 PARAMETER Experiment Name: At_14day_Shoots-Roots_Sub_P Parameter: Plant Line Value: WS
  misc_feature: MA Experiment 20000315 PARAMETER Experiment Name: At_14day_Shoots-Roots_Sub_P Parameter: Tissue Value: Shoots vs. Whole Plant
  misc_feature: MA Experiment ID: 20000328 Result: Down-regulated in Transcription
  misc_feature: MA Experiment 20000328 PARAMETER Experiment Name: At_42deg_Heat_Sub_P Parameter: Age (day) Value: 14
  misc_feature: MA Experiment 20000328 PARAMETER Experiment Name: At_42deg_Heat_Sub_P Parameter: Organism Value: A. thaliana
  misc_feature: MA Experiment 20000328 PARAMETER Experiment Name: At_42deg_Heat_Sub_P Parameter: Plant Line Value: WS
  misc_feature: MA Experiment 20000328 PARAMETER Experiment Name: At_42deg_Heat_Sub_P Parameter: Temperature (deg C) Value: 42 vs. 22
  misc_feature: MA Experiment 20000328 PARAMETER Experiment Name: At_42deg_Heat_Sub_P Parameter: Timepoint (hr) Value: 6
  misc_feature: MA Experiment 20000328 PARAMETER Experiment Name: At_42deg_Heat_Sub_P Parameter: Tissue Value: Aerial

SEQ ID NO: 94021 - protein, 428 aa, Arabidopsis thaliana; identical to SEQ ID NO: 90265
  peptide (1)..(428): Ceres Seq. ID no. 12723295
  misc_feature (8)..(427): Pfam Name: Adaptor complexes medium subunit family Pfam Description: Adaptor complexes medium subunit family
  misc_feature (1)..(428): Homolog of NCBI NO: 15219810 NR Description: clathrin adaptor medium chain protein MU1B, protein id: At1g60780.1, supported by cDNA: gi_20466371 thaliana] >gi|25320049|pir||C96633 probable Serine/Threonine
  misc_feature (1)..(428): Homolog of NCBI NO: 15220202 NR Description: putative clathrin-coat assembly protein; protein At1g10730.1 [Arabidopsis thaliana] >gi|25320047|pir||G86240
  misc_feature (1)..(428): Homolog of NCBI NO: 34910334 NR Description: putative clathrin-associated protein [Oryza
  misc_feature (111)..(428): Homolog of NCBI NO: 6573741 NR Description: F20B24.16 [Arabidopsis thaliana]
  misc_feature (1)..(92): Homolog of NCBI NO: 6573741 NR Description: F20B24.16 [Arabidopsis thaliana]
  misc_feature (5)..(427): Homolog of NCBI NO: 28949965 NR Description: probable clathrin assembly protein AP47
  misc_feature (4)..(426): Homolog of NCBI NO: 14210504 NR Description: adaptor-related protein complex 1, mu 1 subunit; assembly protein complex 1, medium chain; clathrin coat assembly
  misc_feature (4)..(427): Homolog of NCBI NO: 17508211 NR Description: UNCoordinated locomotion UNC-101,
  misc_feature (4)..(426): Homolog of NCBI NO: 6671557 NR Description: adaptor-related protein complex AP-1, mu subunit
  misc_feature (4)..(427): Homolog of NCBI NO: 1078840 NR Description: clathrin-associated protein unc-101 -

SEQ ID NO: 94022 - protein, 368 aa, Arabidopsis thaliana; identical to SEQ ID NO: 90266
  peptide (1)..(368): Ceres Seq. ID no. 12723296
  misc_feature (1)..(367): Pfam Name: Adaptor complexes medium subunit family Pfam Description: Adaptor complexes medium subunit family
  misc_feature (1)..(368): Homolog of NCBI NO: 15219810 NR Description: clathrin adaptor medium chain protein MU1B, protein id: At1g60780.1, supported by cDNA: gi_20466371 thaliana] >gi|25320049|pir||C96633 probable Serine/Threonine
  misc_feature (1)..(368): Homolog of NCBI NO: 15220202 NR Description: putative clathrin-coat assembly protein; protein At1g10730.1 [Arabidopsis thaliana] >gi|25320047|pir||G86240
  misc_feature (1)..(368): Homolog of NCBI NO: 34910334 NR Description: putative clathrin-associated protein [Oryza
  misc_feature (51)..(368): Homolog of NCBI NO: 6573741 NR Description: F20B24.16 [Arabidopsis thaliana]
  misc_feature (1)..(32): Homolog of NCBI NO: 6573741 NR Description: F20B24.16 [Arabidopsis thaliana]
  misc_feature (1)..(367): Homolog of NCBI NO: 28949965 NR Description: probable clathrin assembly protein AP47
  misc_feature (1)..(366): Homolog of NCBI NO: 14210504 NR Description: adaptor-related protein complex 1, mu 1 subunit; assembly protein complex 1, medium chain; clathrin coat assembly
  misc_feature (1)..(367): Homolog of NCBI NO: 17508211 NR Description: UNCoordinated locomotion UNC-101,
  misc_feature (1)..(366): Homolog of NCBI NO: 6671557 NR Description: adaptor-related protein complex AP-1, mu subunit
  misc_feature (1)..(367): Homolog of NCBI NO: 1078840 NR Description: clathrin-associated protein unc-101 -

SEQ ID NO: 94023 - protein, 358 aa, Arabidopsis thaliana; identical to SEQ ID NO: 90267
  peptide (1)..(358): Ceres Seq. ID no. 12723297
  misc_feature (1)..(357): Pfam Name: Adaptor complexes medium subunit family Pfam Description: Adaptor complexes medium subunit family
  misc_feature (1)..(358): Homolog of NCBI NO: 15219810 NR Description: clathrin adaptor medium chain protein MU1B, protein id: At1g60780.1, supported by cDNA: gi_20466371 thaliana] >gi|25320049|pir||C96633 probable Serine/Threonine
  misc_feature (1)..(358): Homolog of NCBI NO: 15220202 NR Description: putative clathrin-coat assembly protein; protein At1g10730.1 [Arabidopsis thaliana] >gi|25320047|pir||G86240
  misc_feature (1)..(358): Homolog of NCBI NO: 34910334 NR Description: putative clathrin-associated protein [Oryza
  misc_feature (41)..(358): Homolog of NCBI NO: 6573741 NR Description: F20B24.16 [Arabidopsis thaliana]
  misc_feature (1)..(22): Homolog of NCBI NO: 6573741 NR Description: F20B24.16 [Arabidopsis thaliana]
  misc_feature (1)..(357): Homolog of NCBI NO: 28949965 NR Description: probable clathrin assembly protein AP47
  misc_feature (1)..(356): Homolog of NCBI NO: 14210504 NR Description: adaptor-related protein complex 1, mu 1 subunit; assembly protein complex 1, medium chain; clathrin coat assembly
  misc_feature (1)..(357): Homolog of NCBI NO: 17508211 NR Description: UNCoordinated locomotion UNC-101,
  misc_feature (1)..(356): Homolog of NCBI NO: 6671557 NR Description: adaptor-related protein complex AP-1, mu subunit
  misc_feature (1)..(357): Homolog of NCBI NO: 1078840 NR Description: clathrin-associated protein unc-101 -

SEQ ID NO: 94024 - DNA, 2566 bp, Arabidopsis thaliana; identical to SEQ ID NO: 90268
  misc_feature (1)..(2566): Ceres Seq. ID no. 12723302
  misc_feature: MA Experiment ID: 20000180 Result: Up-regulated in Transcription
  misc_feature: MA Experiment 20000180 PARAMETER Experiment Name: At_Germinating_Seeds_P Parameter: Age (hr) Value: 24 vs. 0
  misc_feature: MA Experiment 20000180 PARAMETER Experiment Name: At_Germinating_Seeds_P Parameter: Tissue Value: Germinating Seeds
  misc_feature: MA Experiment ID: 20000437 Result: Down-regulated in Transcription
  misc_feature: MA Experiment 20000437 PARAMETER Experiment Name: At_Drought_P Parameter: Age (day) Value: 8
  misc_feature: MA Experiment 20000437 PARAMETER Experiment Name: At_Drought_P Parameter: Organism Value: A. thaliana
  misc_feature: MA Experiment 20000437 PARAMETER Experiment Name: At_Drought_P Parameter: Plant Line Value: WS
  misc_feature: MA Experiment 20000437 PARAMETER Experiment Name: At_Drought_P Parameter: Timepoint (hr) Value: 24
  misc_feature: MA Experiment 20000437 PARAMETER Experiment Name: At_Drought_P Parameter: Tissue Value: Whole Plant
  misc_feature: MA Experiment 20000437 PARAMETER Experiment Name: At_Drought_P Parameter: Treatment Value: Drought vs. No Drought
  misc_feature: MA Experiment ID: 20000438 Result: Up-regulated in Transcription
  misc_feature: MA Experiment 20000438 PARAMETER Experiment Name: At_Shoots__P Parameter: Age (day) Value: 14
  misc_feature: MA Experiment 20000438 PARAMETER Experiment Name: At_Shoots__P Parameter: Tissue Value: Shoots vs. Whole Plant
  misc_feature: MA Experiment ID: 20001248 Result: Down-regulated in Transcription
  misc_feature: MA Experiment 20001248 PARAMETER Experiment Name: At_Far-red-induction_P Parameter: Age (day) Value: 7
  misc_feature: MA Experiment 20001248 PARAMETER Experiment Name: At_Far-red-induction_P Parameter: Light Value: Far-red vs. White
  misc_feature: MA Experiment 20001248 PARAMETER Experiment Name: At_Far-red-induction_P Parameter: Organism Value: A. thaliana
  misc_feature: MA Experiment 20001248 PARAMETER Experiment Name: At_Far-red-induction_P Parameter: Plant Line Value: Columbia
  misc_feature: MA Experiment 20001248 PARAMETER Experiment Name: At_Far-red-induction_P Parameter: Timepoint (hr) Value: 4
  misc_feature: MA Experiment 20001248 PARAMETER Experiment Name: At_Far-red-induction_P Parameter: Tissue Value: Whole Plant
  misc_feature: MA Experiment ID: 20001757 Result: Up-regulated in Transcription
  misc_feature: MA Experiment 20001757 PARAMETER Experiment Name: At_50mM_NH4NO3_L-to-H_P Parameter: Timepoint (hr) Value: 6
  misc_feature: MA Experiment 20001757 PARAMETER Experiment Name: At_50mM_NH4NO3_L-to-H_P Parameter: Tissue Value: Leaf
  misc_feature: MA Experiment 20001757 PARAMETER Experiment Name: At_50mM_NH4NO3_L-to-H_P Parameter: Treatment Value: 50mM NH4NO3 vs 100mM Mannitol
  misc_feature: MA Experiment ID: 20001904 Result: Down-regulated in Transcription
  misc_feature: MA Experiment 20001904 PARAMETER Experiment Name: At_Drought_Reproduction_P Parameter: Age (day) Value: 37
  misc_feature: MA Experiment 20001904 PARAMETER Experiment Name: At_Drought_Reproduction_P Parameter: Organism Value: A. thaliana
  misc_feature: MA Experiment 20001904 PARAMETER Experiment Name: At_Drought_Reproduction_P Parameter: Plant Line Value: WS
  misc_feature: MA Experiment 20001904 PARAMETER Experiment Name: At_Drought_Reproduction_P Parameter: Timepoint (day) Value: 7
  misc_feature: MA Experiment 20001904 PARAMETER Experiment Name: At_Drought_Reproduction_P Parameter: Tissue Value: Rosettes
  misc_feature: MA Experiment 20001904 PARAMETER Experiment Name: At_Drought_Reproduction_P Parameter: Treatment Value: Drought vs. No Drought
  misc_feature: MA Experiment ID: 20001905 Result: Down-regulated in Transcription
  misc_feature: MA Experiment 20001905 PARAMETER Experiment Name: At_Drought_Reproduction_P Parameter: Age (day) Value: 40
  misc_feature: MA Experiment 20001905 PARAMETER Experiment Name: At_Drought_Reproduction_P Parameter: Organism Value: A. thaliana
  misc_feature: MA Experiment 20001905 PARAMETER Experiment Name: At_Drought_Reproduction_P Parameter: Plant Line Value: WS
  misc_feature: MA Experiment 20001905 PARAMETER Experiment Name: At_Drought_Reproduction_P Parameter: Timepoint (day) Value: 10
  misc_feature: MA Experiment 20001905 PARAMETER Experiment Name: At_Drought_Reproduction_P Parameter: Tissue Value: Rosettes
  misc_feature: MA Experiment 20001905 PARAMETER Experiment Name: At_Drought_Reproduction_P Parameter: Treatment Value: Drought vs. No Drought
  misc_feature: MA Experiment ID: 20001906 Result: Down-regulated in Transcription
  misc_feature: MA Experiment 20001906 PARAMETER Experiment Name: At_Drought_Reproduction_P Parameter: Age (day) Value: 35
  misc_feature: MA Experiment 20001906 PARAMETER Experiment Name: At_Drought_Reproduction_P Parameter: Organism Value: A. thaliana
  misc_feature: MA Experiment 20001906 PARAMETER Experiment Name: At_Drought_Reproduction_P Parameter: Plant Line Value: WS
  misc_feature: MA Experiment 20001906 PARAMETER Experiment Name: At_Drought_Reproduction_P Parameter: Timepoint (day) Value: 5
  misc_feature: MA Experiment 20001906 PARAMETER Experiment Name: At_Drought_Reproduction_P Parameter: Tissue Value: Siliques
  misc_feature: MA Experiment 20001906 PARAMETER Experiment Name: At_Drought_Reproduction_P Parameter: Treatment Value: Drought vs. No Drought
  misc_feature: MA Experiment ID: 20001908 Result: Down-regulated in Transcription
  misc_feature: MA Experiment 20001908 PARAMETER Experiment Name: At_Drought_Reproduction_P Parameter: Age (day) Value: 40
  misc_feature: MA Experiment 20001908 PARAMETER Experiment Name: At_Drought_Reproduction_P Parameter: Organism Value: A. thaliana
  misc_feature: MA Experiment 20001908 PARAMETER Experiment Name: At_Drought_Reproduction_P Parameter: Plant Line Value: WS
  misc_feature: MA Experiment 20001908 PARAMETER Experiment Name: At_Drought_Reproduction_P Parameter: Timepoint (day) Value: 10
  misc_feature: MA Experiment 20001908 PARAMETER Experiment Name: At_Drought_Reproduction_P Parameter: Tissue Value: Siliques
  misc_feature: MA Experiment 20001908 PARAMETER Experiment Name: At_Drought_Reproduction_P Parameter: Treatment Value: Drought vs. No Drought

SEQ ID NO: 94025 - protein, 632 aa, Arabidopsis thaliana; identical to SEQ ID NO: 90269
  peptide (1)..(632): Ceres Seq. ID no. 12723303
  misc_feature (124)..(632): Homolog of NCBI NO: 25404291 NR Description: probable Serine/Threonine protein kinase F8A5.31
  misc_feature (13)..(632): Homolog of NCBI NO: 22331326 NR Description: somatic embryogenesis receptor-like kinase, protein id: At3g25560.1, supported by cDNA: gi_19715614 thaliana] >gi|19715615|gb|AAL91629.1| AT3g25560/MWL2_18
  misc_feature (13)..(632): Homolog of NCBI NO: 9279736 NR Description: receptor-like kinase [Arabidopsis thaliana]
  misc_feature (11)..(632): Homolog of NCBI NO: 21593619 NR Description: receptor protein kinase-like protein [Arabidopsis
  misc_feature (11)..(632): Homolog of NCBI NO: 15237242 NR Description: receptor protein kinase-like protein; protein id:
  misc_feature (23)..(632): Homolog of NCBI NO: 11862956 NR Description: putative protein kinase [Oryza sativa (japonica
  misc_feature (19)..(588): Homolog of NCBI NO: 22329033 NR Description: receptor-like kinase homolog; protein id: supported by cDNA: gi_17979064, supported by cDNA: gi_20465456 thaliana] >gi|17979065|gb|AAL49800.1| putative receptor kinase
  misc_feature (200)..(569): Homolog of NCBI NO: 15528710 NR Description: putative receptor-like kinase [Oryza sativa
  misc_feature (23)..(81): Homolog of NCBI NO: 15528710 NR Description: putative receptor-like kinase [Oryza sativa
  misc_feature (75)..(588): Homolog of NCBI NO: 15224077 NR Description: putative LRR receptor protein kinase; protein id:

SEQ ID NO: 94026 - protein, 565 aa, Arabidopsis thaliana; identical to SEQ ID NO: 90270
  peptide (1)..(565): Ceres Seq. ID no. 12723304
  misc_feature (57)..(565): Homolog of NCBI NO: 25404291 NR Description: probable Serine/Threonine protein kinase F8A5.31
  misc_feature (1)..(565): Homolog of NCBI NO: 22331326 NR Description: somatic embryogenesis receptor-like kinase, protein id: At3g25560.1, supported by cDNA: gi_19715614 thaliana] >gi|19715615|gb|AAL91629.1| AT3g25560/MWL2_18
  misc_feature (1)..(565): Homolog of NCBI NO: 9279736 NR Description: receptor-like kinase [Arabidopsis thaliana]
  misc_feature (1)..(565): Homolog of NCBI NO: 21593619 NR Description: receptor protein kinase-like protein [Arabidopsis
  misc_feature (1)..(565): Homolog of NCBI NO: 15237242 NR Description: receptor protein kinase-like protein; protein id:
  misc_feature (1)..(565): Homolog of NCBI NO: 11862956 NR Description: putative protein kinase [Oryza sativa (japonica
  misc_feature (1)..(521): Homolog of NCBI NO: 22329033 NR Description: receptor-like kinase homolog; protein id: supported by cDNA: gi_17979064, supported by cDNA: gi_20465456 thaliana] >gi|17979065|gb|AAL49800.1| putative receptor kinase
  misc_feature (133)..(502): Homolog of NCBI NO: 15528710 NR Description: putative receptor-like kinase [Oryza sativa
  misc_feature (1)..(14): Homolog of NCBI NO: 15528710 NR Description: putative receptor-like kinase [Oryza sativa
  misc_feature (8)..(521): Homolog of NCBI NO: 15224077 NR Description: putative LRR receptor protein kinase; protein id:

SEQ ID NO: 94027 - protein, 376 aa, Arabidopsis thaliana; identical to SEQ ID NO: 90271
  peptide (1)..(376): Ceres Seq. ID no. 12723305
  misc_feature (1)..(376): Homolog of NCBI NO: 25404291 NR Description: probable Serine/Threonine protein kinase F8A5.31
  misc_feature (1)..(376): Homolog of NCBI NO: 22331326 NR Description: somatic embryogenesis receptor-like kinase, protein id: At3g25560.1, supported by cDNA: gi_19715614 thaliana] >gi|19715615|gb|AAL91629.1| AT3g25560/MWL2_18
  misc_feature (1)..(376): Homolog of NCBI NO: 9279736 NR Description: receptor-like kinase [Arabidopsis thaliana]
  misc_feature (1)..(376): Homolog of NCBI NO: 21593619 NR Description: receptor protein kinase-like protein [Arabidopsis
  misc_feature (1)..(376): Homolog of NCBI NO: 15237242 NR Description: receptor protein kinase-like protein; protein id:
  misc_feature (1)..(376): Homolog of NCBI NO: 11862956 NR Description: putative protein kinase [Oryza sativa (japonica
  misc_feature (1)..(332): Homolog of NCBI NO: 22329033 NR Description: receptor-like kinase homolog; protein id: supported by cDNA: gi_17979064, supported by cDNA: gi_20465456 thaliana] >gi|17979065|gb|AAL49800.1| putative receptor kinase
  misc_feature (1)..(313): Homolog of NCBI NO: 15528710 NR Description: putative receptor-like kinase [Oryza sativa
  misc_feature (1)..(332): Homolog of NCBI NO: 15224077 NR Description: putative LRR receptor protein kinase; protein id:
  misc_feature (27)..(332): Homolog of NCBI NO: 25407653 NR Description: receptor-like kinase homolog [imported] -

SEQ ID NO: 94028 - DNA, 1457 bp, Arabidopsis thaliana; identical to SEQ ID NO: 90272
  misc_feature (1)..(1457): Ceres Seq. ID no. 12723306
  misc_feature: MA Experiment ID: 108461 Result: Up-regulated in Transcription
  misc_feature: MA Experiment 108461 PARAMETER Experiment Name: At_Germinating_Seeds_cDNA_P Parameter: Age (day) Value: 1 vs. 0
  misc_feature: MA Experiment 108461 PARAMETER Experiment Name: At_Germinating_Seeds_cDNA_P Parameter: Tissue Value: Germinating Seeds
  misc_feature: MA Experiment ID: 108462 Result: Up-regulated in Transcription
  misc_feature: MA Experiment 108462 PARAMETER Experiment Name: At_Germinating_Seeds_cDNA_P Parameter: Age (day) Value: 2 vs. 0
  misc_feature: MA Experiment 108462 PARAMETER Experiment Name: At_Germinating_Seeds_cDNA_P Parameter: Tissue Value: Germinating Seeds
  misc_feature: MA Experiment ID: 108463 Result: Up-regulated in Transcription
  misc_feature: MA Experiment 108463 PARAMETER Experiment Name: At_Germinating_Seeds_cDNA_P Parameter: Age (day) Value: 3 vs. 0
  misc_feature: MA Experiment 108463 PARAMETER Experiment Name: At_Germinating_Seeds_cDNA_P Parameter: Tissue Value: Germinating Seeds
  misc_feature: MA Experiment ID: 108464 Result: Up-regulated in Transcription
  misc_feature: MA Experiment 108464 PARAMETER Experiment Name: At_Germinating_Seeds_cDNA_P Parameter: Age (day) Value: 4 vs. 0
  misc_feature: MA Experiment 108464 PARAMETER Experiment Name: At_Germinating_Seeds_cDNA_P Parameter: Tissue Value: Germinating Seeds
  misc_feature: MA Experiment ID: 108573 Result: Down-regulated in Transcription
  misc_feature: MA Experiment 108573 PARAMETER Experiment Name: At_Drought_cDNA_P Parameter: Timepoint (hr) Value: 6
  misc_feature: MA Experiment 108573 PARAMETER Experiment Name: At_Drought_cDNA_P Parameter: Tissue Value: Aerial
  misc_feature: MA Experiment 108573 PARAMETER Experiment Name: At_Drought_cDNA_P Parameter: Treatment Value: Drought vs. No Drought
  misc_feature: MA Experiment ID: 108595 Result: Down-regulated in Transcription
  misc_feature: MA Experiment 108595 PARAMETER Experiment Name: At_Ler-pi_Ovule_cDNA_P Parameter: Plant Line Value: null
  misc_feature: MA Experiment ID: 20000113 Result: Down-regulated in Transcription
  misc_feature: MA Experiment 20000113 PARAMETER Experiment Name: At_42deg_Heat_cDNA_P Parameter: Temperature (deg C) Value: 42 vs. 22
  misc_feature: MA Experiment 20000113 PARAMETER Experiment Name: At_42deg_Heat_cDNA_P Parameter: Timepoint (hr) Value: 8
  misc_feature: MA Experiment 20000113 PARAMETER Experiment Name: At_42deg_Heat_cDNA_P Parameter: Tissue Value: Aerial
  misc_feature: MA Experiment ID: 20000224 Result: Down-regulated in Transcription
  misc_feature: MA Experiment ID: 20000315 Result: Down-regulated in Transcription
  misc_feature: MA Experiment 20000315 PARAMETER Experiment Name: At_14day_Shoots-Roots_Sub_P Parameter: Age (day) Value: 14
  misc_feature: MA Experiment 20000315 PARAMETER Experiment Name: At_14day_Shoots-Roots_Sub_P Parameter: Organism Value: A. thaliana
  misc_feature: MA Experiment 20000315 PARAMETER Experiment Name: At_14day_Shoots-Roots_Sub_P Parameter: Plant Line Value: WS
  misc_feature: MA Experiment 20000315 PARAMETER Experiment Name: At_14day_Shoots-Roots_Sub_P Parameter: Tissue Value: Shoots vs. Whole Plant

SEQ ID NO: 94029 - protein, 423 aa, Arabidopsis thaliana; identical to SEQ ID NO: 90273
  peptide (1)..(423): Ceres Seq. ID no. 12723307
  misc_feature (1)..(423): Homolog of NCBI NO: 15219818 NR Description: ATP citrate-lyase, putative; protein id: supported by cDNA: gi_19698852 [Arabidopsis thaliana]
  misc_feature (1)..(423): Homolog of NCBI NO: 19698853 NR Description: similar to ATP-citrate-lyase [Arabidopsis
  misc_feature (1)..(423): Homolog of NCBI NO: 15220186 NR Description: ATP citrate-lyase, putative; protein id: supported by cDNA: 36439., supported by cDNA: gi_15810348, by cDNA: gi_16648641, supported by cDNA: gi_20453213, supported
  misc_feature (1)..(423): Homolog of NCBI NO: 21593129 NR Description: ATP citrate-lyase, putative [Arabidopsis thaliana]
  misc_feature (1)..(423): Homolog of NCBI NO: 15919089 NR Description: ATP citrate lyase b-subunit [Lupinus albus]
  misc_feature (1)..(419): Homolog of NCBI NO: 15217510 NR Description: unknown protein; protein id: At1g09430.1
  misc_feature (1)..(416): Homolog of NCBI NO: 9229902 NR Description: ATP citrate-lyase [Ciona intestinalis]
  misc_feature (1)..(411): Homolog of NCBI NO: 8392839 NR Description: ATP citrate lyase [Rattus norvegicus]
  misc_feature (1)..(416): Homolog of NCBI NO: 24653988 NR Description: ATP citrate lyase CG8322-PA
  misc_feature (1)..(416): Homolog of NCBI NO: 28372804 NR Description: LD21334p [Drosophila melanogaster]

SEQ ID NO: 94030 - protein, 363 aa, Arabidopsis thaliana; identical to SEQ ID NO: 90274
  peptide (1)..(363): Ceres Seq. ID no. 12723308
  misc_feature (1)..(363): Homolog of NCBI NO: 15219818 NR Description: ATP citrate-lyase, putative; protein id: supported by cDNA: gi_19698852 [Arabidopsis thaliana]
  misc_feature (1)..(363): Homolog of NCBI NO: 19698853 NR Description: similar to ATP-citrate-lyase [Arabidopsis
  misc_feature (1)..(363): Homolog of NCBI NO: 15220186 NR Description: ATP citrate-lyase, putative; protein id: supported by cDNA: 36439., supported by cDNA: gi_15810348, by cDNA: gi_16648641, supported by cDNA: gi_20453213, supported
  misc_feature (1)..(363): Homolog of NCBI NO: 21593129 NR Description: ATP citrate-lyase, putative [Arabidopsis thaliana]
  misc_feature (1)..(363): Homolog of NCBI NO: 15919089 NR Description: ATP citrate lyase b-subunit [Lupinus albus]
  misc_feature (1)..(359): Homolog of NCBI NO: 15217510 NR Description: unknown protein; protein id: At1g09430.1
  misc_feature (1)..(356): Homolog of NCBI NO: 9229902 NR Description: ATP citrate-lyase [Ciona intestinalis]
  misc_feature (1)..(351): Homolog of NCBI NO: 8392839 NR Description: ATP citrate lyase [Rattus norvegicus]
  misc_feature (1)..(356): Homolog of NCBI NO: 24653988 NR Description: ATP citrate lyase CG8322-PA
  misc_feature (1)..(356): Homolog of NCBI NO: 28372804 NR Description: LD21334p [Drosophila melanogaster]

SEQ ID NO: 94031 - protein, 329 aa, Arabidopsis thaliana; identical to SEQ ID NO: 90275
  peptide (1)..(329): Ceres Seq. ID no. 12723309
  misc_feature (1)..(329): Homolog of NCBI NO: 15219818 NR Description: ATP citrate-lyase, putative; protein id: supported by cDNA: gi_19698852 [Arabidopsis thaliana]
  misc_feature (1)..(329): Homolog of NCBI NO: 19698853 NR Description: similar to ATP-citrate-lyase [Arabidopsis
  misc_feature (1)..(329): Homolog of NCBI NO: 15220186 NR Description: ATP citrate-lyase, putative; protein id: supported by cDNA: 36439., supported by cDNA: gi_15810348, by cDNA: gi_16648641, supported by cDNA: gi_20453213, supported
  misc_feature (1)..(329): Homolog of NCBI NO: 21593129 NR Description: ATP citrate-lyase, putative [Arabidopsis thaliana]
  misc_feature (1)..(329): Homolog of NCBI NO: 15919089 NR Description: ATP citrate lyase b-subunit [Lupinus albus]
  misc_feature (1)..(325): Homolog of NCBI NO: 15217510 NR Description: unknown protein; protein id: At1g09430.1
  misc_feature (1)..(322): Homolog of NCBI NO: 9229902 NR Description: ATP citrate-lyase [Ciona intestinalis]
  misc_feature (1)..(317): Homolog of NCBI NO: 8392839 NR Description: ATP citrate lyase [Rattus norvegicus]
  misc_feature (1)..(322): Homolog of NCBI NO: 24653988 NR Description: ATP citrate lyase CG8322-PA
  misc_feature (1)..(322): Homolog of NCBI NO: 28372804 NR Description: LD21334p [Drosophila melanogaster]

SEQ ID NO: 94032 - DNA, 725 bp, Arabidopsis thaliana; identical to SEQ ID NO: 90276
  misc_feature (1)..(725): Ceres Seq. ID no. 12723324
  misc_feature: MA Experiment ID: 20000437 Result: Up-regulated in Transcription
  misc_feature: MA Experiment 20000437 PARAMETER Experiment Name: At_Drought_P Parameter: Age (day) Value: 8
  misc_feature: MA Experiment 20000437 PARAMETER Experiment Name: At_Drought_P Parameter: Organism Value: A. thaliana
  misc_feature: MA Experiment 20000437 PARAMETER Experiment Name: At_Drought_P Parameter: Plant Line Value: WS
  misc_feature: MA Experiment 20000437 PARAMETER Experiment Name: At_Drought_P Parameter: Timepoint (hr) Value: 24
  misc_feature: MA Experiment 20000437 PARAMETER Experiment Name: At_Drought_P Parameter: Tissue Value: Whole Plant
  misc_feature: MA Experiment 20000437 PARAMETER Experiment Name: At_Drought_P Parameter: Treatment Value: Drought vs. No Drought
  misc_feature: MA Experiment ID: 20001555 Result: Up-regulated in Transcription
  misc_feature: MA Experiment 20001555 PARAMETER Experiment Name: At_Drought_Soil_Dry_P Parameter: Age (day) Value: 24
  misc_feature: MA Experiment 20001555 PARAMETER Experiment Name: At_Drought_Soil_Dry_P Parameter: Organism Value: A. thaliana
  misc_feature: MA Experiment 20001555 PARAMETER Experiment Name: At_Drought_Soil_Dry_P Parameter: Plant Line Value: WS
  misc_feature: MA Experiment 20001555 PARAMETER Experiment Name: At_Drought_Soil_Dry_P Parameter: Post Timepoint (hr) Value: None
  misc_feature: MA Experiment 20001555 PARAMETER Experiment Name: At_Drought_Soil_Dry_P Parameter: Post-Treatment Value: None
  misc_feature: MA Experiment 20001555 PARAMETER Experiment Name: At_Drought_Soil_Dry_P Parameter: Timepoint (day) Value: 10
  misc_feature: MA Experiment 20001555 PARAMETER Experiment Name: At_Drought_Soil_Dry_P Parameter: Treatment Value: Drought vs. No Drought
  misc_feature: MA Experiment ID: 20001556 Result: Up-regulated in Transcription
  misc_feature: MA Experiment 20001556 PARAMETER Experiment Name: At_Drought_Soil_Dry_P Parameter: Age (day) Value: 26
  misc_feature: MA Experiment 20001556 PARAMETER Experiment Name: At_Drought_Soil_Dry_P Parameter: Organism Value: A. thaliana
  misc_feature: MA Experiment 20001556 PARAMETER Experiment Name: At_Drought_Soil_Dry_P Parameter: Plant Line Value: WS
  misc_feature: MA Experiment 20001556 PARAMETER Experiment Name: At_Drought_Soil_Dry_P Parameter: Post Timepoint (hr) Value: None
  misc_feature: MA Experiment 20001556 PARAMETER Experiment Name: At_Drought_Soil_Dry_P Parameter: Post-Treatment Value: None
  misc_feature: MA Experiment 20001556 PARAMETER Experiment Name: At_Drought_Soil_Dry_P Parameter: Timepoint (day) Value: 12
  misc_feature: MA Experiment 20001556 PARAMETER Experiment Name: At_Drought_Soil_Dry_P Parameter: Treatment Value: Drought vs. No Drought
  misc_feature: MA Experiment ID: 20001557 Result: Up-regulated in Transcription
  misc_feature: MA Experiment 20001557 PARAMETER Experiment Name: At_Drought_Soil_Dry_P Parameter: Age (day) Value: 27
  misc_feature: MA Experiment 20001557 PARAMETER Experiment Name: At_Drought_Soil_Dry_P Parameter: Organism Value: A. thaliana
  misc_feature: MA Experiment 20001557 PARAMETER Experiment Name: At_Drought_Soil_Dry_P Parameter: Plant Line Value: WS
  misc_feature: MA Experiment 20001557 PARAMETER Experiment Name: At_Drought_Soil_Dry_P Parameter: Post Timepoint (hr) Value: 3
  misc_feature: MA Experiment 20001557 PARAMETER Experiment Name: At_Drought_Soil_Dry_P Parameter: Post-Treatment Value: Re-Water vs. No Drought
  misc_feature: MA Experiment 20001557 PARAMETER Experiment Name: At_Drought_Soil_Dry_P Parameter: Timepoint (day) Value: 13
  misc_feature: MA Experiment 20001557 PARAMETER Experiment Name: At_Drought_Soil_Dry_P Parameter: Treatment Value: Drought vs. No Drought
  misc_feature: MA Experiment ID: 20001559 Result: Up-regulated in Transcription
  misc_feature: MA Experiment 20001559 PARAMETER Experiment Name: At_Drought_Soil_Dry_P Parameter: Age (day) Value: 28
  misc_feature: MA Experiment 20001559 PARAMETER Experiment Name: At_Drought_Soil_Dry_P Parameter: Organism Value: A. thaliana
  misc_feature: MA Experiment 20001559 PARAMETER Experiment Name: At_Drought_Soil_Dry_P Parameter: Plant Line Value: WS
  misc_feature: MA Experiment 20001559 PARAMETER Experiment Name: At_Drought_Soil_Dry_P Parameter: Post Timepoint (hr) Value: 29
  misc_feature: MA Experiment 20001559 PARAMETER Experiment Name: At_Drought_Soil_Dry_P Parameter: Post-Treatment Value: Re-Water vs. No Drought
  misc_feature: MA Experiment 20001559 PARAMETER Experiment Name: At_Drought_Soil_Dry_P Parameter: Timepoint (day) Value: 14
  misc_feature: MA Experiment 20001559 PARAMETER Experiment Name: At_Drought_Soil_Dry_P Parameter: Treatment Value: Drought vs. No Drought
  misc_feature: MA Experiment ID: 20001904 Result: Up-regulated in Transcription
  misc_feature: MA Experiment 20001904 PARAMETER Experiment Name: At_Drought_Reproduction_P Parameter: Age (day) Value: 37
  misc_feature: MA Experiment 20001904 PARAMETER Experiment Name: At_Drought_Reproduction_P Parameter: Organism Value: A. thaliana
  misc_feature: MA Experiment 20001904 PARAMETER Experiment Name: At_Drought_Reproduction_P Parameter: Plant Line Value: WS
  misc_feature: MA Experiment 20001904 PARAMETER Experiment Name: At_Drought_Reproduction_P Parameter: Timepoint (day) Value: 7
  misc_feature: MA Experiment 20001904 PARAMETER Experiment Name: At_Drought_Reproduction_P Parameter: Tissue Value: Rosettes
  misc_feature: MA Experiment 20001904 PARAMETER Experiment Name: At_Drought_Reproduction_P Parameter: Treatment Value: Drought vs. No Drought
  misc_feature: MA Experiment ID: 20001905 Result: Up-regulated in Transcription
  misc_feature: MA Experiment 20001905 PARAMETER Experiment Name: At_Drought_Reproduction_P Parameter: Age (day) Value: 40
  misc_feature: MA Experiment 20001905 PARAMETER Experiment Name: At_Drought_Reproduction_P Parameter: Organism Value: A. thaliana
  misc_feature: MA Experiment 20001905 PARAMETER Experiment Name: At_Drought_Reproduction_P Parameter: Plant Line Value: WS
  misc_feature: MA Experiment 20001905 PARAMETER Experiment Name: At_Drought_Reproduction_P Parameter: Timepoint (day) Value: 10
  misc_feature: MA Experiment 20001905 PARAMETER Experiment Name: At_Drought_Reproduction_P Parameter: Tissue Value: Rosettes
  misc_feature: MA Experiment 20001905 PARAMETER Experiment Name: At_Drought_Reproduction_P Parameter: Treatment Value: Drought vs. No Drought
  misc_feature: MA Experiment ID: 20001906 Result: Up-regulated in Transcription
  misc_feature: MA Experiment 20001906 PARAMETER Experiment Name: At_Drought_Reproduction_P Parameter: Age (day) Value: 35
  misc_feature: MA Experiment 20001906 PARAMETER Experiment Name: At_Drought_Reproduction_P Parameter: Organism Value: A. thaliana
  misc_feature: MA Experiment 20001906 PARAMETER Experiment Name: At_Drought_Reproduction_P Parameter: Plant Line Value: WS
  misc_feature: MA Experiment 20001906 PARAMETER Experiment Name: At_Drought_Reproduction_P Parameter: Timepoint (day) Value: 5
  misc_feature: MA Experiment 20001906 PARAMETER Experiment Name: At_Drought_Reproduction_P Parameter: Tissue Value: Siliques
  misc_feature: MA Experiment 20001906 PARAMETER Experiment Name: At_Drought_Reproduction_P Parameter: Treatment Value: Drought vs. No Drought
  misc_feature: MA Experiment ID: 20001911 Result: Up-regulated in Transcription
  misc_feature: MA Experiment 20001911 PARAMETER Experiment Name: At_Drought_Reproduction_P Parameter: Age (day) Value: 40
  misc_feature: MA Experiment 20001911 PARAMETER Experiment Name: At_Drought_Reproduction_P Parameter: Organism Value: A. thaliana
  misc_feature: MA Experiment 20001911 PARAMETER Experiment Name: At_Drought_Reproduction_P Parameter: Plant Line Value: WS
  misc_feature: MA Experiment 20001911 PARAMETER Experiment Name: At_Drought_Reproduction_P Parameter: Timepoint (day) Value: 10
  misc_feature: MA Experiment 20001911 PARAMETER Experiment Name: At_Drought_Reproduction_P Parameter: Tissue Value: Flowers
  misc_feature: MA Experiment 20001911 PARAMETER Experiment Name: At_Drought_Reproduction_P Parameter: Treatment Value: Drought vs. No Drought

SEQ ID NO: 94033 - protein, 177 aa, Arabidopsis thaliana; identical to SEQ ID NO: 90277
  peptide (1)..(177): Ceres Seq. ID no. 12723325
  misc_feature (6)..(145): Pfam Name: Clathrin adaptor complex small chain Pfam Description: Clathrin adaptor complex small chain
  misc_feature (1)..(177): Homolog of NCBI NO: 18406956 NR Description: putative coatomer zeta subunit; protein id: supported by cDNA: gi_15450726 [Arabidopsis thaliana] At1g60970/T7P1_11 [Arabidopsis thaliana]
  misc_feature (1)..(158): Homolog of NCBI NO: 25347918 NR Description: probable coatomer zeta subunit T7P1.11 [imported] Arabidopsis thaliana >gi|12323342|gb|AAG51650.1|AC018908_16
  misc_feature (5)..(177): Homolog of NCBI NO: 7259352 NR Description: nonclathrin coat protein zeta1-COP [Lycopersicon

SEQ ID NO: 94034 - DNA, 2724 bp, Arabidopsis thaliana; identical to SEQ ID NO: 90278
  misc_feature (1)..(2724): Ceres Seq. ID no. 12723338
  misc_feature: MA Experiment ID: 20000307 Result: Up-regulated in Transcription
  misc_feature: MA Experiment 20000307 PARAMETER Experiment Name: At_Germinating_Seeds_Sub_P Parameter: Age (hr) Value: 24 vs. 0
  misc_feature: MA Experiment 20000307 PARAMETER Experiment Name: At_Germinating_Seeds_Sub_P Parameter: Organism Value: A. thaliana
  misc_feature: MA Experiment 20000307 PARAMETER Experiment Name: At_Germinating_Seeds_Sub_P Parameter: Plant Line Value: WS
  misc_feature: MA Experiment 20000307 PARAMETER Experiment Name: At_Germinating_Seeds_Sub_P Parameter: Tissue Value: Germinating Seeds

SEQ ID NO: 94035 - protein, 907 aa, Arabidopsis thaliana; identical to SEQ ID NO: 90279
  peptide (1)..(907): Ceres Seq. ID no. 12723339
  misc_feature (417)..(715): Pfam Name: Formin Homology 2 Domain Pfam Description: Formin Homology 2 Domain
  misc_feature (550)..(900): Homolog of NCBI NO: 15220280 NR Description: hypothetical protein; protein id: At1g11070.1
  misc_feature (134)..(205): Homolog of NCBI NO: 15220280 NR Description: hypothetical protein; protein id: At1g11070.1
  misc_feature (558)..(861): Homolog of NCBI NO: 18412766 NR Description: unknown protein; protein id: At4g04980.1
  misc_feature (210)..(409): Homolog of NCBI NO: 18412766 NR Description: unknown protein; protein id: At4g04980.1
  misc_feature (408)..(642): Homolog of NCBI NO: 15240851 NR Description: putative protein; protein id: At5g07750.1 thaliana] >gi|9759597|dbj|BAB11454.1|
  misc_feature (411)..(642): Homolog of NCBI NO: 15240851 NR Description: putative protein; protein id: At5g07750.1 thaliana] >gi|9759597|dbj|BAB11454.1|
  misc_feature (416)..(641): Homolog of NCBI NO: 21322711 NR Description: pherophorin-dz1 protein [Volvox carteri f.
  misc_feature (416)..(641): Homolog of NCBI NO: 21322711 NR Description: pherophorin-dz1 protein [Volvox carteri f.
  misc_feature (416)..(641): Homolog of NCBI NO: 21322711 NR Description: pherophorin-dz1 protein [Volvox carteri f.
  misc_feature (416)..(641): Homolog of NCBI NO: 21322711 NR Description: pherophorin-dz1 protein [Volvox carteri f.

SEQ ID NO: 94036 - protein, 811 aa, Arabidopsis thaliana; identical to SEQ ID NO: 90280
  peptide (1)..(811): Ceres Seq. ID no. 12723340
  misc_feature (321)..(619): Pfam Name: Formin Homology 2 Domain Pfam Description: Formin Homology 2 Domain
  misc_feature (454)..(804): Homolog of NCBI NO: 15220280 NR Description: hypothetical protein; protein id: At1g11070.1
  misc_feature (38)..(109): Homolog of NCBI NO: 15220280 NR Description: hypothetical protein; protein id: At1g11070.1
  misc_feature (462)..(765): Homolog of NCBI NO: 18412766 NR Description: unknown protein; protein id: At4g04980.1
  misc_feature (114)..(313): Homolog of NCBI NO: 18412766 NR Description: unknown protein; protein id: At4g04980.1
  misc_feature (312)..(546): Homolog of NCBI NO: 15240851 NR Description: putative protein; protein id: At5g07750.1 thaliana] >gi|9759597|dbj|BAB11454.1|
  misc_feature (315)..(546): Homolog of NCBI NO: 15240851 NR Description: putative protein; protein id: At5g07750.1 thaliana] >gi|9759597|dbj|BAB11454.1|
  misc_feature (320)..(545): Homolog of NCBI NO: 21322711 NR Description: pherophorin-dz1 protein [Volvox carteri f.
  misc_feature (320)..(545): Homolog of NCBI NO: 21322711 NR Description: pherophorin-dz1 protein [Volvox carteri f.
  misc_feature (320)..(545): Homolog of NCBI NO: 21322711 NR Description: pherophorin-dz1 protein [Volvox carteri f.
  misc_feature (320)..(545): Homolog of NCBI NO: 21322711 NR Description: pherophorin-dz1 protein [Volvox carteri f.

SEQ ID NO: 94037 - protein, 774 aa, Arabidopsis thaliana; identical to SEQ ID NO: 90281
  peptide (1)..(774): Ceres Seq. ID no. 12723341
  misc_feature (284)..(582): Pfam Name: Formin Homology 2 Domain Pfam Description: Formin Homology 2 Domain
  misc_feature (417)..(767): Homolog of NCBI NO: 15220280 NR Description: hypothetical protein; protein id: At1g11070.1
  misc_feature (1)..(72): Homolog of NCBI NO: 15220280 NR Description: hypothetical protein; protein id: At1g11070.1
  misc_feature (425)..(728): Homolog of NCBI NO: 18412766 NR Description: unknown protein; protein id: At4g04980.1
  misc_feature (77)..(276): Homolog of NCBI NO: 18412766 NR Description: unknown protein; protein id: At4g04980.1
  misc_feature (275)..(509): Homolog of NCBI NO: 15240851 NR Description: putative protein; protein id: At5g07750.1 thaliana] >gi|9759597|dbj|BAB11454.1|
  misc_feature (278)..(509): Homolog of NCBI NO: 15240851 NR Description: putative protein; protein id: At5g07750.1 thaliana] >gi|9759597|dbj|BAB11454.1|
  misc_feature (283)..(508): Homolog of NCBI NO: 21322711 NR Description: pherophorin-dz1 protein [Volvox carteri f.
  misc_feature (283)..(508): Homolog of NCBI NO: 21322711 NR Description: pherophorin-dz1 protein [Volvox carteri f.
  misc_feature (283)..(508): Homolog of NCBI NO: 21322711 NR Description: pherophorin-dz1 protein [Volvox carteri f.
  misc_feature (283)..(508): Homolog of NCBI NO: 21322711 NR Description: pherophorin-dz1 protein [Volvox carteri f.

SEQ ID NO: 94038 - DNA, 2013 bp, Arabidopsis thaliana; identical to SEQ ID NO: 90282
  misc_feature (1)..(2013): Ceres Seq. ID no. 12723362

SEQ ID NO: 94039 - protein, 573 aa, Arabidopsis thaliana; identical to SEQ ID NO: 90283
  peptide (1)..(573): Ceres Seq. ID no. 12723363
  misc_feature (346)..(390): Pfam Name: Armadillo/beta-catenin-like repeat Pfam Description: Armadillo/beta-catenin-like repeat
  misc_feature (1)..(573): Homolog of NCBI NO: 18407140 NR Description: expressed protein; protein id: At1g61350.1, by cDNA: gi_16209657, supported by cDNA: gi_18700124 [Arabidopsis
  misc_feature (1)..(573): Homolog of NCBI NO: 16209658 NR Description: At1g61350/T1F9_16 [Arabidopsis thaliana]
  misc_feature (1)..(571): Homolog of NCBI NO: 34394021 NR Description: arm repeat containing protein-like [Oryza sativa
  misc_feature (19)..(568): Homolog of NCBI NO: 15241309 NR Description: putative protein; protein id: At5g50900.1, by cDNA: gi_14532769 [Arabidopsis thaliana] gene_id:K3K7.4~pir||T02475~similar to unknown protein
  misc_feature (19)..(568): Homolog of NCBI NO: 14532770 NR Description: unknown protein [Arabidopsis thaliana]
  misc_feature (12)..(566): Homolog of NCBI NO: 15224987 NR Description: hypothetical protein; protein id: At2g05810.1, by cDNA: gi_20466607 [Arabidopsis thaliana]
  misc_feature (14)..(568): Homolog of NCBI NO: 37536190 NR Description: putative arm repeat containing protein [Oryza
  misc_feature (16)..(565): Homolog of NCBI NO: 15225552 NR Description: unknown protein; protein id: At2g45720.1
  misc_feature (11)..(565): Homolog of NCBI NO: 18378889 NR Description: expressed protein; protein id: At1g01830.1, by cDNA: gi_16604588, supported by cDNA: gi_20258992 [Arabidopsis >gi|16604589|gb|AAL24151.1| unknown protein [Arabidopsis
  misc_feature (11)..(565): Homolog of NCBI NO: 25518344 NR Description: hypothetical protein T1N6.25 [imported] - thaliana >gi|8671849|gb|AAF78412.1|AC009273_18 Contains to an unknown protein F17K2.25 gi|7485635 from Arabidopsis

SEQ ID NO: 94040 - protein, 476 aa, Arabidopsis thaliana; identical to SEQ ID NO: 90284
  peptide (1)..(476): Ceres Seq. ID no. 12723364
  misc_feature (249)..(293): Pfam Name: Armadillo/beta-catenin-like repeat Pfam Description: Armadillo/beta-catenin-like repeat
  misc_feature (1)..(476): Homolog of NCBI NO: 18407140 NR Description: expressed protein; protein id: At1g61350.1, by cDNA: gi_16209657, supported by cDNA: gi_18700124 [Arabidopsis
  misc_feature (1)..(476): Homolog of NCBI NO: 16209658 NR Description: At1g61350/T1F9_16 [Arabidopsis thaliana]
  misc_feature (1)..(474): Homolog of NCBI NO: 34394021 NR Description: arm repeat containing protein-like [Oryza sativa
  misc_feature (1)..(471): Homolog of NCBI NO: 15241309 NR Description: putative protein; protein id: At5g50900.1, by cDNA: gi_14532769 [Arabidopsis thaliana] gene_id:K3K7.4~pir||T02475~similar to unknown protein
  misc_feature (1)..(471): Homolog of NCBI NO: 14532770 NR Description: unknown protein [Arabidopsis thaliana]
  misc_feature (1)..(469): Homolog of NCBI NO: 15224987 NR Description: hypothetical protein; protein id: At2g05810.1, by cDNA: gi_20466607 [Arabidopsis thaliana]
  misc_feature (1)..(471): Homolog of NCBI NO: 37536190 NR Description: putative arm repeat containing protein [Oryza
  misc_feature (1)..(468): Homolog of NCBI NO: 15225552 NR Description: unknown protein; protein id: At2g45720.1
  misc_feature (1)..(468): Homolog of NCBI NO: 18378889 NR Description: expressed protein; protein id: At1g01830.1, by cDNA: gi_16604588, supported by cDNA: gi_20258992 [Arabidopsis >gi|16604589|gb|AAL24151.1| unknown protein [Arabidopsis
  misc_feature (1)..(468): Homolog of NCBI NO: 25518344 NR Description: hypothetical protein T1N6.25 [imported] - thaliana >gi|8671849|gb|AAF78412.1|AC009273_18 Contains to an unknown protein F17K2.25 gi|7485635 from Arabidopsis

SEQ ID NO: 94041 - protein, 469 aa, Arabidopsis thaliana; identical to SEQ ID NO: 90285
  peptide (1)..(469): Ceres Seq. ID no. 12723365
  misc_feature (242)..(286): Pfam Name: Armadillo/beta-catenin-like repeat Pfam Description: Armadillo/beta-catenin-like repeat
  misc_feature (1)..(469): Homolog of NCBI NO: 18407140 NR Description: expressed protein; protein id: At1g61350.1, by cDNA: gi_16209657, supported by cDNA: gi_18700124 [Arabidopsis
  misc_feature (1)..(469): Homolog of NCBI NO: 16209658 NR Description: At1g61350/T1F9_16 [Arabidopsis thaliana]
  misc_feature (1)..(467): Homolog of NCBI NO: 34394021 NR Description: arm repeat containing protein-like [Oryza sativa
  misc_feature (1)..(464): Homolog of NCBI NO: 15241309 NR Description: putative protein; protein id: At5g50900.1, by cDNA: gi_14532769 [Arabidopsis thaliana] gene_id:K3K7.4~pir||T02475~similar to unknown protein
  misc_feature (1)..(464): Homolog of NCBI NO: 14532770 NR Description: unknown protein [Arabidopsis thaliana]
  misc_feature (1)..(462): Homolog of NCBI NO: 15224987 NR Description: hypothetical protein; protein id: At2g05810.1, by cDNA: gi_20466607 [Arabidopsis thaliana]
  misc_feature (1)..(464): Homolog of NCBI NO: 37536190 NR Description: putative arm repeat containing protein [Oryza
  misc_feature (1)..(461): Homolog of NCBI NO: 15225552 NR Description: unknown protein; protein id: At2g45720.1
  misc_feature (1)..(461): Homolog of NCBI NO: 18378889 NR Description: expressed protein; protein id: At1g01830.1, by cDNA: gi_16604588, supported by cDNA: gi_20258992 [Arabidopsis >gi|16604589|gb|AAL24151.1| unknown protein [Arabidopsis
  misc_feature (1)..(461): Homolog of NCBI NO: 25518344 NR Description: hypothetical protein T1N6.25 [imported] - thaliana >gi|8671849|gb|AAF78412.1|AC009273_18 Contains to an unknown protein F17K2.25 gi|7485635 from Arabidopsis

SEQ ID NO: 94042 - DNA, 2415 bp, Arabidopsis thaliana; identical to SEQ ID NO: 90286
  misc_feature (1)..(2415): Ceres Seq. ID no. 12723377
  misc_feature: MA Experiment ID: 20000315 Result: Down-regulated in Transcription
  misc_feature: MA Experiment 20000315 PARAMETER Experiment Name: At_14day_Shoots-Roots_Sub_P Parameter: Age (day) Value: 14
  misc_feature: MA Experiment 20000315 PARAMETER Experiment Name: At_14day_Shoots-Roots_Sub_P Parameter: Organism Value: A. thaliana
  misc_feature: MA Experiment 20000315 PARAMETER Experiment Name: At_14day_Shoots-Roots_Sub_P Parameter: Plant Line Value: WS
  misc_feature: MA Experiment 20000315 PARAMETER Experiment Name: At_14day_Shoots-Roots_Sub_P Parameter: Tissue Value: Shoots vs. Whole Plant

SEQ ID NO: 94043 - protein, 804 aa, Arabidopsis thaliana; identical to SEQ ID NO: 90287
  peptide (1)..(804): Ceres Seq. ID no. 12723378
  misc_feature (70)..(180): Pfam Name: D-mannose binding lectin Pfam Description: D-mannose binding lectin
  misc_feature (10)..(804): Homolog of NCBI NO: 30682152 NR Description: S-locus protein kinase, putative [Arabidopsis
  misc_feature (10)..(804): Homolog of NCBI NO: 30682149 NR Description: S-locus protein kinase, putative [Arabidopsis
  misc_feature (247)..(680): Homolog of NCBI NO: 30696575 NR Description: S-locus protein kinase, putative [Arabidopsis
  misc_feature (683)..(804): Homolog of NCBI NO: 30696575 NR Description: S-locus protein kinase, putative [Arabidopsis
  misc_feature (152)..(220): Homolog of NCBI NO: 30696575 NR Description: S-locus protein kinase, putative [Arabidopsis
  misc_feature (5)..(452): Homolog of NCBI NO: 30314606 NR Description: S receptor kinase [Brassica rapa]
  misc_feature (476)..(804): Homolog of NCBI NO: 30314606 NR Description: S receptor kinase [Brassica rapa]
  misc_feature (10)..(418): Homolog of NCBI NO: 15220351 NR Description: receptor kinase, putative; protein id:
  misc_feature (476)..(804): Homolog of NCBI NO: 15220351 NR Description: receptor kinase, putative; protein id:
  misc_feature (33)..(776): Homolog of NCBI NO: 25956275 NR Description: unnamed protein product [Lotus japonicus]

SEQ ID NO: 94044 - protein, 803 aa, Arabidopsis thaliana; identical to SEQ ID NO: 90288
  peptide (1)..(803): Ceres Seq. ID no. 12723379
  misc_feature (69)..(179): Pfam Name: D-mannose binding lectin Pfam Description: D-mannose binding lectin
  misc_feature (9)..(803): Homolog of NCBI NO: 30682152 NR Description: S-locus protein kinase, putative [Arabidopsis
  misc_feature (9)..(803): Homolog of NCBI NO: 30682149 NR Description: S-locus protein kinase, putative [Arabidopsis
  misc_feature (246)..(679): Homolog of NCBI NO: 30696575 NR Description: S-locus protein kinase, putative [Arabidopsis
  misc_feature (682)..(803): Homolog of NCBI NO: 30696575 NR Description: S-locus protein kinase, putative [Arabidopsis
  misc_feature (151)..(219): Homolog of NCBI NO: 30696575 NR Description: S-locus protein kinase, putative [Arabidopsis
  misc_feature (4)..(451): Homolog of NCBI NO: 30314606 NR Description: S receptor kinase [Brassica rapa]
  misc_feature (475)..(803): Homolog of NCBI NO: 30314606 NR Description: S receptor kinase [Brassica rapa]
  misc_feature (9)..(417): Homolog of NCBI NO: 15220351 NR Description: receptor kinase, putative; protein id:
  misc_feature (475)..(803): Homolog of NCBI NO: 15220351 NR Description: receptor kinase, putative; protein id:
  misc_feature (32)..(775): Homolog of NCBI NO: 25956275 NR Description: unnamed protein product [Lotus japonicus]

SEQ ID NO: 94045 - protein, 792 aa, Arabidopsis thaliana; identical to SEQ ID NO: 90289
  peptide (1)..(792): Ceres Seq. ID no. 12723380
  misc_feature (58)..(168): Pfam Name: D-mannose binding lectin Pfam Description: D-mannose binding lectin
  misc_feature (1)..(792): Homolog of NCBI NO: 30682152 NR Description: S-locus protein kinase, putative [Arabidopsis
  misc_feature (1)..(792): Homolog of NCBI NO: 30682149 NR Description: S-locus protein kinase, putative [Arabidopsis
  misc_feature (235)..(668): Homolog of NCBI NO: 30696575 NR Description: S-locus protein kinase, putative [Arabidopsis
  misc_feature (671)..(792): Homolog of NCBI NO: 30696575 NR Description: S-locus protein kinase, putative [Arabidopsis
  misc_feature (140)..(208): Homolog of NCBI NO: 30696575 NR Description: S-locus protein kinase, putative [Arabidopsis
  misc_feature (1)..(440): Homolog of NCBI NO: 30314606 NR Description: S receptor kinase [Brassica rapa]
  misc_feature (464)..(792): Homolog of NCBI NO: 30314606 NR Description: S receptor kinase [Brassica rapa]
  misc_feature (1)..(406): Homolog of NCBI NO: 15220351 NR Description: receptor kinase, putative; protein id:
  misc_feature (464)..(792): Homolog of NCBI NO: 15220351 NR Description: receptor kinase, putative; protein id:
  misc_feature (21)..(764): Homolog of NCBI NO: 25956275 NR Description: unnamed protein product [Lotus japonicus]

SEQ ID NO: 94046 - DNA, 1942 bp, Arabidopsis thaliana; identical to SEQ ID NO: 90290
  misc_feature (1)..(1942): Ceres Seq. ID no. 12723381
  misc_feature: MA Experiment ID: 20000185 Result: Up-regulated in Transcription
  misc_feature: MA Experiment 20000185 PARAMETER Experiment Name: At_Roots__P Parameter: Age (day) Value: 7 vs. 21
  misc_feature: MA Experiment 20000185 PARAMETER Experiment Name: At_Roots__P Parameter: Organism Value: A. thaliana
  misc_feature: MA Experiment 20000185 PARAMETER Experiment Name: At_Roots__P Parameter: Tissue Value: Roots vs. Whole Plant
  misc_feature: MA Experiment ID: 20000227 Result: Down-regulated in Transcription
  misc_feature: MA Experiment 20000227 PARAMETER Experiment Name: At_Root-Tips-vs-Tops_P Parameter: Tissue Value: Root Tips vs. Root Tops
  misc_feature: MA Experiment ID: 20000286 Result: Up-regulated in Transcription
  misc_feature: MA Experiment 20000286 PARAMETER Experiment Name: At_Open_Flower_P Parameter: Age (day) Value: 21
  misc_feature: MA Experiment 20000286 PARAMETER Experiment Name: At_Open_Flower_P Parameter: Plant Line Value: WS
  misc_feature: MA Experiment 20000286 PARAMETER Experiment Name: At_Open_Flower_P Parameter: Tissue Value: Half Open vs. Whole Plant
  misc_feature: MA Experiment ID: 20000439 Result: Up-regulated in Transcription
  misc_feature: MA Experiment 20000439 PARAMETER Experiment Name: At_Roots__P Parameter: Age (day) Value: 14 vs. 21
  misc_feature: MA Experiment 20000439 PARAMETER Experiment Name: At_Roots__P Parameter: Organism Value: A. thaliana
  misc_feature: MA Experiment 20000439 PARAMETER Experiment Name: At_Roots__P Parameter: Tissue Value: Roots vs. Whole Plant
  misc_feature: MA Experiment ID: 20000443 Result: Down-regulated in Transcription
  misc_feature: MA Experiment 20000443 PARAMETER Experiment Name: At_1uM_BR-BRZ__P Parameter: Tissue Value: Shoot Apices
  misc_feature: MA Experiment 20000443 PARAMETER Experiment Name: At_1uM_BR-BRZ__P Parameter: Treatment Value: 1uM BRZ vs. No Treatment
  misc_feature: MA Experiment ID: 20000527 Result: Down-regulated in Transcription
  misc_feature: MA Experiment 20000527 PARAMETER Experiment Name: At_10percent_PEG_P Parameter: Age (day) Value: 20
  misc_feature: MA Experiment 20000527 PARAMETER Experiment Name: At_10percent_PEG_P Parameter: Organism Value: A. thaliana
  misc_feature: MA Experiment 20000527 PARAMETER Experiment Name: At_10percent_PEG_P Parameter: Plant Line Value: WS
  misc_feature: MA Experiment 20000527 PARAMETER Experiment Name: At_10percent_PEG_P Parameter: Timepoint (day) Value: 20
  misc_feature: MA Experiment 20000527 PARAMETER Experiment Name: At_10percent_PEG_P Parameter: Tissue Value: Whole Plant
  misc_feature: MA Experiment 20000527 PARAMETER Experiment Name: At_10percent_PEG_P Parameter: Treatment Value: 10percent PEG vs. No Treatment

SEQ ID NO: 94047 - protein, 583 aa, Arabidopsis thaliana; identical to SEQ ID NO: 90291
  peptide (1)..(583): Ceres Seq. ID no. 12723382
  misc_feature (1)..(583): Homolog of NCBI NO: 15220529 NR Description: Mlo protein, putative; protein id: At1g61560.1, by cDNA: gi_14091581 [Arabidopsis thaliana]
  misc_feature (1)..(583): Homolog of NCBI NO: 15220339 NR Description: Mlo protein, putative; protein id: At1g11310.1, by cDNA: 259664., supported by cDNA: gi_14091573, supported by gi_15809945 [Arabidopsis thaliana] >gi|25346298|pir||B86247
  misc_feature (5)..(583): Homolog of NCBI NO: 18404979 NR Description: similar to Mlo proteins from H. vulgare; protein At2g39200.1, supported by cDNA: gi_14091593 [Arabidopsis
  misc_feature (5)..(583): Homolog of NCBI NO: 7487052 NR Description: H. vulgare Mlo protein homolog [imported] -
  misc_feature (8)..(514): Homolog of NCBI NO: 6063540 NR Description: similar to OsMlo-h1. (Z95353) [Oryza sativa
  misc_feature (8)..(514): Homolog of NCBI NO: 15290605 NR Description: seven transmembrane protein MLO2 [Oryza sativa
  misc_feature (8)..(436): Homolog of NCBI NO: 23306124 NR Description: Putative OsMlo-h1 [Oryza sativa (japonica
  misc_feature (435)..(514): Homolog of NCBI NO: 23306124 NR Description: Putative OsMlo-h1 [Oryza sativa (japonica
  misc_feature (8)..(495): Homolog of NCBI NO: 14718604 NR Description: Mlo [Oryza sativa]
  misc_feature (132)..(505): Homolog of NCBI NO: 22261804 NR Description: MLO protein homolog 1

SEQ ID NO: 94048 - protein, 521 aa, Arabidopsis thaliana; identical to SEQ ID NO: 90292
  peptide (1)..(521): Ceres Seq. ID no. 12723383
  misc_feature (1)..(521): Homolog of NCBI NO: 15220529 NR Description: Mlo protein, putative; protein id: At1g61560.1, by cDNA: gi_14091581 [Arabidopsis thaliana]
  misc_feature (1)..(521): Homolog of NCBI NO: 15220339 NR Description: Mlo protein, putative; protein id: At1g11310.1, by cDNA: 259664., supported by cDNA: gi_14091573, supported by gi_15809945 [Arabidopsis thaliana] >gi|25346298|pir||B86247
  misc_feature (1)..(521): Homolog of NCBI NO: 18404979 NR Description: similar to Mlo proteins from H. vulgare; protein At2g39200.1, supported by cDNA: gi_14091593 [Arabidopsis
  misc_feature (1)..(521): Homolog of NCBI NO: 7487052 NR Description: H. vulgare Mlo protein homolog [imported] -
  misc_feature (1)..(452): Homolog of NCBI NO: 6063540 NR Description: similar to OsMlo-h1. (Z95353) [Oryza sativa
  misc_feature (1)..(452): Homolog of NCBI NO: 15290605 NR Description: seven transmembrane protein MLO2 [Oryza sativa
  misc_feature (1)..(374): Homolog of NCBI NO: 23306124 NR Description: Putative OsMlo-h1 [Oryza sativa (japonica
  misc_feature (373)..(452): Homolog of NCBI NO: 23306124 NR Description: Putative OsMlo-h1 [Oryza sativa (japonica
  misc_feature (1)..(433): Homolog of NCBI NO: 14718604 NR Description: Mlo [Oryza sativa]
  misc_feature (70)..(443): Homolog of NCBI NO: 22261804 NR Description: MLO protein homolog 1

SEQ ID NO: 94049 - protein, 519 aa, Arabidopsis thaliana; identical to SEQ ID NO: 90293
  peptide (1)..(519): Ceres Seq. ID no. 12723384
  misc_feature (1)..(519): Homolog of NCBI NO: 15220529 NR Description: Mlo protein, putative; protein id: At1g61560.1, by cDNA: gi_14091581 [Arabidopsis thaliana]
  misc_feature (1)..(519): Homolog of NCBI NO: 15220339 NR Description: Mlo protein, putative; protein id: At1g11310.1, by cDNA: 259664., supported by cDNA: gi_14091573, supported by gi_15809945 [Arabidopsis thaliana] >gi|25346298|pir||B86247
  misc_feature (1)..(519): Homolog of NCBI NO: 18404979 NR Description: similar to Mlo proteins from H. vulgare; protein At2g39200.1, supported by cDNA: gi_14091593 [Arabidopsis
  misc_feature (1)..(519): Homolog of NCBI NO: 7487052 NR Description: H. vulgare Mlo protein homolog [imported] -
  misc_feature (1)..(450): Homolog of NCBI NO: 6063540 NR Description: similar to OsMlo-h1. (Z95353) [Oryza sativa
  misc_feature (1)..(450): Homolog of NCBI NO: 15290605 NR Description: seven transmembrane protein MLO2 [Oryza sativa
  misc_feature (1)..(372): Homolog of NCBI NO: 23306124 NR Description: Putative OsMlo-h1 [Oryza sativa (japonica
  misc_feature (371)..(450): Homolog of NCBI NO: 23306124 NR Description: Putative OsMlo-h1 [Oryza sativa (japonica
  misc_feature (1)..(431): Homolog of NCBI NO: 14718604 NR Description: Mlo [Oryza sativa]
  misc_feature (68)..(441): Homolog of NCBI NO: 22261804 NR Description: MLO protein homolog 1

SEQ ID NO: 94050 - DNA, 1863 bp, Arabidopsis thaliana; identical to SEQ ID NO: 90294
  misc_feature (1)..(1863): Ceres Seq. ID no. 12723420
  misc_feature: MA Experiment ID: 20000182 Result: Up-regulated in Transcription
  misc_feature: MA Experiment 20000182 PARAMETER Experiment Name: At_2mM_SA_P Parameter: Age (day) Value: 14
  misc_feature: MA Experiment 20000182 PARAMETER Experiment Name: At_2mM_SA_P Parameter: Organism Value: A. thaliana
  misc_feature: MA Experiment 20000182 PARAMETER Experiment Name: At_2mM_SA_P Parameter: Plant Line Value: WS
  misc_feature: MA Experiment 20000182 PARAMETER Experiment Name: At_2mM_SA_P Parameter: Timepoint (hr) Value: 6
  misc_feature: MA Experiment 20000182 PARAMETER Experiment Name: At_2mM_SA_P Parameter: Tissue Value: Aerial
  misc_feature: MA Experiment 20000182 PARAMETER Experiment Name: At_2mM_SA_P Parameter: Treatment Value: 2mM SA vs. No Treatment
  misc_feature: MA Experiment ID: 20000184 Result: Down-regulated in Transcription
  misc_feature: MA Experiment 20000184 PARAMETER Experiment Name: At_Shoots__P Parameter: Age (day) Value: 7
  misc_feature: MA Experiment 20000184 PARAMETER Experiment Name: At_Shoots__P Parameter: Tissue Value: Shoots vs. Whole Plant
  misc_feature: MA Experiment ID: 20000227 Result: Up-regulated in Transcription
  misc_feature: MA Experiment 20000227 PARAMETER Experiment Name: At_Root-Tips-vs-Tops_P Parameter: Tissue Value: Root Tips vs. Root Tops
  misc_feature: MA Experiment ID: 20000437 Result: Up-regulated in Transcription
  misc_feature: MA Experiment 20000437 PARAMETER Experiment Name: At_Drought_P Parameter: Age (day) Value: 8
  misc_feature: MA Experiment 20000437 PARAMETER Experiment Name: At_Drought_P Parameter: Organism Value: A. thaliana
  misc_feature: MA Experiment 20000437 PARAMETER Experiment Name: At_Drought_P Parameter: Plant Line Value: WS
  misc_feature: MA Experiment 20000437 PARAMETER Experiment Name: At_Drought_P Parameter: Timepoint (hr) Value: 24
  misc_feature: MA Experiment 20000437 PARAMETER Experiment Name: At_Drought_P Parameter: Tissue Value: Whole Plant
  misc_feature: MA Experiment 20000437 PARAMETER Experiment Name: At_Drought_P Parameter: Treatment Value: Drought vs. No Drought
  misc_feature: MA Experiment ID: 20000495 Result: Up-regulated in Transcription
  misc_feature: MA Experiment 20000495 PARAMETER Experiment Name: At_Guard_Cells_P Parameter: Harvest Date Value: 8/2/2002
  misc_feature: MA Experiment 20000495 PARAMETER Experiment Name: At_Guard_Cells_P Parameter: Organism Value: A. thaliana
  misc_feature: MA Experiment 20000495 PARAMETER Experiment Name: At_Guard_Cells_P Parameter: Tissue Value: Guard Cells vs. Leaves
  misc_feature: MA Experiment ID: 20000527 Result: Down-regulated in Transcription
  misc_feature: MA Experiment 20000527 PARAMETER Experiment Name: At_10percent_PEG_P Parameter: Age (day) Value: 20
  misc_feature: MA Experiment 20000527 PARAMETER Experiment Name: At_10percent_PEG_P Parameter: Organism Value: A. thaliana
  misc_feature: MA Experiment 20000527 PARAMETER Experiment Name: At_10percent_PEG_P Parameter: Plant Line Value: WS
  misc_feature: MA Experiment 20000527 PARAMETER Experiment Name: At_10percent_PEG_P Parameter: Timepoint (day) Value: 20
  misc_feature: MA Experiment 20000527 PARAMETER Experiment Name: At_10percent_PEG_P Parameter: Tissue Value: Whole Plant
  misc_feature: MA Experiment 20000527 PARAMETER Experiment Name: At_10percent_PEG_P Parameter: Treatment Value: 10percent PEG vs. No Treatment
  misc_feature: MA Experiment ID: 20001906 Result: Up-regulated in Transcription
  misc_feature: MA Experiment 20001906 PARAMETER Experiment Name: At_Drought_Reproduction_P Parameter: Age (day) Value: 35
  misc_feature: MA Experiment 20001906 PARAMETER Experiment Name: At_Drought_Reproduction_P Parameter: Organism Value: A. thaliana
  misc_feature: MA Experiment 20001906 PARAMETER Experiment Name: At_Drought_Reproduction_P Parameter: Plant Line Value: WS
  misc_feature: MA Experiment 20001906 PARAMETER Experiment Name: At_Drought_Reproduction_P Parameter: Timepoint (day) Value: 5
  misc_feature: MA Experiment 20001906 PARAMETER Experiment Name: At_Drought_Reproduction_P Parameter: Tissue Value: Siliques
  misc_feature: MA Experiment 20001906 PARAMETER Experiment Name: At_Drought_Reproduction_P Parameter: Treatment Value: Drought vs. No Drought

SEQ ID NO: 94051 - protein, 404 aa, Arabidopsis thaliana; identical to SEQ ID NO: 90295
  peptide (1)..(404): Ceres Seq. ID no. 12723421
  misc_feature (94)..(394): Pfam Name: Protein of unknown function (DUF707) Pfam Description: Protein of unknown function (DUF707)
  misc_feature (1)..(404): Homolog of NCBI NO: 18408876 NR Description: F12A21.2; protein id: At1g67850.1, supported by gi_14326581 [Arabidopsis thaliana] At1g67850/F12A21_2 [Arabidopsis thaliana]
  misc_feature (91)..(404): Homolog of NCBI NO: 11072034 NR Description: F12A21.2 [Arabidopsis thaliana]
  misc_feature (1)..(388): Homolog of NCBI NO: 34906848 NR Description: P0470A12.1 [Oryza sativa (japonica
  misc_feature (5)..(391): Homolog of NCBI NO: 22329525 NR Description: unknown protein; protein id: At1g13000.1, by cDNA: gi_18175818, supported by cDNA: gi_20465546 [Arabidopsis >gi|18175819|gb|AAL59933.1| unknown protein [Arabidopsis
  misc_feature (8)..(400): Homolog of NCBI NO: 14719314 NR Description: putative protein [Oryza sativa]
  misc_feature (11)..(398): Homolog of NCBI NO: 22331371 NR Description: unknown protein; protein id: At3g27470.1, by cDNA: gi_19698930 [Arabidopsis thaliana] unknown protein [Arabidopsis thaliana]
  misc_feature (94)..(387): Homolog of NCBI NO: 30683843 NR Description: expressed protein [Arabidopsis thaliana]
  misc_feature (1)..(63): Homolog of NCBI NO: 30683843 NR Description: expressed protein [Arabidopsis thaliana]
  misc_feature (1)..(394): Homolog of NCBI NO: 18390845 NR Description: storage protein, putative; protein id: supported by cDNA: gi_15810566, supported by cDNA: gi_20259568 thaliana] >gi|15810567|gb|AAL07171.1| putative storage protein
  misc_feature (6)..(402): Homolog of NCBI NO: 16612300 NR Description: AT3g26440/F20C19_16 [Arabidopsis thaliana]

SEQ ID NO: 94052 - protein, 388 aa, Arabidopsis thaliana; identical to SEQ ID NO: 90296
  peptide (1)..(388): Ceres Seq. ID no. 12723422
  misc_feature (78)..(378): Pfam Name: Protein of unknown function (DUF707) Pfam Description: Protein of unknown function (DUF707)
  misc_feature (1)..(388): Homolog of NCBI NO: 18408876 NR Description: F12A21.2; protein id: At1g67850.1, supported by gi_14326581 [Arabidopsis thaliana] At1g67850/F12A21_2 [Arabidopsis thaliana]
  misc_feature (75)..(388): Homolog of NCBI NO: 11072034 NR Description: F12A21.2 [Arabidopsis thaliana]
  misc_feature (1)..(372): Homolog of NCBI NO: 34906848 NR Description: P0470A12.1 [Oryza sativa (japonica
  misc_feature (1)..(375): Homolog of NCBI NO: 22329525 NR Description: unknown protein; protein id: At1g13000.1, by cDNA: gi_18175818, supported by cDNA: gi_20465546 [Arabidopsis >gi|18175819|gb|AAL59933.1| unknown protein [Arabidopsis
  misc_feature (1)..(384): Homolog of NCBI NO: 14719314 NR Description: putative protein [Oryza sativa]
  misc_feature (1)..(382): Homolog of NCBI NO: 22331371 NR Description: unknown protein; protein id: At3g27470.1, by cDNA: gi_19698930 [Arabidopsis thaliana] unknown protein [Arabidopsis thaliana]
  misc_feature (78)..(371): Homolog of NCBI NO: 30683843 NR Description: expressed protein [Arabidopsis thaliana]
  misc_feature (1)..(47): Homolog of NCBI NO: 30683843 NR Description: expressed protein [Arabidopsis thaliana]
  misc_feature (1)..(378): Homolog of NCBI NO: 18390845 NR Description: storage protein, putative; protein id: supported by cDNA: gi_15810566, supported by cDNA: gi_20259568 thaliana] >gi|15810567|gb|AAL07171.1| putative storage protein
  misc_feature (1)..(386): Homolog of NCBI NO: 16612300 NR Description: AT3g26440/F20C19_16 [Arabidopsis thaliana]

SEQ ID NO: 94053 - protein, 299 aa, Arabidopsis thaliana; identical to SEQ ID NO: 90297
  peptide (1)..(299): Ceres Seq. ID no. 12723423
  misc_feature (1)..(289): Pfam Name: Protein of unknown function (DUF707) Pfam Description: Protein of unknown function (DUF707)
  misc_feature (1)..(299): Homolog of NCBI NO: 18408876 NR Description: F12A21.2; protein id: At1g67850.1, supported by gi_14326581 [Arabidopsis thaliana] At1g67850/F12A21_2 [Arabidopsis thaliana]
  misc_feature (1)..(299): Homolog of NCBI NO: 11072034 NR Description: F12A21.2 [Arabidopsis thaliana]
  misc_feature (1)..(283): Homolog of NCBI NO: 34906848 NR Description: P0470A12.1 [Oryza sativa (japonica
  misc_feature (1)..(286): Homolog of NCBI NO: 22329525 NR Description: unknown protein; protein id: At1g13000.1, by cDNA: gi_18175818, supported by cDNA: gi_20465546 [Arabidopsis >gi|18175819|gb|AAL59933.1| unknown protein [Arabidopsis
  misc_feature (1)..(295): Homolog of NCBI NO: 14719314 NR Description: putative protein [Oryza sativa]
  misc_feature (1)..(293): Homolog of NCBI NO: 22331371 NR Description: unknown protein; protein id: At3g27470.1, by cDNA: gi_19698930 [Arabidopsis thaliana] unknown protein [Arabidopsis thaliana]
  misc_feature (1)..(282): Homolog of NCBI NO: 30683843 NR Description: expressed protein [Arabidopsis thaliana]
  misc_feature (1)..(289): Homolog of NCBI NO: 18390845 NR Description: storage protein, putative; protein id: supported by cDNA: gi_15810566, supported by cDNA: gi_20259568 thaliana] >gi|15810567|gb|AAL07171.1| putative storage protein
  misc_feature (1)..(297): Homolog of NCBI NO: 16612300 NR Description: AT3g26440/F20C19_16 [Arabidopsis thaliana]
  misc_feature (1)..(297): Homolog of NCBI NO: 18404941 NR Description: expressed protein; protein id: At3g26440.1,

SEQ ID NO: 94054 - DNA, 2202 bp, Arabidopsis thaliana; identical to SEQ ID NO: 90298
  misc_feature (1)..(2202): Ceres Seq. ID no. 12723428
  misc_feature: MA Experiment ID: 20000307 Result: Down-regulated in Transcription
  misc_feature: MA Experiment 20000307 PARAMETER Experiment Name: At_Germinating_Seeds_Sub_P Parameter: Age (hr) Value: 24 vs. 0
  misc_feature: MA Experiment 20000307 PARAMETER Experiment Name: At_Germinating_Seeds_Sub_P Parameter: Organism Value: A. thaliana
  misc_feature: MA Experiment 20000307 PARAMETER Experiment Name: At_Germinating_Seeds_Sub_P Parameter: Plant Line Value: WS
  misc_feature: MA Experiment 20000307 PARAMETER Experiment Name: At_Germinating_Seeds_Sub_P Parameter: Tissue Value: Germinating Seeds
  misc_feature: MA Experiment ID: 20000348 Result: Down-regulated in Transcription
  misc_feature: MA Experiment 20000348 PARAMETER Experiment Name: At_100uM_ABA_Sub_P Parameter: Age (day) Value: 14
  misc_feature: MA Experiment 20000348 PARAMETER Experiment Name: At_100uM_ABA_Sub_P Parameter: Organism Value: A. thaliana
  misc_feature: MA Experiment 20000348 PARAMETER Experiment Name: At_100uM_ABA_Sub_P Parameter: Plant Line Value: WS
  misc_feature: MA Experiment 20000348 PARAMETER Experiment Name: At_100uM_ABA_Sub_P Parameter: Timepoint (hr) Value: 1
  misc_feature: MA Experiment 20000348 PARAMETER Experiment Name: At_100uM_ABA_Sub_P Parameter: Tissue Value: Aerial
  misc_feature: MA Experiment 20000348 PARAMETER Experiment Name: At_100uM_ABA_Sub_P Parameter: Treatment Value: 100uM ABA vs. No Treatment
  misc_feature: MA Experiment ID: 20000355 Result: Up-regulated in Transcription
  misc_feature: MA Experiment 20000355 PARAMETER Experiment Name: At_Siliques_Sub_P Parameter: Age (day) Value: 21
  misc_feature: MA Experiment 20000355 PARAMETER Experiment Name: At_Siliques_Sub_P Parameter: Organism Value: A. thaliana
  misc_feature: MA Experiment 20000355 PARAMETER Experiment Name: At_Siliques_Sub_P Parameter: Plant Line Value: WS
  misc_feature: MA Experiment 20000355 PARAMETER Experiment Name: At_Siliques_Sub_P Parameter: Tissue Value: Less Than 5mm Siliques vs. Whole Plant

SEQ ID NO: 94055 - protein, 733 aa, Arabidopsis thaliana; identical to SEQ ID NO: 90299
  peptide (1)..(733): Ceres Seq. ID no. 12723429
  misc_feature (3)..(733): Homolog of NCBI NO: 15234254 NR Description: putative protein; protein id: At4g27730.1
  misc_feature (10)..(732): Homolog of NCBI NO: 15238761 NR Description: isp4 protein; protein id: At5g53510.1 thaliana] >gi|9759190|dbj|BAB09727.1| isp4 protein [Arabidopsis
  misc_feature (14)..(733): Homolog of NCBI NO: 34898010 NR Description: EST D25093(R3139) corresponds to a region of the
  misc_feature (9)..(733): Homolog of NCBI NO: 15236912 NR Description: putative oligopeptide transporter; protein id: supported by cDNA: gi_15010733 [Arabidopsis thaliana]
  misc_feature (15)..(732): Homolog of NCBI NO: 25553564 NR Description: putative isp4 protein [Oryza sativa (japonica
  misc_feature (14)..(733): Homolog of NCBI NO: 15218331 NR Description: unknown protein; protein id: At1g09930.1
  misc_feature (14)..(732): Homolog of NCBI NO: 21592665 NR Description: Isp4-like protein [Arabidopsis thaliana]
  misc_feature (75)..(733): Homolog of NCBI NO: 30722286 NR Description: glutathione transporter GT1 [Brassica juncea]
  misc_feature (75)..(610): Homolog of NCBI NO: 7485100 NR Description: hypothetical protein - Arabidopsis thaliana isp4 like protein [Arabidopsis thaliana]
  misc_feature (14)..(41): Homolog of NCBI NO: 7485100 NR Description: hypothetical protein - Arabidopsis thaliana isp4 like protein [Arabidopsis thaliana]

SEQ ID NO: 94056 - protein, 692 aa, Arabidopsis thaliana; identical to SEQ ID NO: 90300
  peptide (1)..(692): Ceres Seq. ID no. 12723430
  misc_feature (1)..(692): Homolog of NCBI NO: 15234254 NR Description: putative protein; protein id: At4g27730.1
  misc_feature (1)..(691): Homolog of NCBI NO: 15238761 NR Description: isp4 protein; protein id: At5g53510.1 thaliana] >gi|9759190|dbj|BAB09727.1| isp4 protein [Arabidopsis
  misc_feature (1)..(692): Homolog of NCBI NO: 34898010 NR Description: EST D25093(R3139) corresponds to a region of the
  misc_feature (1)..(692): Homolog of NCBI NO: 15236912 NR Description: putative oligopeptide transporter; protein id: supported by cDNA: gi_15010733 [Arabidopsis thaliana]
  misc_feature (1)..(691): Homolog of NCBI NO: 25553564 NR Description: putative isp4 protein [Oryza sativa (japonica
  misc_feature (1)..(692): Homolog of NCBI NO: 15218331 NR Description: unknown protein; protein id: At1g09930.1
  misc_feature (1)..(691): Homolog of NCBI NO: 21592665 NR Description: Isp4-like protein [Arabidopsis thaliana]
  misc_feature (34)..(692): Homolog of NCBI NO: 30722286 NR Description: glutathione transporter GT1 [Brassica juncea]
  misc_feature (34)..(569): Homolog of NCBI NO: 7485100 NR Description: hypothetical protein - Arabidopsis thaliana isp4 like protein [Arabidopsis thaliana]
  misc_feature (34)..(569): Homolog of NCBI NO: 18414644 NR Description: isp4 like protein; protein id: At4g16370.1,

SEQ ID NO: 94057 - protein, 649 aa, Arabidopsis thaliana; identical to SEQ ID NO: 90301
  peptide (1)..(649): Ceres Seq. ID no. 12723431
  misc_feature (1)..(649): Homolog of NCBI NO: 15234254 NR Description: putative protein; protein id: At4g27730.1
  misc_feature (1)..(648): Homolog of NCBI NO: 15238761 NR Description: isp4 protein; protein id: At5g53510.1 thaliana] >gi|9759190|dbj|BAB09727.1| isp4 protein [Arabidopsis
  misc_feature (1)..(649): Homolog of NCBI NO: 34898010 NR Description: EST D25093(R3139) corresponds to a region of the
  misc_feature (1)..(649): Homolog of NCBI NO: 15236912 NR Description: putative oligopeptide transporter; protein id: supported by cDNA: gi_15010733 [Arabidopsis thaliana]
  misc_feature (1)..(648): Homolog of NCBI NO: 25553564 NR Description: putative isp4 protein [Oryza sativa (japonica
  misc_feature (1)..(649): Homolog of NCBI NO: 15218331 NR Description: unknown protein; protein id: At1g09930.1
  misc_feature (1)..(648): Homolog of NCBI NO: 21592665 NR Description: Isp4-like protein [Arabidopsis thaliana]
  misc_feature (1)..(649): Homolog of NCBI NO: 30722286 NR Description: glutathione transporter GT1 [Brassica juncea]
  misc_feature (1)..(526): Homolog of NCBI NO: 7485100 NR Description: hypothetical protein - Arabidopsis thaliana isp4 like protein [Arabidopsis thaliana]
  misc_feature (1)..(526): Homolog of NCBI NO: 18414644 NR Description: isp4 like protein; protein id: At4g16370.1,

SEQ ID NO: 94058 - DNA, 642 bp, Arabidopsis thaliana; identical to SEQ ID NO: 90302
  misc_feature (1)..(642): Ceres Seq. ID no. 12723445
  misc_feature: MA Experiment ID: 20000185 Result: Down-regulated in Transcription
  misc_feature: MA Experiment 20000185 PARAMETER Experiment Name: At_Roots__P Parameter: Age (day) Value: 7 vs. 21
  misc_feature: MA Experiment 20000185 PARAMETER Experiment Name: At_Roots__P Parameter: Organism Value: A. thaliana
  misc_feature: MA Experiment 20000185 PARAMETER Experiment Name: At_Roots__P Parameter: Tissue Value: Roots vs. Whole Plant
  misc_feature: MA Experiment ID: 20000265 Result: Down-regulated in Transcription
  misc_feature: MA Experiment 20000265 PARAMETER Experiment Name: At_Open_Flower_P Parameter: Age (day) Value: 21
  misc_feature: MA Experiment 20000265 PARAMETER Experiment Name: At_Open_Flower_P Parameter: Plant Line Value: WS
  misc_feature: MA Experiment 20000265 PARAMETER Experiment Name: At_Open_Flower_P Parameter: Tissue Value: Closed Flower vs. Whole Plant
  misc_feature: MA Experiment ID: 20000286 Result: Down-regulated in Transcription
  misc_feature: MA Experiment 20000286 PARAMETER Experiment Name: At_Open_Flower_P Parameter: Age (day) Value: 21
  misc_feature: MA Experiment 20000286 PARAMETER Experiment Name: At_Open_Flower_P Parameter: Plant Line Value: WS
  misc_feature: MA Experiment 20000286 PARAMETER Experiment Name: At_Open_Flower_P Parameter: Tissue Value: Half Open vs. Whole Plant
  misc_feature: MA Experiment ID: 20000437 Result: Up-regulated in Transcription
  misc_feature: MA Experiment 20000437 PARAMETER Experiment Name: At_Drought_P Parameter: Age (day) Value: 8
  misc_feature: MA Experiment 20000437 PARAMETER Experiment Name: At_Drought_P Parameter: Organism Value: A. thaliana
  misc_feature: MA Experiment 20000437 PARAMETER Experiment Name: At_Drought_P Parameter: Plant Line Value: WS
  misc_feature: MA Experiment 20000437 PARAMETER Experiment Name: At_Drought_P Parameter: Timepoint (hr) Value: 24
  misc_feature: MA Experiment 20000437 PARAMETER Experiment Name: At_Drought_P Parameter: Tissue Value: Whole Plant
  misc_feature: MA Experiment 20000437 PARAMETER Experiment Name: At_Drought_P Parameter: Treatment Value: Drought vs. No Drought
  misc_feature: MA Experiment ID: 20000438 Result: Down-regulated in Transcription
  misc_feature: MA Experiment 20000438 PARAMETER Experiment Name: At_Shoots__P Parameter: Age (day) Value: 14
  misc_feature: MA Experiment 20000438 PARAMETER Experiment Name: At_Shoots__P Parameter: Tissue Value: Shoots vs. Whole Plant
  misc_feature: MA Experiment ID: 20000439 Result: Down-regulated in Transcription
  misc_feature: MA Experiment 20000439 PARAMETER Experiment Name: At_Roots__P Parameter: Age (day) Value: 14 vs. 21
  misc_feature: MA Experiment 20000439 PARAMETER Experiment Name: At_Roots__P Parameter: Organism Value: A. thaliana
  misc_feature: MA Experiment 20000439 PARAMETER Experiment Name: At_Roots__P Parameter: Tissue Value: Roots vs. Whole Plant
  misc_feature: MA Experiment ID: 20000495 Result: Up-regulated in Transcription
  misc_feature: MA Experiment 20000495 PARAMETER Experiment Name: At_Guard_Cells_P Parameter: Harvest Date Value: 8/2/2002
  misc_feature: MA Experiment 20000495 PARAMETER Experiment Name: At_Guard_Cells_P Parameter: Organism Value: A. thaliana
  misc_feature: MA Experiment 20000495 PARAMETER Experiment Name: At_Guard_Cells_P Parameter: Tissue Value: Guard Cells vs. Leaves
  misc_feature: MA Experiment ID: 20001554 Result: Up-regulated in Transcription
  misc_feature: MA Experiment 20001554 PARAMETER Experiment Name: At_Drought_Soil_Dry_P Parameter: Age (day) Value: 21
  misc_feature: MA Experiment 20001554 PARAMETER Experiment Name: At_Drought_Soil_Dry_P Parameter: Organism Value: A. thaliana
  misc_feature: MA Experiment 20001554 PARAMETER Experiment Name: At_Drought_Soil_Dry_P Parameter: Plant Line Value: WS
  misc_feature: MA Experiment 20001554 PARAMETER Experiment Name: At_Drought_Soil_Dry_P Parameter: Post Timepoint (hr) Value: None
  misc_feature: MA Experiment 20001554 PARAMETER Experiment Name: At_Drought_Soil_Dry_P Parameter: Post-Treatment Value: None
  misc_feature: MA Experiment 20001554 PARAMETER Experiment Name: At_Drought_Soil_Dry_P Parameter: Timepoint (day) Value: 7
  misc_feature: MA Experiment 20001554 PARAMETER Experiment Name: At_Drought_Soil_Dry_P Parameter: Treatment Value: Drought vs. No Drought
  misc_feature: MA Experiment ID: 20001555 Result: Up-regulated in Transcription
  misc_feature: MA Experiment 20001555 PARAMETER Experiment Name: At_Drought_Soil_Dry_P Parameter: Age (day) Value: 24
  misc_feature: MA Experiment 20001555 PARAMETER Experiment Name: At_Drought_Soil_Dry_P Parameter: Organism Value: A. thaliana
  misc_feature: MA Experiment 20001555 PARAMETER Experiment Name: At_Drought_Soil_Dry_P Parameter: Plant Line Value: WS
  misc_feature: MA Experiment 20001555 PARAMETER Experiment Name: At_Drought_Soil_Dry_P Parameter: Post Timepoint (hr) Value: None
  misc_feature: MA Experiment 20001555 PARAMETER Experiment Name: At_Drought_Soil_Dry_P Parameter: Post-Treatment Value: None
  misc_feature: MA Experiment 20001555 PARAMETER Experiment Name: At_Drought_Soil_Dry_P Parameter: Timepoint (day) Value: 10
  misc_feature: MA Experiment 20001555 PARAMETER Experiment Name: At_Drought_Soil_Dry_P Parameter: Treatment Value: Drought vs. No Drought
  misc_feature: MA Experiment ID: 20001904 Result: Up-regulated in Transcription
  misc_feature: MA Experiment 20001904 PARAMETER Experiment Name: At_Drought_Reproduction_P Parameter: Age (day) Value: 37
  misc_feature: MA Experiment 20001904 PARAMETER Experiment Name: At_Drought_Reproduction_P Parameter: Organism Value: A. thaliana
  misc_feature: MA Experiment 20001904 PARAMETER Experiment Name: At_Drought_Reproduction_P Parameter: Plant Line Value: WS
  misc_feature: MA Experiment 20001904 PARAMETER Experiment Name: At_Drought_Reproduction_P Parameter: Timepoint (day) Value: 7
  misc_feature: MA Experiment 20001904 PARAMETER Experiment Name: At_Drought_Reproduction_P Parameter: Tissue Value: Rosettes
  misc_feature: MA Experiment 20001904 PARAMETER Experiment Name: At_Drought_Reproduction_P Parameter: Treatment Value: Drought vs. No Drought
  misc_feature: MA Experiment ID: 20001910 Result: Up-regulated in Transcription
  misc_feature: MA Experiment 20001910 PARAMETER Experiment Name: At_Drought_Reproduction_P Parameter: Age (day) Value: 37
  misc_feature: MA Experiment 20001910 PARAMETER Experiment Name: At_Drought_Reproduction_P Parameter: Organism Value: A. thaliana
  misc_feature: MA Experiment 20001910 PARAMETER Experiment Name: At_Drought_Reproduction_P Parameter: Plant Line Value: WS
  misc_feature: MA Experiment 20001910 PARAMETER Experiment Name: At_Drought_Reproduction_P Parameter: Timepoint (day) Value: 7
  misc_feature: MA Experiment 20001910 PARAMETER Experiment Name: At_Drought_Reproduction_P Parameter: Tissue Value: Flowers
  misc_feature: MA Experiment 20001910 PARAMETER Experiment Name: At_Drought_Reproduction_P Parameter: Treatment Value: Drought vs. No Drought
  misc_feature: MA Experiment ID: 20001911 Result: Up-regulated in Transcription
  misc_feature: MA Experiment 20001911 PARAMETER Experiment Name: At_Drought_Reproduction_P Parameter: Age (day) Value: 40
  misc_feature: MA Experiment 20001911 PARAMETER Experiment Name: At_Drought_Reproduction_P Parameter: Organism Value: A. thaliana
  misc_feature: MA Experiment 20001911 PARAMETER Experiment Name: At_Drought_Reproduction_P Parameter: Plant Line Value: WS
  misc_feature: MA Experiment 20001911 PARAMETER Experiment Name: At_Drought_Reproduction_P Parameter: Timepoint (day) Value: 10
  misc_feature: MA Experiment 20001911 PARAMETER Experiment Name: At_Drought_Reproduction_P Parameter: Tissue Value: Flowers
  misc_feature: MA Experiment 20001911 PARAMETER Experiment Name: At_Drought_Reproduction_P Parameter: Treatment Value: Drought vs. No Drought

SEQ ID NO: 94059 - protein, 213 aa, Arabidopsis thaliana; identical to SEQ ID NO: 90303
  peptide (1)..(213): Ceres Seq. ID no. 12723446
  misc_feature (1)..(213): Homolog of NCBI NO: 15238828 NR Description: hairpin-induced protein, putative (HIN1); protein At5g53730.1 [Arabidopsis thaliana] >gi|9759067|dbj|BAB09545.1|
  misc_feature (34)..(213): Homolog of NCBI NO: 15229906 NR Description: hairpin-induced protein, putative (HIN1); protein At3g44220.1 [Arabidopsis thaliana] >gi|11282595|pir||T49138
  misc_feature (25)..(193): Homolog of NCBI NO: 18399308 NR Description: VAMP protein SEC22; protein id: At3g11660.1, by cDNA: 8166., supported by cDNA: gi_9502171 [Arabidopsis
  misc_feature (25)..(193): Homolog of NCBI NO: 28392929 NR Description: putative VAMP protein SEC22 [Arabidopsis thaliana]
  misc_feature (6)..(213): Homolog of NCBI NO: 15240001 NR Description: hairpin-induced protein, putative (HIN1); protein
  misc_feature (10)..(193): Homolog of NCBI NO: 15231227 NR Description: hairpin-induced protein, putative (HIN1); protein At3g52470.1, supported by cDNA: 92178., supported by cDNA: supported by cDNA: gi_21281063 [Arabidopsis thaliana]
  misc_feature (10)..(190): Homolog of NCBI NO: 15227538 NR Description: hairpin-induced protein, putative (HIN1); protein
  misc_feature (41)..(213): Homolog of NCBI NO: 22326984 NR Description: similar to hairpin-induced protein, putative
  misc_feature (38)..(190): Homolog of NCBI NO: 15233951 NR Description: hairpin-induced protein, putative (HIN1); protein At4g09590.1 [Arabidopsis thaliana] >gi|25354574|pir||A85098
  misc_feature (38)..(190): Homolog of NCBI NO: 15227540 NR Description: hairpin-induced protein, putative (HIN1); protein

SEQ ID NO: 94060 - DNA, 1113 bp, Arabidopsis thaliana; identical to SEQ ID NO: 90304
  misc_feature (1)..(1113): Ceres Seq. ID no. 12723453
  misc_feature: MA Experiment ID: 20000169 Result: Up-regulated in Transcription
  misc_feature: MA Experiment 20000169 PARAMETER Experiment Name: At_100uM_ABA_P Parameter: Age (day) Value: 14
  misc_feature: MA Experiment 20000169 PARAMETER Experiment Name: At_100uM_ABA_P Parameter: Organism Value: A. thaliana
  misc_feature: MA Experiment 20000169 PARAMETER Experiment Name: At_100uM_ABA_P Parameter: Plant Line Value: WS
  misc_feature: MA Experiment 20000169 PARAMETER Experiment Name: At_100uM_ABA_P Parameter: Timepoint (hr) Value: 6
  misc_feature: MA Experiment 20000169 PARAMETER Experiment Name: At_100uM_ABA_P Parameter: Tissue Value: Aerial
  misc_feature: MA Experiment 20000169 PARAMETER Experiment Name: At_100uM_ABA_P Parameter: Treatment Value: 100uM ABA vs. No Treatment
  misc_feature: MA Experiment ID: 20000184 Result: Down-regulated in Transcription
  misc_feature: MA Experiment 20000184 PARAMETER Experiment Name: At_Shoots__P Parameter: Age (day) Value: 7
  misc_feature: MA Experiment 20000184 PARAMETER Experiment Name: At_Shoots__P Parameter: Tissue Value: Shoots vs. Whole Plant
  misc_feature: MA Experiment ID: 20000185 Result: Down-regulated in Transcription
  misc_feature: MA Experiment 20000185 PARAMETER Experiment Name: At_Roots__P Parameter: Age (day) Value: 7 vs. 21
  misc_feature: MA Experiment 20000185 PARAMETER Experiment Name: At_Roots__P Parameter: Organism Value: A. thaliana
  misc_feature: MA Experiment 20000185 PARAMETER Experiment Name: At_Roots__P Parameter: Tissue Value: Roots vs. Whole Plant
  misc_feature: MA Experiment ID: 20000265 Result: Down-regulated in Transcription
  misc_feature: MA Experiment 20000265 PARAMETER Experiment Name: At_Open_Flower_P Parameter: Age (day) Value: 21
  misc_feature: MA Experiment 20000265 PARAMETER Experiment Name: At_Open_Flower_P Parameter: Plant Line Value: WS
  misc_feature: MA Experiment 20000265 PARAMETER Experiment Name: At_Open_Flower_P Parameter: Tissue Value: Closed Flower vs. Whole Plant
  misc_feature: MA Experiment ID: 20000267 Result: Up-regulated in Transcription
  misc_feature: MA Experiment 20000267 PARAMETER Experiment Name: At_Drought_P Parameter: Age (day) Value: 7
  misc_feature: MA Experiment 20000267 PARAMETER Experiment Name: At_Drought_P Parameter: Organism Value: A. thaliana
  misc_feature: MA Experiment 20000267 PARAMETER Experiment Name: At_Drought_P Parameter: Plant Line Value: WS
  misc_feature: MA Experiment 20000267 PARAMETER Experiment Name: At_Drought_P Parameter: Timepoint (hr) Value: 6
  misc_feature: MA Experiment 20000267 PARAMETER Experiment Name: At_Drought_P Parameter: Tissue Value: Whole Plant
  misc_feature: MA Experiment 20000267 PARAMETER Experiment Name: At_Drought_P Parameter: Treatment Value: Drought vs. No Drought
  misc_feature: MA Experiment ID: 20000436 Result: Up-regulated in Transcription
  misc_feature: MA Experiment 20000436 PARAMETER Experiment Name: At_Drought_P Parameter: Age (day) Value: 7
  misc_feature: MA Experiment 20000436 PARAMETER Experiment Name: At_Drought_P Parameter: Organism Value: A. thaliana
  misc_feature: MA Experiment 20000436 PARAMETER Experiment Name: At_Drought_P Parameter: Plant Line Value: WS
  misc_feature: MA Experiment 20000436 PARAMETER Experiment Name: At_Drought_P Parameter: Timepoint (hr) Value: 12
  misc_feature: MA Experiment 20000436 PARAMETER Experiment Name: At_Drought_P Parameter: Tissue Value: Whole Plant
  misc_feature: MA Experiment 20000436 PARAMETER Experiment Name: At_Drought_P Parameter: Treatment Value: Drought vs. No Drought
  misc_feature: MA Experiment ID: 20000437 Result: Up-regulated in Transcription
  misc_feature: MA Experiment 20000437 PARAMETER Experiment Name: At_Drought_P Parameter: Age (day) Value: 8
  misc_feature: MA Experiment 20000437 PARAMETER Experiment Name: At_Drought_P Parameter: Organism Value: A. thaliana
  misc_feature: MA Experiment 20000437 PARAMETER Experiment Name: At_Drought_P Parameter: Plant Line Value: WS
  misc_feature: MA Experiment 20000437 PARAMETER Experiment Name: At_Drought_P Parameter: Timepoint (hr) Value: 24
  misc_feature: MA Experiment 20000437 PARAMETER Experiment Name: At_Drought_P Parameter: Tissue Value: Whole Plant
  misc_feature: MA Experiment 20000437 PARAMETER Experiment Name: At_Drought_P Parameter: Treatment Value: Drought vs. No Drought
  misc_feature: MA Experiment ID: 20000439 Result: Down-regulated in Transcription
  misc_feature: MA Experiment 20000439 PARAMETER Experiment Name: At_Roots__P Parameter: Age (day) Value: 14 vs. 21
  misc_feature: MA Experiment 20000439 PARAMETER Experiment Name: At_Roots__P Parameter: Organism Value: A. thaliana
  misc_feature: MA Experiment 20000439 PARAMETER Experiment Name: At_Roots__P Parameter: Tissue Value: Roots vs. Whole Plant
  misc_feature: MA Experiment ID: 20000453 Result: Up-regulated in Transcription
  misc_feature: MA Experiment 20000453 PARAMETER Experiment Name: At_100uM_ABA_P Parameter: Age (day) Value: 15
  misc_feature: MA Experiment 20000453 PARAMETER Experiment Name: At_100uM_ABA_P Parameter: Organism Value: A. thaliana
  misc_feature: MA Experiment 20000453 PARAMETER Experiment Name: At_100uM_ABA_P Parameter: Plant Line Value: WS
  misc_feature: MA Experiment 20000453 PARAMETER Experiment Name: At_100uM_ABA_P Parameter: Timepoint (hr) Value: 24
  misc_feature: MA Experiment 20000453 PARAMETER Experiment Name: At_100uM_ABA_P Parameter: Tissue Value: Aerial
  misc_feature: MA Experiment 20000453 PARAMETER Experiment Name: At_100uM_ABA_P Parameter: Treatment Value: 100uM ABA vs. No Treatment
  misc_feature: MA Experiment ID: 20000455 Result: Up-regulated in Transcription
  misc_feature: MA Experiment 20000455 PARAMETER Experiment Name: At_100uM_ABA_P Parameter: Age (day) Value: 16
  misc_feature: MA Experiment 20000455 PARAMETER Experiment Name: At_100uM_ABA_P Parameter: Organism Value: A. thaliana
  misc_feature: MA Experiment 20000455 PARAMETER Experiment Name: At_100uM_ABA_P Parameter: Plant Line Value: WS
  misc_feature: MA Experiment 20000455 PARAMETER Experiment Name: At_100uM_ABA_P Parameter: Timepoint (hr) Value: 48
  misc_feature: MA Experiment 20000455 PARAMETER Experiment Name: At_100uM_ABA_P Parameter: Tissue Value: Aerial
  misc_feature: MA Experiment 20000455 PARAMETER Experiment Name: At_100uM_ABA_P Parameter: Treatment Value: 100uM ABA vs. No Treatment
  misc_feature: MA Experiment ID: 20000495 Result: Up-regulated in Transcription
  misc_feature: MA Experiment 20000495 PARAMETER Experiment Name: At_Guard_Cells_P Parameter: Harvest Date Value: 8/2/2002
  misc_feature: MA Experiment 20000495 PARAMETER Experiment Name: At_Guard_Cells_P Parameter: Organism Value: A. thaliana
  misc_feature: MA Experiment 20000495 PARAMETER Experiment Name: At_Guard_Cells_P Parameter: Tissue Value: Guard Cells vs. Leaves
  misc_feature: MA Experiment ID: 20000794 Result: Down-regulated in Transcription
  misc_feature: MA Experiment 20000794 PARAMETER Experiment Name: At_Petals_P Parameter: Age (day) Value: 23-25 days
  misc_feature: MA Experiment 20000794 PARAMETER Experiment Name: At_Petals_P Parameter: Plant Line Value: WS
  misc_feature: MA Experiment 20000794 PARAMETER Experiment Name: At_Petals_P Parameter: Tissue Value: Petals vs. Whole plant
  misc_feature: MA Experiment ID: 20001554 Result: Up-regulated in Transcription
  misc_feature: MA Experiment 20001554 PARAMETER Experiment Name: At_Drought_Soil_Dry_P Parameter: Age (day) Value: 21
  misc_feature: MA Experiment 20001554 PARAMETER Experiment Name: At_Drought_Soil_Dry_P Parameter: Organism Value: A. thaliana
  misc_feature: MA Experiment 20001554 PARAMETER Experiment Name: At_Drought_Soil_Dry_P Parameter: Plant Line Value: WS
  misc_feature: MA Experiment 20001554 PARAMETER Experiment Name: At_Drought_Soil_Dry_P Parameter: Post Timepoint (hr) Value: None
  misc_feature: MA Experiment 20001554 PARAMETER Experiment Name: At_Drought_Soil_Dry_P Parameter: Post-Treatment Value: None
  misc_feature: MA Experiment 20001554 PARAMETER Experiment Name: At_Drought_Soil_Dry_P Parameter: Timepoint (day) Value: 7
  misc_feature: MA Experiment 20001554 PARAMETER Experiment Name: At_Drought_Soil_Dry_P Parameter: Treatment Value: Drought vs. No Drought
  misc_feature: MA Experiment ID: 20001555 Result: Up-regulated in Transcription
  misc_feature: MA Experiment 20001555 PARAMETER Experiment Name: At_Drought_Soil_Dry_P Parameter: Age (day) Value: 24
  misc_feature: MA Experiment 20001555 PARAMETER Experiment Name: At_Drought_Soil_Dry_P Parameter: Organism Value: A. thaliana
  misc_feature: MA Experiment 20001555 PARAMETER Experiment Name: At_Drought_Soil_Dry_P Parameter: Plant Line Value: WS
  misc_feature: MA Experiment 20001555 PARAMETER Experiment Name: At_Drought_Soil_Dry_P Parameter: Post Timepoint (hr) Value: None
  misc_feature: MA Experiment 20001555 PARAMETER Experiment Name: At_Drought_Soil_Dry_P Parameter: Post-Treatment Value: None
  misc_feature: MA Experiment 20001555 PARAMETER Experiment Name: At_Drought_Soil_Dry_P Parameter: Timepoint (day) Value: 10
  misc_feature: MA Experiment 20001555 PARAMETER Experiment Name: At_Drought_Soil_Dry_P Parameter: Treatment Value: Drought vs. No Drought
  misc_feature: MA Experiment ID: 20001559 Result: Up-regulated in Transcription
  misc_feature: MA Experiment 20001559 PARAMETER Experiment Name: At_Drought_Soil_Dry_P Parameter: Age (day) Value: 28
  misc_feature: MA Experiment 20001559 PARAMETER Experiment Name: At_Drought_Soil_Dry_P Parameter: Organism Value: A. thaliana
  misc_feature: MA Experiment 20001559 PARAMETER Experiment Name: At_Drought_Soil_Dry_P Parameter: Plant Line Value: WS
  misc_feature: MA Experiment 20001559 PARAMETER Experiment Name: At_Drought_Soil_Dry_P Parameter: Post Timepoint (hr) Value: 29
  misc_feature: MA Experiment 20001559 PARAMETER Experiment Name: At_Drought_Soil_Dry_P Parameter: Post-Treatment Value: Re-Water vs. No Drought
  misc_feature: MA Experiment 20001559 PARAMETER Experiment Name: At_Drought_Soil_Dry_P Parameter: Timepoint (day) Value: 14
  misc_feature: MA Experiment 20001559 PARAMETER Experiment Name: At_Drought_Soil_Dry_P Parameter: Treatment Value: Drought vs. No Drought
  misc_feature: MA Experiment ID: 20001904 Result: Up-regulated in Transcription
  misc_feature: MA Experiment 20001904 PARAMETER Experiment Name: At_Drought_Reproduction_P Parameter: Age (day) Value: 37
  misc_feature: MA Experiment 20001904 PARAMETER Experiment Name: At_Drought_Reproduction_P Parameter: Organism Value: A. thaliana
  misc_feature: MA Experiment 20001904 PARAMETER Experiment Name: At_Drought_Reproduction_P Parameter: Plant Line Value: WS
  misc_feature: MA Experiment 20001904 PARAMETER Experiment Name: At_Drought_Reproduction_P Parameter: Timepoint (day) Value: 7
  misc_feature: MA Experiment 20001904 PARAMETER Experiment Name: At_Drought_Reproduction_P Parameter: Tissue Value: Rosettes
  misc_feature: MA Experiment 20001904 PARAMETER Experiment Name: At_Drought_Reproduction_P Parameter: Treatment Value: Drought vs. No Drought
  misc_feature: MA Experiment ID: 20001905 Result: Up-regulated in Transcription
  misc_feature: MA Experiment 20001905 PARAMETER Experiment Name: At_Drought_Reproduction_P Parameter: Age (day) Value: 40
  misc_feature: MA Experiment 20001905 PARAMETER Experiment Name: At_Drought_Reproduction_P Parameter: Organism Value: A. thaliana
  misc_feature: MA Experiment 20001905 PARAMETER Experiment Name: At_Drought_Reproduction_P Parameter: Plant Line Value: WS
  misc_feature: MA Experiment 20001905 PARAMETER Experiment Name: At_Drought_Reproduction_P Parameter: Timepoint (day) Value: 10
  misc_feature: MA Experiment 20001905 PARAMETER Experiment Name: At_Drought_Reproduction_P Parameter: Tissue Value: Rosettes
  misc_feature: MA Experiment 20001905 PARAMETER Experiment Name: At_Drought_Reproduction_P Parameter: Treatment Value: Drought vs. No Drought
  misc_feature: MA Experiment ID: 20001906 Result: Up-regulated in Transcription
  misc_feature: MA Experiment 20001906 PARAMETER Experiment Name: At_Drought_Reproduction_P Parameter: Age (day) Value: 35
  misc_feature: MA Experiment 20001906 PARAMETER Experiment Name: At_Drought_Reproduction_P Parameter: Organism Value: A. thaliana
  misc_feature: MA Experiment 20001906 PARAMETER Experiment Name: At_Drought_Reproduction_P Parameter: Plant Line Value: WS
  misc_feature: MA Experiment 20001906 PARAMETER Experiment Name: At_Drought_Reproduction_P Parameter: Timepoint (day) Value: 5
  misc_feature: MA Experiment 20001906 PARAMETER Experiment Name: At_Drought_Reproduction_P Parameter: Tissue Value: Siliques
  misc_feature: MA Experiment 20001906 PARAMETER Experiment Name: At_Drought_Reproduction_P Parameter: Treatment Value: Drought vs. No Drought
  misc_feature: MA Experiment ID: 20001907 Result: Up-regulated in Transcription
  misc_feature: MA Experiment 20001907 PARAMETER Experiment Name: At_Drought_Reproduction_P Parameter: Age (day) Value: 37
  misc_feature: MA Experiment 20001907 PARAMETER Experiment Name: At_Drought_Reproduction_P Parameter: Organism Value: A. thaliana
  misc_feature: MA Experiment 20001907 PARAMETER Experiment Name: At_Drought_Reproduction_P Parameter: Plant Line Value: WS
  misc_feature: MA Experiment 20001907 PARAMETER Experiment Name: At_Drought_Reproduction_P Parameter: Timepoint (day) Value: 7
  misc_feature: MA Experiment 20001907 PARAMETER Experiment Name: At_Drought_Reproduction_P Parameter: Tissue Value: Siliques
  misc_feature: MA Experiment 20001907 PARAMETER Experiment Name: At_Drought_Reproduction_P Parameter: Treatment Value: Drought vs. No Drought
  misc_feature: MA Experiment ID: 20001908 Result: Up-regulated in Transcription
  misc_feature: MA Experiment 20001908 PARAMETER Experiment Name: At_Drought_Reproduction_P Parameter: Age (day) Value: 40
  misc_feature: MA Experiment 20001908 PARAMETER Experiment Name: At_Drought_Reproduction_P Parameter: Organism Value: A. thaliana
  misc_feature: MA Experiment 20001908 PARAMETER Experiment Name: At_Drought_Reproduction_P Parameter: Plant Line Value: WS
  misc_feature: MA Experiment 20001908 PARAMETER Experiment Name: At_Drought_Reproduction_P Parameter: Timepoint (day) Value: 10
  misc_feature: MA Experiment 20001908 PARAMETER Experiment Name: At_Drought_Reproduction_P Parameter: Tissue Value: Siliques
  misc_feature: MA Experiment 20001908 PARAMETER Experiment Name: At_Drought_Reproduction_P Parameter: Treatment Value: Drought vs. No Drought
  misc_feature: MA Experiment ID: 20001910 Result: Up-regulated in Transcription
  misc_feature: MA Experiment 20001910 PARAMETER Experiment Name: At_Drought_Reproduction_P Parameter: Age (day) Value: 37
  misc_feature: MA Experiment 20001910 PARAMETER Experiment Name: At_Drought_Reproduction_P Parameter: Organism Value: A. thaliana
  misc_feature: MA Experiment 20001910 PARAMETER Experiment Name: At_Drought_Reproduction_P Parameter: Plant Line Value: WS
  misc_feature: MA Experiment 20001910 PARAMETER Experiment Name: At_Drought_Reproduction_P Parameter: Timepoint (day) Value: 7
  misc_feature: MA Experiment 20001910 PARAMETER Experiment Name: At_Drought_Reproduction_P Parameter: Tissue Value: Flowers
  misc_feature: MA Experiment 20001910 PARAMETER Experiment Name: At_Drought_Reproduction_P Parameter: Treatment Value: Drought vs. No Drought
  misc_feature: MA Experiment ID: 20001911 Result: Up-regulated in Transcription
  misc_feature: MA Experiment 20001911 PARAMETER Experiment Name: At_Drought_Reproduction_P Parameter: Age (day) Value: 40
  misc_feature: MA Experiment 20001911 PARAMETER Experiment Name: At_Drought_Reproduction_P Parameter: Organism Value: A. thaliana
  misc_feature: MA Experiment 20001911 PARAMETER Experiment Name: At_Drought_Reproduction_P Parameter: Plant Line Value: WS
  misc_feature: MA Experiment 20001911 PARAMETER Experiment Name: At_Drought_Reproduction_P Parameter: Timepoint (day) Value: 10
  misc_feature: MA Experiment 20001911 PARAMETER Experiment Name: At_Drought_Reproduction_P Parameter: Tissue Value: Flowers
  misc_feature: MA Experiment 20001911 PARAMETER Experiment Name: At_Drought_Reproduction_P Parameter: Treatment Value: Drought vs. No Drought

SEQ ID NO: 94061 - protein, 370 aa, Arabidopsis thaliana; identical to SEQ ID NO: 90305
  peptide (1)..(370): Ceres Seq. ID no. 12723454
  misc_feature (38)..(121): Pfam Name: Plastocyanin-like domain Pfam Description: Plastocyanin-like domain
  misc_feature (1)..(370): Homolog of NCBI NO: 15238868 NR Description: putative protein; protein id: At5g53870.1 thaliana] >gi|10177249|dbj|BAB10717.1| contains similarity to
  misc_feature (1)..(370): Homolog of NCBI NO: 28396618 NR Description: phytocyanin protein, PUP2 [Arabidopsis thaliana]
  misc_feature (5)..(336): Homolog of NCBI NO: 15234164 NR Description: putative protein; protein id: At4g27520.1, by cDNA: 33380., supported by cDNA: gi_13358224 [Arabidopsis
  misc_feature (5)..(336): Homolog of NCBI NO: 21592865 NR Description: unknown [Arabidopsis thaliana]
  misc_feature (95)..(344): Homolog of NCBI NO: 1076211 NR Description: hypothetical protein VSP-3 - Chlamydomonas >gi|530876|gb|AAB53953.1| amino acid feature: Rod protein domain,
  misc_feature (23)..(226): Homolog of NCBI NO: 34903678 NR Description: B1015E06.24 [Oryza sativa (japonica
  misc_feature (1)..(185): Homolog of NCBI NO: 7485901 NR Description: hypothetical protein F20O9.30 - Arabidopsis
  misc_feature (1)..(185): Homolog of NCBI NO: 18417181 NR Description: copper-binding protein-like; protein id:
  misc_feature (89)..(345): Homolog of NCBI NO: 1076211 NR Description: hypothetical protein VSP-3 - Chlamydomonas >gi|530876|gb|AAB53953.1| amino acid feature: Rod protein domain,
  misc_feature (134)..(342): Homolog of NCBI NO: 20138131 NR Description: Vegetative cell wall protein gp1 precursor rich glycoprotein 1) >gi|12018147|gb|AAG45420.1|AF309494_1

SEQ ID NO: 94062 - protein, 366 aa, Arabidopsis thaliana; identical to SEQ ID NO: 90306
  peptide (1)..(366): Ceres Seq. ID no. 12723455
  misc_feature (34)..(117): Pfam Name: Plastocyanin-like domain Pfam Description: Plastocyanin-like domain
  misc_feature (1)..(366): Homolog of NCBI NO: 15238868 NR Description: putative protein; protein id: At5g53870.1 thaliana] >gi|10177249|dbj|BAB10717.1| contains similarity to
  misc_feature (1)..(366): Homolog of NCBI NO: 28396618 NR Description: phytocyanin protein, PUP2 [Arabidopsis thaliana]
  misc_feature (1)..(332): Homolog of NCBI NO: 15234164 NR Description: putative protein; protein id: At4g27520.1, by cDNA: 33380., supported by cDNA: gi_13358224 [Arabidopsis
  misc_feature (1)..(332): Homolog of NCBI NO: 21592865 NR Description: unknown [Arabidopsis thaliana]
  misc_feature (91)..(340): Homolog of NCBI NO: 1076211 NR Description: hypothetical protein VSP-3 - Chlamydomonas >gi|530876|gb|AAB53953.1| amino acid feature: Rod protein domain,
  misc_feature (19)..(222): Homolog of NCBI NO: 34903678 NR Description: B1015E06.24 [Oryza sativa (japonica
  misc_feature (1)..(181): Homolog of NCBI NO: 7485901 NR Description: hypothetical protein F20O9.30 - Arabidopsis
  misc_feature (1)..(181): Homolog of NCBI NO: 18417181 NR Description: copper-binding protein-like; protein id:
  misc_feature (85)..(341): Homolog of NCBI NO: 1076211 NR Description: hypothetical protein VSP-3 - Chlamydomonas >gi|530876|gb|AAB53953.1| amino acid feature: Rod protein domain,
  misc_feature (130)..(338): Homolog of NCBI NO: 20138131 NR Description: Vegetative cell wall protein gp1 precursor rich glycoprotein 1) >gi|12018147|gb|AAG45420.1|AF309494_1

SEQ ID NO: 94063 - protein, 295 aa, Arabidopsis thaliana; identical to SEQ ID NO: 90307
  peptide (1)..(295): Ceres Seq. ID no. 12723456
  misc_feature (56)..(267): Pfam Name: Extensin-like region Pfam Description: Extensin-like region
  misc_feature (1)..(295): Homolog of NCBI NO: 15238868 NR Description: putative protein; protein id: At5g53870.1 thaliana] >gi|10177249|dbj|BAB10717.1| contains similarity to
  misc_feature (1)..(295): Homolog of NCBI NO: 28396618 NR Description: phytocyanin protein, PUP2 [Arabidopsis thaliana]
  misc_feature (1)..(261): Homolog of NCBI NO: 15234164 NR Description: putative protein; protein id: At4g27520.1, by cDNA: 33380., supported by cDNA: gi_13358224 [Arabidopsis
  misc_feature (1)..(261): Homolog of NCBI NO: 21592865 NR Description: unknown [Arabidopsis thaliana]
  misc_feature (20)..(269): Homolog of NCBI NO: 1076211 NR Description: hypothetical protein VSP-3 - Chlamydomonas >gi|530876|gb|AAB53953.1| amino acid feature: Rod protein domain,
  misc_feature (1)..(151): Homolog of NCBI NO: 34903678 NR Description: B1015E06.24 [Oryza sativa (japonica
  misc_feature (1)..(110): Homolog of NCBI NO: 7485901 NR Description: hypothetical protein F20O9.30 - Arabidopsis
  misc_feature (1)..(110): Homolog of NCBI NO: 18417181 NR Description: copper-binding protein-like; protein id:
  misc_feature (14)..(270): Homolog of NCBI NO: 1076211 NR Description: hypothetical protein VSP-3 - Chlamydomonas >gi|530876|gb|AAB53953.1| amino acid feature: Rod protein domain,
  misc_feature (59)..(267): Homolog of NCBI NO: 20138131 NR Description: Vegetative cell wall protein gp1 precursor rich glycoprotein 1) >gi|12018147|gb|AAG45420.1|AF309494_1

SEQ ID NO: 94064 - DNA, 1558 bp, Arabidopsis thaliana; identical to SEQ ID NO: 90308
  misc_feature (1)..(1558): Ceres Seq. ID no. 12723483
  misc_feature: MA Experiment ID: 20000169 Result: Up-regulated in Transcription
  misc_feature: MA Experiment 20000169 PARAMETER Experiment Name: At_100uM_ABA_P Parameter: Age (day) Value: 14
  misc_feature: MA Experiment 20000169 PARAMETER Experiment Name: At_100uM_ABA_P Parameter: Organism Value: A. thaliana
  misc_feature: MA Experiment 20000169 PARAMETER Experiment Name: At_100uM_ABA_P Parameter: Plant Line Value: WS
  misc_feature: MA Experiment 20000169 PARAMETER Experiment Name: At_100uM_ABA_P Parameter: Timepoint (hr) Value: 6
  misc_feature: MA Experiment 20000169 PARAMETER Experiment Name: At_100uM_ABA_P Parameter: Tissue Value: Aerial
  misc_feature: MA Experiment 20000169 PARAMETER Experiment Name: At_100uM_ABA_P Parameter: Treatment Value: 100uM ABA vs. No Treatment
  misc_feature: MA Experiment ID: 20000171 Result: Up-regulated in Transcription
  misc_feature: MA Experiment 20000171 PARAMETER Experiment Name: At_42deg_Heat_P Parameter: Age (day) Value: 14
  misc_feature: MA Experiment 20000171 PARAMETER Experiment Name: At_42deg_Heat_P Parameter: Organism Value: A. thaliana
  misc_feature: MA Experiment 20000171 PARAMETER Experiment Name: At_42deg_Heat_P Parameter: Plant Line Value: WS
  misc_feature: MA Experiment 20000171 PARAMETER Experiment Name: At_42deg_Heat_P Parameter: Temperature (deg C) Value: 42 vs. 22
  misc_feature: MA Experiment 20000171 PARAMETER Experiment Name: At_42deg_Heat_P Parameter: Timepoint (hr) Value: 1
  misc_feature: MA Experiment 20000171 PARAMETER Experiment Name: At_42deg_Heat_P Parameter: Tissue Value: Aerial
  misc_feature: MA Experiment ID: 20000173 Result: Up-regulated in Transcription
  misc_feature: MA Experiment 20000173 PARAMETER Experiment Name: At_42deg_Heat_P Parameter: Age (day) Value: 14
  misc_feature: MA Experiment 20000173 PARAMETER Experiment Name: At_42deg_Heat_P Parameter: Organism Value: A. thaliana
  misc_feature: MA Experiment 20000173 PARAMETER Experiment Name: At_42deg_Heat_P Parameter: Plant Line Value: WS
  misc_feature: MA Experiment 20000173 PARAMETER Experiment Name: At_42deg_Heat_P Parameter: Temperature (deg C) Value: 42 vs. 22
  misc_feature: MA Experiment 20000173 PARAMETER Experiment Name: At_42deg_Heat_P Parameter: Timepoint (hr) Value: 6
  misc_feature: MA Experiment 20000173 PARAMETER Experiment Name: At_42deg_Heat_P Parameter: Tissue Value: Aerial
  misc_feature: MA Experiment ID: 20000179 Result: Down-regulated in Transcription
  misc_feature: MA Experiment 20000179 PARAMETER Experiment Name: At_Germinating_Seeds_P Parameter: Age (hr) Value: 6 vs. 0
  misc_feature: MA Experiment 20000179 PARAMETER Experiment Name: At_Germinating_Seeds_P Parameter: Tissue Value: Germinating Seeds
  misc_feature: MA Experiment ID: 20000182 Result: Up-regulated in Transcription
  misc_feature: MA Experiment 20000182 PARAMETER Experiment Name: At_2mM_SA_P Parameter: Age (day) Value: 14
  misc_feature: MA Experiment 20000182 PARAMETER Experiment Name: At_2mM_SA_P Parameter: Organism Value: A. thaliana
  misc_feature: MA Experiment 20000182 PARAMETER Experiment Name: At_2mM_SA_P Parameter: Plant Line Value: WS
  misc_feature: MA Experiment 20000182 PARAMETER Experiment Name: At_2mM_SA_P Parameter: Timepoint (hr) Value: 6
  misc_feature: MA Experiment 20000182 PARAMETER Experiment Name: At_2mM_SA_P Parameter: Tissue Value: Aerial
  misc_feature: MA Experiment 20000182 PARAMETER Experiment Name: At_2mM_SA_P Parameter: Treatment Value: 2mM SA vs. No Treatment
  misc_feature: MA Experiment ID: 20000234 Result: Down-regulated in Transcription
  misc_feature: MA Experiment 20000234 PARAMETER Experiment Name: At_Siliques_P Parameter: Age (day) Value: 21
  misc_feature: MA Experiment 20000234 PARAMETER Experiment Name: At_Siliques_P Parameter: Organism Value: A. thaliana
  misc_feature: MA Experiment 20000234 PARAMETER Experiment Name: At_Siliques_P Parameter: Plant Line Value: WS
  misc_feature: MA Experiment 20000234 PARAMETER Experiment Name: At_Siliques_P Parameter: Tissue Value: Less Than 5mm Siliques vs. Whole Plant
  misc_feature: MA Experiment ID: 20000235 Result: Down-regulated in Transcription
  misc_feature: MA Experiment 20000235 PARAMETER Experiment Name: At_Siliques_P Parameter: Age (day) Value: 21
  misc_feature: MA Experiment 20000235 PARAMETER Experiment Name: At_Siliques_P Parameter: Organism Value: A. thaliana
  misc_feature: MA Experiment 20000235 PARAMETER Experiment Name: At_Siliques_P Parameter: Plant Line Value: WS
  misc_feature: MA Experiment 20000235 PARAMETER Experiment Name: At_Siliques_P Parameter: Tissue Value: 5-10mm Siliques vs. Whole Plant
  misc_feature: MA Experiment ID: 20000265 Result: Down-regulated in Transcription
  misc_feature: MA Experiment 20000265 PARAMETER Experiment Name: At_Open_Flower_P Parameter: Age (day) Value: 21
  misc_feature: MA Experiment 20000265 PARAMETER Experiment Name: At_Open_Flower_P Parameter: Plant Line Value: WS
  misc_feature: MA Experiment 20000265 PARAMETER Experiment Name: At_Open_Flower_P Parameter: Tissue Value: Closed Flower vs. Whole Plant
  misc_feature: MA Experiment ID: 20000267 Result: Up-regulated in Transcription
  misc_feature: MA Experiment 20000267 PARAMETER Experiment Name: At_Drought_P Parameter: Age (day) Value: 7
  misc_feature: MA Experiment 20000267 PARAMETER Experiment Name: At_Drought_P Parameter: Organism Value: A. thaliana
  misc_feature: MA Experiment 20000267 PARAMETER Experiment Name: At_Drought_P Parameter: Plant Line Value: WS
  misc_feature: MA Experiment 20000267 PARAMETER Experiment Name: At_Drought_P Parameter: Timepoint (hr) Value: 6
  misc_feature: MA Experiment 20000267 PARAMETER Experiment Name: At_Drought_P Parameter: Tissue Value: Whole Plant
  misc_feature: MA Experiment 20000267 PARAMETER Experiment Name: At_Drought_P Parameter: Treatment Value: Drought vs. No Drought
  misc_feature: MA Experiment ID: 20000268 Result: Up-regulated in Transcription
  misc_feature: MA Experiment 20000268 PARAMETER Experiment Name: At_100mM_NaCl__P Parameter: Age (day) Value: 14
  misc_feature: MA Experiment 20000268 PARAMETER Experiment Name: At_100mM_NaCl__P Parameter: Organism Value: A. thaliana
  misc_feature: MA Experiment 20000268 PARAMETER Experiment Name: At_100mM_NaCl__P Parameter: Plant Line Value: WS
  misc_feature: MA Experiment 20000268 PARAMETER Experiment Name: At_100mM_NaCl__P Parameter: Timepoint (hr) Value: 6
  misc_feature: MA Experiment 20000268 PARAMETER Experiment Name: At_100mM_NaCl__P Parameter: Tissue Value: Whole Plant
  misc_feature: MA Experiment 20000268 PARAMETER Experiment Name: At_100mM_NaCl__P Parameter: Treatment Value: 100mM NaCl vs. No Treatment
  misc_feature: MA Experiment ID: 20000286 Result: Down-regulated in Transcription
  misc_feature: MA Experiment 20000286 PARAMETER Experiment Name: At_Open_Flower_P Parameter: Age (day) Value: 21
  misc_feature: MA Experiment 20000286 PARAMETER Experiment Name: At_Open_Flower_P Parameter: Plant Line Value: WS
  misc_feature: MA Experiment 20000286 PARAMETER Experiment Name: At_Open_Flower_P Parameter: Tissue Value: Half Open vs. Whole Plant
  misc_feature: MA Experiment ID: 20000436 Result: Up-regulated in Transcription
  misc_feature: MA Experiment 20000436 PARAMETER Experiment Name: At_Drought_P Parameter: Age (day) Value: 7
  misc_feature: MA Experiment 20000436 PARAMETER Experiment Name: At_Drought_P Parameter: Organism Value: A. thaliana
  misc_feature: MA Experiment 20000436 PARAMETER Experiment Name: At_Drought_P Parameter: Plant Line Value: WS
  misc_feature: MA Experiment 20000436 PARAMETER Experiment Name: At_Drought_P Parameter: Timepoint (hr) Value: 12
  misc_feature: MA Experiment 20000436 PARAMETER Experiment Name: At_Drought_P Parameter: Tissue Value: Whole Plant
  misc_feature: MA Experiment 20000436 PARAMETER Experiment Name: At_Drought_P Parameter: Treatment Value: Drought vs. No Drought
  misc_feature: MA Experiment ID: 20000437 Result: Up-regulated in Transcription
  misc_feature: MA Experiment 20000437 PARAMETER Experiment Name: At_Drought_P Parameter: Age (day) Value: 8
  misc_feature: MA Experiment 20000437 PARAMETER Experiment Name: At_Drought_P Parameter: Organism Value: A. thaliana
  misc_feature: MA Experiment 20000437 PARAMETER Experiment Name: At_Drought_P Parameter: Plant Line Value: WS
  misc_feature: MA Experiment 20000437 PARAMETER Experiment Name: At_Drought_P Parameter: Timepoint (hr) Value: 24
  misc_feature: MA Experiment 20000437 PARAMETER Experiment Name: At_Drought_P Parameter: Tissue Value: Whole Plant
  misc_feature: MA Experiment 20000437 PARAMETER Experiment Name: At_Drought_P Parameter: Treatment Value: Drought vs. No Drought
  misc_feature: MA Experiment ID: 20000439 Result: Down-regulated in Transcription
  misc_feature: MA Experiment 20000439 PARAMETER Experiment Name: At_Roots__P Parameter: Age (day) Value: 14 vs. 21
  misc_feature: MA Experiment 20000439 PARAMETER Experiment Name: At_Roots__P Parameter: Organism Value: A. thaliana
  misc_feature: MA Experiment 20000439 PARAMETER Experiment Name: At_Roots__P Parameter: Tissue Value: Roots vs. Whole Plant
  misc_feature: MA Experiment ID: 20000495 Result: Down-regulated in Transcription
  misc_feature: MA Experiment 20000495 PARAMETER Experiment Name: At_Guard_Cells_P Parameter: Harvest Date Value: 8/2/2002
  misc_feature: MA Experiment 20000495 PARAMETER Experiment Name: At_Guard_Cells_P Parameter: Organism Value: A. thaliana
  misc_feature: MA Experiment 20000495 PARAMETER Experiment Name: At_Guard_Cells_P Parameter: Tissue Value: Guard Cells vs. Leaves
  misc_feature: MA Experiment ID: 20000573 Result: Down-regulated in Transcription
  misc_feature: MA Experiment 20000573 PARAMETER Experiment Name: At_100uM_ABA_Mutants__P Parameter: Organism Value: A. thaliana
  misc_feature: MA Experiment 20000573 PARAMETER Experiment Name: At_100uM_ABA_Mutants__P Parameter: Plant Line Value: CS22 vs. Ler wt
  misc_feature: MA Experiment 20000573 PARAMETER Experiment Name: At_100uM_ABA_Mutants__P Parameter: Timepoint (hr) Value: N/A
  misc_feature: MA Experiment 20000573 PARAMETER Experiment Name: At_100uM_ABA_Mutants__P Parameter: Tissue Value: Whole Plant
  misc_feature: MA Experiment 20000573 PARAMETER Experiment Name: At_100uM_ABA_Mutants__P Parameter: Treatment Value: None
  misc_feature: MA Experiment ID: 20000574 Result: Down-regulated in Transcription
  misc_feature: MA Experiment 20000574 PARAMETER Experiment Name: At_100uM_ABA_Mutants__P Parameter: Organism Value: A. thaliana
  misc_feature: MA Experiment 20000574 PARAMETER Experiment Name: At_100uM_ABA_Mutants__P Parameter: Plant Line Value: CS23 vs. Ler wt
  misc_feature: MA Experiment 20000574 PARAMETER Experiment Name: At_100uM_ABA_Mutants__P Parameter: Timepoint (hr) Value: N/A
  misc_feature: MA Experiment 20000574 PARAMETER Experiment Name: At_100uM_ABA_Mutants__P Parameter: Tissue Value: Whole Plant
  misc_feature: MA Experiment 20000574 PARAMETER Experiment Name: At_100uM_ABA_Mutants__P Parameter: Treatment Value: None
  misc_feature: MA Experiment ID: 20000709 Result: Up-regulated in Transcription
  misc_feature: MA Experiment 20000709 PARAMETER Experiment Name: At_15mM_NH4NO3_L-to-H_P Parameter: Age (hr) Value: 14
  misc_feature: MA Experiment 20000709 PARAMETER Experiment Name: At_15mM_NH4NO3_L-to-H_P Parameter: Organism Value: A. thaliana
  misc_feature: MA Experiment 20000709 PARAMETER Experiment Name: At_15mM_NH4NO3_L-to-H_P Parameter: Plant Line Value: WS
  misc_feature: MA Experiment 20000709 PARAMETER Experiment Name: At_15mM_NH4NO3_L-to-H_P Parameter: Timepoint (hr) Value: 4
  misc_feature: MA Experiment 20000709 PARAMETER Experiment Name: At_15mM_NH4NO3_L-to-H_P Parameter: Tissue Value: Aerial
  misc_feature: MA Experiment 20000709 PARAMETER Experiment Name: At_15mM_NH4NO3_L-to-H_P Parameter: Treatment Value: 15mM NH4NO3 vs. 30mM Mannitol
  misc_feature: MA Experiment ID: 20001247 Result: Up-regulated in Transcription
  misc_feature: MA Experiment 20001247 PARAMETER Experiment Name: At_Far-red-induction_P Parameter: Age (day) Value: 7
  misc_feature: MA Experiment 20001247 PARAMETER Experiment Name: At_Far-red-induction_P Parameter: Light Value: Far-red vs. White
  misc_feature: MA Experiment 20001247 PARAMETER Experiment Name: At_Far-red-induction_P Parameter: Organism Value: A. thaliana
  misc_feature: MA Experiment 20001247 PARAMETER Experiment Name: At_Far-red-induction_P Parameter: Plant Line Value: Columbia
  misc_feature: MA Experiment 20001247 PARAMETER Experiment Name: At_Far-red-induction_P Parameter: Timepoint (hr) Value: 1
  misc_feature: MA Experiment 20001247 PARAMETER Experiment Name: At_Far-red-induction_P Parameter: Tissue Value: Whole Plant
  misc_feature: MA Experiment ID: 20001450 Result: Up-regulated in Transcription
  misc_feature: MA Experiment 20001450 PARAMETER Experiment Name: At_Far-red-induction_P Parameter: Age (day) Value: 7
  misc_feature: MA Experiment 20001450 PARAMETER Experiment Name: At_Far-red-induction_P Parameter: Light Value: Far-red vs. White
  misc_feature: MA Experiment 20001450 PARAMETER Experiment Name: At_Far-red-induction_P Parameter: Organism Value: A. thaliana
  misc_feature: MA Experiment 20001450 PARAMETER Experiment Name: At_Far-red-induction_P Parameter: Plant Line Value: Columbia
  misc_feature: MA Experiment 20001450 PARAMETER Experiment Name: At_Far-red-induction_P Parameter: Timepoint (hr) Value: 8
  misc_feature: MA Experiment 20001450 PARAMETER Experiment Name: At_Far-red-induction_P Parameter: Tissue Value: Whole Plant
  misc_feature: MA Experiment ID: 20001451 Result: Up-regulated in Transcription
  misc_feature: MA Experiment 20001451 PARAMETER Experiment Name: At_Far-red-induction_P Parameter: Age (day) Value: 7
  misc_feature: MA Experiment 20001451 PARAMETER Experiment Name: At_Far-red-induction_P Parameter: Light Value: Far-red vs. White
  misc_feature: MA Experiment 20001451 PARAMETER Experiment Name: At_Far-red-induction_P Parameter: Organism Value: A. thaliana
  misc_feature: MA Experiment 20001451 PARAMETER Experiment Name: At_Far-red-induction_P Parameter: Plant Line Value: Columbia
  misc_feature: MA Experiment 20001451 PARAMETER Experiment Name: At_Far-red-induction_P Parameter: Timepoint (hr) Value: 24
  misc_feature: MA Experiment 20001451 PARAMETER Experiment Name: At_Far-red-induction_P Parameter: Tissue Value: Whole Plant
  misc_feature: MA Experiment ID: 20001554 Result: Up-regulated in Transcription
  misc_feature: MA Experiment 20001554 PARAMETER Experiment Name: At_Drought_Soil_Dry_P Parameter: Age (day) Value: 21
  misc_feature: MA Experiment 20001554 PARAMETER Experiment Name: At_Drought_Soil_Dry_P Parameter: Organism Value: A. thaliana
  misc_feature: MA Experiment 20001554 PARAMETER Experiment Name: At_Drought_Soil_Dry_P Parameter: Plant Line Value: WS
  misc_feature: MA Experiment 20001554 PARAMETER Experiment Name: At_Drought_Soil_Dry_P Parameter: Post Timepoint (hr) Value: None
  misc_feature: MA Experiment 20001554 PARAMETER Experiment Name: At_Drought_Soil_Dry_P Parameter: Post-Treatment Value: None
  misc_feature: MA Experiment 20001554 PARAMETER Experiment Name: At_Drought_Soil_Dry_P Parameter: Timepoint (day) Value: 7
  misc_feature: MA Experiment 20001554 PARAMETER Experiment Name: At_Drought_Soil_Dry_P Parameter: Treatment Value: Drought vs. No Drought
  misc_feature: MA Experiment ID: 20001904 Result: Up-regulated in Transcription
  misc_feature: MA Experiment 20001904 PARAMETER Experiment Name: At_Drought_Reproduction_P Parameter: Age (day) Value: 37
  misc_feature: MA Experiment 20001904 PARAMETER Experiment Name: At_Drought_Reproduction_P Parameter: Organism Value: A. thaliana
  misc_feature: MA Experiment 20001904 PARAMETER Experiment Name: At_Drought_Reproduction_P Parameter: Plant Line Value: WS
  misc_feature: MA Experiment 20001904 PARAMETER Experiment Name: At_Drought_Reproduction_P Parameter: Timepoint (day) Value: 7
  misc_feature: MA Experiment 20001904 PARAMETER Experiment Name: At_Drought_Reproduction_P Parameter: Tissue Value: Rosettes
  misc_feature: MA Experiment 20001904 PARAMETER Experiment Name: At_Drought_Reproduction_P Parameter: Treatment Value: Drought vs. No Drought
  misc_feature: MA Experiment ID: 20001906 Result: Up-regulated in Transcription
  misc_feature: MA Experiment 20001906 PARAMETER Experiment Name: At_Drought_Reproduction_P Parameter: Age (day) Value: 35
  misc_feature: MA Experiment 20001906 PARAMETER Experiment Name: At_Drought_Reproduction_P Parameter: Organism Value: A. thaliana
  misc_feature: MA Experiment 20001906 PARAMETER Experiment Name: At_Drought_Reproduction_P Parameter: Plant Line Value: WS
  misc_feature: MA Experiment 20001906 PARAMETER Experiment Name: At_Drought_Reproduction_P Parameter: Timepoint (day) Value: 5
  misc_feature: MA Experiment 20001906 PARAMETER Experiment Name: At_Drought_Reproduction_P Parameter: Tissue Value: Siliques
  misc_feature: MA Experiment 20001906 PARAMETER Experiment Name: At_Drought_Reproduction_P Parameter: Treatment Value: Drought vs. No Drought

SEQ ID NO: 94065 - protein, 414 aa, Arabidopsis thaliana; identical to SEQ ID NO: 90309
  peptide (1)..(414): Ceres Seq. ID no. 12723484
  misc_feature (86)..(403): Pfam Name: Aminotransferase class I and II Pfam Description: Aminotransferase class I and II
  misc_feature (1)..(414): Homolog of NCBI NO: 15239521 NR Description: tyrosine aminotransferase; protein id: [Arabidopsis thaliana] >gi|10177259|dbj|BAB10727.1| tyrosine [Arabidopsis thaliana] >gi|25054842|gb|AAN71911.1| putative
  misc_feature (1)..(414): Homolog of NCBI NO: 23397279 NR Description: putatative tyrosine aminotransferase [Arabidopsis
  misc_feature (1)..(407): Homolog of NCBI NO: 27525396 NR Description: tyrosine aminotransferase [Solenostemon
  misc_feature (8)..(410): Homolog of NCBI NO: 8777301 NR Description: tyrosine aminotransferase-like protein
  misc_feature (5)..(408): Homolog of NCBI NO: 11527943 NR Description: ROOTY/SUPERROOT1 [Arabidopsis thaliana]
  misc_feature (5)..(408): Homolog of NCBI NO: 11527941 NR Description: ROOTY/SUPERROOT1 [Arabidopsis thaliana]
  misc_feature (5)..(408): Homolog of NCBI NO: 15225387 NR Description: putative tyrosine aminotransferase; protein id: supported by cDNA: gi_11527938, supported by cDNA: gi_11527940,
  misc_feature (5)..(408): Homolog of NCBI NO: 15809874 NR Description: At2g20610/F23N11.7 [Arabidopsis thaliana]
  misc_feature (5)..(408): Homolog of NCBI NO: 6469089 NR Description: nicotianamine aminotransferase [Hordeum vulgare
  misc_feature (5)..(408): Homolog of NCBI NO: 6498122 NR Description: nicotianamine aminotransferase A [Hordeum vulgare

SEQ ID NO: 94066 - protein, 394 aa, Arabidopsis thaliana; identical to SEQ ID NO: 90310
  peptide (1)..(394): Ceres Seq. ID no. 12723485
  misc_feature (66)..(383): Pfam Name: Aminotransferase class I and II Pfam Description: Aminotransferase class I and II
  misc_feature (1)..(394): Homolog of NCBI NO: 15239521 NR Description: tyrosine aminotransferase; protein id: [Arabidopsis thaliana] >gi|10177259|dbj|BAB10727.1| tyrosine [Arabidopsis thaliana] >gi|25054842|gb|AAN71911.1| putative
  misc_feature (1)..(394): Homolog of NCBI NO: 23397279 NR Description: putatative tyrosine aminotransferase [Arabidopsis
  misc_feature (1)..(387): Homolog of NCBI NO: 27525396 NR Description: tyrosine aminotransferase [Solenostemon
  misc_feature (1)..(390): Homolog of NCBI NO: 8777301 NR Description: tyrosine aminotransferase-like protein
  misc_feature (1)..(388): Homolog of NCBI NO: 11527943 NR Description: ROOTY/SUPERROOT1 [Arabidopsis thaliana]
  misc_feature (1)..(388): Homolog of NCBI NO: 11527941 NR Description: ROOTY/SUPERROOT1 [Arabidopsis thaliana]
  misc_feature (1)..(388): Homolog of NCBI NO: 15225387 NR Description: putative tyrosine aminotransferase; protein id: supported by cDNA: gi_11527938, supported by cDNA: gi_11527940,
  misc_feature (1)..(388): Homolog of NCBI NO: 15809874 NR Description: At2g20610/F23N11.7 [Arabidopsis thaliana]
  misc_feature (1)..(388): Homolog of NCBI NO: 6469089 NR Description: nicotianamine aminotransferase [Hordeum vulgare
  misc_feature (1)..(388): Homolog of NCBI NO: 6498122 NR Description: nicotianamine aminotransferase A [Hordeum vulgare

SEQ ID NO: 94067 - protein, 375 aa, Arabidopsis thaliana; identical to SEQ ID NO: 90311
  peptide (1)..(375): Ceres Seq. ID no. 12723486
  misc_feature (47)..(364): Pfam Name: Aminotransferase class I and II Pfam Description: Aminotransferase class I and II
  misc_feature (1)..(375): Homolog of NCBI NO: 15239521 NR Description: tyrosine aminotransferase; protein id: [Arabidopsis thaliana] >gi|10177259|dbj|BAB10727.1| tyrosine [Arabidopsis thaliana] >gi|25054842|gb|AAN71911.1| putative
  misc_feature (1)..(375): Homolog of NCBI NO: 23397279 NR Description: putatative tyrosine aminotransferase [Arabidopsis
  misc_feature (1)..(368): Homolog of NCBI NO: 27525396 NR Description: tyrosine aminotransferase [Solenostemon
  misc_feature (1)..(371): Homolog of NCBI NO: 8777301 NR Description: tyrosine aminotransferase-like protein
  misc_feature (1)..(369): Homolog of NCBI NO: 11527943 NR Description: ROOTY/SUPERROOT1 [Arabidopsis thaliana]
  misc_feature (1)..(369): Homolog of NCBI NO: 11527941 NR Description: ROOTY/SUPERROOT1 [Arabidopsis thaliana]
  misc_feature (1)..(369): Homolog of NCBI NO: 15225387 NR Description: putative tyrosine aminotransferase; protein id: supported by cDNA: gi_11527938, supported by cDNA: gi_11527940,
  misc_feature (1)..(369): Homolog of NCBI NO: 15809874 NR Description: At2g20610/F23N11.7 [Arabidopsis thaliana]
  misc_feature (1)..(369): Homolog of NCBI NO: 6469089 NR Description: nicotianamine aminotransferase [Hordeum vulgare
  misc_feature (1)..(369): Homolog of NCBI NO: 6498122 NR Description: nicotianamine aminotransferase A [Hordeum vulgare

SEQ ID NO: 94068 - DNA, 1050 bp, Arabidopsis thaliana; identical to SEQ ID NO: 90312
  misc_feature (1)..(1050): Ceres Seq. ID no. 12723494
  misc_feature: MA Experiment ID: 20000180 Result: Up-regulated in Transcription
  misc_feature: MA Experiment 20000180 PARAMETER Experiment Name: At_Germinating_Seeds_P Parameter: Age (hr) Value: 24 vs. 0
  misc_feature: MA Experiment 20000180 PARAMETER Experiment Name: At_Germinating_Seeds_P Parameter: Tissue Value: Germinating Seeds

SEQ ID NO: 94069 - protein, 349 aa, Arabidopsis thaliana; identical to SEQ ID NO: 90313
  peptide (1)..(349): Ceres Seq. ID no. 12723495
  misc_feature (202)..(302): Pfam Name: 2OG-Fe(II) oxygenase superfamily Pfam Description: 2OG-Fe(II) oxygenase superfamily
  misc_feature (1)..(349): Homolog of NCBI NO: 15239524 NR Description: ethylene-forming-enzyme-like dioxygenase; protein
  misc_feature (1)..(349): Homolog of NCBI NO: 21593366 NR Description: ethylene-forming-enzyme-like dioxygenase-like
  misc_feature (1)..(349): Homolog of NCBI NO: 15241348 NR Description: ethylene-forming-enzyme-like dioxygenase-like protein id: At5g20400.1, supported by cDNA: 38372. [Arabidopsis
  misc_feature (1)..(349): Homolog of NCBI NO: 15222131 NR Description: flavonol synthase, putative; protein id: [Arabidopsis thaliana] >gi|25285686|pir||C96530 hypothetical
  misc_feature (1)..(349): Homolog of NCBI NO: 15241383 NR Description: ethylene-forming-enzyme-like dioxygenase - like;
  misc_feature (8)..(349): Homolog of NCBI NO: 2688828 NR Description: ethylene-forming-enzyme-like dioxygenase [Prunus
  misc_feature (9)..(349): Homolog of NCBI NO: 24413984 NR Description: ethylene-forming-enzyme-like dioxygenase-like
  misc_feature (9)..(330): Homolog of NCBI NO: 24413982 NR Description: ethylene-forming-enzyme-like dioxygenase-like
  misc_feature (9)..(336): Homolog of NCBI NO: 34898470 NR Description: ESTs D47168(S12332),D46350(S10967) correspond to
  misc_feature (5)..(345): Homolog of NCBI NO: 33115140 NR Description: iron/ascorbate-dependent oxidoreductase [Hordeum

SEQ ID NO: 94070 - protein, 306 aa, Arabidopsis thaliana; identical to SEQ ID NO: 90314
  peptide (1)..(306): Ceres Seq. ID no. 12723496
  misc_feature (159)..(259): Pfam Name: 2OG-Fe(II) oxygenase superfamily Pfam Description: 2OG-Fe(II) oxygenase superfamily
  misc_feature (1)..(306): Homolog of NCBI NO: 15239524 NR Description: ethylene-forming-enzyme-like dioxygenase; protein
  misc_feature (1)..(306): Homolog of NCBI NO: 21593366 NR Description: ethylene-forming-enzyme-like dioxygenase-like
  misc_feature (1)..(306): Homolog of NCBI NO: 15241348 NR Description: ethylene-forming-enzyme-like dioxygenase-like protein id: At5g20400.1, supported by cDNA: 38372. [Arabidopsis
  misc_feature (1)..(306): Homolog of NCBI NO: 15222131 NR Description: flavonol synthase, putative; protein id: [Arabidopsis thaliana] >gi|25285686|pir||C96530 hypothetical
  misc_feature (1)..(306): Homolog of NCBI NO: 15241383 NR Description: ethylene-forming-enzyme-like dioxygenase - like;
  misc_feature (1)..(306): Homolog of NCBI NO: 2688828 NR Description: ethylene-forming-enzyme-like dioxygenase [Prunus
  misc_feature (1)..(306): Homolog of NCBI NO: 24413984 NR Description: ethylene-forming-enzyme-like dioxygenase-like
  misc_feature (1)..(287): Homolog of NCBI NO: 24413982 NR Description: ethylene-forming-enzyme-like dioxygenase-like
  misc_feature (1)..(293): Homolog of NCBI NO: 34898470 NR Description: ESTs D47168(S12332),D46350(S10967) correspond to
  misc_feature (1)..(302): Homolog of NCBI NO: 33115140 NR Description: iron/ascorbate-dependent oxidoreductase [Hordeum

SEQ ID NO: 94071 - protein, 269 aa, Arabidopsis thaliana; identical to SEQ ID NO: 90315
  peptide (1)..(269): Ceres Seq. ID no. 12723497
  misc_feature (122)..(222): Pfam Name: 2OG-Fe(II) oxygenase superfamily Pfam Description: 2OG-Fe(II) oxygenase superfamily
  misc_feature (1)..(269): Homolog of NCBI NO: 15239524 NR Description: ethylene-forming-enzyme-like dioxygenase; protein
  misc_feature (1)..(269): Homolog of NCBI NO: 21593366 NR Description: ethylene-forming-enzyme-like dioxygenase-like
  misc_feature (1)..(269): Homolog of NCBI NO: 15241348 NR Description: ethylene-forming-enzyme-like dioxygenase-like protein id: At5g20400.1, supported by cDNA: 38372. [Arabidopsis
  misc_feature (1)..(269): Homolog of NCBI NO: 15222131 NR Description: flavonol synthase, putative; protein id: [Arabidopsis thaliana] >gi|25285686|pir||C96530 hypothetical
  misc_feature (1)..(269): Homolog of NCBI NO: 15241383 NR Description: ethylene-forming-enzyme-like dioxygenase - like;
  misc_feature (1)..(269): Homolog of NCBI NO: 2688828 NR Description: ethylene-forming-enzyme-like dioxygenase [Prunus
  misc_feature (1)..(269): Homolog of NCBI NO: 24413984 NR Description: ethylene-forming-enzyme-like dioxygenase-like
  misc_feature (1)..(250): Homolog of NCBI NO: 24413982 NR Description: ethylene-forming-enzyme-like dioxygenase-like
  misc_feature (1)..(256): Homolog of NCBI NO: 34898470 NR Description: ESTs D47168(S12332),D46350(S10967) correspond to
  misc_feature (1)..(265): Homolog of NCBI NO: 33115140 NR Description: iron/ascorbate-dependent oxidoreductase [Hordeum

SEQ ID NO: 94072 - DNA, 1362 bp, Arabidopsis thaliana; identical to SEQ ID NO: 90316
  misc_feature (1)..(1362): Ceres Seq. ID no. 12723498
  misc_feature: MA Experiment ID: 20000440 Result: Up-regulated in Transcription
  misc_feature: MA Experiment 20000440 PARAMETER Experiment Name: At_Closed-Flower__Sub_P Parameter: Tissue Value: Closed Flower vs. Whole Plant

SEQ ID NO: 94073 - protein, 453 aa, Arabidopsis thaliana; identical to SEQ ID NO: 90317
  peptide (1)..(453): Ceres Seq. ID no. 12723499
  misc_feature (1)..(453): Homolog of NCBI NO: 15239525 NR Description: flavonol 3-O-glucosyltransferase-like protein;
  misc_feature (1)..(453): Homolog of NCBI NO: 15239523 NR Description: flavonol 3-O-glucosyltransferase-like protein; id: At5g53990.1, supported by cDNA: gi_17529305, supported by gi_20465446 [Arabidopsis thaliana] >gi|10177261|dbj|BAB10729.1|
  misc_feature (1)..(447): Homolog of NCBI NO: 15217796 NR Description: anthocyanidin-3-glucoside rhamnosyltransferase, protein id: At1g64920.1 [Arabidopsis thaliana]
  misc_feature (1)..(453): Homolog of NCBI NO: 15217773 NR Description: rhamnosyltransferase, putative; protein id:
  misc_feature (1)..(445): Homolog of NCBI NO: 15227766 NR Description: putative flavonol 3-O-glucosyltransferase;
  misc_feature (1)..(445): Homolog of NCBI NO: 15233903 NR Description: putative protein; protein id: At4g09500.1
  misc_feature (2)..(447): Homolog of NCBI NO: 15234196 NR Description: UDP rhamnose--anthocyanidin-3-glucoside
  misc_feature (2)..(451): Homolog of NCBI NO: 15234195 NR Description: UDP rhamnose-anthocyanidin-3-glucoside
  misc_feature (1)..(449): Homolog of NCBI NO: 15223589 NR Description: putative indole-3-acetate protein id: At1g50580.1 [Arabidopsis thaliana]
  misc_feature (1)..(451): Homolog of NCBI NO: 15230017 NR Description: flavonol 3-O-Glucosyltransferase, putative;

SEQ ID NO: 94074 - protein, 445 aa, Arabidopsis thaliana; identical to SEQ ID NO: 90318
  peptide (1)..(445): Ceres Seq. ID no. 12723500
  misc_feature (1)..(445): Homolog of NCBI NO: 15239525 NR Description: flavonol 3-O-glucosyltransferase-like protein;
  misc_feature (1)..(445): Homolog of NCBI NO: 15239523 NR Description: flavonol 3-O-glucosyltransferase-like protein; id: At5g53990.1, supported by cDNA: gi_17529305, supported by gi_20465446 [Arabidopsis thaliana] >gi|10177261|dbj|BAB10729.1|
  misc_feature (1)..(439): Homolog of NCBI NO: 15217796 NR Description: anthocyanidin-3-glucoside rhamnosyltransferase, protein id: At1g64920.1 [Arabidopsis thaliana]
  misc_feature (1)..(445): Homolog of NCBI NO: 15217773 NR Description: rhamnosyltransferase, putative; protein id:
  misc_feature (1)..(437): Homolog of NCBI NO: 15227766 NR Description: putative flavonol 3-O-glucosyltransferase;
  misc_feature (1)..(437): Homolog of NCBI NO: 15233903 NR Description: putative protein; protein id: At4g09500.1
  misc_feature (1)..(439): Homolog of NCBI NO: 15234196 NR Description: UDP rhamnose--anthocyanidin-3-glucoside
  misc_feature (1)..(443): Homolog of NCBI NO: 15234195 NR Description: UDP rhamnose-anthocyanidin-3-glucoside
  misc_feature (1)..(441): Homolog of NCBI NO: 15223589 NR Description: putative indole-3-acetate protein id: At1g50580.1 [Arabidopsis thaliana]
  misc_feature (1)..(443): Homolog of NCBI NO: 15230017 NR Description: flavonol 3-O-Glucosyltransferase, putative;

SEQ ID NO: 94075 - protein, 436 aa, Arabidopsis thaliana; identical to SEQ ID NO: 90319
  peptide (1)..(436): Ceres Seq. ID no. 12723501
  misc_feature (1)..(436): Homolog of NCBI NO: 15239525 NR Description: flavonol 3-O-glucosyltransferase-like protein;
  misc_feature (1)..(436): Homolog of NCBI NO: 15239523 NR Description: flavonol 3-O-glucosyltransferase-like protein; id: At5g53990.1, supported by cDNA: gi_17529305, supported by gi_20465446 [Arabidopsis thaliana] >gi|10177261|dbj|BAB10729.1|
  misc_feature (1)..(430): Homolog of NCBI NO: 15217796 NR Description: anthocyanidin-3-glucoside rhamnosyltransferase, protein id: At1g64920.1 [Arabidopsis thaliana]
  misc_feature (1)..(436): Homolog of NCBI NO: 15217773 NR Description: rhamnosyltransferase, putative; protein id:
  misc_feature (1)..(428): Homolog of NCBI NO: 15227766 NR Description: putative flavonol 3-O-glucosyltransferase;
  misc_feature (1)..(428): Homolog of NCBI NO: 15233903 NR Description: putative protein; protein id: At4g09500.1
  misc_feature (1)..(430): Homolog of NCBI NO: 15234196 NR Description: UDP rhamnose--anthocyanidin-3-glucoside
  misc_feature (1)..(434): Homolog of NCBI NO: 15234195 NR Description: UDP rhamnose-anthocyanidin-3-glucoside
  misc_feature (1)..(432): Homolog of NCBI NO: 15223589 NR Description: putative indole-3-acetate protein id: At1g50580.1 [Arabidopsis thaliana]
  misc_feature (1)..(434): Homolog of NCBI NO: 15230017 NR Description: flavonol 3-O-Glucosyltransferase, putative;

SEQ ID NO: 94076 - DNA, 1254 bp, Arabidopsis thaliana; identical to SEQ ID NO: 90320
  misc_feature (1)..(1254): Ceres Seq. ID no. 12723511
  misc_feature: MA Experiment ID: 20000184 Result: Up-regulated in Transcription
  misc_feature: MA Experiment 20000184 PARAMETER Experiment Name: At_Shoots__P Parameter: Age (day) Value: 7
  misc_feature: MA Experiment 20000184 PARAMETER Experiment Name: At_Shoots__P Parameter: Tissue Value: Shoots vs. Whole Plant
  misc_feature: MA Experiment ID: 20000185 Result: Down-regulated in Transcription
  misc_feature: MA Experiment 20000185 PARAMETER Experiment Name: At_Roots__P Parameter: Age (day) Value: 7 vs. 21
  misc_feature: MA Experiment 20000185 PARAMETER Experiment Name: At_Roots__P Parameter: Organism Value: A. thaliana
  misc_feature: MA Experiment 20000185 PARAMETER Experiment Name: At_Roots__P Parameter: Tissue Value: Roots vs. Whole Plant
  misc_feature: MA Experiment ID: 20000453 Result: Down-regulated in Transcription
  misc_feature: MA Experiment 20000453 PARAMETER Experiment Name: At_100uM_ABA_P Parameter: Age (day) Value: 15
  misc_feature: MA Experiment 20000453 PARAMETER Experiment Name: At_100uM_ABA_P Parameter: Organism Value: A. thaliana
  misc_feature: MA Experiment 20000453 PARAMETER Experiment Name: At_100uM_ABA_P Parameter: Plant Line Value: WS
  misc_feature: MA Experiment 20000453 PARAMETER Experiment Name: At_100uM_ABA_P Parameter: Timepoint (hr) Value: 24
  misc_feature: MA Experiment 20000453 PARAMETER Experiment Name: At_100uM_ABA_P Parameter: Tissue Value: Aerial
  misc_feature: MA Experiment 20000453 PARAMETER Experiment Name: At_100uM_ABA_P Parameter: Treatment Value: 100uM ABA vs. No Treatment
  misc_feature: MA Experiment ID: 20000495 Result: Down-regulated in Transcription
  misc_feature: MA Experiment 20000495 PARAMETER Experiment Name: At_Guard_Cells_P Parameter: Harvest Date Value: 8/2/2002
  misc_feature: MA Experiment 20000495 PARAMETER Experiment Name: At_Guard_Cells_P Parameter: Organism Value: A. thaliana
  misc_feature: MA Experiment 20000495 PARAMETER Experiment Name: At_Guard_Cells_P Parameter: Tissue Value: Guard Cells vs. Leaves
  misc_feature: MA Experiment ID: 20001557 Result: Down-regulated in Transcription
  misc_feature: MA Experiment 20001557 PARAMETER Experiment Name: At_Drought_Soil_Dry_P Parameter: Age (day) Value: 27
  misc_feature: MA Experiment 20001557 PARAMETER Experiment Name: At_Drought_Soil_Dry_P Parameter: Organism Value: A. thaliana
  misc_feature: MA Experiment 20001557 PARAMETER Experiment Name: At_Drought_Soil_Dry_P Parameter: Plant Line Value: WS
  misc_feature: MA Experiment 20001557 PARAMETER Experiment Name: At_Drought_Soil_Dry_P Parameter: Post Timepoint (hr) Value: 3
  misc_feature: MA Experiment 20001557 PARAMETER Experiment Name: At_Drought_Soil_Dry_P Parameter: Post-Treatment Value: Re-Water vs. No Drought
  misc_feature: MA Experiment 20001557 PARAMETER Experiment Name: At_Drought_Soil_Dry_P Parameter: Timepoint (day) Value: 13
  misc_feature: MA Experiment 20001557 PARAMETER Experiment Name: At_Drought_Soil_Dry_P Parameter: Treatment Value: Drought vs. No Drought
  misc_feature: MA Experiment ID: 20001558 Result: Down-regulated in Transcription
  misc_feature: MA Experiment 20001558 PARAMETER Experiment Name: At_Drought_Soil_Dry_P Parameter: Age (day) Value: 27
  misc_feature: MA Experiment 20001558 PARAMETER Experiment Name: At_Drought_Soil_Dry_P Parameter: Organism Value: A. thaliana
  misc_feature: MA Experiment 20001558 PARAMETER Experiment Name: At_Drought_Soil_Dry_P Parameter: Plant Line Value: WS
  misc_feature: MA Experiment 20001558 PARAMETER Experiment Name: At_Drought_Soil_Dry_P Parameter: Post Timepoint (hr) Value: 6
  misc_feature: MA Experiment 20001558 PARAMETER Experiment Name: At_Drought_Soil_Dry_P Parameter: Post-Treatment Value: Re-Water vs. No Drought
  misc_feature: MA Experiment 20001558 PARAMETER Experiment Name: At_Drought_Soil_Dry_P Parameter: Timepoint (day) Value: 13
  misc_feature: MA Experiment 20001558 PARAMETER Experiment Name: At_Drought_Soil_Dry_P Parameter: Treatment Value: Drought vs. No Drought

SEQ ID NO: 94077 - protein, 331 aa, Arabidopsis thaliana; identical to SEQ ID NO: 90321
  peptide (1)..(331): Ceres Seq. ID no. 12723512
  misc_feature (70)..(233): Pfam Name: HSF-type DNA-binding Pfam Description: HSF-type DNA-binding
  misc_feature (1)..(331): Homolog of NCBI NO: 15239544 NR Description: putative protein; protein id: At5g54070.1, by cDNA: gi_17528983, supported by cDNA: gi_20465484 [Arabidopsis
  misc_feature (43)..(259): Homolog of NCBI NO: 729774 NR Description: HEAT SHOCK FACTOR PROTEIN HSF30 (HEAT SHOCK FACTOR 30) (HSTF 30) (HEAT STRESS TRANSCRIPTION FACTOR)
  misc_feature (178)..(273): Homolog of NCBI NO: 729775 NR Description: HEAT SHOCK FACTOR PROTEIN HSF8 (HEAT SHOCK FACTOR 8) (HSTF 8) (HEAT STRESS TRANSCRIPTION FACTOR)
  misc_feature (71)..(161): Homolog of NCBI NO: 729775 NR Description: HEAT SHOCK FACTOR PROTEIN HSF8 (HEAT SHOCK FACTOR 8) (HSTF 8) (HEAT STRESS TRANSCRIPTION FACTOR)
  misc_feature (178)..(273): Homolog of NCBI NO: 11386827 NR Description: Heat shock factor protein HSF8 (Heat shock factor 8) (HSTF 8) (Heat stress transcription factor)
  misc_feature (71)..(161): Homolog of NCBI NO: 11386827 NR Description: Heat shock factor protein HSF8 (Heat shock factor 8) (HSTF 8) (Heat stress transcription factor)
  misc_feature (7)..(325): Homolog of NCBI NO: 25052685 NR Description: heat stress transcription factor HSFA9
  misc_feature (69)..(282): Homolog of NCBI NO: 11357326 NR Description: heat shock transcription factor-like protein -
  misc_feature (69)..(282): Homolog of NCBI NO: 22326589 NR Description: heat shock transcription factor -like protein;
  misc_feature (63)..(286): Homolog of NCBI NO: 15225255 NR Description: putative heat shock transcription factor; protein At2g26150.1 [Arabidopsis thaliana] >gi|7485001|pir||T02609

SEQ ID NO: 94078 - DNA, 1572 bp, Arabidopsis thaliana; identical to SEQ ID NO: 90322
  misc_feature (1)..(1572): Ceres Seq. ID no. 12723521
  misc_feature: MA Experiment ID: 20000265 Result: Up-regulated in Transcription
  misc_feature: MA Experiment 20000265 PARAMETER Experiment Name: At_Open_Flower_P Parameter: Age (day) Value: 21
  misc_feature: MA Experiment 20000265 PARAMETER Experiment Name: At_Open_Flower_P Parameter: Plant Line Value: WS
  misc_feature: MA Experiment 20000265 PARAMETER Experiment Name: At_Open_Flower_P Parameter: Tissue Value: Closed Flower vs. Whole Plant
  misc_feature: MA Experiment ID: 20000286 Result: Up-regulated in Transcription
  misc_feature: MA Experiment 20000286 PARAMETER Experiment Name: At_Open_Flower_P Parameter: Age (day) Value: 21
  misc_feature: MA Experiment 20000286 PARAMETER Experiment Name: At_Open_Flower_P Parameter: Plant Line Value: WS
  misc_feature: MA Experiment 20000286 PARAMETER Experiment Name: At_Open_Flower_P Parameter: Tissue Value: Half Open vs. Whole Plant
  misc_feature: MA Experiment ID: 20000438 Result: Down-regulated in Transcription
  misc_feature: MA Experiment 20000438 PARAMETER Experiment Name: At_Shoots__P Parameter: Age (day) Value: 14
  misc_feature: MA Experiment 20000438 PARAMETER Experiment Name: At_Shoots__P Parameter: Tissue Value: Shoots vs. Whole Plant
  misc_feature: MA Experiment ID: 20001910 Result: Down-regulated in Transcription
  misc_feature: MA Experiment 20001910 PARAMETER Experiment Name: At_Drought_Reproduction_P Parameter: Age (day) Value: 37
  misc_feature: MA Experiment 20001910 PARAMETER Experiment Name: At_Drought_Reproduction_P Parameter: Organism Value: A. thaliana
  misc_feature: MA Experiment 20001910 PARAMETER Experiment Name: At_Drought_Reproduction_P Parameter: Plant Line Value: WS
  misc_feature: MA Experiment 20001910 PARAMETER Experiment Name: At_Drought_Reproduction_P Parameter: Timepoint (day) Value: 7
  misc_feature: MA Experiment 20001910 PARAMETER Experiment Name: At_Drought_Reproduction_P Parameter: Tissue Value: Flowers
  misc_feature: MA Experiment 20001910 PARAMETER Experiment Name: At_Drought_Reproduction_P Parameter: Treatment Value: Drought vs. No Drought

SEQ ID NO: 94079 - protein, 523 aa, Arabidopsis thaliana; identical to SEQ ID NO: 90323
  peptide (1)..(523): Ceres Seq. ID no. 12723522
  misc_feature (70)..(229): Pfam Name: FAD binding domain Pfam Description: FAD binding domain
  misc_feature (1)..(523): Homolog of NCBI NO: 15241997 NR Description: cytokinin oxidase; protein id: At5g56970.1, by cDNA: gi_11120509 [Arabidopsis thaliana] Cytokinin oxidase 3 precursor (CKO 3) >gi|8777437|dbj|BAA97027.1|
  misc_feature (16)..(517): Homolog of NCBI NO: 11558277 NR Description: cytokinin oxidase [Dendrobium cv. 'Sonia']
  misc_feature (13)..(517): Homolog of NCBI NO: 15233677 NR Description: cytokinin oxidase - like protein; protein id: supported by cDNA: gi_11120511, supported by cDNA: gi_15450760 thaliana] >gi|20137961|sp|Q9FUJ2|CKX4_ARATH Cytokinin oxidase
  misc_feature (54)..(517): Homolog of NCBI NO: 11120512 NR Description: cytokinin oxidase [Arabidopsis thaliana]
  misc_feature (5)..(517): Homolog of NCBI NO: 18399056 NR Description: putative cytokinin oxidase; protein id: supported by cDNA: gi_11120507 [Arabidopsis thaliana] Cytokinin oxidase 2 precursor (CKO 2) >gi|20197481|gb|AAD10149.2|
  misc_feature (5)..(517): Homolog of NCBI NO: 11120508 NR Description: cytokinin oxidase [Arabidopsis thaliana]
  misc_feature (20)..(518): Homolog of NCBI NO: 22330649 NR Description: cytokinin oxidase, putative; protein id:
  misc_feature (20)..(518): Homolog of NCBI NO: 11120516 NR Description: cytokinin oxidase [Arabidopsis thaliana]
  misc_feature (5)..(517): Homolog of NCBI NO: 25345685 NR Description: probable cytokinin oxidase [imported] -
  misc_feature (51)..(519): Homolog of NCBI NO: 15227374 NR Description: putative cytokinin oxidase; protein id: [Arabidopsis thaliana] >gi|7487602|pir||T00807 probable cytokinin

SEQ ID NO: 94080 - protein, 403 aa, Arabidopsis thaliana; identical to SEQ ID NO: 90324
  peptide (1)..(403): Ceres Seq. ID no. 12723523
  misc_feature (1)..(109): Pfam Name: FAD binding domain Pfam Description: FAD binding domain
  misc_feature (1)..(403): Homolog of NCBI NO: 15241997 NR Description: cytokinin oxidase; protein id: At5g56970.1, by cDNA: gi_11120509 [Arabidopsis thaliana] Cytokinin oxidase 3 precursor (CKO 3) >gi|8777437|dbj|BAA97027.1|
  misc_feature (1)..(397): Homolog of NCBI NO: 11558277 NR Description: cytokinin oxidase [Dendrobium cv. 'Sonia']
  misc_feature (1)..(397): Homolog of NCBI NO: 15233677 NR Description: cytokinin oxidase - like protein; protein id: supported by cDNA: gi_11120511, supported by cDNA: gi_15450760 thaliana] >gi|20137961|sp|Q9FUJ2|CKX4_ARATH Cytokinin oxidase
  misc_feature (1)..(397): Homolog of NCBI NO: 11120512 NR Description: cytokinin oxidase [Arabidopsis thaliana]
  misc_feature (1)..(397): Homolog of NCBI NO: 18399056 NR Description: putative cytokinin oxidase; protein id: supported by cDNA: gi_11120507 [Arabidopsis thaliana] Cytokinin oxidase 2 precursor (CKO 2) >gi|20197481|gb|AAD10149.2|
  misc_feature (1)..(397): Homolog of NCBI NO: 11120508 NR Description: cytokinin oxidase [Arabidopsis thaliana]
  misc_feature (1)..(398): Homolog of NCBI NO: 22330649 NR Description: cytokinin oxidase, putative; protein id:
  misc_feature (1)..(398): Homolog of NCBI NO: 11120516 NR Description: cytokinin oxidase [Arabidopsis thaliana]
  misc_feature (1)..(397): Homolog of NCBI NO: 25345685 NR Description: probable cytokinin oxidase [imported] -
  misc_feature (1)..(399): Homolog of NCBI NO: 15227374 NR Description: putative cytokinin oxidase; protein id: [Arabidopsis thaliana] >gi|7487602|pir||T00807 probable cytokinin

SEQ ID NO: 94081 - protein, 400 aa, Arabidopsis thaliana; identical to SEQ ID NO: 90325
  peptide (1)..(400): Ceres Seq. ID no. 12723524
  misc_feature (1)..(106): Pfam Name: FAD binding domain Pfam Description: FAD binding domain
  misc_feature (1)..(400): Homolog of NCBI NO: 15241997 NR Description: cytokinin oxidase; protein id: At5g56970.1, by cDNA: gi_11120509 [Arabidopsis thaliana] Cytokinin oxidase 3 precursor (CKO 3) >gi|8777437|dbj|BAA97027.1|
  misc_feature (1)..(394): Homolog of NCBI NO: 11558277 NR Description: cytokinin oxidase [Dendrobium cv. 'Sonia']
  misc_feature (1)..(394): Homolog of NCBI NO: 15233677 NR Description: cytokinin oxidase - like protein; protein id: supported by cDNA: gi_11120511, supported by cDNA: gi_15450760 thaliana] >gi|20137961|sp|Q9FUJ2|CKX4_ARATH Cytokinin oxidase
  misc_feature (1)..(394): Homolog of NCBI NO: 11120512 NR Description: cytokinin oxidase [Arabidopsis thaliana]
  misc_feature (1)..(394): Homolog of NCBI NO: 18399056 NR Description: putative cytokinin oxidase; protein id: supported by cDNA: gi_11120507 [Arabidopsis thaliana] Cytokinin oxidase 2 precursor (CKO 2) >gi|20197481|gb|AAD10149.2|
  misc_feature (1)..(394): Homolog of NCBI NO: 11120508 NR Description: cytokinin oxidase [Arabidopsis thaliana]
  misc_feature (1)..(395): Homolog of NCBI NO: 22330649 NR Description: cytokinin oxidase, putative; protein id:
  misc_feature (1)..(395): Homolog of NCBI NO: 11120516 NR Description: cytokinin oxidase [Arabidopsis thaliana]
  misc_feature (1)..(394): Homolog of NCBI NO: 25345685 NR Description: probable cytokinin oxidase [imported] -
  misc_feature (1)..(396): Homolog of NCBI NO: 15227374 NR Description: putative cytokinin oxidase; protein id: [Arabidopsis thaliana] >gi|7487602|pir||T00807 probable cytokinin

SEQ ID NO: 94082 - DNA, 1886 bp, Arabidopsis thaliana; identical to SEQ ID NO: 90326
  misc_feature (1)..(1886): Ceres Seq. ID no. 12723537
  misc_feature: MA Experiment ID: 20000346 Result: Up-regulated in Transcription
  misc_feature: MA Experiment 20000346 PARAMETER Experiment Name: At_2mM_SA_Sub_P Parameter: Age (day) Value: 14
  misc_feature: MA Experiment 20000346 PARAMETER Experiment Name: At_2mM_SA_Sub_P Parameter: Organism Value: A. thaliana
  misc_feature: MA Experiment 20000346 PARAMETER Experiment Name: At_2mM_SA_Sub_P Parameter: Plant Line Value: WS
  misc_feature: MA Experiment 20000346 PARAMETER Experiment Name: At_2mM_SA_Sub_P Parameter: Timepoint (hr) Value: 1
  misc_feature: MA Experiment 20000346 PARAMETER Experiment Name: At_2mM_SA_Sub_P Parameter: Tissue Value: Aerial
  misc_feature: MA Experiment 20000346 PARAMETER Experiment Name: At_2mM_SA_Sub_P Parameter: Treatment Value: 2mM SA vs. No Treatment
  misc_feature: MA Experiment ID: 20000347 Result: Up-regulated in Transcription
  misc_feature: MA Experiment 20000347 PARAMETER Experiment Name: At_2mM_SA_Sub_P Parameter: Age (day) Value: 14
  misc_feature: MA Experiment 20000347 PARAMETER Experiment Name: At_2mM_SA_Sub_P Parameter: Organism Value: A. thaliana
  misc_feature: MA Experiment 20000347 PARAMETER Experiment Name: At_2mM_SA_Sub_P Parameter: Plant Line Value: WS
  misc_feature: MA Experiment 20000347 PARAMETER Experiment Name: At_2mM_SA_Sub_P Parameter: Timepoint (hr) Value: 6
  misc_feature: MA Experiment 20000347 PARAMETER Experiment Name: At_2mM_SA_Sub_P Parameter: Tissue Value: Aerial
  misc_feature: MA Experiment 20000347 PARAMETER Experiment Name: At_2mM_SA_Sub_P Parameter: Treatment Value: 2mM SA vs. No Treatment
  misc_feature: MA Experiment ID: 20000348 Result: Up-regulated in Transcription
  misc_feature: MA Experiment 20000348 PARAMETER Experiment Name: At_100uM_ABA_Sub_P Parameter: Age (day) Value: 14
  misc_feature: MA Experiment 20000348 PARAMETER Experiment Name: At_100uM_ABA_Sub_P Parameter: Organism Value: A. thaliana
  misc_feature: MA Experiment 20000348 PARAMETER Experiment Name: At_100uM_ABA_Sub_P Parameter: Plant Line Value: WS
  misc_feature: MA Experiment 20000348 PARAMETER Experiment Name: At_100uM_ABA_Sub_P Parameter: Timepoint (hr) Value: 1
  misc_feature: MA Experiment 20000348 PARAMETER Experiment Name: At_100uM_ABA_Sub_P Parameter: Tissue Value: Aerial
  misc_feature: MA Experiment 20000348 PARAMETER Experiment Name: At_100uM_ABA_Sub_P Parameter: Treatment Value: 100uM ABA vs. No Treatment
  misc_feature: MA Experiment ID: 20000349 Result: Up-regulated in Transcription
  misc_feature: MA Experiment 20000349 PARAMETER Experiment Name: At_100uM_ABA_Sub_P Parameter: Age (day) Value: 14
  misc_feature: MA Experiment 20000349 PARAMETER Experiment Name: At_100uM_ABA_Sub_P Parameter: Organism Value: A. thaliana
  misc_feature: MA Experiment 20000349 PARAMETER Experiment Name: At_100uM_ABA_Sub_P Parameter: Plant Line Value: WS
  misc_feature: MA Experiment 20000349 PARAMETER Experiment Name: At_100uM_ABA_Sub_P Parameter: Timepoint (hr) Value: 6
  misc_feature: MA Experiment 20000349 PARAMETER Experiment Name: At_100uM_ABA_Sub_P Parameter: Tissue Value: Aerial
  misc_feature: MA Experiment 20000349 PARAMETER Experiment Name: At_100uM_ABA_Sub_P Parameter: Treatment Value: 100uM ABA vs. No Treatment
  misc_feature: MA Experiment ID: 20000352 Result: Up-regulated in Transcription
  misc_feature: MA Experiment 20000352 PARAMETER Experiment Name: At_Drought_Sub_P Parameter: Age (day) Value: 7
  misc_feature: MA Experiment 20000352 PARAMETER Experiment Name: At_Drought_Sub_P Parameter: Organism Value: A. thaliana
  misc_feature: MA Experiment 20000352 PARAMETER Experiment Name: At_Drought_Sub_P Parameter: Plant Line Value: WS
  misc_feature: MA Experiment 20000352 PARAMETER Experiment Name: At_Drought_Sub_P Parameter: Timepoint (hr) Value: 6
  misc_feature: MA Experiment 20000352 PARAMETER Experiment Name: At_Drought_Sub_P Parameter: Tissue Value: Whole Plant
  misc_feature: MA Experiment 20000352 PARAMETER Experiment Name: At_Drought_Sub_P Parameter: Treatment Value: Drought vs. No Drought
  misc_feature: MA Experiment ID: 20001807 Result: Down-regulated in Transcription
  misc_feature: MA Experiment 20001807 PARAMETER Experiment Name: At_50mM_NH4NO3_L-to-H_Sub_P Parameter: Timepoint (hr) Value: 6
  misc_feature: MA Experiment 20001807 PARAMETER Experiment Name: At_50mM_NH4NO3_L-to-H_Sub_P Parameter: Tissue Value: Leaf
  misc_feature: MA Experiment 20001807 PARAMETER Experiment Name: At_50mM_NH4NO3_L-to-H_Sub_P Parameter: Treatment Value: 50mM NH4NO3 vs 100mM Mannitol

SEQ ID NO: 94083 - protein, 423 aa, Arabidopsis thaliana; identical to SEQ ID NO: 90327
  peptide (1)..(423): Ceres Seq. ID no. 12723538
  misc_feature (125)..(404): Pfam Name: Protein phosphatase 2C Pfam Description: Protein phosphatase 2C
  misc_feature (1)..(423): Homolog of NCBI NO: 15242022 NR Description: protein phosphatase 2C, ABI2; protein id: [Arabidopsis thaliana] >gi|3914239|sp|O04719|P2C2_ARATH Protein
  misc_feature (1)..(423): Homolog of NCBI NO: 509419 NR Description: ABI1 [Arabidopsis thaliana]
  misc_feature (1)..(423): Homolog of NCBI NO: 15236110 NR Description: protein phosphatase ABI1; protein id: supported by cDNA: gi_14334799, supported by cDNA: gi_549980 thaliana] >gi|21431817|sp|P49597|P2C1_ARATH Protein phosphatase
  misc_feature (1)..(423): Homolog of NCBI NO: 14334800 NR Description: putative protein phosphatase ABI1 [Arabidopsis
  misc_feature (101)..(421): Homolog of NCBI NO: 21902025 NR Description: protein phosphatase 2C-like protein [Oryza sativa
  misc_feature (36)..(419): Homolog of NCBI NO: 3643082 NR Description: protein phosphatase-2C; PP2C [Mesembryanthemum
  misc_feature (198)..(421): Homolog of NCBI NO: 3242077 NR Description: protein phosphatase 2C [Arabidopsis thaliana]
  misc_feature (198)..(421): Homolog of NCBI NO: 15218595 NR Description: protein phosphatase 2C (AtP2C-HA); protein id:
  misc_feature (186)..(421): Homolog of NCBI NO: 30685388 NR Description: protein phosphatase 2C (PP2C) -related
  misc_feature (186)..(421): Homolog of NCBI NO: 26452332 NR Description: unknown protein [Arabidopsis thaliana]

SEQ ID NO: 94084 - protein, 379 aa, Arabidopsis thaliana; identical to SEQ ID NO: 90328
  peptide (1)..(379): Ceres Seq. ID no. 12723539
  misc_feature (81)..(360): Pfam Name: Protein phosphatase 2C Pfam Description: Protein phosphatase 2C
  misc_feature (1)..(379): Homolog of NCBI NO: 15242022 NR Description: protein phosphatase 2C, ABI2; protein id: [Arabidopsis thaliana] >gi|3914239|sp|O04719|P2C2_ARATH Protein
  misc_feature (1)..(379): Homolog of NCBI NO: 509419 NR Description: ABI1 [Arabidopsis thaliana]
  misc_feature (1)..(379): Homolog of NCBI NO: 15236110 NR Description: protein phosphatase ABI1; protein id: supported by cDNA: gi_14334799, supported by cDNA: gi_549980 thaliana] >gi|21431817|sp|P49597|P2C1_ARATH Protein phosphatase
  misc_feature (1)..(379): Homolog of NCBI NO: 14334800 NR Description: putative protein phosphatase ABI1 [Arabidopsis
  misc_feature (57)..(377): Homolog of NCBI NO: 21902025 NR Description: protein phosphatase 2C-like protein [Oryza sativa
  misc_feature (1)..(375): Homolog of NCBI NO: 3643082 NR Description: protein phosphatase-2C; PP2C [Mesembryanthemum
  misc_feature (154)..(377): Homolog of NCBI NO: 3242077 NR Description: protein phosphatase 2C [Arabidopsis thaliana]
  misc_feature (154)..(377): Homolog of NCBI NO: 15218595 NR Description: protein phosphatase 2C (AtP2C-HA); protein id:
  misc_feature (142)..(377): Homolog of NCBI NO: 30685388 NR Description: protein phosphatase 2C (PP2C) -related
  misc_feature (142)..(377): Homolog of NCBI NO: 26452332 NR Description: unknown protein [Arabidopsis thaliana]

SEQ ID NO: 94085 - protein, 358 aa, Arabidopsis thaliana; identical to SEQ ID NO: 90329
  peptide (1)..(358): Ceres Seq. ID no. 12723540
  misc_feature (60)..(339): Pfam Name: Protein phosphatase 2C Pfam Description: Protein phosphatase 2C
  misc_feature (1)..(358): Homolog of NCBI NO: 15242022 NR Description: protein phosphatase 2C, ABI2; protein id: [Arabidopsis thaliana] >gi|3914239|sp|O04719|P2C2_ARATH Protein
  misc_feature (1)..(358): Homolog of NCBI NO: 509419 NR Description: ABI1 [Arabidopsis thaliana]
  misc_feature (1)..(358): Homolog of NCBI NO: 15236110 NR Description: protein phosphatase ABI1; protein id: supported by cDNA: gi_14334799, supported by cDNA: gi_549980 thaliana] >gi|21431817|sp|P49597|P2C1_ARATH Protein phosphatase
  misc_feature (1)..(358): Homolog of NCBI NO: 14334800 NR Description: putative protein phosphatase ABI1 [Arabidopsis
  misc_feature (36)..(356): Homolog of NCBI NO: 21902025 NR Description: protein phosphatase 2C-like protein [Oryza sativa
  misc_feature (1)..(354): Homolog of NCBI NO: 3643082 NR Description: protein phosphatase-2C; PP2C [Mesembryanthemum
  misc_feature (133)..(356): Homolog of NCBI NO: 3242077 NR Description: protein phosphatase 2C [Arabidopsis thaliana]
  misc_feature (133)..(356): Homolog of NCBI NO: 15218595 NR Description: protein phosphatase 2C (AtP2C-HA); protein id:
  misc_feature (121)..(356): Homolog of NCBI NO: 30685388 NR Description: protein phosphatase 2C (PP2C) -related
  misc_feature (121)..(356): Homolog of NCBI NO: 26452332 NR Description: unknown protein [Arabidopsis thaliana]

SEQ ID NO: 94086 - DNA, 1720 bp, Arabidopsis thaliana; identical to SEQ ID NO: 90330
  misc_feature (1)..(1720): Ceres Seq. ID no. 12723568
  misc_feature: MA Experiment ID: 20000179 Result: Down-regulated in Transcription
  misc_feature: MA Experiment 20000179 PARAMETER Experiment Name: At_Germinating_Seeds_P Parameter: Age (hr) Value: 6 vs. 0
  misc_feature: MA Experiment 20000179 PARAMETER Experiment Name: At_Germinating_Seeds_P Parameter: Tissue Value: Germinating Seeds
  misc_feature: MA Experiment ID: 20000180 Result: Down-regulated in Transcription
  misc_feature: MA Experiment 20000180 PARAMETER Experiment Name: At_Germinating_Seeds_P Parameter: Age (hr) Value: 24 vs. 0
  misc_feature: MA Experiment 20000180 PARAMETER Experiment Name: At_Germinating_Seeds_P Parameter: Tissue Value: Germinating Seeds
  misc_feature: MA Experiment ID: 20000184 Result: Down-regulated in Transcription
  misc_feature: MA Experiment 20000184 PARAMETER Experiment Name: At_Shoots__P Parameter: Age (day) Value: 7
  misc_feature: MA Experiment 20000184 PARAMETER Experiment Name: At_Shoots__P Parameter: Tissue Value: Shoots vs. Whole Plant
  misc_feature: MA Experiment ID: 20000185 Result: Down-regulated in Transcription
  misc_feature: MA Experiment 20000185 PARAMETER Experiment Name: At_Roots__P Parameter: Age (day) Value: 7 vs. 21
  misc_feature: MA Experiment 20000185 PARAMETER Experiment Name: At_Roots__P Parameter: Organism Value: A. thaliana
  misc_feature: MA Experiment 20000185 PARAMETER Experiment Name: At_Roots__P Parameter: Tissue Value: Roots vs. Whole Plant
  misc_feature: MA Experiment ID: 20000211 Result: Down-regulated in Transcription
  misc_feature: MA Experiment 20000211 PARAMETER Experiment Name: At_0.001percent_MeJA__P Parameter: Age (day) Value: 14
  misc_feature: MA Experiment 20000211 PARAMETER Experiment Name: At_0.001percent_MeJA__P Parameter: Organism Value: A. thaliana
  misc_feature: MA Experiment 20000211 PARAMETER Experiment Name: At_0.001percent_MeJA__P Parameter: Plant Line Value: WS
  misc_feature: MA Experiment 20000211 PARAMETER Experiment Name: At_0.001percent_MeJA__P Parameter: Timepoint (hr) Value: 1
  misc_feature: MA Experiment 20000211 PARAMETER Experiment Name: At_0.001percent_MeJA__P Parameter: Tissue Value: Aerial
  misc_feature: MA Experiment 20000211 PARAMETER Experiment Name: At_0.001percent_MeJA__P Parameter: Treatment Value: 0.001percent MeJA vs. No Treatment
  misc_feature: MA Experiment ID: 20000227 Result: Down-regulated in Transcription
  misc_feature: MA Experiment 20000227 PARAMETER Experiment Name: At_Root-Tips-vs-Tops_P Parameter: Tissue Value: Root Tips vs. Root Tops
  misc_feature: MA Experiment ID: 20000288 Result: Up-regulated in Transcription
  misc_feature: MA Experiment 20000288 PARAMETER Experiment Name: At_Drought_P Parameter: Age (day) Value: 7
  misc_feature: MA Experiment 20000288 PARAMETER Experiment Name: At_Drought_P Parameter: Organism Value: A. thaliana
  misc_feature: MA Experiment 20000288 PARAMETER Experiment Name: At_Drought_P Parameter: Plant Line Value: WS
  misc_feature: MA Experiment 20000288 PARAMETER Experiment Name: At_Drought_P Parameter: Timepoint (hr) Value: 1
  misc_feature: MA Experiment 20000288 PARAMETER Experiment Name: At_Drought_P Parameter: Tissue Value: Whole Plant
  misc_feature: MA Experiment 20000288 PARAMETER Experiment Name: At_Drought_P Parameter: Treatment Value: Drought vs. No Drought
  misc_feature: MA Experiment ID: 20000436 Result: Down-regulated in Transcription
  misc_feature: MA Experiment 20000436 PARAMETER Experiment Name: At_Drought_P Parameter: Age (day) Value: 7
  misc_feature: MA Experiment 20000436 PARAMETER Experiment Name: At_Drought_P Parameter: Organism Value: A. thaliana
  misc_feature: MA Experiment 20000436 PARAMETER Experiment Name: At_Drought_P Parameter: Plant Line Value: WS
  misc_feature: MA Experiment 20000436 PARAMETER Experiment Name: At_Drought_P Parameter: Timepoint (hr) Value: 12
  misc_feature: MA Experiment 20000436 PARAMETER Experiment Name: At_Drought_P Parameter: Tissue Value: Whole Plant
  misc_feature: MA Experiment 20000436 PARAMETER Experiment Name: At_Drought_P Parameter: Treatment Value: Drought vs. No Drought
  misc_feature: MA Experiment ID: 20000438 Result: Down-regulated in Transcription
  misc_feature: MA Experiment 20000438 PARAMETER Experiment Name: At_Shoots__P Parameter: Age (day) Value: 14
  misc_feature: MA Experiment 20000438 PARAMETER Experiment Name: At_Shoots__P Parameter: Tissue Value: Shoots vs. Whole Plant
  misc_feature: MA Experiment ID: 20000439 Result: Down-regulated in Transcription
  misc_feature: MA Experiment 20000439 PARAMETER Experiment Name: At_Roots__P Parameter: Age (day) Value: 14 vs. 21
  misc_feature: MA Experiment 20000439 PARAMETER Experiment Name: At_Roots__P Parameter: Organism Value: A. thaliana
  misc_feature: MA Experiment 20000439 PARAMETER Experiment Name: At_Roots__P Parameter: Tissue Value: Roots vs. Whole Plant
  misc_feature: MA Experiment ID: 20000451 Result: Up-regulated in Transcription
  misc_feature: MA Experiment 20000451 PARAMETER Experiment Name: At_CS6879_Shoots-Roots_P Parameter: Age (day) Value: 14
  misc_feature: MA Experiment 20000451 PARAMETER Experiment Name: At_CS6879_Shoots-Roots_P Parameter: Organism Value: A. thaliana
  misc_feature: MA Experiment 20000451 PARAMETER Experiment Name: At_CS6879_Shoots-Roots_P Parameter: Plant Line Value: CS6879 vs. WS
  misc_feature: MA Experiment 20000451 PARAMETER Experiment Name: At_CS6879_Shoots-Roots_P Parameter: Tissue Value: Roots
  misc_feature: MA Experiment ID: 20000456 Result: Up-regulated in Transcription
  misc_feature: MA Experiment 20000456 PARAMETER Experiment Name: At_100uM_BA_P Parameter: Age (day) Value: 14
  misc_feature: MA Experiment 20000456 PARAMETER Experiment Name: At_100uM_BA_P Parameter: Organism Value: A. thaliana
  misc_feature: MA Experiment 20000456 PARAMETER Experiment Name: At_100uM_BA_P Parameter: Plant Line Value: WS
  misc_feature: MA Experiment 20000456 PARAMETER Experiment Name: At_100uM_BA_P Parameter: Timepoint (hr) Value: 6
  misc_feature: MA Experiment 20000456 PARAMETER Experiment Name: At_100uM_BA_P Parameter: Tissue Value: Aerial
  misc_feature: MA Experiment 20000456 PARAMETER Experiment Name: At_100uM_BA_P Parameter: Treatment Value: 100uM BA vs. No Treatment
  misc_feature: MA Experiment ID: 20000460 Result: Up-regulated in Transcription
  misc_feature: MA Experiment 20000460 PARAMETER Experiment Name: At_10percent_PEG_P Parameter: Age (day) Value: 12
  misc_feature: MA Experiment 20000460 PARAMETER Experiment Name: At_10percent_PEG_P Parameter: Organism Value: A. thaliana
  misc_feature: MA Experiment 20000460 PARAMETER Experiment Name: At_10percent_PEG_P Parameter: Plant Line Value: WS
  misc_feature: MA Experiment 20000460 PARAMETER Experiment Name: At_10percent_PEG_P Parameter: Timepoint (day) Value: 12
  misc_feature: MA Experiment 20000460 PARAMETER Experiment Name: At_10percent_PEG_P Parameter: Tissue Value: Whole Plant
  misc_feature: MA Experiment 20000460 PARAMETER Experiment Name: At_10percent_PEG_P Parameter: Treatment Value: 10percent PEG vs. No Treatment
  misc_feature: MA Experiment ID: 20000576 Result: Down-regulated in Transcription
  misc_feature: MA Experiment 20000576 PARAMETER Experiment Name: At_100uM_ABA_Mutants__P Parameter: Organism Value: A. thaliana
  misc_feature: MA Experiment 20000576 PARAMETER Experiment Name: At_100uM_ABA_Mutants__P Parameter: Plant Line Value: CS23
  misc_feature: MA Experiment 20000576 PARAMETER Experiment Name: At_100uM_ABA_Mutants__P Parameter: Timepoint (hr) Value: 6
  misc_feature: MA Experiment 20000576 PARAMETER Experiment Name: At_100uM_ABA_Mutants__P Parameter: Tissue Value: Whole Plant
  misc_feature: MA Experiment 20000576 PARAMETER Experiment Name: At_100uM_ABA_Mutants__P Parameter: Treatment Value: 1uM ABA vs. No Treatment
  misc_feature: MA Experiment ID: 20000606 Result: Up-regulated in Transcription
  misc_feature: MA Experiment 20000606 PARAMETER Experiment Name: At_CS8548_Mutant_P Parameter: Age (day) Value: 14
  misc_feature: MA Experiment 20000606 PARAMETER Experiment Name: At_CS8548_Mutant_P Parameter: Plant Line Value: CS8548 vs. wt
  misc_feature: MA Experiment 20000606 PARAMETER Experiment Name: At_CS8548_Mutant_P Parameter: Tissue Value: Whole Plant
  misc_feature: MA Experiment ID: 20001247 Result: Up-regulated in Transcription
  misc_feature: MA Experiment 20001247 PARAMETER Experiment Name: At_Far-red-induction_P Parameter: Age (day) Value: 7
  misc_feature: MA Experiment 20001247 PARAMETER Experiment Name: At_Far-red-induction_P Parameter: Light Value: Far-red vs. White
  misc_feature: MA Experiment 20001247 PARAMETER Experiment Name: At_Far-red-induction_P Parameter: Organism Value: A. thaliana
  misc_feature: MA Experiment 20001247 PARAMETER Experiment Name: At_Far-red-induction_P Parameter: Plant Line Value: Columbia
  misc_feature: MA Experiment 20001247 PARAMETER Experiment Name: At_Far-red-induction_P Parameter: Timepoint (hr) Value: 1
  misc_feature: MA Experiment 20001247 PARAMETER Experiment Name: At_Far-red-induction_P Parameter: Tissue Value: Whole Plant
  misc_feature: MA Experiment ID: 20001248 Result: Up-regulated in Transcription
  misc_feature: MA Experiment 20001248 PARAMETER Experiment Name: At_Far-red-induction_P Parameter: Age (day) Value: 7
  misc_feature: MA Experiment 20001248 PARAMETER Experiment Name: At_Far-red-induction_P Parameter: Light Value: Far-red vs. White
  misc_feature: MA Experiment 20001248 PARAMETER Experiment Name: At_Far-red-induction_P Parameter: Organism Value: A. thaliana
  misc_feature: MA Experiment 20001248 PARAMETER Experiment Name: At_Far-red-induction_P Parameter: Plant Line Value: Columbia
  misc_feature: MA Experiment 20001248 PARAMETER Experiment Name: At_Far-red-induction_P Parameter: Timepoint (hr) Value: 4
  misc_feature: MA Experiment 20001248 PARAMETER Experiment Name: At_Far-red-induction_P Parameter: Tissue Value: Whole Plant
  misc_feature: MA Experiment ID: 20001755 Result: Up-regulated in Transcription
  misc_feature: MA Experiment 20001755 PARAMETER Experiment Name: At_50mM_NH4NO3_L-to-H_P Parameter: Timepoint (hr) Value: 2
  misc_feature: MA Experiment 20001755 PARAMETER Experiment Name: At_50mM_NH4NO3_L-to-H_P Parameter: Tissue Value: Leaf
  misc_feature: MA Experiment 20001755 PARAMETER Experiment Name: At_50mM_NH4NO3_L-to-H_P Parameter: Treatment Value: 50mM NH4NO3 vs 100mM Mannitol
  misc_feature: MA Experiment ID: 20001904 Result: Down-regulated in Transcription
  misc_feature: MA Experiment 20001904 PARAMETER Experiment Name: At_Drought_Reproduction_P Parameter: Age (day) Value: 37
  misc_feature: MA Experiment 20001904 PARAMETER Experiment Name: At_Drought_Reproduction_P Parameter: Organism Value: A. thaliana
  misc_feature: MA Experiment 20001904 PARAMETER Experiment Name: At_Drought_Reproduction_P Parameter: Plant Line Value: WS
  misc_feature: MA Experiment 20001904 PARAMETER Experiment Name: At_Drought_Reproduction_P Parameter: Timepoint (day) Value: 7
  misc_feature: MA Experiment 20001904 PARAMETER Experiment Name: At_Drought_Reproduction_P Parameter: Tissue Value: Rosettes
  misc_feature: MA Experiment 20001904 PARAMETER Experiment Name: At_Drought_Reproduction_P Parameter: Treatment Value: Drought vs. No Drought
  misc_feature: MA Experiment ID: 20001905 Result: Down-regulated in Transcription
  misc_feature: MA Experiment 20001905 PARAMETER Experiment Name: At_Drought_Reproduction_P Parameter: Age (day) Value: 40
  misc_feature: MA Experiment 20001905 PARAMETER Experiment Name: At_Drought_Reproduction_P Parameter: Organism Value: A. thaliana
  misc_feature: MA Experiment 20001905 PARAMETER Experiment Name: At_Drought_Reproduction_P Parameter: Plant Line Value: WS
  misc_feature: MA Experiment 20001905 PARAMETER Experiment Name: At_Drought_Reproduction_P Parameter: Timepoint (day) Value: 10
  misc_feature: MA Experiment 20001905 PARAMETER Experiment Name: At_Drought_Reproduction_P Parameter: Tissue Value: Rosettes
  misc_feature: MA Experiment 20001905 PARAMETER Experiment Name: At_Drought_Reproduction_P Parameter: Treatment Value: Drought vs. No Drought

SEQ ID NO: 94087 - protein, 491 aa, Arabidopsis thaliana; identical to SEQ ID NO: 90331
  peptide (1)..(491): Ceres Seq. ID no. 12723569
  misc_feature (31)..(478): Pfam Name: Cytochrome P450 Pfam Description: Cytochrome P450
  misc_feature (1)..(491): Homolog of NCBI NO: 15242068 NR Description: cytochrome p450 family; protein id: At5g57220.1, by cDNA: gi_17528949, supported by cDNA: gi_20465950 [Arabidopsis >gi|8777355|dbj|BAA96945.1| cytochrome P450 [Arabidopsis
  misc_feature (1)..(491): Homolog of NCBI NO: 18420031 NR Description: cytochrome p450 family; protein id: At4g37400.1,
  misc_feature (1)..(491): Homolog of NCBI NO: 21618287 NR Description: cytochrome P450 monooxygenase-like protein
  misc_feature (6)..(490): Homolog of NCBI NO: 15235559 NR Description: cytochrome p450 family; protein id: At4g37430.1, by cDNA: 33365., supported by cDNA: gi_14532439, supported by gi_3164143 [Arabidopsis thaliana]
  misc_feature (6)..(490): Homolog of NCBI NO: 21618274 NR Description: cytochrome P450 monooxygenase CYP91A2
  misc_feature (6)..(490): Homolog of NCBI NO: 25282605 NR Description: cytochrome P450 monooxygenase [imported] - thaliana >gi|3164144|dbj|BAA28539.1| cytochrome P450
  misc_feature (6)..(490): Homolog of NCBI NO: 18491105 NR Description: AT4g37430/F6G17_80 [Arabidopsis thaliana]
  misc_feature (6)..(473): Homolog of NCBI NO: 23397303 NR Description: putative cytochrome P450 monooxygenase (CYP91A2)
  misc_feature (2)..(491): Homolog of NCBI NO: 15235541 NR Description: cytochrome p450, putative; protein id: supported by cDNA: 102007. [Arabidopsis thaliana]
  misc_feature (2)..(451): Homolog of NCBI NO: 18252165 NR Description: cytochrome P450 monooxygenase - like protein

SEQ ID NO: 94088 - protein, 308 aa, Arabidopsis thaliana; identical to SEQ ID NO: 90332
  peptide (1)..(308): Ceres Seq. ID no. 12723570
  misc_feature (1)..(295): Pfam Name: Cytochrome P450 Pfam Description: Cytochrome P450
  misc_feature (1)..(308): Homolog of NCBI NO: 15242068 NR Description: cytochrome p450 family; protein id: At5g57220.1, by cDNA: gi_17528949, supported by cDNA: gi_20465950 [Arabidopsis >gi|8777355|dbj|BAA96945.1| cytochrome P450 [Arabidopsis
  misc_feature (1)..(308): Homolog of NCBI NO: 18420031 NR Description: cytochrome p450 family; protein id: At4g37400.1,
  misc_feature (1)..(308): Homolog of NCBI NO: 21618287 NR Description: cytochrome P450 monooxygenase-like protein
  misc_feature (1)..(307): Homolog of NCBI NO: 15235559 NR Description: cytochrome p450 family; protein id: At4g37430.1, by cDNA: 33365., supported by cDNA: gi_14532439, supported by gi_3164143 [Arabidopsis thaliana]
  misc_feature (1)..(307): Homolog of NCBI NO: 21618274 NR Description: cytochrome P450 monooxygenase CYP91A2
  misc_feature (1)..(307): Homolog of NCBI NO: 25282605 NR Description: cytochrome P450 monooxygenase [imported] - thaliana >gi|3164144|dbj|BAA28539.1| cytochrome P450
  misc_feature (1)..(307): Homolog of NCBI NO: 18491105 NR Description: AT4g37430/F6G17_80 [Arabidopsis thaliana]
  misc_feature (1)..(290): Homolog of NCBI NO: 23397303 NR Description: putative cytochrome P450 monooxygenase (CYP91A2)
  misc_feature (1)..(308): Homolog of NCBI NO: 15235541 NR Description: cytochrome p450, putative; protein id: supported by cDNA: 102007. [Arabidopsis thaliana]
  misc_feature (1)..(268): Homolog of NCBI NO: 18252165 NR Description: cytochrome P450 monooxygenase - like protein

SEQ ID NO: 94089 - protein, 247 aa, Arabidopsis thaliana; identical to SEQ ID NO: 90333
  peptide (1)..(247): Ceres Seq. ID no. 12723571
  misc_feature (1)..(234): Pfam Name: Cytochrome P450 Pfam Description: Cytochrome P450
  misc_feature (1)..(247): Homolog of NCBI NO: 15242068 NR Description: cytochrome p450 family; protein id: At5g57220.1, by cDNA: gi_17528949, supported by cDNA: gi_20465950 [Arabidopsis >gi|8777355|dbj|BAA96945.1| cytochrome P450 [Arabidopsis
  misc_feature (1)..(247): Homolog of NCBI NO: 18420031 NR Description: cytochrome p450 family; protein id: At4g37400.1,
  misc_feature (1)..(247): Homolog of NCBI NO: 21618287 NR Description: cytochrome P450 monooxygenase-like protein
  misc_feature (1)..(246): Homolog of NCBI NO: 15235559 NR Description: cytochrome p450 family; protein id: At4g37430.1, by cDNA: 33365., supported by cDNA: gi_14532439, supported by gi_3164143 [Arabidopsis thaliana]
  misc_feature (1)..(246): Homolog of NCBI NO: 21618274 NR Description: cytochrome P450 monooxygenase CYP91A2
  misc_feature (1)..(246): Homolog of NCBI NO: 25282605 NR Description: cytochrome P450 monooxygenase [imported] - thaliana >gi|3164144|dbj|BAA28539.1| cytochrome P450
  misc_feature (1)..(246): Homolog of NCBI NO: 18491105 NR Description: AT4g37430/F6G17_80 [Arabidopsis thaliana]
  misc_feature (1)..(229): Homolog of NCBI NO: 23397303 NR Description: putative cytochrome P450 monooxygenase (CYP91A2)
  misc_feature (1)..(247): Homolog of NCBI NO: 15235541 NR Description: cytochrome p450, putative; protein id: supported by cDNA: 102007. [Arabidopsis thaliana]
  misc_feature (1)..(207): Homolog of NCBI NO: 18252165 NR Description: cytochrome P450 monooxygenase - like protein

SEQ ID NO: 94090 - DNA, 483 bp, Arabidopsis thaliana; identical to SEQ ID NO: 90334
  misc_feature (1)..(483): Ceres Seq. ID no. 12723572
  misc_feature: MA Experiment ID: 20000184 Result: Down-regulated in Transcription
  misc_feature: MA Experiment 20000184 PARAMETER Experiment Name: At_Shoots__P Parameter: Age (day) Value: 7
  misc_feature: MA Experiment 20000184 PARAMETER Experiment Name: At_Shoots__P Parameter: Tissue Value: Shoots vs. Whole Plant
  misc_feature: MA Experiment ID: 20001247 Result: Down-regulated in Transcription
  misc_feature: MA Experiment 20001247 PARAMETER Experiment Name: At_Far-red-induction_P Parameter: Age (day) Value: 7
  misc_feature: MA Experiment 20001247 PARAMETER Experiment Name: At_Far-red-induction_P Parameter: Light Value: Far-red vs. White
  misc_feature: MA Experiment 20001247 PARAMETER Experiment Name: At_Far-red-induction_P Parameter: Organism Value: A. thaliana
  misc_feature: MA Experiment 20001247 PARAMETER Experiment Name: At_Far-red-induction_P Parameter: Plant Line Value: Columbia
  misc_feature: MA Experiment 20001247 PARAMETER Experiment Name: At_Far-red-induction_P Parameter: Timepoint (hr) Value: 1
  misc_feature: MA Experiment 20001247 PARAMETER Experiment Name: At_Far-red-induction_P Parameter: Tissue Value: Whole Plant

SEQ ID NO: 94091 - protein, 160 aa, Arabidopsis thaliana; identical to SEQ ID NO: 90335
  peptide (1)..(160): Ceres Seq. ID no. 12723573
  misc_feature (1)..(160): Homolog of NCBI NO: 15242070 NR Description: unknown protein; protein id: At5g57230.1 thaliana] >gi|8777356|dbj|BAA96946.1| gene_id:MJB24.4~unknown

SEQ ID NO: 94092 - protein, 151 aa, Arabidopsis thaliana; identical to SEQ ID NO: 90336
  peptide (1)..(151): Ceres Seq. ID no. 12723574
  misc_feature (1)..(151): Homolog of NCBI NO: 15242070 NR Description: unknown protein; protein id: At5g57230.1 thaliana] >gi|8777356|dbj|BAA96946.1| gene_id:MJB24.4~unknown

SEQ ID NO: 94093 - protein, 92 aa, Arabidopsis thaliana; identical to SEQ ID NO: 90337
  peptide (1)..(92): Ceres Seq. ID no. 12723575
  misc_feature (1)..(92): Homolog of NCBI NO: 15242070 NR Description: unknown protein; protein id: At5g57230.1 thaliana] >gi|8777356|dbj|BAA96946.1| gene_id:MJB24.4~unknown

SEQ ID NO: 94094 - DNA, 2889 bp, Arabidopsis thaliana; identical to SEQ ID NO: 90338
  misc_feature (1)..(2889): Ceres Seq. ID no. 12723580
  misc_feature: MA Experiment ID: 20000315 Result: Down-regulated in Transcription
  misc_feature: MA Experiment 20000315 PARAMETER Experiment Name: At_14day_Shoots-Roots_Sub_P Parameter: Age (day) Value: 14
  misc_feature: MA Experiment 20000315 PARAMETER Experiment Name: At_14day_Shoots-Roots_Sub_P Parameter: Organism Value: A. thaliana
  misc_feature: MA Experiment 20000315 PARAMETER Experiment Name: At_14day_Shoots-Roots_Sub_P Parameter: Plant Line Value: WS
  misc_feature: MA Experiment 20000315 PARAMETER Experiment Name: At_14day_Shoots-Roots_Sub_P Parameter: Tissue Value: Shoots vs. Whole Plant
  misc_feature: MA Experiment ID: 20000355 Result: Up-regulated in Transcription
  misc_feature: MA Experiment 20000355 PARAMETER Experiment Name: At_Siliques_Sub_P Parameter: Age (day) Value: 21
  misc_feature: MA Experiment 20000355 PARAMETER Experiment Name: At_Siliques_Sub_P Parameter: Organism Value: A. thaliana
  misc_feature: MA Experiment 20000355 PARAMETER Experiment Name: At_Siliques_Sub_P Parameter: Plant Line Value: WS
  misc_feature: MA Experiment 20000355 PARAMETER Experiment Name: At_Siliques_Sub_P Parameter: Tissue Value: Less Than 5mm Siliques vs. Whole Plant
  misc_feature: MA Experiment ID: 20000440 Result: Up-regulated in Transcription
  misc_feature: MA Experiment 20000440 PARAMETER Experiment Name: At_Closed-Flower__Sub_P Parameter: Tissue Value: Closed Flower vs. Whole Plant

SEQ ID NO: 94095 - protein, 962 aa, Arabidopsis thaliana; identical to SEQ ID NO: 90339
  peptide (1)..(962): Ceres Seq. ID no. 12723581
  misc_feature (28)..(111): Pfam Name: Gelsolin repeat Pfam Description: Gelsolin repeat
  misc_feature (1)..(919): Homolog of NCBI NO: 38344157 NR Description: OSJNBa0041A02.24 [Oryza sativa (japonica
  misc_feature (1)..(962): Homolog of NCBI NO: 25091523 NR Description: Villin 3 >gi|11358922|pir||T50668 villin 3 - Arabidopsis thaliana >gi|3415117|gb|AAC31607.1| villin 3
  misc_feature (1)..(962): Homolog of NCBI NO: 18410709 NR Description: villin 3 fragment; protein id: At3g57410.1,
  misc_feature (4)..(962): Homolog of NCBI NO: 18405794 NR Description: putative villin 2; protein id: At2g41740.1, by cDNA: gi_19310557, supported by cDNA: gi_3415114 [Arabidopsis >gi|25091521|sp|O81644|VIL2_ARATH Villin 2
  misc_feature (4)..(962): Homolog of NCBI NO: 11358919 NR Description: villin 2 [imported] - Arabidopsis thaliana
  misc_feature (1)..(962): Homolog of NCBI NO: 11358975 NR Description: actin bundling protein ABP135 [imported] - lily >gi|5880464|gb|AAD54660.1|AF088901_1 actin bundling protein
  misc_feature (1)..(526): Homolog of NCBI NO: 4938492 NR Description: putative villin, fragment [Arabidopsis thaliana]
  misc_feature (6)..(909): Homolog of NCBI NO: 25091518 NR Description: Villin 1 >gi|11358918|pir||T50671 villin 1 - Arabidopsis thaliana >gi|3415113|gb|AAC31605.1| villin 1
  misc_feature (872)..(962): Homolog of NCBI NO: 25091518 NR Description: Villin 1 >gi|11358918|pir||T50671 villin 1 - Arabidopsis thaliana >gi|3415113|gb|AAC31605.1| villin 1
  misc_feature (6)..(909): Homolog of NCBI NO: 18402176 NR Description: putative villin; protein id: At2g29890.1, by cDNA: gi_3415112 [Arabidopsis thaliana]

SEQ ID NO: 94096 - protein, 958 aa, Arabidopsis thaliana; identical to SEQ ID NO: 90340
  peptide (1)..(958): Ceres Seq. ID no. 12723582
  misc_feature (24)..(107): Pfam Name: Gelsolin repeat Pfam Description: Gelsolin repeat
  misc_feature (1)..(915): Homolog of NCBI NO: 38344157 NR Description: OSJNBa0041A02.24 [Oryza sativa (japonica
  misc_feature (1)..(958): Homolog of NCBI NO: 25091523 NR Description: Villin 3 >gi|11358922|pir||T50668 villin 3 - Arabidopsis thaliana >gi|3415117|gb|AAC31607.1| villin 3
  misc_feature (1)..(958): Homolog of NCBI NO: 18410709 NR Description: villin 3 fragment; protein id: At3g57410.1,
  misc_feature (1)..(958): Homolog of NCBI NO: 18405794 NR Description: putative villin 2; protein id: At2g41740.1, by cDNA: gi_19310557, supported by cDNA: gi_3415114 [Arabidopsis >gi|25091521|sp|O81644|VIL2_ARATH Villin 2
  misc_feature (1)..(958): Homolog of NCBI NO: 11358919 NR Description: villin 2 [imported] - Arabidopsis thaliana
  misc_feature (1)..(958): Homolog of NCBI NO: 11358975 NR Description: actin bundling protein ABP135 [imported] - lily >gi|5880464|gb|AAD54660.1|AF088901_1 actin bundling protein
  misc_feature (1)..(522): Homolog of NCBI NO: 4938492 NR Description: putative villin, fragment [Arabidopsis thaliana]
  misc_feature (2)..(905): Homolog of NCBI NO: 25091518 NR Description: Villin 1 >gi|11358918|pir||T50671 villin 1 - Arabidopsis thaliana >gi|3415113|gb|AAC31605.1| villin 1
  misc_feature (868)..(958): Homolog of NCBI NO: 25091518 NR Description: Villin 1 >gi|11358918|pir||T50671 villin 1 - Arabidopsis thaliana >gi|3415113|gb|AAC31605.1| villin 1
  misc_feature (2)..(905): Homolog of NCBI NO: 18402176 NR Description: putative villin; protein id: At2g29890.1, by cDNA: gi_3415112 [Arabidopsis thaliana]

SEQ ID NO: 94097 - protein, 879 aa, Arabidopsis thaliana; identical to SEQ ID NO: 78691
  peptide (1)..(879): Ceres Seq. ID no. 12723583
  misc_feature (844)..(879): Pfam Name: Villin headpiece domain Pfam Description: Villin headpiece domain
  misc_feature (1)..(836): Homolog of NCBI NO: 38344157 NR Description: OSJNBa0041A02.24 [Oryza sativa (japonica
  misc_feature (1)..(879): Homolog of NCBI NO: 25091523 NR Description: Villin 3 >gi|11358922|pir||T50668 villin 3 - Arabidopsis thaliana >gi|3415117|gb|AAC31607.1| villin 3
  misc_feature (1)..(879): Homolog of NCBI NO: 18410709 NR Description: villin 3 fragment; protein id: At3g57410.1,
  misc_feature (1)..(879): Homolog of NCBI NO: 18405794 NR Description: putative villin 2; protein id: At2g41740.1, by cDNA: gi_19310557, supported by cDNA: gi_3415114 [Arabidopsis >gi|25091521|sp|O81644|VIL2_ARATH Villin 2
  misc_feature (1)..(879): Homolog of NCBI NO: 11358919 NR Description: villin 2 [imported] - Arabidopsis thaliana
  misc_feature (1)..(879): Homolog of NCBI NO: 11358975 NR Description: actin bundling protein ABP135 [imported] - lily >gi|5880464|gb|AAD54660.1|AF088901_1 actin bundling protein
  misc_feature (1)..(443): Homolog of NCBI NO: 4938492 NR Description: putative villin, fragment [Arabidopsis thaliana]
  misc_feature (1)..(826): Homolog of NCBI NO: 25091518 NR Description: Villin 1 >gi|11358918|pir||T50671 villin 1 - Arabidopsis thaliana >gi|3415113|gb|AAC31605.1| villin 1
  misc_feature (789)..(879): Homolog of NCBI NO: 25091518 NR Description: Villin 1 >gi|11358918|pir||T50671 villin 1 - Arabidopsis thaliana >gi|3415113|gb|AAC31605.1| villin 1
  misc_feature (1)..(826): Homolog of NCBI NO: 18402176 NR Description: putative villin; protein id: At2g29890.1, by cDNA: gi_3415112 [Arabidopsis thaliana]

SEQ ID NO: 94098 - DNA, 3177 bp, Arabidopsis thaliana; identical to SEQ ID NO: 90342
  misc_feature (1)..(3177): Ceres Seq. ID no. 12723584
  misc_feature: MA Experiment ID: 20000180 Result: Up-regulated in Transcription
  misc_feature: MA Experiment 20000180 PARAMETER Experiment Name: At_Germinating_Seeds_P Parameter: Age (hr) Value: 24 vs. 0
  misc_feature: MA Experiment 20000180 PARAMETER Experiment Name: At_Germinating_Seeds_P Parameter: Tissue Value: Germinating Seeds
  misc_feature: MA Experiment ID: 20000227 Result: Down-regulated in Transcription
  misc_feature: MA Experiment 20000227 PARAMETER Experiment Name: At_Root-Tips-vs-Tops_P Parameter: Tissue Value: Root Tips vs. Root Tops
  misc_feature: MA Experiment ID: 20000436 Result: Up-regulated in Transcription
  misc_feature: MA Experiment 20000436 PARAMETER Experiment Name: At_Drought_P Parameter: Age (day) Value: 7
  misc_feature: MA Experiment 20000436 PARAMETER Experiment Name: At_Drought_P Parameter: Organism Value: A. thaliana
  misc_feature: MA Experiment 20000436 PARAMETER Experiment Name: At_Drought_P Parameter: Plant Line Value: WS
  misc_feature: MA Experiment 20000436 PARAMETER Experiment Name: At_Drought_P Parameter: Timepoint (hr) Value: 12
  misc_feature: MA Experiment 20000436 PARAMETER Experiment Name: At_Drought_P Parameter: Tissue Value: Whole Plant
  misc_feature: MA Experiment 20000436 PARAMETER Experiment Name: At_Drought_P Parameter: Treatment Value: Drought vs. No Drought
  misc_feature: MA Experiment ID: 20000437 Result: Up-regulated in Transcription
  misc_feature: MA Experiment 20000437 PARAMETER Experiment Name: At_Drought_P Parameter: Age (day) Value: 8
  misc_feature: MA Experiment 20000437 PARAMETER Experiment Name: At_Drought_P Parameter: Organism Value: A. thaliana
  misc_feature: MA Experiment 20000437 PARAMETER Experiment Name: At_Drought_P Parameter: Plant Line Value: WS
  misc_feature: MA Experiment 20000437 PARAMETER Experiment Name: At_Drought_P Parameter: Timepoint (hr) Value: 24
  misc_feature: MA Experiment 20000437 PARAMETER Experiment Name: At_Drought_P Parameter: Tissue Value: Whole Plant
  misc_feature: MA Experiment 20000437 PARAMETER Experiment Name: At_Drought_P Parameter: Treatment Value: Drought vs. No Drought
  misc_feature: MA Experiment ID: 20000495 Result: Up-regulated in Transcription
  misc_feature: MA Experiment 20000495 PARAMETER Experiment Name: At_Guard_Cells_P Parameter: Harvest Date Value: 8/2/2002
  misc_feature: MA Experiment 20000495 PARAMETER Experiment Name: At_Guard_Cells_P Parameter: Organism Value: A. thaliana
  misc_feature: MA Experiment 20000495 PARAMETER Experiment Name: At_Guard_Cells_P Parameter: Tissue Value: Guard Cells vs. Leaves
  misc_feature: MA Experiment ID: 20000496 Result: Up-regulated in Transcription
  misc_feature: MA Experiment 20000496 PARAMETER Experiment Name: At_Guard_Cells_P Parameter: Harvest Date Value: 7/19/2002
  misc_feature: MA Experiment 20000496 PARAMETER Experiment Name: At_Guard_Cells_P Parameter: Organism Value: Canola
  misc_feature: MA Experiment 20000496 PARAMETER Experiment Name: At_Guard_Cells_P Parameter: Tissue Value: Guard Cells vs. Leaves
  misc_feature: MA Experiment ID: 20000794 Result: Up-regulated in Transcription
  misc_feature: MA Experiment 20000794 PARAMETER Experiment Name: At_Petals_P Parameter: Age (day) Value: 23-25 days
  misc_feature: MA Experiment 20000794 PARAMETER Experiment Name: At_Petals_P Parameter: Plant Line Value: WS
  misc_feature: MA Experiment 20000794 PARAMETER Experiment Name: At_Petals_P Parameter: Tissue Value: Petals vs. Whole plant
  misc_feature: MA Experiment ID: 20001558 Result: Down-regulated in Transcription
  misc_feature: MA Experiment 20001558 PARAMETER Experiment Name: At_Drought_Soil_Dry_P Parameter: Age (day) Value: 27
  misc_feature: MA Experiment 20001558 PARAMETER Experiment Name: At_Drought_Soil_Dry_P Parameter: Organism Value: A. thaliana
  misc_feature: MA Experiment 20001558 PARAMETER Experiment Name: At_Drought_Soil_Dry_P Parameter: Plant Line Value: WS
  misc_feature: MA Experiment 20001558 PARAMETER Experiment Name: At_Drought_Soil_Dry_P Parameter: Post Timepoint (hr) Value: 6
  misc_feature: MA Experiment 20001558 PARAMETER Experiment Name: At_Drought_Soil_Dry_P Parameter: Post-Treatment Value: Re-Water vs. No Drought
  misc_feature: MA Experiment 20001558 PARAMETER Experiment Name: At_Drought_Soil_Dry_P Parameter: Timepoint (day) Value: 13
  misc_feature: MA Experiment 20001558 PARAMETER Experiment Name: At_Drought_Soil_Dry_P Parameter: Treatment Value: Drought vs. No Drought
  misc_feature: MA Experiment ID: 20001911 Result: Up-regulated in Transcription
  misc_feature: MA Experiment 20001911 PARAMETER Experiment Name: At_Drought_Reproduction_P Parameter: Age (day) Value: 40
  misc_feature: MA Experiment 20001911 PARAMETER Experiment Name: At_Drought_Reproduction_P Parameter: Organism Value: A. thaliana
  misc_feature: MA Experiment 20001911 PARAMETER Experiment Name: At_Drought_Reproduction_P Parameter: Plant Line Value: WS
  misc_feature: MA Experiment 20001911 PARAMETER Experiment Name: At_Drought_Reproduction_P Parameter: Timepoint (day) Value: 10
  misc_feature: MA Experiment 20001911 PARAMETER Experiment Name: At_Drought_Reproduction_P Parameter: Tissue Value: Flowers
  misc_feature: MA Experiment 20001911 PARAMETER Experiment Name: At_Drought_Reproduction_P Parameter: Treatment Value: Drought vs. No Drought

SEQ ID NO: 94099 - protein, 964 aa, Arabidopsis thaliana; identical to SEQ ID NO: 90343
  peptide (1)..(964): Ceres Seq. ID no. 12723585
  misc_feature (339)..(625): Pfam Name: haloacid dehalogenase-like hydrolase Pfam Description: haloacid dehalogenase-like hydrolase
  misc_feature (17)..(858): Homolog of NCBI NO: 6691153 NR Description: plasma membrane H(+)-ATPase [Filobasidiella
  misc_feature (17)..(858): Homolog of NCBI NO: 3348073 NR Description: plasma membrane H(+)-ATPase 1 [Filobasidiella
  misc_feature (21)..(861): Homolog of NCBI NO: 2652922 NR Description: plasma membrane (H+) ATPase [Uromyces fabae]
  misc_feature (34)..(863): Homolog of NCBI NO: 1709664 NR Description: Probable plasma membrane ATPase (Proton pump)
  misc_feature (13)..(753): Homolog of NCBI NO: 1709666 NR Description: Plasma membrane ATPase (Proton pump)
  misc_feature (760)..(821): Homolog of NCBI NO: 1709666 NR Description: Plasma membrane ATPase (Proton pump)
  misc_feature (14)..(755): Homolog of NCBI NO: 1709665 NR Description: Plasma membrane ATPase (Proton pump)
  misc_feature (773)..(821): Homolog of NCBI NO: 1709665 NR Description: Plasma membrane ATPase (Proton pump)
  misc_feature (26)..(762): Homolog of NCBI NO: 16751320 NR Description: putative plasma membrane-type proton ATPase
  misc_feature (760)..(821): Homolog of NCBI NO: 16751320 NR Description: putative plasma membrane-type proton ATPase

SEQ ID NO: 94100 - protein, 949 aa, Arabidopsis thaliana; identical to SEQ ID NO: 90344
  peptide (1)..(949): Ceres Seq. ID no. 12723586
  misc_feature (324)..(610): Pfam Name: haloacid dehalogenase-like hydrolase Pfam Description: haloacid dehalogenase-like hydrolase
  misc_feature (2)..(843): Homolog of NCBI NO: 6691153 NR Description: plasma membrane H(+)-ATPase [Filobasidiella
  misc_feature (2)..(843): Homolog of NCBI NO: 3348073 NR Description: plasma membrane H(+)-ATPase 1 [Filobasidiella
  misc_feature (6)..(846): Homolog of NCBI NO: 2652922 NR Description: plasma membrane (H+) ATPase [Uromyces fabae]
  misc_feature (19)..(848): Homolog of NCBI NO: 1709664 NR Description: Probable plasma membrane ATPase (Proton pump)
  misc_feature (1)..(738): Homolog of NCBI NO: 1709666 NR Description: Plasma membrane ATPase (Proton pump)
  misc_feature (745)..(806): Homolog of NCBI NO: 1709666 NR Description: Plasma membrane ATPase (Proton pump)
  misc_feature (1)..(740): Homolog of NCBI NO: 1709665 NR Description: Plasma membrane ATPase (Proton pump)
  misc_feature (758)..(806): Homolog of NCBI NO: 1709665 NR Description: Plasma membrane ATPase (Proton pump)
  misc_feature (11)..(747): Homolog of NCBI NO: 16751320 NR Description: putative plasma membrane-type proton ATPase
  misc_feature (745)..(806): Homolog of NCBI NO: 16751320 NR Description: putative plasma membrane-type proton ATPase

SEQ ID NO: 94101 - protein, 884 aa, Arabidopsis thaliana; identical to SEQ ID NO: 90345
  peptide (1)..(884): Ceres Seq. ID no. 12723587
  misc_feature (259)..(545): Pfam Name: haloacid dehalogenase-like hydrolase Pfam Description: haloacid dehalogenase-like hydrolase
  misc_feature (1)..(778): Homolog of NCBI NO: 6691153 NR Description: plasma membrane H(+)-ATPase [Filobasidiella
  misc_feature (1)..(778): Homolog of NCBI NO: 3348073 NR Description: plasma membrane H(+)-ATPase 1 [Filobasidiella
  misc_feature (1)..(781): Homolog of NCBI NO: 2652922 NR Description: plasma membrane (H+) ATPase [Uromyces fabae]
  misc_feature (1)..(783): Homolog of NCBI NO: 1709664 NR Description: Probable plasma membrane ATPase (Proton pump)
  misc_feature (1)..(673): Homolog of NCBI NO: 1709666 NR Description: Plasma membrane ATPase (Proton pump)
  misc_feature (680)..(741): Homolog of NCBI NO: 1709666 NR Description: Plasma membrane ATPase (Proton pump)
  misc_feature (1)..(675): Homolog of NCBI NO: 1709665 NR Description: Plasma membrane ATPase (Proton pump)
  misc_feature (693)..(741): Homolog of NCBI NO: 1709665 NR Description: Plasma membrane ATPase (Proton pump)
  misc_feature (1)..(682): Homolog of NCBI NO: 16751320 NR Description: putative plasma membrane-type proton ATPase
  misc_feature (680)..(741): Homolog of NCBI NO: 16751320 NR Description: putative plasma membrane-type proton ATPase

SEQ ID NO: 94102 - DNA, 1803 bp, Arabidopsis thaliana; identical to SEQ ID NO: 90346
  misc_feature (1)..(1803): Ceres Seq. ID no. 12723588
  misc_feature: MA Experiment ID: 20000179 Result: Down-regulated in Transcription
  misc_feature: MA Experiment 20000179 PARAMETER Experiment Name: At_Germinating_Seeds_P Parameter: Age (hr) Value: 6 vs. 0
  misc_feature: MA Experiment 20000179 PARAMETER Experiment Name: At_Germinating_Seeds_P Parameter: Tissue Value: Germinating Seeds
  misc_feature: MA Experiment ID: 20000180 Result: Down-regulated in Transcription
  misc_feature: MA Experiment 20000180 PARAMETER Experiment Name: At_Germinating_Seeds_P Parameter: Age (hr) Value: 24 vs. 0
  misc_feature: MA Experiment 20000180 PARAMETER Experiment Name: At_Germinating_Seeds_P Parameter: Tissue Value: Germinating Seeds
  misc_feature: MA Experiment ID: 20000264 Result: Up-regulated in Transcription
  misc_feature: MA Experiment 20000264 PARAMETER Experiment Name: At_Open_Flower_P Parameter: Age (day) Value: 21
  misc_feature: MA Experiment 20000264 PARAMETER Experiment Name: At_Open_Flower_P Parameter: Plant Line Value: WS
  misc_feature: MA Experiment 20000264 PARAMETER Experiment Name: At_Open_Flower_P Parameter: Tissue Value: Open Flower vs. Whole Plant
  misc_feature: MA Experiment ID: 20000265 Result: Up-regulated in Transcription
  misc_feature: MA Experiment 20000265 PARAMETER Experiment Name: At_Open_Flower_P Parameter: Age (day) Value: 21
  misc_feature: MA Experiment 20000265 PARAMETER Experiment Name: At_Open_Flower_P Parameter: Plant Line Value: WS
  misc_feature: MA Experiment 20000265 PARAMETER Experiment Name: At_Open_Flower_P Parameter: Tissue Value: Closed Flower vs. Whole Plant
  misc_feature: MA Experiment ID: 20000286 Result: Up-regulated in Transcription
  misc_feature: MA Experiment 20000286 PARAMETER Experiment Name: At_Open_Flower_P Parameter: Age (day) Value: 21
  misc_feature: MA Experiment 20000286 PARAMETER Experiment Name: At_Open_Flower_P Parameter: Plant Line Value: WS
  misc_feature: MA Experiment 20000286 PARAMETER Experiment Name: At_Open_Flower_P Parameter: Tissue Value: Half Open vs. Whole Plant
  misc_feature: MA Experiment ID: 20000496 Result: Down-regulated in Transcription
  misc_feature: MA Experiment 20000496 PARAMETER Experiment Name: At_Guard_Cells_P Parameter: Harvest Date Value: 7/19/2002
  misc_feature: MA Experiment 20000496 PARAMETER Experiment Name: At_Guard_Cells_P Parameter: Organism Value: Canola
  misc_feature: MA Experiment 20000496 PARAMETER Experiment Name: At_Guard_Cells_P Parameter: Tissue Value: Guard Cells vs. Leaves
  misc_feature: MA Experiment ID: 20000794 Result: Up-regulated in Transcription
  misc_feature: MA Experiment 20000794 PARAMETER Experiment Name: At_Petals_P Parameter: Age (day) Value: 23-25 days
  misc_feature: MA Experiment 20000794 PARAMETER Experiment Name: At_Petals_P Parameter: Plant Line Value: WS
  misc_feature: MA Experiment 20000794 PARAMETER Experiment Name: At_Petals_P Parameter: Tissue Value: Petals vs. Whole plant

SEQ ID NO: 94103 - protein, 600 aa, Arabidopsis thaliana; identical to SEQ ID NO: 90347
  peptide (1)..(600): Ceres Seq. ID no. 12723589
  misc_feature (293)..(382): Pfam Name: Fibronectin type III domain Pfam Description: Fibronectin type III domain
  misc_feature (354)..(600): Homolog of NCBI NO: 15234667 NR Description: putative protein; protein id: At4g30200.1, by cDNA: gi_11177136 [Arabidopsis thaliana]
  misc_feature (61)..(290): Homolog of NCBI NO: 15234667 NR Description: putative protein; protein id: At4g30200.1, by cDNA: gi_11177136 [Arabidopsis thaliana]
  misc_feature (89)..(600): Homolog of NCBI NO: 38637254 NR Description: putative coiled-coil protein [Oryza sativa
  misc_feature (16)..(96): Homolog of NCBI NO: 38637254 NR Description: putative coiled-coil protein [Oryza sativa
  misc_feature (4)..(455): Homolog of NCBI NO: 30350861 NR Description: hypothetical protein At2g18880 [Arabidopsis
  misc_feature (517)..(598): Homolog of NCBI NO: 30350861 NR Description: hypothetical protein At2g18880 [Arabidopsis
  misc_feature (268)..(437): Homolog of NCBI NO: 15234667 NR Description: putative protein; protein id: At4g30200.1, by cDNA: gi_11177136 [Arabidopsis thaliana]
  misc_feature (61)..(423): Homolog of NCBI NO: 30688585 NR Description: coiled-coil protein [Arabidopsis thaliana] putative protein [Arabidopsis thaliana]
  misc_feature (110)..(387): Homolog of NCBI NO: 15230113 NR Description: hypothetical protein; protein id: At3g24440.1 thaliana] >gi|9294095|dbj|BAB01947.1|
  misc_feature (489)..(590): Homolog of NCBI NO: 15230113 NR Description: hypothetical protein; protein id: At3g24440.1 thaliana] >gi|9294095|dbj|BAB01947.1|

SEQ ID NO: 94104 - protein, 549 aa, Arabidopsis thaliana; identical to SEQ ID NO: 90348
  peptide (1)..(549): Ceres Seq. ID no. 12723590
  misc_feature (242)..(331): Pfam Name: Fibronectin type III domain Pfam Description: Fibronectin type III domain
  misc_feature (303)..(549): Homolog of NCBI NO: 15234667 NR Description: putative protein; protein id: At4g30200.1, by cDNA: gi_11177136 [Arabidopsis thaliana]
  misc_feature (10)..(239): Homolog of NCBI NO: 15234667 NR Description: putative protein; protein id: At4g30200.1, by cDNA: gi_11177136 [Arabidopsis thaliana]
  misc_feature (38)..(549): Homolog of NCBI NO: 38637254 NR Description: putative coiled-coil protein [Oryza sativa
  misc_feature (1)..(45): Homolog of NCBI NO: 38637254 NR Description: putative coiled-coil protein [Oryza sativa
  misc_feature (1)..(404): Homolog of NCBI NO: 30350861 NR Description: hypothetical protein At2g18880 [Arabidopsis
  misc_feature (466)..(547): Homolog of NCBI NO: 30350861 NR Description: hypothetical protein At2g18880 [Arabidopsis
  misc_feature (217)..(386): Homolog of NCBI NO: 15234667 NR Description: putative protein; protein id: At4g30200.1, by cDNA: gi_11177136 [Arabidopsis thaliana]
  misc_feature (10)..(372): Homolog of NCBI NO: 30688585 NR Description: coiled-coil protein [Arabidopsis thaliana] putative protein [Arabidopsis thaliana]
  misc_feature (59)..(336): Homolog of NCBI NO: 15230113 NR Description: hypothetical protein; protein id: At3g24440.1 thaliana] >gi|9294095|dbj|BAB01947.1|
  misc_feature (438)..(539): Homolog of NCBI NO: 15230113 NR Description: hypothetical protein; protein id: At3g24440.1 thaliana] >gi|9294095|dbj|BAB01947.1|

SEQ ID NO: 94105 - protein, 542 aa, Arabidopsis thaliana; identical to SEQ ID NO: 90349
  peptide (1)..(542): Ceres Seq. ID no. 12723591
  misc_feature (235)..(324): Pfam Name: Fibronectin type III domain Pfam Description: Fibronectin type III domain
  misc_feature (296)..(542): Homolog of NCBI NO: 15234667 NR Description: putative protein; protein id: At4g30200.1, by cDNA: gi_11177136 [Arabidopsis thaliana]
  misc_feature (3)..(232): Homolog of NCBI NO: 15234667 NR Description: putative protein; protein id: At4g30200.1, by cDNA: gi_11177136 [Arabidopsis thaliana]
  misc_feature (31)..(542): Homolog of NCBI NO: 38637254 NR Description: putative coiled-coil protein [Oryza sativa
  misc_feature (1)..(38): Homolog of NCBI NO: 38637254 NR Description: putative coiled-coil protein [Oryza sativa
  misc_feature (1)..(397): Homolog of NCBI NO: 30350861 NR Description: hypothetical protein At2g18880 [Arabidopsis
  misc_feature (459)..(540): Homolog of NCBI NO: 30350861 NR Description: hypothetical protein At2g18880 [Arabidopsis
  misc_feature (210)..(379): Homolog of NCBI NO: 15234667 NR Description: putative protein; protein id: At4g30200.1, by cDNA: gi_11177136 [Arabidopsis thaliana]
  misc_feature (3)..(365): Homolog of NCBI NO: 30688585 NR Description: coiled-coil protein [Arabidopsis thaliana] putative protein [Arabidopsis thaliana]
  misc_feature (52)..(329): Homolog of NCBI NO: 15230113 NR Description: hypothetical protein; protein id: At3g24440.1 thaliana] >gi|9294095|dbj|BAB01947.1|
  misc_feature (431)..(532): Homolog of NCBI NO: 15230113 NR Description: hypothetical protein; protein id: At3g24440.1 thaliana] >gi|9294095|dbj|BAB01947.1|

SEQ ID NO: 94106 - DNA, 1563 bp, Arabidopsis thaliana; identical to SEQ ID NO: 90350
  misc_feature (1)..(1563): Ceres Seq. ID no. 12723601
  misc_feature: MA Experiment ID: 20000307 Result: Up-regulated in Transcription
  misc_feature: MA Experiment 20000307 PARAMETER Experiment Name: At_Germinating_Seeds_Sub_P Parameter: Age (hr) Value: 24 vs. 0
  misc_feature: MA Experiment 20000307 PARAMETER Experiment Name: At_Germinating_Seeds_Sub_P Parameter: Organism Value: A. thaliana
  misc_feature: MA Experiment 20000307 PARAMETER Experiment Name: At_Germinating_Seeds_Sub_P Parameter: Plant Line Value: WS
  misc_feature: MA Experiment 20000307 PARAMETER Experiment Name: At_Germinating_Seeds_Sub_P Parameter: Tissue Value: Germinating Seeds
  misc_feature: MA Experiment ID: 20000314 Result: Up-regulated in Transcription
  misc_feature: MA Experiment 20000314 PARAMETER Experiment Name: At_14day_Shoots-Roots_Sub_P Parameter: Age (day) Value: 14
  misc_feature: MA Experiment 20000314 PARAMETER Experiment Name: At_14day_Shoots-Roots_Sub_P Parameter: Organism Value: A. thaliana
  misc_feature: MA Experiment 20000314 PARAMETER Experiment Name: At_14day_Shoots-Roots_Sub_P Parameter: Plant Line Value: WS
  misc_feature: MA Experiment 20000314 PARAMETER Experiment Name: At_14day_Shoots-Roots_Sub_P Parameter: Tissue Value: Roots vs. Whole Plant
  misc_feature: MA Experiment ID: 20000315 Result: Down-regulated in Transcription
  misc_feature: MA Experiment 20000315 PARAMETER Experiment Name: At_14day_Shoots-Roots_Sub_P Parameter: Age (day) Value: 14
  misc_feature: MA Experiment 20000315 PARAMETER Experiment Name: At_14day_Shoots-Roots_Sub_P Parameter: Organism Value: A. thaliana
  misc_feature: MA Experiment 20000315 PARAMETER Experiment Name: At_14day_Shoots-Roots_Sub_P Parameter: Plant Line Value: WS
  misc_feature: MA Experiment 20000315 PARAMETER Experiment Name: At_14day_Shoots-Roots_Sub_P Parameter: Tissue Value: Shoots vs. Whole Plant
  misc_feature: MA Experiment ID: 20000328 Result: Down-regulated in Transcription
  misc_feature: MA Experiment 20000328 PARAMETER Experiment Name: At_42deg_Heat_Sub_P Parameter: Age (day) Value: 14
  misc_feature: MA Experiment 20000328 PARAMETER Experiment Name: At_42deg_Heat_Sub_P Parameter: Organism Value: A. thaliana
  misc_feature: MA Experiment 20000328 PARAMETER Experiment Name: At_42deg_Heat_Sub_P Parameter: Plant Line Value: WS
  misc_feature: MA Experiment 20000328 PARAMETER Experiment Name: At_42deg_Heat_Sub_P Parameter: Temperature (deg C) Value: 42 vs. 22
  misc_feature: MA Experiment 20000328 PARAMETER Experiment Name: At_42deg_Heat_Sub_P Parameter: Timepoint (hr) Value: 6
  misc_feature: MA Experiment 20000328 PARAMETER Experiment Name: At_42deg_Heat_Sub_P Parameter: Tissue Value: Aerial
  misc_feature: MA Experiment ID: 20000355 Result: Down-regulated in Transcription
  misc_feature: MA Experiment 20000355 PARAMETER Experiment Name: At_Siliques_Sub_P Parameter: Age (day) Value: 21
  misc_feature: MA Experiment 20000355 PARAMETER Experiment Name: At_Siliques_Sub_P Parameter: Organism Value: A. thaliana
  misc_feature: MA Experiment 20000355 PARAMETER Experiment Name: At_Siliques_Sub_P Parameter: Plant Line Value: WS
  misc_feature: MA Experiment 20000355 PARAMETER Experiment Name: At_Siliques_Sub_P Parameter: Tissue Value: Less Than 5mm Siliques vs. Whole Plant
  misc_feature: MA Experiment ID: 20000440 Result: Down-regulated in Transcription
  misc_feature: MA Experiment 20000440 PARAMETER Experiment Name: At_Closed-Flower__Sub_P Parameter: Tissue Value: Closed Flower vs. Whole Plant

SEQ ID NO: 94107 - protein, 520 aa, Arabidopsis thaliana; identical to SEQ ID NO: 90351
  peptide (1)..(520): Ceres Seq. ID no. 12723602
  misc_feature (239)..(451): Pfam Name: ATPase family associated with various cellular Pfam Description: ATPase family associated with various cellular
  misc_feature (1)..(520): Homolog of NCBI NO: 15242143 NR Description: putative protein; protein id: At5g57480.1
  misc_feature (1)..(520): Homolog of NCBI NO: 18416629 NR Description: putative mitochondrial protein; protein id: supported by cDNA: gi_19715598 [Arabidopsis thaliana]
  misc_feature (17)..(520): Homolog of NCBI NO: 7485479 NR Description: hypothetical protein F14M19.110 - Arabidopsis >gi|4539301|emb|CAB39604.1| putative mitochondrial protein thaliana] >gi|7269434|emb|CAB79438.1| putative mitochondrial
  misc_feature (8)..(507): Homolog of NCBI NO: 15234674 NR Description: putative protein; protein id: At4g30250.1
  misc_feature (1)..(498): Homolog of NCBI NO: 15233037 NR Description: hypothetical protein; protein id: At3g28580.1, by cDNA: gi_18175626 [Arabidopsis thaliana]
  misc_feature (1)..(512): Homolog of NCBI NO: 15242536 NR Description: putative protein; protein id: At5g40010.1
  misc_feature (5)..(513): Homolog of NCBI NO: 15233010 NR Description: hypothetical protein; protein id: At3g28510.1, by cDNA: gi_20466451 [Arabidopsis thaliana]
  misc_feature (6)..(504): Homolog of NCBI NO: 15233016 NR Description: hypothetical protein; protein id: At3g28540.1
  misc_feature (1)..(331): Homolog of NCBI NO: 10176992 NR Description: contains similarity to AAA-type
  misc_feature (1)..(331): Homolog of NCBI NO: 15242534 NR Description: putative protein; protein id: At5g40000.1

SEQ ID NO: 94108 - protein, 499 aa, Arabidopsis thaliana; identical to SEQ ID NO: 90352
  peptide (1)..(499): Ceres Seq. ID no. 12723603
  misc_feature (218)..(430): Pfam Name: ATPase family associated with various cellular Pfam Description: ATPase family associated with various cellular
  misc_feature (1)..(499): Homolog of NCBI NO: 15242143 NR Description: putative protein; protein id: At5g57480.1
  misc_feature (1)..(499): Homolog of NCBI NO: 18416629 NR Description: putative mitochondrial protein; protein id: supported by cDNA: gi_19715598 [Arabidopsis thaliana]
  misc_feature (1)..(499): Homolog of NCBI NO: 7485479 NR Description: hypothetical protein F14M19.110 - Arabidopsis >gi|4539301|emb|CAB39604.1| putative mitochondrial protein thaliana] >gi|7269434|emb|CAB79438.1| putative mitochondrial
  misc_feature (1)..(486): Homolog of NCBI NO: 15234674 NR Description: putative protein; protein id: At4g30250.1
  misc_feature (1)..(477): Homolog of NCBI NO: 15233037 NR Description: hypothetical protein; protein id: At3g28580.1, by cDNA: gi_18175626 [Arabidopsis thaliana]
  misc_feature (1)..(491): Homolog of NCBI NO: 15242536 NR Description: putative protein; protein id: At5g40010.1
  misc_feature (1)..(492): Homolog of NCBI NO: 15233010 NR Description: hypothetical protein; protein id: At3g28510.1, by cDNA: gi_20466451 [Arabidopsis thaliana]
  misc_feature (1)..(483): Homolog of NCBI NO: 15233016 NR Description: hypothetical protein; protein id: At3g28540.1
  misc_feature (1)..(310): Homolog of NCBI NO: 10176992 NR Description: contains similarity to AAA-type
  misc_feature (1)..(310): Homolog of NCBI NO: 15242534 NR Description: putative protein; protein id: At5g40000.1

SEQ ID NO: 94109 - protein, 361 aa, Arabidopsis thaliana; identical to SEQ ID NO: 90353
  peptide (1)..(361): Ceres Seq. ID no. 12723604
  misc_feature (80)..(292): Pfam Name: ATPase family associated with various cellular Pfam Description: ATPase family associated with various cellular
  misc_feature (1)..(361): Homolog of NCBI NO: 15242143 NR Description: putative protein; protein id: At5g57480.1
  misc_feature (1)..(361): Homolog of NCBI NO: 18416629 NR Description: putative mitochondrial protein; protein id: supported by cDNA: gi_19715598 [Arabidopsis thaliana]
  misc_feature (1)..(361): Homolog of NCBI NO: 7485479 NR Description: hypothetical protein F14M19.110 - Arabidopsis >gi|4539301|emb|CAB39604.1| putative mitochondrial protein thaliana] >gi|7269434|emb|CAB79438.1| putative mitochondrial
  misc_feature (1)..(348): Homolog of NCBI NO: 15234674 NR Description: putative protein; protein id: At4g30250.1
  misc_feature (1)..(339): Homolog of NCBI NO: 15233037 NR Description: hypothetical protein; protein id: At3g28580.1, by cDNA: gi_18175626 [Arabidopsis thaliana]
  misc_feature (1)..(353): Homolog of NCBI NO: 15242536 NR Description: putative protein; protein id: At5g40010.1
  misc_feature (1)..(354): Homolog of NCBI NO: 15233010 NR Description: hypothetical protein; protein id: At3g28510.1, by cDNA: gi_20466451 [Arabidopsis thaliana]
  misc_feature (1)..(345): Homolog of NCBI NO: 15233016 NR Description: hypothetical protein; protein id: At3g28540.1
  misc_feature (1)..(172): Homolog of NCBI NO: 10176992 NR Description: contains similarity to AAA-type
  misc_feature (1)..(172): Homolog of NCBI NO: 15242534 NR Description: putative protein; protein id: At5g40000.1

SEQ ID NO: 94110 - DNA, 1062 bp, Arabidopsis thaliana; identical to SEQ ID NO: 90354
  misc_feature (1)..(1062): Ceres Seq. ID no. 12723611
  misc_feature: MA Experiment ID: 20000180 Result: Up-regulated in Transcription
  misc_feature: MA Experiment 20000180 PARAMETER Experiment Name: At_Germinating_Seeds_P Parameter: Age (hr) Value: 24 vs. 0
  misc_feature: MA Experiment 20000180 PARAMETER Experiment Name: At_Germinating_Seeds_P Parameter: Tissue Value: Germinating Seeds
  misc_feature: MA Experiment ID: 20000439 Result: Up-regulated in Transcription
  misc_feature: MA Experiment 20000439 PARAMETER Experiment Name: At_Roots__P Parameter: Age (day) Value: 14 vs. 21
  misc_feature: MA Experiment 20000439 PARAMETER Experiment Name: At_Roots__P Parameter: Organism Value: A. thaliana
  misc_feature: MA Experiment 20000439 PARAMETER Experiment Name: At_Roots__P Parameter: Tissue Value: Roots vs. Whole Plant
  misc_feature: MA Experiment ID: 20000460 Result: Down-regulated in Transcription
  misc_feature: MA Experiment 20000460 PARAMETER Experiment Name: At_10percent_PEG_P Parameter: Age (day) Value: 12
  misc_feature: MA Experiment 20000460 PARAMETER Experiment Name: At_10percent_PEG_P Parameter: Organism Value: A. thaliana
  misc_feature: MA Experiment 20000460 PARAMETER Experiment Name: At_10percent_PEG_P Parameter: Plant Line Value: WS
  misc_feature: MA Experiment 20000460 PARAMETER Experiment Name: At_10percent_PEG_P Parameter: Timepoint (day) Value: 12
  misc_feature: MA Experiment 20000460 PARAMETER Experiment Name: At_10percent_PEG_P Parameter: Tissue Value: Whole Plant
  misc_feature: MA Experiment 20000460 PARAMETER Experiment Name: At_10percent_PEG_P Parameter: Treatment Value: 10percent PEG vs. No Treatment
  misc_feature: MA Experiment ID: 20000527 Result: Down-regulated in Transcription
  misc_feature: MA Experiment 20000527 PARAMETER Experiment Name: At_10percent_PEG_P Parameter: Age (day) Value: 20
  misc_feature: MA Experiment 20000527 PARAMETER Experiment Name: At_10percent_PEG_P Parameter: Organism Value: A. thaliana
  misc_feature: MA Experiment 20000527 PARAMETER Experiment Name: At_10percent_PEG_P Parameter: Plant Line Value: WS
  misc_feature: MA Experiment 20000527 PARAMETER Experiment Name: At_10percent_PEG_P Parameter: Timepoint (day) Value: 20
  misc_feature: MA Experiment 20000527 PARAMETER Experiment Name: At_10percent_PEG_P Parameter: Tissue Value: Whole Plant
  misc_feature: MA Experiment 20000527 PARAMETER Experiment Name: At_10percent_PEG_P Parameter: Treatment Value: 10percent PEG vs. No Treatment
  misc_feature: MA Experiment ID: 20001450 Result: Down-regulated in Transcription
  misc_feature: MA Experiment 20001450 PARAMETER Experiment Name: At_Far-red-induction_P Parameter: Age (day) Value: 7
  misc_feature: MA Experiment 20001450 PARAMETER Experiment Name: At_Far-red-induction_P Parameter: Light Value: Far-red vs. White
  misc_feature: MA Experiment 20001450 PARAMETER Experiment Name: At_Far-red-induction_P Parameter: Organism Value: A. thaliana
  misc_feature: MA Experiment 20001450 PARAMETER Experiment Name: At_Far-red-induction_P Parameter: Plant Line Value: Columbia
  misc_feature: MA Experiment 20001450 PARAMETER Experiment Name: At_Far-red-induction_P Parameter: Timepoint (hr) Value: 8
  misc_feature: MA Experiment 20001450 PARAMETER Experiment Name: At_Far-red-induction_P Parameter: Tissue Value: Whole Plant

SEQ ID NO: 94111 - protein, 303 aa, Arabidopsis thaliana; identical to SEQ ID NO: 90355
  peptide (1)..(303): Ceres Seq. ID no. 12723612
  misc_feature (45)..(226): Pfam Name: Glycosyl hydrolases family 16 Pfam Description: Glycosyl hydrolases family 16
  misc_feature (19)..(303): Homolog of NCBI NO: 15242778 NR Description: xyloglucan endotransglycosylase, putative; id: At5g57530.1, supported by cDNA: gi_16323042 [Arabidopsis >gi|9758314|dbj|BAB08788.1| xyloglucan endotransglycosylase
  misc_feature (19)..(303): Homolog of NCBI NO: 15242779 NR Description: xyloglucan endotransglycosylase, putative; id: At5g57540.1 [Arabidopsis thaliana]
  misc_feature (19)..(302): Homolog of NCBI NO: 15235998 NR Description: xyloglucan endotransglycosylase XTR9; protein id: supported by cDNA: gi_20260567, supported by cDNA: gi_4218962 thaliana] >gi|7447404|pir||T04236 xyloglucan [Arabidopsis

SEQ ID NO: 94112 - protein, 285 aa, Arabidopsis thaliana; identical to SEQ ID NO: 90356
  peptide (1)..(285): Ceres Seq. ID no. 12723613
  misc_feature (27)..(208): Pfam Name: Glycosyl hydrolases family 16 Pfam Description: Glycosyl hydrolases family 16
  misc_feature (1)..(285): Homolog of NCBI NO: 15242778 NR Description: xyloglucan endotransglycosylase, putative; id: At5g57530.1, supported by cDNA: gi_16323042 [Arabidopsis >gi|9758314|dbj|BAB08788.1| xyloglucan endotransglycosylase
  misc_feature (1)..(285): Homolog of NCBI NO: 15242779 NR Description: xyloglucan endotransglycosylase, putative; id: At5g57540.1 [Arabidopsis thaliana]
  misc_feature (1)..(284): Homolog of NCBI NO: 15235998 NR Description: xyloglucan endotransglycosylase XTR9; protein id: supported by cDNA: gi_20260567, supported by cDNA: gi_4218962 thaliana] >gi|7447404|pir||T04236 xyloglucan [Arabidopsis

SEQ ID NO: 94113 - protein, 212 aa, Arabidopsis thaliana; identical to SEQ ID NO: 90357
  peptide (1)..(212): Ceres Seq. ID no. 12723614
  misc_feature (1)..(135): Pfam Name: Glycosyl hydrolases family 16 Pfam Description: Glycosyl hydrolases family 16
  misc_feature (1)..(212): Homolog of NCBI NO: 15242778 NR Description: xyloglucan endotransglycosylase, putative; id: At5g57530.1, supported by cDNA: gi_16323042 [Arabidopsis >gi|9758314|dbj|BAB08788.1| xyloglucan endotransglycosylase
  misc_feature (1)..(212): Homolog of NCBI NO: 15242779 NR Description: xyloglucan endotransglycosylase, putative; id: At5g57540.1 [Arabidopsis thaliana]
  misc_feature (1)..(211): Homolog of NCBI NO: 15235998 NR Description: xyloglucan endotransglycosylase XTR9; protein id: supported by cDNA: gi_20260567, supported by cDNA: gi_4218962 thaliana] >gi|7447404|pir||T04236 xyloglucan [Arabidopsis

SEQ ID NO: 94114 - DNA, 1059 bp, Arabidopsis thaliana; identical to SEQ ID NO: 90358
  misc_feature (1)..(1059): Ceres Seq. ID no. 12723619
  misc_feature: MA Experiment ID: 20000166 Result: Up-regulated in Transcription
  misc_feature: MA Experiment 20000166 PARAMETER Experiment Name: At_100uM_ABA_P Parameter: Age (day) Value: 14
  misc_feature: MA Experiment 20000166 PARAMETER Experiment Name: At_100uM_ABA_P Parameter: Organism Value: A. thaliana
  misc_feature: MA Experiment 20000166 PARAMETER Experiment Name: At_100uM_ABA_P Parameter: Plant Line Value: WS
  misc_feature: MA Experiment 20000166 PARAMETER Experiment Name: At_100uM_ABA_P Parameter: Timepoint (hr) Value: 1
  misc_feature: MA Experiment 20000166 PARAMETER Experiment Name: At_100uM_ABA_P Parameter: Tissue Value: Aerial
  misc_feature: MA Experiment 20000166 PARAMETER Experiment Name: At_100uM_ABA_P Parameter: Treatment Value: 100uM ABA vs. No Treatment
  misc_feature: MA Experiment ID: 20000169 Result: Up-regulated in Transcription
  misc_feature: MA Experiment 20000169 PARAMETER Experiment Name: At_100uM_ABA_P Parameter: Age (day) Value: 14
  misc_feature: MA Experiment 20000169 PARAMETER Experiment Name: At_100uM_ABA_P Parameter: Organism Value: A. thaliana
  misc_feature: MA Experiment 20000169 PARAMETER Experiment Name: At_100uM_ABA_P Parameter: Plant Line Value: WS
  misc_feature: MA Experiment 20000169 PARAMETER Experiment Name: At_100uM_ABA_P Parameter: Timepoint (hr) Value: 6
  misc_feature: MA Experiment 20000169 PARAMETER Experiment Name: At_100uM_ABA_P Parameter: Tissue Value: Aerial
  misc_feature: MA Experiment 20000169 PARAMETER Experiment Name: At_100uM_ABA_P Parameter: Treatment Value: 100uM ABA vs. No Treatment
  misc_feature: MA Experiment ID: 20000179 Result: Down-regulated in Transcription
  misc_feature: MA Experiment 20000179 PARAMETER Experiment Name: At_Germinating_Seeds_P Parameter: Age (hr) Value: 6 vs. 0
  misc_feature: MA Experiment 20000179 PARAMETER Experiment Name: At_Germinating_Seeds_P Parameter: Tissue Value: Germinating Seeds
  misc_feature: MA Experiment ID: 20000180 Result: Down-regulated in Transcription
  misc_feature: MA Experiment 20000180 PARAMETER Experiment Name: At_Germinating_Seeds_P Parameter: Age (hr) Value: 24 vs. 0
  misc_feature: MA Experiment 20000180 PARAMETER Experiment Name: At_Germinating_Seeds_P Parameter: Tissue Value: Germinating Seeds
  misc_feature: MA Experiment ID: 20000182 Result: Up-regulated in Transcription
  misc_feature: MA Experiment 20000182 PARAMETER Experiment Name: At_2mM_SA_P Parameter: Age (day) Value: 14
  misc_feature: MA Experiment 20000182 PARAMETER Experiment Name: At_2mM_SA_P Parameter: Organism Value: A. thaliana
  misc_feature: MA Experiment 20000182 PARAMETER Experiment Name: At_2mM_SA_P Parameter: Plant Line Value: WS
  misc_feature: MA Experiment 20000182 PARAMETER Experiment Name: At_2mM_SA_P Parameter: Timepoint (hr) Value: 6
  misc_feature: MA Experiment 20000182 PARAMETER Experiment Name: At_2mM_SA_P Parameter: Tissue Value: Aerial
  misc_feature: MA Experiment 20000182 PARAMETER Experiment Name: At_2mM_SA_P Parameter: Treatment Value: 2mM SA vs. No Treatment
  misc_feature: MA Experiment ID: 20000184 Result: Down-regulated in Transcription
  misc_feature: MA Experiment 20000184 PARAMETER Experiment Name: At_Shoots__P Parameter: Age (day) Value: 7
  misc_feature: MA Experiment 20000184 PARAMETER Experiment Name: At_Shoots__P Parameter: Tissue Value: Shoots vs. Whole Plant
  misc_feature: MA Experiment ID: 20000185 Result: Down-regulated in Transcription
  misc_feature: MA Experiment 20000185 PARAMETER Experiment Name: At_Roots__P Parameter: Age (day) Value: 7 vs. 21
  misc_feature: MA Experiment 20000185 PARAMETER Experiment Name: At_Roots__P Parameter: Organism Value: A. thaliana
  misc_feature: MA Experiment 20000185 PARAMETER Experiment Name: At_Roots__P Parameter: Tissue Value: Roots vs. Whole Plant
  misc_feature: MA Experiment ID: 20000213 Result: Down-regulated in Transcription
  misc_feature: MA Experiment 20000213 PARAMETER Experiment Name: At_4deg_Cold_P Parameter: Timepoint (hr) Value: 2
  misc_feature: MA Experiment ID: 20000234 Result: Down-regulated in Transcription
  misc_feature: MA Experiment 20000234 PARAMETER Experiment Name: At_Siliques_P Parameter: Age (day) Value: 21
  misc_feature: MA Experiment 20000234 PARAMETER Experiment Name: At_Siliques_P Parameter: Organism Value: A. thaliana
  misc_feature: MA Experiment 20000234 PARAMETER Experiment Name: At_Siliques_P Parameter: Plant Line Value: WS
  misc_feature: MA Experiment 20000234 PARAMETER Experiment Name: At_Siliques_P Parameter: Tissue Value: Less Than 5mm Siliques vs. Whole Plant
  misc_feature: MA Experiment ID: 20000235 Result: Down-regulated in Transcription
  misc_feature: MA Experiment 20000235 PARAMETER Experiment Name: At_Siliques_P Parameter: Age (day) Value: 21
  misc_feature: MA Experiment 20000235 PARAMETER Experiment Name: At_Siliques_P Parameter: Organism Value: A. thaliana
  misc_feature: MA Experiment 20000235 PARAMETER Experiment Name: At_Siliques_P Parameter: Plant Line Value: WS
  misc_feature: MA Experiment 20000235 PARAMETER Experiment Name: At_Siliques_P Parameter: Tissue Value: 5-10mm Siliques vs. Whole Plant
  misc_feature: MA Experiment ID: 20000264 Result: Down-regulated in Transcription
  misc_feature: MA Experiment 20000264 PARAMETER Experiment Name: At_Open_Flower_P Parameter: Age (day) Value: 21
  misc_feature: MA Experiment 20000264 PARAMETER Experiment Name: At_Open_Flower_P Parameter: Plant Line Value: WS
  misc_feature: MA Experiment 20000264 PARAMETER Experiment Name: At_Open_Flower_P Parameter: Tissue Value: Open Flower vs. Whole Plant
  misc_feature: MA Experiment ID: 20000265 Result: Down-regulated in Transcription
  misc_feature: MA Experiment 20000265 PARAMETER Experiment Name: At_Open_Flower_P Parameter: Age (day) Value: 21
  misc_feature: MA Experiment 20000265 PARAMETER Experiment Name: At_Open_Flower_P Parameter: Plant Line Value: WS
  misc_feature: MA Experiment 20000265 PARAMETER Experiment Name: At_Open_Flower_P Parameter: Tissue Value: Closed Flower vs. Whole Plant
  misc_feature: MA Experiment ID: 20000286 Result: Down-regulated in Transcription
  misc_feature: MA Experiment 20000286 PARAMETER Experiment Name: At_Open_Flower_P Parameter: Age (day) Value: 21
  misc_feature: MA Experiment 20000286 PARAMETER Experiment Name: At_Open_Flower_P Parameter: Plant Line Value: WS
  misc_feature: MA Experiment 20000286 PARAMETER Experiment Name: At_Open_Flower_P Parameter: Tissue Value: Half Open vs. Whole Plant
  misc_feature: MA Experiment ID: 20000438 Result: Down-regulated in Transcription
  misc_feature: MA Experiment 20000438 PARAMETER Experiment Name: At_Shoots__P Parameter: Age (day) Value: 14
  misc_feature: MA Experiment 20000438 PARAMETER Experiment Name: At_Shoots__P Parameter: Tissue Value: Shoots vs. Whole Plant
  misc_feature: MA Experiment ID: 20000439 Result: Down-regulated in Transcription
  misc_feature: MA Experiment 20000439 PARAMETER Experiment Name: At_Roots__P Parameter: Age (day) Value: 14 vs. 21
  misc_feature: MA Experiment 20000439 PARAMETER Experiment Name: At_Roots__P Parameter: Organism Value: A. thaliana
  misc_feature: MA Experiment 20000439 PARAMETER Experiment Name: At_Roots__P Parameter: Tissue Value: Roots vs. Whole Plant
  misc_feature: MA Experiment ID: 20000453 Result: Up-regulated in Transcription
  misc_feature: MA Experiment 20000453 PARAMETER Experiment Name: At_100uM_ABA_P Parameter: Age (day) Value: 15
  misc_feature: MA Experiment 20000453 PARAMETER Experiment Name: At_100uM_ABA_P Parameter: Organism Value: A. thaliana
  misc_feature: MA Experiment 20000453 PARAMETER Experiment Name: At_100uM_ABA_P Parameter: Plant Line Value: WS
  misc_feature: MA Experiment 20000453 PARAMETER Experiment Name: At_100uM_ABA_P Parameter: Timepoint (hr) Value: 24
  misc_feature: MA Experiment 20000453 PARAMETER Experiment Name: At_100uM_ABA_P Parameter: Tissue Value: Aerial
  misc_feature: MA Experiment 20000453 PARAMETER Experiment Name: At_100uM_ABA_P Parameter: Treatment Value: 100uM ABA vs. No Treatment
  misc_feature: MA Experiment ID: 20000455 Result: Up-regulated in Transcription
  misc_feature: MA Experiment 20000455 PARAMETER Experiment Name: At_100uM_ABA_P Parameter: Age (day) Value: 16
  misc_feature: MA Experiment 20000455 PARAMETER Experiment Name: At_100uM_ABA_P Parameter: Organism Value: A. thaliana
  misc_feature: MA Experiment 20000455 PARAMETER Experiment Name: At_100uM_ABA_P Parameter: Plant Line Value: WS
  misc_feature: MA Experiment 20000455 PARAMETER Experiment Name: At_100uM_ABA_P Parameter: Timepoint (hr) Value: 48
  misc_feature: MA Experiment 20000455 PARAMETER Experiment Name: At_100uM_ABA_P Parameter: Tissue Value: Aerial
  misc_feature: MA Experiment 20000455 PARAMETER Experiment Name: At_100uM_ABA_P Parameter: Treatment Value: 100uM ABA vs. No Treatment
  misc_feature: MA Experiment ID: 20000573 Result: Up-regulated in Transcription
  misc_feature: MA Experiment 20000573 PARAMETER Experiment Name: At_100uM_ABA_Mutants__P Parameter: Organism Value: A. thaliana
  misc_feature: MA Experiment 20000573 PARAMETER Experiment Name: At_100uM_ABA_Mutants__P Parameter: Plant Line Value: CS22 vs. Ler wt
  misc_feature: MA Experiment 20000573 PARAMETER Experiment Name: At_100uM_ABA_Mutants__P Parameter: Timepoint (hr) Value: N/A
  misc_feature: MA Experiment 20000573 PARAMETER Experiment Name: At_100uM_ABA_Mutants__P Parameter: Tissue Value: Whole Plant
  misc_feature: MA Experiment 20000573 PARAMETER Experiment Name: At_100uM_ABA_Mutants__P Parameter: Treatment Value: None
  misc_feature: MA Experiment ID: 20000574 Result: Up-regulated in Transcription
  misc_feature: MA Experiment 20000574 PARAMETER Experiment Name: At_100uM_ABA_Mutants__P Parameter: Organism Value: A. thaliana
  misc_feature: MA Experiment 20000574 PARAMETER Experiment Name: At_100uM_ABA_Mutants__P Parameter: Plant Line Value: CS23 vs. Ler wt
  misc_feature: MA Experiment 20000574 PARAMETER Experiment Name: At_100uM_ABA_Mutants__P Parameter: Timepoint (hr) Value: N/A
  misc_feature: MA Experiment 20000574 PARAMETER Experiment Name: At_100uM_ABA_Mutants__P Parameter: Tissue Value: Whole Plant
  misc_feature: MA Experiment 20000574 PARAMETER Experiment Name: At_100uM_ABA_Mutants__P Parameter: Treatment Value: None
  misc_feature: MA Experiment ID: 20000794 Result: Down-regulated in Transcription
  misc_feature: MA Experiment 20000794 PARAMETER Experiment Name: At_Petals_P Parameter: Age (day) Value: 23-25 days
  misc_feature: MA Experiment 20000794 PARAMETER Experiment Name: At_Petals_P Parameter: Plant Line Value: WS
  misc_feature: MA Experiment 20000794 PARAMETER Experiment Name: At_Petals_P Parameter: Tissue Value: Petals vs. Whole plant
  misc_feature: MA Experiment ID: 20001450 Result: Up-regulated in Transcription
  misc_feature: MA Experiment 20001450 PARAMETER Experiment Name: At_Far-red-induction_P Parameter: Age (day) Value: 7
  misc_feature: MA Experiment 20001450 PARAMETER Experiment Name: At_Far-red-induction_P Parameter: Light Value: Far-red vs. White
  misc_feature: MA Experiment 20001450 PARAMETER Experiment Name: At_Far-red-induction_P Parameter: Organism Value: A. thaliana
  misc_feature: MA Experiment 20001450 PARAMETER Experiment Name: At_Far-red-induction_P Parameter: Plant Line Value: Columbia
  misc_feature: MA Experiment 20001450 PARAMETER Experiment Name: At_Far-red-induction_P Parameter: Timepoint (hr) Value: 8
  misc_feature: MA Experiment 20001450 PARAMETER Experiment Name: At_Far-red-induction_P Parameter: Tissue Value: Whole Plant
  misc_feature: MA Experiment ID: 20001451 Result: Up-regulated in Transcription
  misc_feature: MA Experiment 20001451 PARAMETER Experiment Name: At_Far-red-induction_P Parameter: Age (day) Value: 7
  misc_feature: MA Experiment 20001451 PARAMETER Experiment Name: At_Far-red-induction_P Parameter: Light Value: Far-red vs. White
  misc_feature: MA Experiment 20001451 PARAMETER Experiment Name: At_Far-red-induction_P Parameter: Organism Value: A. thaliana
  misc_feature: MA Experiment 20001451 PARAMETER Experiment Name: At_Far-red-induction_P Parameter: Plant Line Value: Columbia
  misc_feature: MA Experiment 20001451 PARAMETER Experiment Name: At_Far-red-induction_P Parameter: Timepoint (hr) Value: 24
  misc_feature: MA Experiment 20001451 PARAMETER Experiment Name: At_Far-red-induction_P Parameter: Tissue Value: Whole Plant
  misc_feature: MA Experiment ID: 20001458 Result: Down-regulated in Transcription
  misc_feature: MA Experiment 20001458 PARAMETER Experiment Name: At_50mM_NH4NO3_L-to-H_P Parameter: Age (day) Value: Undefined
  misc_feature: MA Experiment 20001458 PARAMETER Experiment Name: At_50mM_NH4NO3_L-to-H_P Parameter: Organism Value: Undefined
  misc_feature: MA Experiment 20001458 PARAMETER Experiment Name: At_50mM_NH4NO3_L-to-H_P Parameter: Plant Line Value: Undefined
  misc_feature: MA Experiment 20001458 PARAMETER Experiment Name: At_50mM_NH4NO3_L-to-H_P Parameter: Timepoint (hr) Value: 2
  misc_feature: MA Experiment 20001458 PARAMETER Experiment Name: At_50mM_NH4NO3_L-to-H_P Parameter: Tissue Value: Siliques
  misc_feature: MA Experiment 20001458 PARAMETER Experiment Name: At_50mM_NH4NO3_L-to-H_P Parameter: Treatment Value: 50mM NH4NO3 vs. 100mM Manitol
  misc_feature: MA Experiment ID: 20001459 Result: Down-regulated in Transcription
  misc_feature: MA Experiment 20001459 PARAMETER Experiment Name: At_50mM_NH4NO3_L-to-H_P Parameter: Age (day) Value: Undefined
  misc_feature: MA Experiment 20001459 PARAMETER Experiment Name: At_50mM_NH4NO3_L-to-H_P Parameter: Organism Value: Undefined
  misc_feature: MA Experiment 20001459 PARAMETER Experiment Name: At_50mM_NH4NO3_L-to-H_P Parameter: Plant Line Value: Undefined
  misc_feature: MA Experiment 20001459 PARAMETER Experiment Name: At_50mM_NH4NO3_L-to-H_P Parameter: Timepoint (hr) Value: 4
  misc_feature: MA Experiment 20001459 PARAMETER Experiment Name: At_50mM_NH4NO3_L-to-H_P Parameter: Tissue Value: Siliques
  misc_feature: MA Experiment 20001459 PARAMETER Experiment Name: At_50mM_NH4NO3_L-to-H_P Parameter: Treatment Value: 50mM NH4NO3 vs. 100mM Manitol
  misc_feature: MA Experiment ID: 20001504 Result: Down-regulated in Transcription
  misc_feature: MA Experiment 20001504 PARAMETER Experiment Name: At_Far-red-enriched_P Parameter: Age (day) Value: 10
  misc_feature: MA Experiment 20001504 PARAMETER Experiment Name: At_Far-red-enriched_P Parameter: Light Value: Far-red enriched vs. White
  misc_feature: MA Experiment 20001504 PARAMETER Experiment Name: At_Far-red-enriched_P Parameter: Organism Value: A. thaliana
  misc_feature: MA Experiment 20001504 PARAMETER Experiment Name: At_Far-red-enriched_P Parameter: Plant Line Value: Columbia
  misc_feature: MA Experiment 20001504 PARAMETER Experiment Name: At_Far-red-enriched_P Parameter: Timepoint (day) Value: 6
  misc_feature: MA Experiment 20001504 PARAMETER Experiment Name: At_Far-red-enriched_P Parameter: Tissue Value: Whole Plant
  misc_feature: MA Experiment ID: 20001556 Result: Up-regulated in Transcription
  misc_feature: MA Experiment 20001556 PARAMETER Experiment Name: At_Drought_Soil_Dry_P Parameter: Age (day) Value: 26
  misc_feature: MA Experiment 20001556 PARAMETER Experiment Name: At_Drought_Soil_Dry_P Parameter: Organism Value: A. thaliana
  misc_feature: MA Experiment 20001556 PARAMETER Experiment Name: At_Drought_Soil_Dry_P Parameter: Plant Line Value: WS
  misc_feature: MA Experiment 20001556 PARAMETER Experiment Name: At_Drought_Soil_Dry_P Parameter: Post Timepoint (hr) Value: None
  misc_feature: MA Experiment 20001556 PARAMETER Experiment Name: At_Drought_Soil_Dry_P Parameter: Post-Treatment Value: None
  misc_feature: MA Experiment 20001556 PARAMETER Experiment Name: At_Drought_Soil_Dry_P Parameter: Timepoint (day) Value: 12
  misc_feature: MA Experiment 20001556 PARAMETER Experiment Name: At_Drought_Soil_Dry_P Parameter: Treatment Value: Drought vs. No Drought
  misc_feature: MA Experiment ID: 20001557 Result: Down-regulated in Transcription
  misc_feature: MA Experiment 20001557 PARAMETER Experiment Name: At_Drought_Soil_Dry_P Parameter: Age (day) Value: 27
  misc_feature: MA Experiment 20001557 PARAMETER Experiment Name: At_Drought_Soil_Dry_P Parameter: Organism Value: A. thaliana
  misc_feature: MA Experiment 20001557 PARAMETER Experiment Name: At_Drought_Soil_Dry_P Parameter: Plant Line Value: WS
  misc_feature: MA Experiment 20001557 PARAMETER Experiment Name: At_Drought_Soil_Dry_P Parameter: Post Timepoint (hr) Value: 3
  misc_feature: MA Experiment 20001557 PARAMETER Experiment Name: At_Drought_Soil_Dry_P Parameter: Post-Treatment Value: Re-Water vs. No Drought
  misc_feature: MA Experiment 20001557 PARAMETER Experiment Name: At_Drought_Soil_Dry_P Parameter: Timepoint (day) Value: 13
  misc_feature: MA Experiment 20001557 PARAMETER Experiment Name: At_Drought_Soil_Dry_P Parameter: Treatment Value: Drought vs. No Drought
  misc_feature: MA Experiment ID: 20001560 Result: Up-regulated in Transcription
  misc_feature: MA Experiment 20001560 PARAMETER Experiment Name: At_Drought_Soil_Dry_P Parameter: Age (day) Value: 28
  misc_feature: MA Experiment 20001560 PARAMETER Experiment Name: At_Drought_Soil_Dry_P Parameter: Organism Value: A. thaliana
  misc_feature: MA Experiment 20001560 PARAMETER Experiment Name: At_Drought_Soil_Dry_P Parameter: Plant Line Value: WS
  misc_feature: MA Experiment 20001560 PARAMETER Experiment Name: At_Drought_Soil_Dry_P Parameter: Post Timepoint (hr) Value: None
  misc_feature: MA Experiment 20001560 PARAMETER Experiment Name: At_Drought_Soil_Dry_P Parameter: Post-Treatment Value: None
  misc_feature: MA Experiment 20001560 PARAMETER Experiment Name: At_Drought_Soil_Dry_P Parameter: Timepoint (day) Value: 14
  misc_feature: MA Experiment 20001560 PARAMETER Experiment Name: At_Drought_Soil_Dry_P Parameter: Treatment Value: Drought vs. No Drought
  misc_feature: MA Experiment ID: 20001904 Result: Up-regulated in Transcription
  misc_feature: MA Experiment 20001904 PARAMETER Experiment Name: At_Drought_Reproduction_P Parameter: Age (day) Value: 37
  misc_feature: MA Experiment 20001904 PARAMETER Experiment Name: At_Drought_Reproduction_P Parameter: Organism Value: A. thaliana
  misc_feature: MA Experiment 20001904 PARAMETER Experiment Name: At_Drought_Reproduction_P Parameter: Plant Line Value: WS
  misc_feature: MA Experiment 20001904 PARAMETER Experiment Name: At_Drought_Reproduction_P Parameter: Timepoint (day) Value: 7
  misc_feature: MA Experiment 20001904 PARAMETER Experiment Name: At_Drought_Reproduction_P Parameter: Tissue Value: Rosettes
  misc_feature: MA Experiment 20001904 PARAMETER Experiment Name: At_Drought_Reproduction_P Parameter: Treatment Value: Drought vs. No Drought
  misc_feature: MA Experiment ID: 20001910 Result: Up-regulated in Transcription
  misc_feature: MA Experiment 20001910 PARAMETER Experiment Name: At_Drought_Reproduction_P Parameter: Age (day) Value: 37
  misc_feature: MA Experiment 20001910 PARAMETER Experiment Name: At_Drought_Reproduction_P Parameter: Organism Value: A. thaliana
  misc_feature: MA Experiment 20001910 PARAMETER Experiment Name: At_Drought_Reproduction_P Parameter: Plant Line Value: WS
  misc_feature: MA Experiment 20001910 PARAMETER Experiment Name: At_Drought_Reproduction_P Parameter: Timepoint (day) Value: 7
  misc_feature: MA Experiment 20001910 PARAMETER Experiment Name: At_Drought_Reproduction_P Parameter: Tissue Value: Flowers
  misc_feature: MA Experiment 20001910 PARAMETER Experiment Name: At_Drought_Reproduction_P Parameter: Treatment Value: Drought vs. No Drought

SEQ ID NO: 94115 - protein, 284 aa, Arabidopsis thaliana; identical to SEQ ID NO: 90359
  peptide (1)..(284): Ceres Seq. ID no. 12723620
  misc_feature (30)..(211): Pfam Name: Glycosyl hydrolases family 16 Pfam Description: Glycosyl hydrolases family 16
  misc_feature (1)..(284): Homolog of NCBI NO: 22327914 NR Description: xyloglucan endotransglycosylase (XTR3); protein At5g57550.1 [Arabidopsis thaliana] endoxyloglucan transferase [Arabidopsis thaliana]
  misc_feature (8)..(284): Homolog of NCBI NO: 2129773 NR Description: xyloglucan endo-1,4-beta-D-glucanase (EC 3.2.1.-) - Arabidopsis thaliana (fragment) >gi|1244752|gb|AAB18364.1|
  misc_feature (1)..(282): Homolog of NCBI NO: 29500891 NR Description: putative xyloglucan endotransglycosylase [Cucumis >gi|29500899|emb|CAD87533.1| putative xyloglucan
  misc_feature (4)..(284): Homolog of NCBI NO: 8886865 NR Description: xyloglucan endotransglycosylase XET1 [Asparagus
  misc_feature (4)..(282): Homolog of NCBI NO: 29500893 NR Description: putative xyloglucan endotransglycosylase [Cucumis >gi|29500901|emb|CAD87534.1| putative xyloglucan

SEQ ID NO: 94116 - protein, 208 aa, Arabidopsis thaliana; identical to SEQ ID NO: 90360
  peptide (1)..(208): Ceres Seq. ID no. 12723621
  misc_feature (1)..(135): Pfam Name: Glycosyl hydrolases family 16 Pfam Description: Glycosyl hydrolases family 16
  misc_feature (1)..(208): Homolog of NCBI NO: 22327914 NR Description: xyloglucan endotransglycosylase (XTR3); protein At5g57550.1 [Arabidopsis thaliana] endoxyloglucan transferase [Arabidopsis thaliana]
  misc_feature (1)..(208): Homolog of NCBI NO: 2129773 NR Description: xyloglucan endo-1,4-beta-D-glucanase (EC 3.2.1.-) - Arabidopsis thaliana (fragment) >gi|1244752|gb|AAB18364.1|
  misc_feature (1)..(206): Homolog of NCBI NO: 29500891 NR Description: putative xyloglucan endotransglycosylase [Cucumis >gi|29500899|emb|CAD87533.1| putative xyloglucan
  misc_feature (1)..(208): Homolog of NCBI NO: 8886865 NR Description: xyloglucan endotransglycosylase XET1 [Asparagus
  misc_feature (1)..(206): Homolog of NCBI NO: 29500893 NR Description: putative xyloglucan endotransglycosylase [Cucumis >gi|29500901|emb|CAD87534.1| putative xyloglucan

SEQ ID NO: 94117 - protein, 165 aa, Arabidopsis thaliana; identical to SEQ ID NO: 90361
  peptide (1)..(165): Ceres Seq. ID no. 12723622
  misc_feature (1)..(92): Pfam Name: Glycosyl hydrolases family 16 Pfam Description: Glycosyl hydrolases family 16
  misc_feature (1)..(165): Homolog of NCBI NO: 22327914 NR Description: xyloglucan endotransglycosylase (XTR3); protein At5g57550.1 [Arabidopsis thaliana] endoxyloglucan transferase [Arabidopsis thaliana]
  misc_feature (1)..(165): Homolog of NCBI NO: 2129773 NR Description: xyloglucan endo-1,4-beta-D-glucanase (EC 3.2.1.-) - Arabidopsis thaliana (fragment) >gi|1244752|gb|AAB18364.1|
  misc_feature (1)..(163): Homolog of NCBI NO: 29500891 NR Description: putative xyloglucan endotransglycosylase [Cucumis >gi|29500899|emb|CAD87533.1| putative xyloglucan
  misc_feature (1)..(165): Homolog of NCBI NO: 8886865 NR Description: xyloglucan endotransglycosylase XET1 [Asparagus
  misc_feature (1)..(163): Homolog of NCBI NO: 29500893 NR Description: putative xyloglucan endotransglycosylase [Cucumis >gi|29500901|emb|CAD87534.1| putative xyloglucan

SEQ ID NO: 94118 - DNA, 2388 bp, Arabidopsis thaliana; identical to SEQ ID NO: 90362
  misc_feature (1)..(2388): Ceres Seq. ID no. 12723627
  misc_feature: MA Experiment ID: 20000182 Result: Up-regulated in Transcription
  misc_feature: MA Experiment 20000182 PARAMETER Experiment Name: At_2mM_SA_P Parameter: Age (day) Value: 14
  misc_feature: MA Experiment 20000182 PARAMETER Experiment Name: At_2mM_SA_P Parameter: Organism Value: A. thaliana
  misc_feature: MA Experiment 20000182 PARAMETER Experiment Name: At_2mM_SA_P Parameter: Plant Line Value: WS
  misc_feature: MA Experiment 20000182 PARAMETER Experiment Name: At_2mM_SA_P Parameter: Timepoint (hr) Value: 6
  misc_feature: MA Experiment 20000182 PARAMETER Experiment Name: At_2mM_SA_P Parameter: Tissue Value: Aerial
  misc_feature: MA Experiment 20000182 PARAMETER Experiment Name: At_2mM_SA_P Parameter: Treatment Value: 2mM SA vs. No Treatment
  misc_feature: MA Experiment ID: 20000184 Result: Down-regulated in Transcription
  misc_feature: MA Experiment 20000184 PARAMETER Experiment Name: At_Shoots__P Parameter: Age (day) Value: 7
  misc_feature: MA Experiment 20000184 PARAMETER Experiment Name: At_Shoots__P Parameter: Tissue Value: Shoots vs. Whole Plant
  misc_feature: MA Experiment ID: 20000234 Result: Down-regulated in Transcription
  misc_feature: MA Experiment 20000234 PARAMETER Experiment Name: At_Siliques_P Parameter: Age (day) Value: 21
  misc_feature: MA Experiment 20000234 PARAMETER Experiment Name: At_Siliques_P Parameter: Organism Value: A. thaliana
  misc_feature: MA Experiment 20000234 PARAMETER Experiment Name: At_Siliques_P Parameter: Plant Line Value: WS
  misc_feature: MA Experiment 20000234 PARAMETER Experiment Name: At_Siliques_P Parameter: Tissue Value: Less Than 5mm Siliques vs. Whole Plant
  misc_feature: MA Experiment ID: 20000235 Result: Down-regulated in Transcription
  misc_feature: MA Experiment 20000235 PARAMETER Experiment Name: At_Siliques_P Parameter: Age (day) Value: 21
  misc_feature: MA Experiment 20000235 PARAMETER Experiment Name: At_Siliques_P Parameter: Organism Value: A. thaliana
  misc_feature: MA Experiment 20000235 PARAMETER Experiment Name: At_Siliques_P Parameter: Plant Line Value: WS
  misc_feature: MA Experiment 20000235 PARAMETER Experiment Name: At_Siliques_P Parameter: Tissue Value: 5-10mm Siliques vs. Whole Plant
  misc_feature: MA Experiment ID: 20000265 Result: Down-regulated in Transcription
  misc_feature: MA Experiment 20000265 PARAMETER Experiment Name: At_Open_Flower_P Parameter: Age (day) Value: 21
  misc_feature: MA Experiment 20000265 PARAMETER Experiment Name: At_Open_Flower_P Parameter: Plant Line Value: WS
  misc_feature: MA Experiment 20000265 PARAMETER Experiment Name: At_Open_Flower_P Parameter: Tissue Value: Closed Flower vs. Whole Plant

SEQ ID NO: 94119 - protein, 647 aa, Arabidopsis thaliana; identical to SEQ ID NO: 90363
  peptide (1)..(647): Ceres Seq. ID no. 12723628
  misc_feature (13)..(458): Homolog of NCBI NO: 30687005 NR Description: calmodulin-binding protein [Arabidopsis thaliana]
  misc_feature (460)..(647): Homolog of NCBI NO: 30687005 NR Description: calmodulin-binding protein [Arabidopsis thaliana]
  misc_feature (105)..(642): Homolog of NCBI NO: 7489107 NR Description: calmodulin-binding protein TCB60 - common tobacco
  misc_feature (101)..(572): Homolog of NCBI NO: 7484830 NR Description: calmodulin-binding protein homolog F14M19.80 -
  misc_feature (59)..(483): Homolog of NCBI NO: 25354646 NR Description: probable calmodulin-binding protein [imported] -
  misc_feature (1)..(60): Homolog of NCBI NO: 25354646 NR Description: probable calmodulin-binding protein [imported] -
  misc_feature (7)..(427): Homolog of NCBI NO: 22329041 NR Description: calmodulin-binding protein; protein id:
  misc_feature (458)..(640): Homolog of NCBI NO: 22329041 NR Description: calmodulin-binding protein; protein id:
  misc_feature (106)..(436): Homolog of NCBI NO: 15224117 NR Description: calmodulin-binding protein; protein id:
  misc_feature (455)..(640): Homolog of NCBI NO: 15224117 NR Description: calmodulin-binding protein; protein id:

SEQ ID NO: 94120 - protein, 646 aa, Arabidopsis thaliana; identical to SEQ ID NO: 90364
  peptide (1)..(646): Ceres Seq. ID no. 12723629
  misc_feature (12)..(457): Homolog of NCBI NO: 30687005 NR Description: calmodulin-binding protein [Arabidopsis thaliana]
  misc_feature (459)..(646): Homolog of NCBI NO: 30687005 NR Description: calmodulin-binding protein [Arabidopsis thaliana]
  misc_feature (104)..(641): Homolog of NCBI NO: 7489107 NR Description: calmodulin-binding protein TCB60 - common tobacco
  misc_feature (100)..(571): Homolog of NCBI NO: 7484830 NR Description: calmodulin-binding protein homolog F14M19.80 -
  misc_feature (58)..(482): Homolog of NCBI NO: 25354646 NR Description: probable calmodulin-binding protein [imported] -
  misc_feature (1)..(59): Homolog of NCBI NO: 25354646 NR Description: probable calmodulin-binding protein [imported] -
  misc_feature (6)..(426): Homolog of NCBI NO: 22329041 NR Description: calmodulin-binding protein; protein id:
  misc_feature (457)..(639): Homolog of NCBI NO: 22329041 NR Description: calmodulin-binding protein; protein id:
  misc_feature (105)..(435): Homolog of NCBI NO: 15224117 NR Description: calmodulin-binding protein; protein id:
  misc_feature (454)..(639): Homolog of NCBI NO: 15224117 NR Description: calmodulin-binding protein; protein id:

SEQ ID NO: 94121 - protein, 639 aa, Arabidopsis thaliana; identical to SEQ ID NO: 90365
  peptide (1)..(639): Ceres Seq. ID no. 12723630
  misc_feature (5)..(450): Homolog of NCBI NO: 30687005 NR Description: calmodulin-binding protein [Arabidopsis thaliana]
  misc_feature (452)..(639): Homolog of NCBI NO: 30687005 NR Description: calmodulin-binding protein [Arabidopsis thaliana]
  misc_feature (97)..(634): Homolog of NCBI NO: 7489107 NR Description: calmodulin-binding protein TCB60 - common tobacco
  misc_feature (93)..(564): Homolog of NCBI NO: 7484830 NR Description: calmodulin-binding protein homolog F14M19.80 -
  misc_feature (51)..(475): Homolog of NCBI NO: 25354646 NR Description: probable calmodulin-binding protein [imported] -
  misc_feature (1)..(52): Homolog of NCBI NO: 25354646 NR Description: probable calmodulin-binding protein [imported] -
  misc_feature (1)..(419): Homolog of NCBI NO: 22329041 NR Description: calmodulin-binding protein; protein id:
  misc_feature (450)..(632): Homolog of NCBI NO: 22329041 NR Description: calmodulin-binding protein; protein id:
  misc_feature (98)..(428): Homolog of NCBI NO: 15224117 NR Description: calmodulin-binding protein; protein id:
  misc_feature (447)..(632): Homolog of NCBI NO: 15224117 NR Description: calmodulin-binding protein; protein id:

SEQ ID NO: 94122 - DNA, 3165 bp, Arabidopsis thaliana; identical to SEQ ID NO: 90366
  misc_feature (1)..(3165): Ceres Seq. ID no. 12723631
  misc_feature: MA Experiment ID: 20000166 Result: Up-regulated in Transcription
  misc_feature: MA Experiment 20000166 PARAMETER Experiment Name: At_100uM_ABA_P Parameter: Age (day) Value: 14
  misc_feature: MA Experiment 20000166 PARAMETER Experiment Name: At_100uM_ABA_P Parameter: Organism Value: A. thaliana
  misc_feature: MA Experiment 20000166 PARAMETER Experiment Name: At_100uM_ABA_P Parameter: Plant Line Value: WS
  misc_feature: MA Experiment 20000166 PARAMETER Experiment Name: At_100uM_ABA_P Parameter: Timepoint (hr) Value: 1
  misc_feature: MA Experiment 20000166 PARAMETER Experiment Name: At_100uM_ABA_P Parameter: Tissue Value: Aerial
  misc_feature: MA Experiment 20000166 PARAMETER Experiment Name: At_100uM_ABA_P Parameter: Treatment Value: 100uM ABA vs. No Treatment
  misc_feature: MA Experiment ID: 20000173 Result: Up-regulated in Transcription
  misc_feature: MA Experiment 20000173 PARAMETER Experiment Name: At_42deg_Heat_P Parameter: Age (day) Value: 14
  misc_feature: MA Experiment 20000173 PARAMETER Experiment Name: At_42deg_Heat_P Parameter: Organism Value: A. thaliana
  misc_feature: MA Experiment 20000173 PARAMETER Experiment Name: At_42deg_Heat_P Parameter: Plant Line Value: WS
  misc_feature: MA Experiment 20000173 PARAMETER Experiment Name: At_42deg_Heat_P Parameter: Temperature (deg C) Value: 42 vs. 22
  misc_feature: MA Experiment 20000173 PARAMETER Experiment Name: At_42deg_Heat_P Parameter: Timepoint (hr) Value: 6
  misc_feature: MA Experiment 20000173 PARAMETER Experiment Name: At_42deg_Heat_P Parameter: Tissue Value: Aerial
  misc_feature: MA Experiment ID: 20000180 Result: Up-regulated in Transcription
  misc_feature: MA Experiment 20000180 PARAMETER Experiment Name: At_Germinating_Seeds_P Parameter: Age (hr) Value: 24 vs. 0
  misc_feature: MA Experiment 20000180 PARAMETER Experiment Name: At_Germinating_Seeds_P Parameter: Tissue Value: Germinating Seeds
  misc_feature: MA Experiment ID: 20000264 Result: Up-regulated in Transcription
  misc_feature: MA Experiment 20000264 PARAMETER Experiment Name: At_Open_Flower_P Parameter: Age (day) Value: 21
  misc_feature: MA Experiment 20000264 PARAMETER Experiment Name: At_Open_Flower_P Parameter: Plant Line Value: WS
  misc_feature: MA Experiment 20000264 PARAMETER Experiment Name: At_Open_Flower_P Parameter: Tissue Value: Open Flower vs. Whole Plant
  misc_feature: MA Experiment ID: 20000267 Result: Up-regulated in Transcription
  misc_feature: MA Experiment 20000267 PARAMETER Experiment Name: At_Drought_P Parameter: Age (day) Value: 7
  misc_feature: MA Experiment 20000267 PARAMETER Experiment Name: At_Drought_P Parameter: Organism Value: A. thaliana
  misc_feature: MA Experiment 20000267 PARAMETER Experiment Name: At_Drought_P Parameter: Plant Line Value: WS
  misc_feature: MA Experiment 20000267 PARAMETER Experiment Name: At_Drought_P Parameter: Timepoint (hr) Value: 6
  misc_feature: MA Experiment 20000267 PARAMETER Experiment Name: At_Drought_P Parameter: Tissue Value: Whole Plant
  misc_feature: MA Experiment 20000267 PARAMETER Experiment Name: At_Drought_P Parameter: Treatment Value: Drought vs. No Drought
  misc_feature: MA Experiment ID: 20000436 Result: Up-regulated in Transcription
  misc_feature: MA Experiment 20000436 PARAMETER Experiment Name: At_Drought_P Parameter: Age (day) Value: 7
  misc_feature: MA Experiment 20000436 PARAMETER Experiment Name: At_Drought_P Parameter: Organism Value: A. thaliana
  misc_feature: MA Experiment 20000436 PARAMETER Experiment Name: At_Drought_P Parameter: Plant Line Value: WS
  misc_feature: MA Experiment 20000436 PARAMETER Experiment Name: At_Drought_P Parameter: Timepoint (hr) Value: 12
  misc_feature: MA Experiment 20000436 PARAMETER Experiment Name: At_Drought_P Parameter: Tissue Value: Whole Plant
  misc_feature: MA Experiment 20000436 PARAMETER Experiment Name: At_Drought_P Parameter: Treatment Value: Drought vs. No Drought
  misc_feature: MA Experiment ID: 20000437 Result: Up-regulated in Transcription
  misc_feature: MA Experiment 20000437 PARAMETER Experiment Name: At_Drought_P Parameter: Age (day) Value: 8
  misc_feature: MA Experiment 20000437 PARAMETER Experiment Name: At_Drought_P Parameter: Organism Value: A. thaliana
  misc_feature: MA Experiment 20000437 PARAMETER Experiment Name: At_Drought_P Parameter: Plant Line Value: WS
  misc_feature: MA Experiment 20000437 PARAMETER Experiment Name: At_Drought_P Parameter: Timepoint (hr) Value: 24
  misc_feature: MA Experiment 20000437 PARAMETER Experiment Name: At_Drought_P Parameter: Tissue Value: Whole Plant
  misc_feature: MA Experiment 20000437 PARAMETER Experiment Name: At_Drought_P Parameter: Treatment Value: Drought vs. No Drought
  misc_feature: MA Experiment ID: 20000438 Result: Up-regulated in Transcription
  misc_feature: MA Experiment 20000438 PARAMETER Experiment Name: At_Shoots__P Parameter: Age (day) Value: 14
  misc_feature: MA Experiment 20000438 PARAMETER Experiment Name: At_Shoots__P Parameter: Tissue Value: Shoots vs. Whole Plant
  misc_feature: MA Experiment ID: 20000573 Result: Down-regulated in Transcription
  misc_feature: MA Experiment 20000573 PARAMETER Experiment Name: At_100uM_ABA_Mutants__P Parameter: Organism Value: A. thaliana
  misc_feature: MA Experiment 20000573 PARAMETER Experiment Name: At_100uM_ABA_Mutants__P Parameter: Plant Line Value: CS22 vs. Ler wt
  misc_feature: MA Experiment 20000573 PARAMETER Experiment Name: At_100uM_ABA_Mutants__P Parameter: Timepoint (hr) Value: N/A
  misc_feature: MA Experiment 20000573 PARAMETER Experiment Name: At_100uM_ABA_Mutants__P Parameter: Tissue Value: Whole Plant
  misc_feature: MA Experiment 20000573 PARAMETER Experiment Name: At_100uM_ABA_Mutants__P Parameter: Treatment Value: None
  misc_feature: MA Experiment ID: 20000574 Result: Down-regulated in Transcription
  misc_feature: MA Experiment 20000574 PARAMETER Experiment Name: At_100uM_ABA_Mutants__P Parameter: Organism Value: A. thaliana
  misc_feature: MA Experiment 20000574 PARAMETER Experiment Name: At_100uM_ABA_Mutants__P Parameter: Plant Line Value: CS23 vs. Ler wt
  misc_feature: MA Experiment 20000574 PARAMETER Experiment Name: At_100uM_ABA_Mutants__P Parameter: Timepoint (hr) Value: N/A
  misc_feature: MA Experiment 20000574 PARAMETER Experiment Name: At_100uM_ABA_Mutants__P Parameter: Tissue Value: Whole Plant
  misc_feature: MA Experiment 20000574 PARAMETER Experiment Name: At_100uM_ABA_Mutants__P Parameter: Treatment Value: None
  misc_feature: MA Experiment ID: 20000794 Result: Up-regulated in Transcription
  misc_feature: MA Experiment 20000794 PARAMETER Experiment Name: At_Petals_P Parameter: Age (day) Value: 23-25 days
  misc_feature: MA Experiment 20000794 PARAMETER Experiment Name: At_Petals_P Parameter: Plant Line Value: WS
  misc_feature: MA Experiment 20000794 PARAMETER Experiment Name: At_Petals_P Parameter: Tissue Value: Petals vs. Whole plant
  misc_feature: MA Experiment ID: 20001248 Result: Down-regulated in Transcription
  misc_feature: MA Experiment 20001248 PARAMETER Experiment Name: At_Far-red-induction_P Parameter: Age (day) Value: 7
  misc_feature: MA Experiment 20001248 PARAMETER Experiment Name: At_Far-red-induction_P Parameter: Light Value: Far-red vs. White
  misc_feature: MA Experiment 20001248 PARAMETER Experiment Name: At_Far-red-induction_P Parameter: Organism Value: A. thaliana
  misc_feature: MA Experiment 20001248 PARAMETER Experiment Name: At_Far-red-induction_P Parameter: Plant Line Value: Columbia
  misc_feature: MA Experiment 20001248 PARAMETER Experiment Name: At_Far-red-induction_P Parameter: Timepoint (hr) Value: 4
  misc_feature: MA Experiment 20001248 PARAMETER Experiment Name: At_Far-red-induction_P Parameter: Tissue Value: Whole Plant
  misc_feature: MA Experiment ID: 20001905 Result: Up-regulated in Transcription
  misc_feature: MA Experiment 20001905 PARAMETER Experiment Name: At_Drought_Reproduction_P Parameter: Age (day) Value: 40
  misc_feature: MA Experiment 20001905 PARAMETER Experiment Name: At_Drought_Reproduction_P Parameter: Organism Value: A. thaliana
  misc_feature: MA Experiment 20001905 PARAMETER Experiment Name: At_Drought_Reproduction_P Parameter: Plant Line Value: WS
  misc_feature: MA Experiment 20001905 PARAMETER Experiment Name: At_Drought_Reproduction_P Parameter: Timepoint (day) Value: 10
  misc_feature: MA Experiment 20001905 PARAMETER Experiment Name: At_Drought_Reproduction_P Parameter: Tissue Value: Rosettes
  misc_feature: MA Experiment 20001905 PARAMETER Experiment Name: At_Drought_Reproduction_P Parameter: Treatment Value: Drought vs. No Drought
  misc_feature: MA Experiment ID: 20001911 Result: Up-regulated in Transcription
  misc_feature: MA Experiment 20001911 PARAMETER Experiment Name: At_Drought_Reproduction_P Parameter: Age (day) Value: 40
  misc_feature: MA Experiment 20001911 PARAMETER Experiment Name: At_Drought_Reproduction_P Parameter: Organism Value: A. thaliana
  misc_feature: MA Experiment 20001911 PARAMETER Experiment Name: At_Drought_Reproduction_P Parameter: Plant Line Value: WS
  misc_feature: MA Experiment 20001911 PARAMETER Experiment Name: At_Drought_Reproduction_P Parameter: Timepoint (day) Value: 10
  misc_feature: MA Experiment 20001911 PARAMETER Experiment Name: At_Drought_Reproduction_P Parameter: Tissue Value: Flowers
  misc_feature: MA Experiment 20001911 PARAMETER Experiment Name: At_Drought_Reproduction_P Parameter: Treatment Value: Drought vs. No Drought

SEQ ID NO: 94123 - protein, 1054 aa, Arabidopsis thaliana; identical to SEQ ID NO: 90367
  peptide (1)..(1054): Ceres Seq. ID no. 12723632
  misc_feature (38)..(125): Pfam Name: PB1 domain Pfam Description: PB1 domain
  misc_feature (724)..(1050): Homolog of NCBI NO: 15219183 NR Description: putative Ser/Thr protein kinase; protein id:
  misc_feature (23)..(270): Homolog of NCBI NO: 15219183 NR Description: putative Ser/Thr protein kinase; protein id:
  misc_feature (735)..(1050): Homolog of NCBI NO: 15219417 NR Description: hypothetical protein; protein id: At1g79570.1
  misc_feature (23)..(158): Homolog of NCBI NO: 15219417 NR Description: hypothetical protein; protein id: At1g79570.1
  misc_feature (773)..(1054): Homolog of NCBI NO: 15232679 NR Description: protein kinase - like protein; protein id:
  misc_feature (7)..(155): Homolog of NCBI NO: 15232679 NR Description: protein kinase - like protein; protein id:
  misc_feature (766)..(1050): Homolog of NCBI NO: 15226883 NR Description: putative protein kinase; protein id: At2g35050.1
  misc_feature (12)..(154): Homolog of NCBI NO: 15226883 NR Description: putative protein kinase; protein id: At2g35050.1
  misc_feature (735)..(1054): Homolog of NCBI NO: 15219796 NR Description: putative Ser/Thr protein kinase; protein id:
  misc_feature (21)..(156): Homolog of NCBI NO: 15219796 NR Description: putative Ser/Thr protein kinase; protein id:

SEQ ID NO: 94124 - protein, 990 aa, Arabidopsis thaliana; identical to SEQ ID NO: 90368
  peptide (1)..(990): Ceres Seq. ID no. 12723633
  misc_feature (1)..(61): Pfam Name: PB1 domain Pfam Description: PB1 domain
  misc_feature (660)..(986): Homolog of NCBI NO: 15219183 NR Description: putative Ser/Thr protein kinase; protein id:
  misc_feature (1)..(206): Homolog of NCBI NO: 15219183 NR Description: putative Ser/Thr protein kinase; protein id:
  misc_feature (671)..(986): Homolog of NCBI NO: 15219417 NR Description: hypothetical protein; protein id: At1g79570.1
  misc_feature (1)..(94): Homolog of NCBI NO: 15219417 NR Description: hypothetical protein; protein id: At1g79570.1
  misc_feature (709)..(990): Homolog of NCBI NO: 15232679 NR Description: protein kinase - like protein; protein id:
  misc_feature (1)..(91): Homolog of NCBI NO: 15232679 NR Description: protein kinase - like protein; protein id:
  misc_feature (702)..(986): Homolog of NCBI NO: 15226883 NR Description: putative protein kinase; protein id: At2g35050.1
  misc_feature (1)..(90): Homolog of NCBI NO: 15226883 NR Description: putative protein kinase; protein id: At2g35050.1
  misc_feature (671)..(990): Homolog of NCBI NO: 15219796 NR Description: putative Ser/Thr protein kinase; protein id:
  misc_feature (1)..(92): Homolog of NCBI NO: 15219796 NR Description: putative Ser/Thr protein kinase; protein id:

SEQ ID NO: 94125 - protein, 987 aa, Arabidopsis thaliana; identical to SEQ ID NO: 90369
  peptide (1)..(987): Ceres Seq. ID no. 12723634
  misc_feature (1)..(58): Pfam Name: PB1 domain Pfam Description: PB1 domain
  misc_feature (657)..(983): Homolog of NCBI NO: 15219183 NR Description: putative Ser/Thr protein kinase; protein id:
  misc_feature (1)..(203): Homolog of NCBI NO: 15219183 NR Description: putative Ser/Thr protein kinase; protein id:
  misc_feature (668)..(983): Homolog of NCBI NO: 15219417 NR Description: hypothetical protein; protein id: At1g79570.1
  misc_feature (1)..(91): Homolog of NCBI NO: 15219417 NR Description: hypothetical protein; protein id: At1g79570.1
  misc_feature (706)..(987): Homolog of NCBI NO: 15232679 NR Description: protein kinase - like protein; protein id:
  misc_feature (1)..(88): Homolog of NCBI NO: 15232679 NR Description: protein kinase - like protein; protein id:
  misc_feature (699)..(983): Homolog of NCBI NO: 15226883 NR Description: putative protein kinase; protein id: At2g35050.1
  misc_feature (1)..(87): Homolog of NCBI NO: 15226883 NR Description: putative protein kinase; protein id: At2g35050.1
  misc_feature (668)..(987): Homolog of NCBI NO: 15219796 NR Description: putative Ser/Thr protein kinase; protein id:
  misc_feature (1)..(89): Homolog of NCBI NO: 15219796 NR Description: putative Ser/Thr protein kinase; protein id:

SEQ ID NO: 94126 - DNA, 1179 bp, Arabidopsis thaliana; identical to SEQ ID NO: 90370
  misc_feature (1)..(1179): Ceres Seq. ID no. 12723635
  misc_feature: MA Experiment ID: 20000184 Result: Up-regulated in Transcription
  misc_feature: MA Experiment 20000184 PARAMETER Experiment Name: At_Shoots__P Parameter: Age (day) Value: 7
  misc_feature: MA Experiment 20000184 PARAMETER Experiment Name: At_Shoots__P Parameter: Tissue Value: Shoots vs. Whole Plant
  misc_feature: MA Experiment ID: 20000438 Result: Up-regulated in Transcription
  misc_feature: MA Experiment 20000438 PARAMETER Experiment Name: At_Shoots__P Parameter: Age (day) Value: 14
  misc_feature: MA Experiment 20000438 PARAMETER Experiment Name: At_Shoots__P Parameter: Tissue Value: Shoots vs. Whole Plant
  misc_feature: MA Experiment ID: 20000439 Result: Up-regulated in Transcription
  misc_feature: MA Experiment 20000439 PARAMETER Experiment Name: At_Roots__P Parameter: Age (day) Value: 14 vs. 21
  misc_feature: MA Experiment 20000439 PARAMETER Experiment Name: At_Roots__P Parameter: Organism Value: A. thaliana
  misc_feature: MA Experiment 20000439 PARAMETER Experiment Name: At_Roots__P Parameter: Tissue Value: Roots vs. Whole Plant

SEQ ID NO: 94127 - protein, 333 aa, Arabidopsis thaliana; identical to SEQ ID NO: 90371
  peptide (1)..(333): Ceres Seq. ID no. 12723636
  misc_feature (14)..(62): Pfam Name: Myb-like DNA-binding domain Pfam Description: Myb-like DNA-binding domain
  misc_feature (1)..(333): Homolog of NCBI NO: 15242793 NR Description: myb family transcription factor; protein id: supported by cDNA: gi_3941447 [Arabidopsis thaliana]
  misc_feature (1)..(333): Homolog of NCBI NO: 11358686 NR Description: probable transcription factor MYB36 [imported] - thaliana >gi|3941448|gb|AAC83600.1| putative transcription factor
  misc_feature (1)..(239): Homolog of NCBI NO: 40253739 NR Description: putative P-type R2R3 Myb protein [Oryza sativa
  misc_feature (1)..(288): Homolog of NCBI NO: 18419456 NR Description: blind [Lycopersicon esculentum]
  misc_feature (1)..(127): Homolog of NCBI NO: 19073324 NR Description: typical P-type R2R3 Myb protein [Sorghum bicolor]
  misc_feature (1)..(127): Homolog of NCBI NO: 33773103 NR Description: P-type R2R3 Myb protein [Sorghum bicolor]
  misc_feature (1)..(123): Homolog of NCBI NO: 11273952 NR Description: myb-related transcription factor MYB68 [imported] Arabidopsis thaliana >gi|3941494|gb|AAC83623.1| putative
  misc_feature (1)..(123): Homolog of NCBI NO: 15239158 NR Description: myb DNA-binding protein (MYB68); protein id: supported by cDNA: gi_3941493 [Arabidopsis thaliana]
  misc_feature (1)..(312): Homolog of NCBI NO: 15229192 NR Description: myb family transcription factor(AtMYB84); protein
  misc_feature (1)..(157): Homolog of NCBI NO: 2832408 NR Description: R2R3-MYB transcription factor [Arabidopsis

SEQ ID NO: 94128 - protein, 210 aa, Arabidopsis thaliana; identical to SEQ ID NO: 90372
  peptide (1)..(210): Ceres Seq. ID no. 12723637
  misc_feature (1)..(210): Homolog of NCBI NO: 15242793 NR Description: myb family transcription factor; protein id: supported by cDNA: gi_3941447 [Arabidopsis thaliana]
  misc_feature (1)..(210): Homolog of NCBI NO: 11358686 NR Description: probable transcription factor MYB36 [imported] - thaliana >gi|3941448|gb|AAC83600.1| putative transcription factor
  misc_feature (1)..(116): Homolog of NCBI NO: 40253739 NR Description: putative P-type R2R3 Myb protein [Oryza sativa
  misc_feature (1)..(165): Homolog of NCBI NO: 18419456 NR Description: blind [Lycopersicon esculentum]
  misc_feature (1)..(189): Homolog of NCBI NO: 15229192 NR Description: myb family transcription factor(AtMYB84); protein
  misc_feature (1)..(34): Homolog of NCBI NO: 2832408 NR Description: R2R3-MYB transcription factor [Arabidopsis
  misc_feature (1)..(32): Homolog of NCBI NO: 15228049 NR Description: light-regulated myb protein, putative; protein At2g36890.1 [Arabidopsis thaliana] >gi|25294087|pir||H84785
  misc_feature (1)..(31): Homolog of NCBI NO: 15237193 NR Description: myb family transcription factor; protein id:
  misc_feature (1)..(126): Homolog of NCBI NO: 30575840 NR Description: MYB1 [Boea crassifolia]
  misc_feature (1)..(127): Homolog of NCBI NO: 15234593 NR Description: myb DNA-binding protein; protein id: At4g05100.1,

SEQ ID NO: 94129 - protein, 172 aa, Arabidopsis thaliana; identical to SEQ ID NO: 90373
  peptide (1)..(172): Ceres Seq. ID no. 12723638
  misc_feature (1)..(172): Homolog of NCBI NO: 15242793 NR Description: myb family transcription factor; protein id: supported by cDNA: gi_3941447 [Arabidopsis thaliana]
  misc_feature (1)..(172): Homolog of NCBI NO: 11358686 NR Description: probable transcription factor MYB36 [imported] - thaliana >gi|3941448|gb|AAC83600.1| putative transcription factor
  misc_feature (1)..(78): Homolog of NCBI NO: 40253739 NR Description: putative P-type R2R3 Myb protein [Oryza sativa
  misc_feature (1)..(127): Homolog of NCBI NO: 18419456 NR Description: blind [Lycopersicon esculentum]
  misc_feature (1)..(151): Homolog of NCBI NO: 15229192 NR Description: myb family transcription factor(AtMYB84); protein
  misc_feature (1)..(88): Homolog of NCBI NO: 30575840 NR Description: MYB1 [Boea crassifolia]
  misc_feature (1)..(89): Homolog of NCBI NO: 15234593 NR Description: myb DNA-binding protein; protein id: At4g05100.1,
  misc_feature (1)..(84): Homolog of NCBI NO: 15228529 NR Description: myb family transcription factor; protein id: supported by cDNA: 33139., supported by cDNA: gi_19698862, by cDNA: gi_3941437, supported by cDNA: gi_9965736 [Arabidopsis
  misc_feature (1)..(84): Homolog of NCBI NO: 21592842 NR Description: MYB family transcription factor (hsr1), putative
  misc_feature (1)..(62): Homolog of NCBI NO: 15228203 NR Description: putative transcription factor MYB94; protein id:

SEQ ID NO: 94130 - DNA, 1251 bp, Arabidopsis thaliana; identical to SEQ ID NO: 90374
  misc_feature (1)..(1251): Ceres Seq. ID no. 12723643
  misc_feature: MA Experiment ID: 20000235 Result: Up-regulated in Transcription
  misc_feature: MA Experiment 20000235 PARAMETER Experiment Name: At_Siliques_P Parameter: Age (day) Value: 21
  misc_feature: MA Experiment 20000235 PARAMETER Experiment Name: At_Siliques_P Parameter: Organism Value: A. thaliana
  misc_feature: MA Experiment 20000235 PARAMETER Experiment Name: At_Siliques_P Parameter: Plant Line Value: WS
  misc_feature: MA Experiment 20000235 PARAMETER Experiment Name: At_Siliques_P Parameter: Tissue Value: 5-10mm Siliques vs. Whole Plant
  misc_feature: MA Experiment ID: 20001450 Result: Up-regulated in Transcription
  misc_feature: MA Experiment 20001450 PARAMETER Experiment Name: At_Far-red-induction_P Parameter: Age (day) Value: 7
  misc_feature: MA Experiment 20001450 PARAMETER Experiment Name: At_Far-red-induction_P Parameter: Light Value: Far-red vs. White
  misc_feature: MA Experiment 20001450 PARAMETER Experiment Name: At_Far-red-induction_P Parameter: Organism Value: A. thaliana
  misc_feature: MA Experiment 20001450 PARAMETER Experiment Name: At_Far-red-induction_P Parameter: Plant Line Value: Columbia
  misc_feature: MA Experiment 20001450 PARAMETER Experiment Name: At_Far-red-induction_P Parameter: Timepoint (hr) Value: 8
  misc_feature: MA Experiment 20001450 PARAMETER Experiment Name: At_Far-red-induction_P Parameter: Tissue Value: Whole Plant

SEQ ID NO: 94131 - protein, 416 aa, Arabidopsis thaliana; identical to SEQ ID NO: 90375
  peptide (1)..(416): Ceres Seq. ID no. 12723644
  misc_feature (1)..(416): Homolog of NCBI NO: 15242821 NR Description: putative protein; protein id: At5g57670.1 thaliana] >gi|9759263|dbj|BAB09584.1| contains similarity to
  misc_feature (76)..(395): Homolog of NCBI NO: 40253745 NR Description: SERK1 protein-like [Oryza sativa (japonica
  misc_feature (86)..(388): Homolog of NCBI NO: 15224251 NR Description: putative protein kinase; protein id: At2g18890.1
  misc_feature (83)..(367): Homolog of NCBI NO: 38343967 NR Description: OSJNBb0022F16.6 [Oryza sativa (japonica
  misc_feature (86)..(381): Homolog of NCBI NO: 30687061 NR Description: protein kinase family [Arabidopsis thaliana] putative protein kinase [Arabidopsis thaliana]
  misc_feature (86)..(376): Homolog of NCBI NO: 22330852 NR Description: putative serine/threonine protein kinase; protein At3g05140.1, supported by cDNA: gi_19698986 [Arabidopsis >gi|19698987|gb|AAL91229.1| putative serine/threonine protein
  misc_feature (86)..(376): Homolog of NCBI NO: 26452369 NR Description: unknown protein [Arabidopsis thaliana]
  misc_feature (86)..(376): Homolog of NCBI NO: 30698132 NR Description: protein kinase, putative [Arabidopsis thaliana]
  misc_feature (92)..(375): Homolog of NCBI NO: 15239245 NR Description: serine/threonine protein kinase-like; protein id: [Arabidopsis thaliana] >gi|9758799|dbj|BAB09252.1|
  misc_feature (86)..(371): Homolog of NCBI NO: 15810235 NR Description: putative Pto kinase interactor [Arabidopsis

SEQ ID NO: 94132 - protein, 378 aa, Arabidopsis thaliana; identical to SEQ ID NO: 90376
  peptide (1)..(378): Ceres Seq. ID no. 12723645
  misc_feature (1)..(378): Homolog of NCBI NO: 15242821 NR Description: putative protein; protein id: At5g57670.1 thaliana] >gi|9759263|dbj|BAB09584.1| contains similarity to
  misc_feature (38)..(357): Homolog of NCBI NO: 40253745 NR Description: SERK1 protein-like [Oryza sativa (japonica
  misc_feature (48)..(350): Homolog of NCBI NO: 15224251 NR Description: putative protein kinase; protein id: At2g18890.1
  misc_feature (45)..(329): Homolog of NCBI NO: 38343967 NR Description: OSJNBb0022F16.6 [Oryza sativa (japonica
  misc_feature (48)..(343): Homolog of NCBI NO: 30687061 NR Description: protein kinase family [Arabidopsis thaliana] putative protein kinase [Arabidopsis thaliana]
  misc_feature (48)..(338): Homolog of NCBI NO: 22330852 NR Description: putative serine/threonine protein kinase; protein At3g05140.1, supported by cDNA: gi_19698986 [Arabidopsis >gi|19698987|gb|AAL91229.1| putative serine/threonine protein
  misc_feature (48)..(338): Homolog of NCBI NO: 26452369 NR Description: unknown protein [Arabidopsis thaliana]
  misc_feature (48)..(338): Homolog of NCBI NO: 30698132 NR Description: protein kinase, putative [Arabidopsis thaliana]
  misc_feature (54)..(337): Homolog of NCBI NO: 15239245 NR Description: serine/threonine protein kinase-like; protein id: [Arabidopsis thaliana] >gi|9758799|dbj|BAB09252.1|
  misc_feature (48)..(333): Homolog of NCBI NO: 15810235 NR Description: putative Pto kinase interactor [Arabidopsis

SEQ ID NO: 94133 - protein, 350 aa, Arabidopsis thaliana; identical to SEQ ID NO: 90377
  peptide (1)..(350): Ceres Seq. ID no. 12723646
  misc_feature (1)..(350): Homolog of NCBI NO: 15242821 NR Description: putative protein; protein id: At5g57670.1 thaliana] >gi|9759263|dbj|BAB09584.1| contains similarity to
  misc_feature (10)..(329): Homolog of NCBI NO: 40253745 NR Description: SERK1 protein-like [Oryza sativa (japonica
  misc_feature (20)..(322): Homolog of NCBI NO: 15224251 NR Description: putative protein kinase; protein id: At2g18890.1
  misc_feature (17)..(301): Homolog of NCBI NO: 38343967 NR Description: OSJNBb0022F16.6 [Oryza sativa (japonica
  misc_feature (20)..(315): Homolog of NCBI NO: 30687061 NR Description: protein kinase family [Arabidopsis thaliana] putative protein kinase [Arabidopsis thaliana]
  misc_feature (20)..(310): Homolog of NCBI NO: 22330852 NR Description: putative serine/threonine protein kinase; protein At3g05140.1, supported by cDNA: gi_19698986 [Arabidopsis >gi|19698987|gb|AAL91229.1| putative serine/threonine protein
  misc_feature (20)..(310): Homolog of NCBI NO: 26452369 NR Description: unknown protein [Arabidopsis thaliana]
  misc_feature (20)..(310): Homolog of NCBI NO: 30698132 NR Description: protein kinase, putative [Arabidopsis thaliana]
  misc_feature (26)..(309): Homolog of NCBI NO: 15239245 NR Description: serine/threonine protein kinase-like; protein id: [Arabidopsis thaliana] >gi|9758799|dbj|BAB09252.1|
  misc_feature (20)..(305): Homolog of NCBI NO: 15810235 NR Description: putative Pto kinase interactor [Arabidopsis

SEQ ID NO: 94134 - DNA, 1499 bp, Arabidopsis thaliana; identical to SEQ ID NO: 90378
  misc_feature (1)..(1499): Ceres Seq. ID no. 12723660
  misc_feature: MA Experiment ID: 20000185 Result: Up-regulated in Transcription
  misc_feature: MA Experiment 20000185 PARAMETER Experiment Name: At_Roots__P Parameter: Age (day) Value: 7 vs. 21
  misc_feature: MA Experiment 20000185 PARAMETER Experiment Name: At_Roots__P Parameter: Organism Value: A. thaliana
  misc_feature: MA Experiment 20000185 PARAMETER Experiment Name: At_Roots__P Parameter: Tissue Value: Roots vs. Whole Plant
  misc_feature: MA Experiment ID: 20000264 Result: Up-regulated in Transcription
  misc_feature: MA Experiment 20000264 PARAMETER Experiment Name: At_Open_Flower_P Parameter: Age (day) Value: 21
  misc_feature: MA Experiment 20000264 PARAMETER Experiment Name: At_Open_Flower_P Parameter: Plant Line Value: WS
  misc_feature: MA Experiment 20000264 PARAMETER Experiment Name: At_Open_Flower_P Parameter: Tissue Value: Open Flower vs. Whole Plant
  misc_feature: MA Experiment ID: 20000286 Result: Up-regulated in Transcription
  misc_feature: MA Experiment 20000286 PARAMETER Experiment Name: At_Open_Flower_P Parameter: Age (day) Value: 21
  misc_feature: MA Experiment 20000286 PARAMETER Experiment Name: At_Open_Flower_P Parameter: Plant Line Value: WS
  misc_feature: MA Experiment 20000286 PARAMETER Experiment Name: At_Open_Flower_P Parameter: Tissue Value: Half Open vs. Whole Plant
  misc_feature: MA Experiment ID: 20000439 Result: Up-regulated in Transcription
  misc_feature: MA Experiment 20000439 PARAMETER Experiment Name: At_Roots__P Parameter: Age (day) Value: 14 vs. 21
  misc_feature: MA Experiment 20000439 PARAMETER Experiment Name: At_Roots__P Parameter: Organism Value: A. thaliana
  misc_feature: MA Experiment 20000439 PARAMETER Experiment Name: At_Roots__P Parameter: Tissue Value: Roots vs. Whole Plant
  misc_feature: MA Experiment ID: 20000495 Result: Up-regulated in Transcription
  misc_feature: MA Experiment 20000495 PARAMETER Experiment Name: At_Guard_Cells_P Parameter: Harvest Date Value: 8/2/2002
  misc_feature: MA Experiment 20000495 PARAMETER Experiment Name: At_Guard_Cells_P Parameter: Organism Value: A. thaliana
  misc_feature: MA Experiment 20000495 PARAMETER Experiment Name: At_Guard_Cells_P Parameter: Tissue Value: Guard Cells vs. Leaves
  misc_feature: MA Experiment ID: 20000794 Result: Up-regulated in Transcription
  misc_feature: MA Experiment 20000794 PARAMETER Experiment Name: At_Petals_P Parameter: Age (day) Value: 23-25 days
  misc_feature: MA Experiment 20000794 PARAMETER Experiment Name: At_Petals_P Parameter: Plant Line Value: WS
  misc_feature: MA Experiment 20000794 PARAMETER Experiment Name: At_Petals_P Parameter: Tissue Value: Petals vs. Whole plant

SEQ ID NO: 94135 - protein, 451 aa, Arabidopsis thaliana; identical to SEQ ID NO: 90379
  peptide (1)..(451): Ceres Seq. ID no. 12723661
  misc_feature (9)..(445): Pfam Name: Transferase family Pfam Description: Transferase family
  misc_feature (9)..(451): Homolog of NCBI NO: 15242883 NR Description: N-hydroxycinnamoyl/benzoyltransferase; protein At5g57840.1, supported by cDNA: gi_15294251 [Arabidopsis
  misc_feature (7)..(445): Homolog of NCBI NO: 6469032 NR Description: N-hydroxycinnamoyl/benzoyltransferase [Ipomoea
  misc_feature (9)..(445): Homolog of NCBI NO: 40644899 NR Description: hydroxycinnamoyl CoA quinate transferase
  misc_feature (9)..(444): Homolog of NCBI NO: 40644084 NR Description: hydroxycinnamoyl CoA quinate transferase
  misc_feature (9)..(445): Homolog of NCBI NO: 27475616 NR Description: hydroxycinnamoyl transferase [Nicotiana tabacum]
  misc_feature (9)..(444): Homolog of NCBI NO: 15239747 NR Description: anthranilate N-benzoyltransferase; protein id: supported by cDNA: 114130. [Arabidopsis thaliana]
  misc_feature (9)..(444): Homolog of NCBI NO: 21536883 NR Description: anthranilate N-benzoyltransferase [Arabidopsis
  misc_feature (9)..(444): Homolog of NCBI NO: 38345030 NR Description: OSJNBa0029H02.14 [Oryza sativa (japonica
  misc_feature (9)..(445): Homolog of NCBI NO: 7484689 NR Description: anthranilate N-benzoyltransferase (EC 2.3.1.144)
  misc_feature (9)..(445): Homolog of NCBI NO: 7484692 NR Description: anthranilate N-benzoyltransferase (EC 2.3.1.144)

SEQ ID NO: 94136 - protein, 443 aa, Arabidopsis thaliana; identical to SEQ ID NO: 90380
  peptide (1)..(443): Ceres Seq. ID no. 12723662
  misc_feature (1)..(437): Pfam Name: Transferase family Pfam Description: Transferase family
  misc_feature (1)..(443): Homolog of NCBI NO: 15242883 NR Description: N-hydroxycinnamoyl/benzoyltransferase; protein At5g57840.1, supported by cDNA: gi_15294251 [Arabidopsis
  misc_feature (1)..(437): Homolog of NCBI NO: 6469032 NR Description: N-hydroxycinnamoyl/benzoyltransferase [Ipomoea
  misc_feature (1)..(437): Homolog of NCBI NO: 40644899 NR Description: hydroxycinnamoyl CoA quinate transferase
  misc_feature (1)..(436): Homolog of NCBI NO: 40644084 NR Description: hydroxycinnamoyl CoA quinate transferase
  misc_feature (1)..(437): Homolog of NCBI NO: 27475616 NR Description: hydroxycinnamoyl transferase [Nicotiana tabacum]
  misc_feature (1)..(436): Homolog of NCBI NO: 15239747 NR Description: anthranilate N-benzoyltransferase; protein id: supported by cDNA: 114130. [Arabidopsis thaliana]
  misc_feature (1)..(436): Homolog of NCBI NO: 21536883 NR Description: anthranilate N-benzoyltransferase [Arabidopsis
  misc_feature (1)..(436): Homolog of NCBI NO: 38345030 NR Description: OSJNBa0029H02.14 [Oryza sativa (japonica
  misc_feature (1)..(437): Homolog of NCBI NO: 7484689 NR Description: anthranilate N-benzoyltransferase (EC 2.3.1.144)
  misc_feature (1)..(437): Homolog of NCBI NO: 7484692 NR Description: anthranilate N-benzoyltransferase (EC 2.3.1.144)

SEQ ID NO: 94137 - protein, 408 aa, Arabidopsis thaliana; identical to SEQ ID NO: 90381
  peptide (1)..(408): Ceres Seq. ID no. 12723663
  misc_feature (1)..(402): Pfam Name: Transferase family Pfam Description: Transferase family
  misc_feature (1)..(408): Homolog of NCBI NO: 15242883 NR Description: N-hydroxycinnamoyl/benzoyltransferase; protein At5g57840.1, supported by cDNA: gi_15294251 [Arabidopsis
  misc_feature (1)..(402): Homolog of NCBI NO: 6469032 NR Description: N-hydroxycinnamoyl/benzoyltransferase [Ipomoea
  misc_feature (1)..(402): Homolog of NCBI NO: 40644899 NR Description: hydroxycinnamoyl CoA quinate transferase
  misc_feature (1)..(401): Homolog of NCBI NO: 40644084 NR Description: hydroxycinnamoyl CoA quinate transferase
  misc_feature (1)..(402): Homolog of NCBI NO: 27475616 NR Description: hydroxycinnamoyl transferase [Nicotiana tabacum]
  misc_feature (1)..(401): Homolog of NCBI NO: 15239747 NR Description: anthranilate N-benzoyltransferase; protein id: supported by cDNA: 114130. [Arabidopsis thaliana]
  misc_feature (1)..(401): Homolog of NCBI NO: 21536883 NR Description: anthranilate N-benzoyltransferase [Arabidopsis
  misc_feature (1)..(401): Homolog of NCBI NO: 38345030 NR Description: OSJNBa0029H02.14 [Oryza sativa (japonica
  misc_feature (1)..(402): Homolog of NCBI NO: 7484689 NR Description: anthranilate N-benzoyltransferase (EC 2.3.1.144)
  misc_feature (1)..(402): Homolog of NCBI NO: 7484692 NR Description: anthranilate N-benzoyltransferase (EC 2.3.1.144)

SEQ ID NO: 94138 - DNA, 1341 bp, Arabidopsis thaliana; identical to SEQ ID NO: 90382
  misc_feature (1)..(1341): Ceres Seq. ID no. 12723664
  misc_feature: MA Experiment ID: 20000180 Result: Up-regulated in Transcription
  misc_feature: MA Experiment 20000180 PARAMETER Experiment Name: At_Germinating_Seeds_P Parameter: Age (hr) Value: 24 vs. 0
  misc_feature: MA Experiment 20000180 PARAMETER Experiment Name: At_Germinating_Seeds_P Parameter: Tissue Value: Germinating Seeds
  misc_feature: MA Experiment ID: 20000185 Result: Down-regulated in Transcription
  misc_feature: MA Experiment 20000185 PARAMETER Experiment Name: At_Roots__P Parameter: Age (day) Value: 7 vs. 21
  misc_feature: MA Experiment 20000185 PARAMETER Experiment Name: At_Roots__P Parameter: Organism Value: A. thaliana
  misc_feature: MA Experiment 20000185 PARAMETER Experiment Name: At_Roots__P Parameter: Tissue Value: Roots vs. Whole Plant
  misc_feature: MA Experiment ID: 20000214 Result: Down-regulated in Transcription
  misc_feature: MA Experiment 20000214 PARAMETER Experiment Name: At_4deg_Cold_P Parameter: Timepoint (hr) Value: 6

SEQ ID NO: 94139 - protein, 373 aa, Arabidopsis thaliana; identical to SEQ ID NO: 90383
  peptide (1)..(373): Ceres Seq. ID no. 12723665
  misc_feature (1)..(373): Homolog of NCBI NO: 22327924 NR Description: branched-chain amino acid aminotransferase-like protein id: At5g57850.1, supported by cDNA: gi_20466633
  misc_feature (78)..(373): Homolog of NCBI NO: 9758354 NR Description: branched-chain amino acid aminotransferase-like
  misc_feature (78)..(373): Homolog of NCBI NO: 34904468 NR Description: putative branched-chain amino acid
  misc_feature (74)..(360): Homolog of NCBI NO: 23474241 NR Description: hypothetical protein [Desulfovibrio desulfuricans
  misc_feature (99)..(365): Homolog of NCBI NO: 20095063 NR Description: Branched-chain amino acid aminotransferase
  misc_feature (83)..(354): Homolog of NCBI NO: 20807414 NR Description: Branched-chain amino acid
  misc_feature (99)..(362): Homolog of NCBI NO: 15669197 NR Description: branched-chain amino acid aminotransferase (ilvE)
  misc_feature (99)..(354): Homolog of NCBI NO: 11498538 NR Description: branched-chain amino acid aminotransferase (ilvE)
  misc_feature (83)..(365): Homolog of NCBI NO: 21227147 NR Description: Branched-chain amino acid aminotransferase
  misc_feature (83)..(348): Homolog of NCBI NO: 23051040 NR Description: hypothetical protein [Methanosarcina barkeri]

SEQ ID NO: 94140 - protein, 331 aa, Arabidopsis thaliana; identical to SEQ ID NO: 90384
  peptide (1)..(331): Ceres Seq. ID no. 12723666
  misc_feature (1)..(331): Homolog of NCBI NO: 22327924 NR Description: branched-chain amino acid aminotransferase-like protein id: At5g57850.1, supported by cDNA: gi_20466633
  misc_feature (36)..(331): Homolog of NCBI NO: 9758354 NR Description: branched-chain amino acid aminotransferase-like
  misc_feature (36)..(331): Homolog of NCBI NO: 34904468 NR Description: putative branched-chain amino acid
  misc_feature (32)..(318): Homolog of NCBI NO: 23474241 NR Description: hypothetical protein [Desulfovibrio desulfuricans
  misc_feature (57)..(323): Homolog of NCBI NO: 20095063 NR Description: Branched-chain amino acid aminotransferase
  misc_feature (41)..(312): Homolog of NCBI NO: 20807414 NR Description: Branched-chain amino acid
  misc_feature (57)..(320): Homolog of NCBI NO: 15669197 NR Description: branched-chain amino acid aminotransferase (ilvE)
  misc_feature (57)..(312): Homolog of NCBI NO: 11498538 NR Description: branched-chain amino acid aminotransferase (ilvE)
  misc_feature (41)..(323): Homolog of NCBI NO: 21227147 NR Description: Branched-chain amino acid aminotransferase
  misc_feature (41)..(306): Homolog of NCBI NO: 23051040 NR Description: hypothetical protein [Methanosarcina barkeri]

SEQ ID NO: 94141 - protein, 296 aa, Arabidopsis thaliana; identical to SEQ ID NO: 90385
  peptide (1)..(296): Ceres Seq. ID no. 12723667
  misc_feature (1)..(296): Homolog of NCBI NO: 22327924 NR Description: branched-chain amino acid aminotransferase-like protein id: At5g57850.1, supported by cDNA: gi_20466633
  misc_feature (1)..(296): Homolog of NCBI NO: 9758354 NR Description: branched-chain amino acid aminotransferase-like
  misc_feature (1)..(296): Homolog of NCBI NO: 34904468 NR Description: putative branched-chain amino acid
  misc_feature (1)..(283): Homolog of NCBI NO: 23474241 NR Description: hypothetical protein [Desulfovibrio desulfuricans
  misc_feature (22)..(288): Homolog of NCBI NO: 20095063 NR Description: Branched-chain amino acid aminotransferase
  misc_feature (6)..(277): Homolog of NCBI NO: 20807414 NR Description: Branched-chain amino acid
  misc_feature (22)..(285): Homolog of NCBI NO: 15669197 NR Description: branched-chain amino acid aminotransferase (ilvE)
  misc_feature (22)..(277): Homolog of NCBI NO: 11498538 NR Description: branched-chain amino acid aminotransferase (ilvE)
  misc_feature (6)..(288): Homolog of NCBI NO: 21227147 NR Description: Branched-chain amino acid aminotransferase
  misc_feature (6)..(271): Homolog of NCBI NO: 23051040 NR Description: hypothetical protein [Methanosarcina barkeri]

SEQ ID NO: 94142 - DNA, 1398 bp, Arabidopsis thaliana; identical to SEQ ID NO: 90386
  misc_feature (1)..(1398): Ceres Seq. ID no. 12723702
  misc_feature: MA Experiment ID: 20000184 Result: Up-regulated in Transcription
  misc_feature: MA Experiment 20000184 PARAMETER Experiment Name: At_Shoots__P Parameter: Age (day) Value: 7
  misc_feature: MA Experiment 20000184 PARAMETER Experiment Name: At_Shoots__P Parameter: Tissue Value: Shoots vs. Whole Plant

SEQ ID NO: 94143 - protein, 465 aa, Arabidopsis thaliana; identical to SEQ ID NO: 90387
  peptide (1)..(465): Ceres Seq. ID no. 12723703
  misc_feature (26)..(334): Pfam Name: Glycosyl hydrolases family 17 Pfam Description: Glycosyl hydrolases family 17
  misc_feature (1)..(465): Homolog of NCBI NO: 30697080 NR Description: glycosyl hydrolase family 17 [Arabidopsis
  misc_feature (25)..(444): Homolog of NCBI NO: 38423964 NR Description: putative glycosyl hydrolase [Oryza sativa
  misc_feature (25)..(447): Homolog of NCBI NO: 7488109 NR Description: probable glucanase - Arabidopsis thaliana glucanase like protein [Arabidopsis thaliana]
  misc_feature (25)..(447): Homolog of NCBI NO: 30683955 NR Description: glycosyl hydrolase family 17 [Arabidopsis >gi|26449937|dbj|BAC42089.1| unknown protein [Arabidopsis
  misc_feature (5)..(447): Homolog of NCBI NO: 37223500 NR Description: beta-1,3-glucanase, acidic [Coffea arabica]
  misc_feature (8)..(437): Homolog of NCBI NO: 30060382 NR Description: putative glucan endo-1,3-beta-glucosidase
  misc_feature (4)..(447): Homolog of NCBI NO: 15230097 NR Description: glycosyl hydrolase family 17; protein id:
  misc_feature (7)..(458): Homolog of NCBI NO: 22327934 NR Description: glycosyl hydrolase family 17; protein id:
  misc_feature (108)..(464): Homolog of NCBI NO: 7486246 NR Description: hypothetical protein F27F23.24 - Arabidopsis
  misc_feature (9)..(117): Homolog of NCBI NO: 7486246 NR Description: hypothetical protein F27F23.24 - Arabidopsis

SEQ ID NO: 94144 - protein, 383 aa, Arabidopsis thaliana; identical to SEQ ID NO: 90388
  peptide (1)..(383): Ceres Seq. ID no. 12723704
  misc_feature (1)..(252): Pfam Name: Glycosyl hydrolases family 17 Pfam Description: Glycosyl hydrolases family 17
  misc_feature (1)..(383): Homolog of NCBI NO: 30697080 NR Description: glycosyl hydrolase family 17 [Arabidopsis
  misc_feature (1)..(362): Homolog of NCBI NO: 38423964 NR Description: putative glycosyl hydrolase [Oryza sativa
  misc_feature (1)..(365): Homolog of NCBI NO: 7488109 NR Description: probable glucanase - Arabidopsis thaliana glucanase like protein [Arabidopsis thaliana]
  misc_feature (1)..(365): Homolog of NCBI NO: 30683955 NR Description: glycosyl hydrolase family 17 [Arabidopsis >gi|26449937|dbj|BAC42089.1| unknown protein [Arabidopsis
  misc_feature (1)..(365): Homolog of NCBI NO: 37223500 NR Description: beta-1,3-glucanase, acidic [Coffea arabica]
  misc_feature (1)..(355): Homolog of NCBI NO: 30060382 NR Description: putative glucan endo-1,3-beta-glucosidase
  misc_feature (1)..(365): Homolog of NCBI NO: 15230097 NR Description: glycosyl hydrolase family 17; protein id:
  misc_feature (1)..(376): Homolog of NCBI NO: 22327934 NR Description: glycosyl hydrolase family 17; protein id:
  misc_feature (26)..(382): Homolog of NCBI NO: 7486246 NR Description: hypothetical protein F27F23.24 - Arabidopsis
  misc_feature (1)..(35): Homolog of NCBI NO: 7486246 NR Description: hypothetical protein F27F23.24 - Arabidopsis

SEQ ID NO: 94145 - protein, 336 aa, Arabidopsis thaliana; identical to SEQ ID NO: 90389
  peptide (1)..(336): Ceres Seq. ID no. 12723705
  misc_feature (1)..(205): Pfam Name: Glycosyl hydrolases family 17 Pfam Description: Glycosyl hydrolases family 17
  misc_feature (1)..(336): Homolog of NCBI NO: 30697080 NR Description: glycosyl hydrolase family 17 [Arabidopsis
  misc_feature (1)..(315): Homolog of NCBI NO: 38423964 NR Description: putative glycosyl hydrolase [Oryza sativa
  misc_feature (1)..(318): Homolog of NCBI NO: 7488109 NR Description: probable glucanase - Arabidopsis thaliana glucanase like protein [Arabidopsis thaliana]
  misc_feature (1)..(318): Homolog of NCBI NO: 30683955 NR Description: glycosyl hydrolase family 17 [Arabidopsis >gi|26449937|dbj|BAC42089.1| unknown protein [Arabidopsis
  misc_feature (1)..(318): Homolog of NCBI NO: 37223500 NR Description: beta-1,3-glucanase, acidic [Coffea arabica]
  misc_feature (1)..(308): Homolog of NCBI NO: 30060382 NR Description: putative glucan endo-1,3-beta-glucosidase
  misc_feature (1)..(318): Homolog of NCBI NO: 15230097 NR Description: glycosyl hydrolase family 17; protein id:
  misc_feature (1)..(329): Homolog of NCBI NO: 22327934 NR Description: glycosyl hydrolase family 17; protein id:
  misc_feature (1)..(335): Homolog of NCBI NO: 7486246 NR Description: hypothetical protein F27F23.24 - Arabidopsis
  misc_feature (1)..(329): Homolog of NCBI NO: 16604491 NR Description: AT5g58090/k21l19_70 [Arabidopsis thaliana]

SEQ ID NO: 94146 - DNA, 3157 bp, Arabidopsis thaliana; identical to SEQ ID NO: 90390
  misc_feature (1)..(3157): Ceres Seq. ID no. 12723709
  misc_feature: MA Experiment ID: 20000184 Result: Down-regulated in Transcription
  misc_feature: MA Experiment 20000184 PARAMETER Experiment Name: At_Shoots__P Parameter: Age (day) Value: 7
  misc_feature: MA Experiment 20000184 PARAMETER Experiment Name: At_Shoots__P Parameter: Tissue Value: Shoots vs. Whole Plant
  misc_feature: MA Experiment ID: 20000227 Result: Down-regulated in Transcription
  misc_feature: MA Experiment 20000227 PARAMETER Experiment Name: At_Root-Tips-vs-Tops_P Parameter: Tissue Value: Root Tips vs. Root Tops
  misc_feature: MA Experiment ID: 20000496 Result: Up-regulated in Transcription
  misc_feature: MA Experiment 20000496 PARAMETER Experiment Name: At_Guard_Cells_P Parameter: Harvest Date Value: 7/19/2002
  misc_feature: MA Experiment 20000496 PARAMETER Experiment Name: At_Guard_Cells_P Parameter: Organism Value: Canola
  misc_feature: MA Experiment 20000496 PARAMETER Experiment Name: At_Guard_Cells_P Parameter: Tissue Value: Guard Cells vs. Leaves
  misc_feature: MA Experiment ID: 20000794 Result: Up-regulated in Transcription
  misc_feature: MA Experiment 20000794 PARAMETER Experiment Name: At_Petals_P Parameter: Age (day) Value: 23-25 days
  misc_feature: MA Experiment 20000794 PARAMETER Experiment Name: At_Petals_P Parameter: Plant Line Value: WS
  misc_feature: MA Experiment 20000794 PARAMETER Experiment Name: At_Petals_P Parameter: Tissue Value: Petals vs. Whole plant
  misc_feature: MA Experiment ID: 20001451 Result: Up-regulated in Transcription
  misc_feature: MA Experiment 20001451 PARAMETER Experiment Name: At_Far-red-induction_P Parameter: Age (day) Value: 7
  misc_feature: MA Experiment 20001451 PARAMETER Experiment Name: At_Far-red-induction_P Parameter: Light Value: Far-red vs. White
  misc_feature: MA Experiment 20001451 PARAMETER Experiment Name: At_Far-red-induction_P Parameter: Organism Value: A. thaliana
  misc_feature: MA Experiment 20001451 PARAMETER Experiment Name: At_Far-red-induction_P Parameter: Plant Line Value: Columbia
  misc_feature: MA Experiment 20001451 PARAMETER Experiment Name: At_Far-red-induction_P Parameter: Timepoint (hr) Value: 24
  misc_feature: MA Experiment 20001451 PARAMETER Experiment Name: At_Far-red-induction_P Parameter: Tissue Value: Whole Plant

SEQ ID NO: 94147 - protein, 963 aa, Arabidopsis thaliana; identical to SEQ ID NO: 90391
  peptide (1)..(963): Ceres Seq. ID no. 12723710
  misc_feature (787)..(963): Homolog of NCBI NO: 10177028 NR Description: gene_id:MQJ2.12~unknown protein [Arabidopsis
  misc_feature (635)..(762): Homolog of NCBI NO: 10177028 NR Description: gene_id:MQJ2.12~unknown protein [Arabidopsis
  misc_feature (368)..(823): Homolog of NCBI NO: 26345344 NR Description: unnamed protein product [Mus musculus]
  misc_feature (107)..(209): Homolog of NCBI NO: 26345344 NR Description: unnamed protein product [Mus musculus]
  misc_feature (13)..(58): Homolog of NCBI NO: 26345344 NR Description: unnamed protein product [Mus musculus]
  misc_feature (368)..(823): Homolog of NCBI NO: 28374414 NR Description: similar to RIKEN cDNA 4732493F09 gene [Mus
  misc_feature (107)..(209): Homolog of NCBI NO: 28374414 NR Description: similar to RIKEN cDNA 4732493F09 gene [Mus
  misc_feature (13)..(58): Homolog of NCBI NO: 28374414 NR Description: similar to RIKEN cDNA 4732493F09 gene [Mus
  misc_feature (368)..(823): Homolog of NCBI NO: 30520087 NR Description: RIKEN cDNA 4732493F09 gene [Mus musculus]
  misc_feature (107)..(209): Homolog of NCBI NO: 30520087 NR Description: RIKEN cDNA 4732493F09 gene [Mus musculus]

SEQ ID NO: 94148 - protein, 880 aa, Arabidopsis thaliana; identical to SEQ ID NO: 90392
  peptide (1)..(880): Ceres Seq. ID no. 12723711
  misc_feature (704)..(880): Homolog of NCBI NO: 10177028 NR Description: gene_id:MQJ2.12~unknown protein [Arabidopsis
  misc_feature (552)..(679): Homolog of NCBI NO: 10177028 NR Description: gene_id:MQJ2.12~unknown protein [Arabidopsis
  misc_feature (285)..(740): Homolog of NCBI NO: 26345344 NR Description: unnamed protein product [Mus musculus]
  misc_feature (24)..(126): Homolog of NCBI NO: 26345344 NR Description: unnamed protein product [Mus musculus]
  misc_feature (285)..(740): Homolog of NCBI NO: 28374414 NR Description: similar to RIKEN cDNA 4732493F09 gene [Mus
  misc_feature (24)..(126): Homolog of NCBI NO: 28374414 NR Description: similar to RIKEN cDNA 4732493F09 gene [Mus
  misc_feature (285)..(740): Homolog of NCBI NO: 30520087 NR Description: RIKEN cDNA 4732493F09 gene [Mus musculus]
  misc_feature (24)..(126): Homolog of NCBI NO: 30520087 NR Description: RIKEN cDNA 4732493F09 gene [Mus musculus]
  misc_feature (285)..(740): Homolog of NCBI NO: 26345242 NR Description: unnamed protein product [Mus musculus]
  misc_feature (31)..(126): Homolog of NCBI NO: 26345242 NR Description: unnamed protein product [Mus musculus]

SEQ ID NO: 94149 - protein, 789 aa, Arabidopsis thaliana; identical to SEQ ID NO: 90393
  peptide (1)..(789): Ceres Seq. ID no. 12723712
  misc_feature (613)..(789): Homolog of NCBI NO: 10177028 NR Description: gene_id:MQJ2.12~unknown protein [Arabidopsis
  misc_feature (461)..(588): Homolog of NCBI NO: 10177028 NR Description: gene_id:MQJ2.12~unknown protein [Arabidopsis
  misc_feature (194)..(649): Homolog of NCBI NO: 26345344 NR Description: unnamed protein product [Mus musculus]
  misc_feature (1)..(35): Homolog of NCBI NO: 26345344 NR Description: unnamed protein product [Mus musculus]
  misc_feature (194)..(649): Homolog of NCBI NO: 28374414 NR Description: similar to RIKEN cDNA 4732493F09 gene [Mus
  misc_feature (1)..(35): Homolog of NCBI NO: 28374414 NR Description: similar to RIKEN cDNA 4732493F09 gene [Mus
  misc_feature (194)..(649): Homolog of NCBI NO: 30520087 NR Description: RIKEN cDNA 4732493F09 gene [Mus musculus]
  misc_feature (1)..(35): Homolog of NCBI NO: 30520087 NR Description: RIKEN cDNA 4732493F09 gene [Mus musculus]
  misc_feature (194)..(649): Homolog of NCBI NO: 26345242 NR Description: unnamed protein product [Mus musculus]
  misc_feature (1)..(35): Homolog of NCBI NO: 26345242 NR Description: unnamed protein product [Mus musculus]

SEQ ID NO: 94150 - DNA, 2497 bp, Arabidopsis thaliana; identical to SEQ ID NO: 90394
  misc_feature (1)..(2497): Ceres Seq. ID no. 12723720
  misc_feature: MA Experiment ID: 20000182 Result: Up-regulated in Transcription
  misc_feature: MA Experiment 20000182 PARAMETER Experiment Name: At_2mM_SA_P Parameter: Age (day) Value: 14
  misc_feature: MA Experiment 20000182 PARAMETER Experiment Name: At_2mM_SA_P Parameter: Organism Value: A. thaliana
  misc_feature: MA Experiment 20000182 PARAMETER Experiment Name: At_2mM_SA_P Parameter: Plant Line Value: WS
  misc_feature: MA Experiment 20000182 PARAMETER Experiment Name: At_2mM_SA_P Parameter: Timepoint (hr) Value: 6
  misc_feature: MA Experiment 20000182 PARAMETER Experiment Name: At_2mM_SA_P Parameter: Tissue Value: Aerial
  misc_feature: MA Experiment 20000182 PARAMETER Experiment Name: At_2mM_SA_P Parameter: Treatment Value: 2mM SA vs. No Treatment
  misc_feature: MA Experiment ID: 20000185 Result: Up-regulated in Transcription
  misc_feature: MA Experiment 20000185 PARAMETER Experiment Name: At_Roots__P Parameter: Age (day) Value: 7 vs. 21
  misc_feature: MA Experiment 20000185 PARAMETER Experiment Name: At_Roots__P Parameter: Organism Value: A. thaliana
  misc_feature: MA Experiment 20000185 PARAMETER Experiment Name: At_Roots__P Parameter: Tissue Value: Roots vs. Whole Plant
  misc_feature: MA Experiment ID: 20000227 Result: Down-regulated in Transcription
  misc_feature: MA Experiment 20000227 PARAMETER Experiment Name: At_Root-Tips-vs-Tops_P Parameter: Tissue Value: Root Tips vs. Root Tops
  misc_feature: MA Experiment ID: 20000438 Result: Down-regulated in Transcription
  misc_feature: MA Experiment 20000438 PARAMETER Experiment Name: At_Shoots__P Parameter: Age (day) Value: 14
  misc_feature: MA Experiment 20000438 PARAMETER Experiment Name: At_Shoots__P Parameter: Tissue Value: Shoots vs. Whole Plant
  misc_feature: MA Experiment ID: 20000445 Result: Up-regulated in Transcription
  misc_feature: MA Experiment 20000445 PARAMETER Experiment Name: At_100uM_NAA__P Parameter: Age (day) Value: 14
  misc_feature: MA Experiment 20000445 PARAMETER Experiment Name: At_100uM_NAA__P Parameter: Organism Value: A. thaliana
  misc_feature: MA Experiment 20000445 PARAMETER Experiment Name: At_100uM_NAA__P Parameter: Plant Line Value: WS
  misc_feature: MA Experiment 20000445 PARAMETER Experiment Name: At_100uM_NAA__P Parameter: Timepoint (hr) Value: 6
  misc_feature: MA Experiment 20000445 PARAMETER Experiment Name: At_100uM_NAA__P Parameter: Tissue Value: Aerial
  misc_feature: MA Experiment 20000445 PARAMETER Experiment Name: At_100uM_NAA__P Parameter: Treatment Value: 100uM NAA vs. No Treatment
  misc_feature: MA Experiment ID: 20001557 Result: Up-regulated in Transcription
  misc_feature: MA Experiment 20001557 PARAMETER Experiment Name: At_Drought_Soil_Dry_P Parameter: Age (day) Value: 27
  misc_feature: MA Experiment 20001557 PARAMETER Experiment Name: At_Drought_Soil_Dry_P Parameter: Organism Value: A. thaliana
  misc_feature: MA Experiment 20001557 PARAMETER Experiment Name: At_Drought_Soil_Dry_P Parameter: Plant Line Value: WS
  misc_feature: MA Experiment 20001557 PARAMETER Experiment Name: At_Drought_Soil_Dry_P Parameter: Post Timepoint (hr) Value: 3
  misc_feature: MA Experiment 20001557 PARAMETER Experiment Name: At_Drought_Soil_Dry_P Parameter: Post-Treatment Value: Re-Water vs. No Drought
  misc_feature: MA Experiment 20001557 PARAMETER Experiment Name: At_Drought_Soil_Dry_P Parameter: Timepoint (day) Value: 13
  misc_feature: MA Experiment 20001557 PARAMETER Experiment Name: At_Drought_Soil_Dry_P Parameter: Treatment Value: Drought vs. No Drought
  misc_feature: MA Experiment ID: 20001757 Result: Down-regulated in Transcription
  misc_feature: MA Experiment 20001757 PARAMETER Experiment Name: At_50mM_NH4NO3_L-to-H_P Parameter: Timepoint (hr) Value: 6
  misc_feature: MA Experiment 20001757 PARAMETER Experiment Name: At_50mM_NH4NO3_L-to-H_P Parameter: Tissue Value: Leaf
  misc_feature: MA Experiment 20001757 PARAMETER Experiment Name: At_50mM_NH4NO3_L-to-H_P Parameter: Treatment Value: 50mM NH4NO3 vs 100mM Mannitol
  misc_feature: MA Experiment ID: 20001905 Result: Up-regulated in Transcription
  misc_feature: MA Experiment 20001905 PARAMETER Experiment Name: At_Drought_Reproduction_P Parameter: Age (day) Value: 40
  misc_feature: MA Experiment 20001905 PARAMETER Experiment Name: At_Drought_Reproduction_P Parameter: Organism Value: A. thaliana
  misc_feature: MA Experiment 20001905 PARAMETER Experiment Name: At_Drought_Reproduction_P Parameter: Plant Line Value: WS
  misc_feature: MA Experiment 20001905 PARAMETER Experiment Name: At_Drought_Reproduction_P Parameter: Timepoint (day) Value: 10
  misc_feature: MA Experiment 20001905 PARAMETER Experiment Name: At_Drought_Reproduction_P Parameter: Tissue Value: Rosettes
  misc_feature: MA Experiment 20001905 PARAMETER Experiment Name: At_Drought_Reproduction_P Parameter: Treatment Value: Drought vs. No Drought

SEQ ID NO: 94151 - protein, 607 aa, Arabidopsis thaliana; identical to SEQ ID NO: 90395
  peptide (1)..(607): Ceres Seq. ID no. 12723721
  misc_feature (92)..(127): Pfam Name: Ankyrin repeat Pfam Description: Ankyrin repeat
  misc_feature (13)..(473): Homolog of NCBI NO: 11357692 NR Description: hypothetical protein F27K19.160 - Arabidopsis >gi|7573493|emb|CAB87852.1| putative protein [Arabidopsis
  misc_feature (13)..(473): Homolog of NCBI NO: 18410398 NR Description: putative protein; protein id: At3g55980.1, by cDNA: gi_15810486 [Arabidopsis thaliana]
  misc_feature (1)..(404): Homolog of NCBI NO: 15225637 NR Description: putative CCCH-type zinc finger protein; protein At2g40140.1, supported by cDNA: gi_20260233 [Arabidopsis
  misc_feature (186)..(490): Homolog of NCBI NO: 20466590 NR Description: zinc finger transcription factor-like protein
  misc_feature (3)..(186): Homolog of NCBI NO: 20466590 NR Description: zinc finger transcription factor-like protein
  misc_feature (186)..(490): Homolog of NCBI NO: 15239917 NR Description: zinc finger transcription factor -like protein; id: At5g12850.1, supported by cDNA: gi_20466589 [Arabidopsis
  misc_feature (5)..(186): Homolog of NCBI NO: 15239917 NR Description: zinc finger transcription factor -like protein; id: At5g12850.1, supported by cDNA: gi_20466589 [Arabidopsis
  misc_feature (186)..(447): Homolog of NCBI NO: 28273376 NR Description: unknown protein [Oryza sativa (japonica
  misc_feature (11)..(155): Homolog of NCBI NO: 28273376 NR Description: unknown protein [Oryza sativa (japonica
  misc_feature (10)..(586): Homolog of NCBI NO: 34899832 NR Description: OJ1092_A07.25 [Oryza sativa (japonica

SEQ ID NO: 94152 - protein, 554 aa, Arabidopsis thaliana; identical to SEQ ID NO: 90396
  peptide (1)..(554): Ceres Seq. ID no. 12723722
  misc_feature (39)..(74): Pfam Name: Ankyrin repeat Pfam Description: Ankyrin repeat
  misc_feature (1)..(420): Homolog of NCBI NO: 11357692 NR Description: hypothetical protein F27K19.160 - Arabidopsis >gi|7573493|emb|CAB87852.1| putative protein [Arabidopsis
  misc_feature (1)..(420): Homolog of NCBI NO: 18410398 NR Description: putative protein; protein id: At3g55980.1, by cDNA: gi_15810486 [Arabidopsis thaliana]
  misc_feature (1)..(351): Homolog of NCBI NO: 15225637 NR Description: putative CCCH-type zinc finger protein; protein At2g40140.1, supported by cDNA: gi_20260233 [Arabidopsis
  misc_feature (133)..(437): Homolog of NCBI NO: 20466590 NR Description: zinc finger transcription factor-like protein
  misc_feature (1)..(133): Homolog of NCBI NO: 20466590 NR Description: zinc finger transcription factor-like protein
  misc_feature (133)..(437): Homolog of NCBI NO: 15239917 NR Description: zinc finger transcription factor -like protein; id: At5g12850.1, supported by cDNA: gi_20466589 [Arabidopsis
  misc_feature (1)..(133): Homolog of NCBI NO: 15239917 NR Description: zinc finger transcription factor -like protein; id: At5g12850.1, supported by cDNA: gi_20466589 [Arabidopsis
  misc_feature (133)..(394): Homolog of NCBI NO: 28273376 NR Description: unknown protein [Oryza sativa (japonica
  misc_feature (1)..(102): Homolog of NCBI NO: 28273376 NR Description: unknown protein [Oryza sativa (japonica
  misc_feature (1)..(533): Homolog of NCBI NO: 34899832 NR Description: OJ1092_A07.25 [Oryza sativa (japonica

SEQ ID NO: 94153 - protein, 545 aa, Arabidopsis thaliana; identical to SEQ ID NO: 90397
  peptide (1)..(545): Ceres Seq. ID no. 12723723
  misc_feature (30)..(65): Pfam Name: Ankyrin repeat Pfam Description: Ankyrin repeat
  misc_feature (1)..(411): Homolog of NCBI NO: 11357692 NR Description: hypothetical protein F27K19.160 - Arabidopsis >gi|7573493|emb|CAB87852.1| putative protein [Arabidopsis
  misc_feature (1)..(411): Homolog of NCBI NO: 18410398 NR Description: putative protein; protein id: At3g55980.1, by cDNA: gi_15810486 [Arabidopsis thaliana]
  misc_feature (1)..(342): Homolog of NCBI NO: 15225637 NR Description: putative CCCH-type zinc finger protein; protein At2g40140.1, supported by cDNA: gi_20260233 [Arabidopsis
  misc_feature (124)..(428): Homolog of NCBI NO: 20466590 NR Description: zinc finger transcription factor-like protein
  misc_feature (1)..(124): Homolog of NCBI NO: 20466590 NR Description: zinc finger transcription factor-like protein
  misc_feature (124)..(428): Homolog of NCBI NO: 15239917 NR Description: zinc finger transcription factor -like protein; id: At5g12850.1, supported by cDNA: gi_20466589 [Arabidopsis
  misc_feature (1)..(124): Homolog of NCBI NO: 15239917 NR Description: zinc finger transcription factor -like protein; id: At5g12850.1, supported by cDNA: gi_20466589 [Arabidopsis
  misc_feature (124)..(385): Homolog of NCBI NO: 28273376 NR Description: unknown protein [Oryza sativa (japonica
  misc_feature (1)..(93): Homolog of NCBI NO: 28273376 NR Description: unknown protein [Oryza sativa (japonica
  misc_feature (1)..(524): Homolog of NCBI NO: 34899832 NR Description: OJ1092_A07.25 [Oryza sativa (japonica

SEQ ID NO: 94154 - DNA, 1487 bp, Arabidopsis thaliana; identical to SEQ ID NO: 90398
  misc_feature (1)..(1487): Ceres Seq. ID no. 12723756
  misc_feature: MA Experiment ID: 108434 Result: Up-regulated in Transcription
  misc_feature: MA Experiment 108434 PARAMETER Experiment Name: At_Root_Tips_cDNA_P Parameter: Tissue Value: Root Tips
  misc_feature: MA Experiment ID: 20000234 Result: Up-regulated in Transcription
  misc_feature: MA Experiment 20000234 PARAMETER Experiment Name: At_Siliques_P Parameter: Age (day) Value: 21
  misc_feature: MA Experiment 20000234 PARAMETER Experiment Name: At_Siliques_P Parameter: Organism Value: A. thaliana
  misc_feature: MA Experiment 20000234 PARAMETER Experiment Name: At_Siliques_P Parameter: Plant Line Value: WS
  misc_feature: MA Experiment 20000234 PARAMETER Experiment Name: At_Siliques_P Parameter: Tissue Value: Less Than 5mm Siliques vs. Whole Plant
  misc_feature: MA Experiment ID: 20000495 Result: Up-regulated in Transcription
  misc_feature: MA Experiment 20000495 PARAMETER Experiment Name: At_Guard_Cells_P Parameter: Harvest Date Value: 8/2/2002
  misc_feature: MA Experiment 20000495 PARAMETER Experiment Name: At_Guard_Cells_P Parameter: Organism Value: A. thaliana
  misc_feature: MA Experiment 20000495 PARAMETER Experiment Name: At_Guard_Cells_P Parameter: Tissue Value: Guard Cells vs. Leaves

SEQ ID NO: 94155 - protein, 388 aa, Arabidopsis thaliana; identical to SEQ ID NO: 90399
  peptide (1)..(388): Ceres Seq. ID no. 12723757
  misc_feature (2)..(327): Pfam Name: Peptidase C13 family Pfam Description: Peptidase C13 family
  misc_feature (1)..(388): Homolog of NCBI NO: 18390936 NR Description: putative GPI-anchor transamidase (U32517); id: At1g08750.1, supported by cDNA: 120167. [Arabidopsis
  misc_feature (1)..(388): Homolog of NCBI NO: 21537105 NR Description: putative GPI-anchor transamidase [Arabidopsis
  misc_feature (1)..(342): Homolog of NCBI NO: 7485988 NR Description: hypothetical protein F22O13.26 - Arabidopsis
  misc_feature (1)..(342): Homolog of NCBI NO: 9802563 NR Description: F22O13.24 [Arabidopsis thaliana]
  misc_feature (14)..(329): Homolog of NCBI NO: 24639234 NR Description: CG4406-PA [Drosophila melanogaster]
  misc_feature (14)..(296): Homolog of NCBI NO: 7511896 NR Description: hypothetical protein 133E12.3 - fruit fly melanogaster) >gi|2661523|emb|CAA15687.1| version:''084'',
  misc_feature (24)..(383): Homolog of NCBI NO: 6320538 NR Description: Protein involved in the attachment of
  misc_feature (24)..(345): Homolog of NCBI NO: 1518259 NR Description: gpi8 [Homo sapiens]
  misc_feature (24)..(345): Homolog of NCBI NO: 23199983 NR Description: phosphatidylinositol glycan, class K precursor
  misc_feature (1)..(306): Homolog of NCBI NO: 29788753 NR Description: phosphatidylinositol glycan, class K [Mus >gi|26346805|dbj|BAC37051.1| unnamed protein product [Mus >gi|26349979|dbj|BAC38629.1| unnamed protein product [Mus

SEQ ID NO: 94156 - protein, 381 aa, Arabidopsis thaliana; identical to SEQ ID NO: 90400
  peptide (1)..(381): Ceres Seq. ID no. 12723758
  misc_feature (1)..(320): Pfam Name: Peptidase C13 family Pfam Description: Peptidase C13 family
  misc_feature (1)..(381): Homolog of NCBI NO: 18390936 NR Description: putative GPI-anchor transamidase (U32517); id: At1g08750.1, supported by cDNA: 120167. [Arabidopsis
  misc_feature (1)..(381): Homolog of NCBI NO: 21537105 NR Description: putative GPI-anchor transamidase [Arabidopsis
  misc_feature (1)..(335): Homolog of NCBI NO: 7485988 NR Description: hypothetical protein F22O13.26 - Arabidopsis
  misc_feature (1)..(335): Homolog of NCBI NO: 9802563 NR Description: F22O13.24 [Arabidopsis thaliana]
  misc_feature (7)..(322): Homolog of NCBI NO: 24639234 NR Description: CG4406-PA [Drosophila melanogaster]
  misc_feature (7)..(289): Homolog of NCBI NO: 7511896 NR Description: hypothetical protein 133E12.3 - fruit fly melanogaster) >gi|2661523|emb|CAA15687.1| version:''084'',
  misc_feature (17)..(376): Homolog of NCBI NO: 6320538 NR Description: Protein involved in the attachment of
  misc_feature (17)..(338): Homolog of NCBI NO: 1518259 NR Description: gpi8 [Homo sapiens]
  misc_feature (17)..(338): Homolog of NCBI NO: 23199983 NR Description: phosphatidylinositol glycan, class K precursor
  misc_feature (1)..(299): Homolog of NCBI NO: 29788753 NR Description: phosphatidylinositol glycan, class K [Mus >gi|26346805|dbj|BAC37051.1| unnamed protein product [Mus >gi|26349979|dbj|BAC38629.1| unnamed protein product [Mus

SEQ ID NO: 94157 - protein, 345 aa, Arabidopsis thaliana; identical to SEQ ID NO: 90401
  peptide (1)..(345): Ceres Seq. ID no. 12723759
  misc_feature (1)..(284): Pfam Name: Peptidase C13 family Pfam Description: Peptidase C13 family
  misc_feature (1)..(345): Homolog of NCBI NO: 18390936 NR Description: putative GPI-anchor transamidase (U32517); id: At1g08750.1, supported by cDNA: 120167. [Arabidopsis
  misc_feature (1)..(345): Homolog of NCBI NO: 21537105 NR Description: putative GPI-anchor transamidase [Arabidopsis
  misc_feature (1)..(299): Homolog of NCBI NO: 7485988 NR Description: hypothetical protein F22O13.26 - Arabidopsis
  misc_feature (1)..(299): Homolog of NCBI NO: 9802563 NR Description: F22O13.24 [Arabidopsis thaliana]
  misc_feature (1)..(286): Homolog of NCBI NO: 24639234 NR Description: CG4406-PA [Drosophila melanogaster]
  misc_feature (1)..(253): Homolog of NCBI NO: 7511896 NR Description: hypothetical protein 133E12.3 - fruit fly melanogaster) >gi|2661523|emb|CAA15687.1| version:''084'',
  misc_feature (1)..(340): Homolog of NCBI NO: 6320538 NR Description: Protein involved in the attachment of
  misc_feature (1)..(302): Homolog of NCBI NO: 1518259 NR Description: gpi8 [Homo sapiens]
  misc_feature (1)..(302): Homolog of NCBI NO: 23199983 NR Description: phosphatidylinositol glycan, class K precursor
  misc_feature (1)..(263): Homolog of NCBI NO: 29788753 NR Description: phosphatidylinositol glycan, class K [Mus >gi|26346805|dbj|BAC37051.1| unnamed protein product [Mus >gi|26349979|dbj|BAC38629.1| unnamed protein product [Mus

SEQ ID NO: 94158 - DNA, 1240 bp, Arabidopsis thaliana; identical to SEQ ID NO: 90402
  misc_feature (1)..(1240): Ceres Seq. ID no. 12723764
  misc_feature: MA Experiment ID: 108577 Result: Down-regulated in Transcription
  misc_feature: MA Experiment 108577 PARAMETER Experiment Name: At_42deg_Heat_cDNA_P Parameter: Temperature (deg C) Value: 42 vs. 22
  misc_feature: MA Experiment 108577 PARAMETER Experiment Name: At_42deg_Heat_cDNA_P Parameter: Timepoint (hr) Value: 6
  misc_feature: MA Experiment 108577 PARAMETER Experiment Name: At_42deg_Heat_cDNA_P Parameter: Tissue Value: Aerial
  misc_feature: MA Experiment ID: 108579 Result: Down-regulated in Transcription
  misc_feature: MA Experiment 108579 PARAMETER Experiment Name: At_4deg_Cold_cDNA_P Parameter: Temperature (deg C) Value: 4 vs. 22
  misc_feature: MA Experiment 108579 PARAMETER Experiment Name: At_4deg_Cold_cDNA_P Parameter: Timepoint (hr) Value: 6
  misc_feature: MA Experiment 108579 PARAMETER Experiment Name: At_4deg_Cold_cDNA_P Parameter: Tissue Value: Aerial
  misc_feature: MA Experiment ID: 20000173 Result: Down-regulated in Transcription
  misc_feature: MA Experiment 20000173 PARAMETER Experiment Name: At_42deg_Heat_P Parameter: Age (day) Value: 14
  misc_feature: MA Experiment 20000173 PARAMETER Experiment Name: At_42deg_Heat_P Parameter: Organism Value: A. thaliana
  misc_feature: MA Experiment 20000173 PARAMETER Experiment Name: At_42deg_Heat_P Parameter: Plant Line Value: WS
  misc_feature: MA Experiment 20000173 PARAMETER Experiment Name: At_42deg_Heat_P Parameter: Temperature (deg C) Value: 42 vs. 22
  misc_feature: MA Experiment 20000173 PARAMETER Experiment Name: At_42deg_Heat_P Parameter: Timepoint (hr) Value: 6
  misc_feature: MA Experiment 20000173 PARAMETER Experiment Name: At_42deg_Heat_P Parameter: Tissue Value: Aerial
  misc_feature: MA Experiment ID: 20000184 Result: Down-regulated in Transcription
  misc_feature: MA Experiment 20000184 PARAMETER Experiment Name: At_Shoots__P Parameter: Age (day) Value: 7
  misc_feature: MA Experiment 20000184 PARAMETER Experiment Name: At_Shoots__P Parameter: Tissue Value: Shoots vs. Whole Plant
  misc_feature: MA Experiment ID: 20000185 Result: Down-regulated in Transcription
  misc_feature: MA Experiment 20000185 PARAMETER Experiment Name: At_Roots__P Parameter: Age (day) Value: 7 vs. 21
  misc_feature: MA Experiment 20000185 PARAMETER Experiment Name: At_Roots__P Parameter: Organism Value: A. thaliana
  misc_feature: MA Experiment 20000185 PARAMETER Experiment Name: At_Roots__P Parameter: Tissue Value: Roots vs. Whole Plant
  misc_feature: MA Experiment ID: 20000227 Result: Down-regulated in Transcription
  misc_feature: MA Experiment 20000227 PARAMETER Experiment Name: At_Root-Tips-vs-Tops_P Parameter: Tissue Value: Root Tips vs. Root Tops
  misc_feature: MA Experiment ID: 20000234 Result: Down-regulated in Transcription
  misc_feature: MA Experiment 20000234 PARAMETER Experiment Name: At_Siliques_P Parameter: Age (day) Value: 21
  misc_feature: MA Experiment 20000234 PARAMETER Experiment Name: At_Siliques_P Parameter: Organism Value: A. thaliana
  misc_feature: MA Experiment 20000234 PARAMETER Experiment Name: At_Siliques_P Parameter: Plant Line Value: WS
  misc_feature: MA Experiment 20000234 PARAMETER Experiment Name: At_Siliques_P Parameter: Tissue Value: Less Than 5mm Siliques vs. Whole Plant
  misc_feature: MA Experiment ID: 20000265 Result: Down-regulated in Transcription
  misc_feature: MA Experiment 20000265 PARAMETER Experiment Name: At_Open_Flower_P Parameter: Age (day) Value: 21
  misc_feature: MA Experiment 20000265 PARAMETER Experiment Name: At_Open_Flower_P Parameter: Plant Line Value: WS
  misc_feature: MA Experiment 20000265 PARAMETER Experiment Name: At_Open_Flower_P Parameter: Tissue Value: Closed Flower vs. Whole Plant
  misc_feature: MA Experiment ID: 20000286 Result: Down-regulated in Transcription
  misc_feature: MA Experiment 20000286 PARAMETER Experiment Name: At_Open_Flower_P Parameter: Age (day) Value: 21
  misc_feature: MA Experiment 20000286 PARAMETER Experiment Name: At_Open_Flower_P Parameter: Plant Line Value: WS
  misc_feature: MA Experiment 20000286 PARAMETER Experiment Name: At_Open_Flower_P Parameter: Tissue Value: Half Open vs. Whole Plant
  misc_feature: MA Experiment ID: 20000439 Result: Down-regulated in Transcription
  misc_feature: MA Experiment 20000439 PARAMETER Experiment Name: At_Roots__P Parameter: Age (day) Value: 14 vs. 21
  misc_feature: MA Experiment 20000439 PARAMETER Experiment Name: At_Roots__P Parameter: Organism Value: A. thaliana
  misc_feature: MA Experiment 20000439 PARAMETER Experiment Name: At_Roots__P Parameter: Tissue Value: Roots vs. Whole Plant
  misc_feature: MA Experiment ID: 20000451 Result: Down-regulated in Transcription
  misc_feature: MA Experiment 20000451 PARAMETER Experiment Name: At_CS6879_Shoots-Roots_P Parameter: Age (day) Value: 14
  misc_feature: MA Experiment 20000451 PARAMETER Experiment Name: At_CS6879_Shoots-Roots_P Parameter: Organism Value: A. thaliana
  misc_feature: MA Experiment 20000451 PARAMETER Experiment Name: At_CS6879_Shoots-Roots_P Parameter: Plant Line Value: CS6879 vs. WS
  misc_feature: MA Experiment 20000451 PARAMETER Experiment Name: At_CS6879_Shoots-Roots_P Parameter: Tissue Value: Roots
  misc_feature: MA Experiment ID: 20000496 Result: Down-regulated in Transcription
  misc_feature: MA Experiment 20000496 PARAMETER Experiment Name: At_Guard_Cells_P Parameter: Harvest Date Value: 7/19/2002
  misc_feature: MA Experiment 20000496 PARAMETER Experiment Name: At_Guard_Cells_P Parameter: Organism Value: Canola
  misc_feature: MA Experiment 20000496 PARAMETER Experiment Name: At_Guard_Cells_P Parameter: Tissue Value: Guard Cells vs. Leaves
  misc_feature: MA Experiment ID: 20001557 Result: Down-regulated in Transcription
  misc_feature: MA Experiment 20001557 PARAMETER Experiment Name: At_Drought_Soil_Dry_P Parameter: Age (day) Value: 27
  misc_feature: MA Experiment 20001557 PARAMETER Experiment Name: At_Drought_Soil_Dry_P Parameter: Organism Value: A. thaliana
  misc_feature: MA Experiment 20001557 PARAMETER Experiment Name: At_Drought_Soil_Dry_P Parameter: Plant Line Value: WS
  misc_feature: MA Experiment 20001557 PARAMETER Experiment Name: At_Drought_Soil_Dry_P Parameter: Post Timepoint (hr) Value: 3
  misc_feature: MA Experiment 20001557 PARAMETER Experiment Name: At_Drought_Soil_Dry_P Parameter: Post-Treatment Value: Re-Water vs. No Drought
  misc_feature: MA Experiment 20001557 PARAMETER Experiment Name: At_Drought_Soil_Dry_P Parameter: Timepoint (day) Value: 13
  misc_feature: MA Experiment 20001557 PARAMETER Experiment Name: At_Drought_Soil_Dry_P Parameter: Treatment Value: Drought vs. No Drought
  misc_feature: MA Experiment ID: 20001558 Result: Down-regulated in Transcription
  misc_feature: MA Experiment 20001558 PARAMETER Experiment Name: At_Drought_Soil_Dry_P Parameter: Age (day) Value: 27
  misc_feature: MA Experiment 20001558 PARAMETER Experiment Name: At_Drought_Soil_Dry_P Parameter: Organism Value: A. thaliana
  misc_feature: MA Experiment 20001558 PARAMETER Experiment Name: At_Drought_Soil_Dry_P Parameter: Plant Line Value: WS
  misc_feature: MA Experiment 20001558 PARAMETER Experiment Name: At_Drought_Soil_Dry_P Parameter: Post Timepoint (hr) Value: 6
  misc_feature: MA Experiment 20001558 PARAMETER Experiment Name: At_Drought_Soil_Dry_P Parameter: Post-Treatment Value: Re-Water vs. No Drought
  misc_feature: MA Experiment 20001558 PARAMETER Experiment Name: At_Drought_Soil_Dry_P Parameter: Timepoint (day) Value: 13
  misc_feature: MA Experiment 20001558 PARAMETER Experiment Name: At_Drought_Soil_Dry_P Parameter: Treatment Value: Drought vs. No Drought
  misc_feature: MA Experiment ID: 20001560 Result: Down-regulated in Transcription
  misc_feature: MA Experiment 20001560 PARAMETER Experiment Name: At_Drought_Soil_Dry_P Parameter: Age (day) Value: 28
  misc_feature: MA Experiment 20001560 PARAMETER Experiment Name: At_Drought_Soil_Dry_P Parameter: Organism Value: A. thaliana
  misc_feature: MA Experiment 20001560 PARAMETER Experiment Name: At_Drought_Soil_Dry_P Parameter: Plant Line Value: WS
  misc_feature: MA Experiment 20001560 PARAMETER Experiment Name: At_Drought_Soil_Dry_P Parameter: Post Timepoint (hr) Value: None
  misc_feature: MA Experiment 20001560 PARAMETER Experiment Name: At_Drought_Soil_Dry_P Parameter: Post-Treatment Value: None
  misc_feature: MA Experiment 20001560 PARAMETER Experiment Name: At_Drought_Soil_Dry_P Parameter: Timepoint (day) Value: 14
  misc_feature: MA Experiment 20001560 PARAMETER Experiment Name: At_Drought_Soil_Dry_P Parameter: Treatment Value: Drought vs. No Drought
  misc_feature: MA Experiment ID: 20001905 Result: Down-regulated in Transcription
  misc_feature: MA Experiment 20001905 PARAMETER Experiment Name: At_Drought_Reproduction_P Parameter: Age (day) Value: 40
  misc_feature: MA Experiment 20001905 PARAMETER Experiment Name: At_Drought_Reproduction_P Parameter: Organism Value: A. thaliana
  misc_feature: MA Experiment 20001905 PARAMETER Experiment Name: At_Drought_Reproduction_P Parameter: Plant Line Value: WS
  misc_feature: MA Experiment 20001905 PARAMETER Experiment Name: At_Drought_Reproduction_P Parameter: Timepoint (day) Value: 10
  misc_feature: MA Experiment 20001905 PARAMETER Experiment Name: At_Drought_Reproduction_P Parameter: Tissue Value: Rosettes
  misc_feature: MA Experiment 20001905 PARAMETER Experiment Name: At_Drought_Reproduction_P Parameter: Treatment Value: Drought vs. No Drought
  misc_feature: MA Experiment ID: 20001906 Result: Down-regulated in Transcription
  misc_feature: MA Experiment 20001906 PARAMETER Experiment Name: At_Drought_Reproduction_P Parameter: Age (day) Value: 35
  misc_feature: MA Experiment 20001906 PARAMETER Experiment Name: At_Drought_Reproduction_P Parameter: Organism Value: A. thaliana
  misc_feature: MA Experiment 20001906 PARAMETER Experiment Name: At_Drought_Reproduction_P Parameter: Plant Line Value: WS
  misc_feature: MA Experiment 20001906 PARAMETER Experiment Name: At_Drought_Reproduction_P Parameter: Timepoint (day) Value: 5
  misc_feature: MA Experiment 20001906 PARAMETER Experiment Name: At_Drought_Reproduction_P Parameter: Tissue Value: Siliques
  misc_feature: MA Experiment 20001906 PARAMETER Experiment Name: At_Drought_Reproduction_P Parameter: Treatment Value: Drought vs. No Drought

SEQ ID NO: 94159 - protein, 370 aa, Arabidopsis thaliana; identical to SEQ ID NO: 90403
  peptide (1)..(370): Ceres Seq. ID no. 12723765
  misc_feature (2)..(143): Pfam Name: Sugar (and other) transporter Pfam Description: Sugar (and other) transporter
  misc_feature (2)..(143): Homolog of NCBI NO: 25407061 NR Description: hypothetical protein [imported] - Arabidopsis >gi|2342688|gb|AAB70414.1| Similar to Beta integral membrane
  misc_feature (271)..(370): Homolog of NCBI NO: 25407061 NR Description: hypothetical protein [imported] - Arabidopsis >gi|2342688|gb|AAB70414.1| Similar to Beta integral membrane
  misc_feature (2)..(367): Homolog of NCBI NO: 14585699 NR Description: sugar-porter family protein 1 [Arabidopsis
  misc_feature (2)..(367): Homolog of NCBI NO: 18421106 NR Description: sugar transporter-like protein; protein id: supported by cDNA: gi_14585698, supported by cDNA: gi_15294181
  misc_feature (1)..(206): Homolog of NCBI NO: 6686829 NR Description: putative sugar transporter [Arabidopsis thaliana]
  misc_feature (1)..(368): Homolog of NCBI NO: 18421108 NR Description: sugar transporter-like protein; protein id:
  misc_feature (2)..(369): Homolog of NCBI NO: 22330860 NR Description: sugar transporter, putative; protein id: supported by cDNA: gi_17380763, supported by cDNA: gi_20259596 thaliana] >gi|17380764|gb|AAL36212.1| putative sugar transporter
  misc_feature (2)..(366): Homolog of NCBI NO: 18390957 NR Description: putative sugar transport protein, ERD6; protein At1g08920.1, supported by cDNA: gi_14194108 [Arabidopsis >gi|14194109|gb|AAK56249.1|AF367260_1 At1g08920/F7G19_20
  misc_feature (2)..(366): Homolog of NCBI NO: 30680865 NR Description: sugar transporter, putative [Arabidopsis thaliana]
  misc_feature (2)..(366): Homolog of NCBI NO: 6686827 NR Description: putative sugar transporter [Arabidopsis thaliana]

SEQ ID NO: 94160 - protein, 368 aa, Arabidopsis thaliana; identical to SEQ ID NO: 90404
  peptide (1)..(368): Ceres Seq. ID no. 12723766
  misc_feature (1)..(141): Pfam Name: Sugar (and other) transporter Pfam Description: Sugar (and other) transporter
  misc_feature (1)..(141): Homolog of NCBI NO: 25407061 NR Description: hypothetical protein [imported] - Arabidopsis >gi|2342688|gb|AAB70414.1| Similar to Beta integral membrane
  misc_feature (269)..(368): Homolog of NCBI NO: 25407061 NR Description: hypothetical protein [imported] - Arabidopsis >gi|2342688|gb|AAB70414.1| Similar to Beta integral membrane
  misc_feature (1)..(365): Homolog of NCBI NO: 14585699 NR Description: sugar-porter family protein 1 [Arabidopsis
  misc_feature (1)..(365): Homolog of NCBI NO: 18421106 NR Description: sugar transporter-like protein; protein id: supported by cDNA: gi_14585698, supported by cDNA: gi_15294181
  misc_feature (1)..(204): Homolog of NCBI NO: 6686829 NR Description: putative sugar transporter [Arabidopsis thaliana]
  misc_feature (1)..(366): Homolog of NCBI NO: 18421108 NR Description: sugar transporter-like protein; protein id:
  misc_feature (1)..(367): Homolog of NCBI NO: 22330860 NR Description: sugar transporter, putative; protein id: supported by cDNA: gi_17380763, supported by cDNA: gi_20259596 thaliana] >gi|17380764|gb|AAL36212.1| putative sugar transporter
  misc_feature (1)..(364): Homolog of NCBI NO: 18390957 NR Description: putative sugar transport protein, ERD6; protein At1g08920.1, supported by cDNA: gi_14194108 [Arabidopsis >gi|14194109|gb|AAK56249.1|AF367260_1 At1g08920/F7G19_20
  misc_feature (1)..(364): Homolog of NCBI NO: 30680865 NR Description: sugar transporter, putative [Arabidopsis thaliana]
  misc_feature (1)..(364): Homolog of NCBI NO: 6686827 NR Description: putative sugar transporter [Arabidopsis thaliana]

SEQ ID NO: 94161 - protein, 346 aa, Arabidopsis thaliana; identical to SEQ ID NO: 90405
  peptide (1)..(346): Ceres Seq. ID no. 12723767
  misc_feature (1)..(119): Pfam Name: Sugar (and other) transporter Pfam Description: Sugar (and other) transporter
  misc_feature (1)..(119): Homolog of NCBI NO: 25407061 NR Description: hypothetical protein [imported] - Arabidopsis >gi|2342688|gb|AAB70414.1| Similar to Beta integral membrane
  misc_feature (247)..(346): Homolog of NCBI NO: 25407061 NR Description: hypothetical protein [imported] - Arabidopsis >gi|2342688|gb|AAB70414.1| Similar to Beta integral membrane
  misc_feature (1)..(343): Homolog of NCBI NO: 14585699 NR Description: sugar-porter family protein 1 [Arabidopsis
  misc_feature (1)..(343): Homolog of NCBI NO: 18421106 NR Description: sugar transporter-like protein; protein id: supported by cDNA: gi_14585698, supported by cDNA: gi_15294181
  misc_feature (1)..(182): Homolog of NCBI NO: 6686829 NR Description: putative sugar transporter [Arabidopsis thaliana]
  misc_feature (1)..(344): Homolog of NCBI NO: 18421108 NR Description: sugar transporter-like protein; protein id:
  misc_feature (1)..(345): Homolog of NCBI NO: 22330860 NR Description: sugar transporter, putative; protein id: supported by cDNA: gi_17380763, supported by cDNA: gi_20259596 thaliana] >gi|17380764|gb|AAL36212.1| putative sugar transporter
  misc_feature (1)..(342): Homolog of NCBI NO: 18390957 NR Description: putative sugar transport protein, ERD6; protein At1g08920.1, supported by cDNA: gi_14194108 [Arabidopsis >gi|14194109|gb|AAK56249.1|AF367260_1 At1g08920/F7G19_20
  misc_feature (1)..(342): Homolog of NCBI NO: 30680865 NR Description: sugar transporter, putative [Arabidopsis thaliana]
  misc_feature (1)..(342): Homolog of NCBI NO: 6686827 NR Description: putative sugar transporter [Arabidopsis thaliana]

SEQ ID NO: 94162 - DNA, 1532 bp, Arabidopsis thaliana; identical to SEQ ID NO: 90406
  misc_feature (1)..(1532): Ceres Seq. ID no. 12723776
  misc_feature: MA Experiment ID: 20000327 Result: Down-regulated in Transcription
  misc_feature: MA Experiment 20000327 PARAMETER Experiment Name: At_42deg_Heat_Sub_P Parameter: Age (day) Value: 14
  misc_feature: MA Experiment 20000327 PARAMETER Experiment Name: At_42deg_Heat_Sub_P Parameter: Organism Value: A. thaliana
  misc_feature: MA Experiment 20000327 PARAMETER Experiment Name: At_42deg_Heat_Sub_P Parameter: Plant Line Value: WS
  misc_feature: MA Experiment 20000327 PARAMETER Experiment Name: At_42deg_Heat_Sub_P Parameter: Temperature (deg C) Value: 42 vs. 22
  misc_feature: MA Experiment 20000327 PARAMETER Experiment Name: At_42deg_Heat_Sub_P Parameter: Timepoint (hr) Value: 1
  misc_feature: MA Experiment 20000327 PARAMETER Experiment Name: At_42deg_Heat_Sub_P Parameter: Tissue Value: Aerial
  misc_feature: MA Experiment ID: 20000328 Result: Down-regulated in Transcription
  misc_feature: MA Experiment 20000328 PARAMETER Experiment Name: At_42deg_Heat_Sub_P Parameter: Age (day) Value: 14
  misc_feature: MA Experiment 20000328 PARAMETER Experiment Name: At_42deg_Heat_Sub_P Parameter: Organism Value: A. thaliana
  misc_feature: MA Experiment 20000328 PARAMETER Experiment Name: At_42deg_Heat_Sub_P Parameter: Plant Line Value: WS
  misc_feature: MA Experiment 20000328 PARAMETER Experiment Name: At_42deg_Heat_Sub_P Parameter: Temperature (deg C) Value: 42 vs. 22
  misc_feature: MA Experiment 20000328 PARAMETER Experiment Name: At_42deg_Heat_Sub_P Parameter: Timepoint (hr) Value: 6
  misc_feature: MA Experiment 20000328 PARAMETER Experiment Name: At_42deg_Heat_Sub_P Parameter: Tissue Value: Aerial
  misc_feature: MA Experiment ID: 20000347 Result: Up-regulated in Transcription
  misc_feature: MA Experiment 20000347 PARAMETER Experiment Name: At_2mM_SA_Sub_P Parameter: Age (day) Value: 14
  misc_feature: MA Experiment 20000347 PARAMETER Experiment Name: At_2mM_SA_Sub_P Parameter: Organism Value: A. thaliana
  misc_feature: MA Experiment 20000347 PARAMETER Experiment Name: At_2mM_SA_Sub_P Parameter: Plant Line Value: WS
  misc_feature: MA Experiment 20000347 PARAMETER Experiment Name: At_2mM_SA_Sub_P Parameter: Timepoint (hr) Value: 6
  misc_feature: MA Experiment 20000347 PARAMETER Experiment Name: At_2mM_SA_Sub_P Parameter: Tissue Value: Aerial
  misc_feature: MA Experiment 20000347 PARAMETER Experiment Name: At_2mM_SA_Sub_P Parameter: Treatment Value: 2mM SA vs. No Treatment
  misc_feature: MA Experiment ID: 20000348 Result: Up-regulated in Transcription
  misc_feature: MA Experiment 20000348 PARAMETER Experiment Name: At_100uM_ABA_Sub_P Parameter: Age (day) Value: 14
  misc_feature: MA Experiment 20000348 PARAMETER Experiment Name: At_100uM_ABA_Sub_P Parameter: Organism Value: A. thaliana
  misc_feature: MA Experiment 20000348 PARAMETER Experiment Name: At_100uM_ABA_Sub_P Parameter: Plant Line Value: WS
  misc_feature: MA Experiment 20000348 PARAMETER Experiment Name: At_100uM_ABA_Sub_P Parameter: Timepoint (hr) Value: 1
  misc_feature: MA Experiment 20000348 PARAMETER Experiment Name: At_100uM_ABA_Sub_P Parameter: Tissue Value: Aerial
  misc_feature: MA Experiment 20000348 PARAMETER Experiment Name: At_100uM_ABA_Sub_P Parameter: Treatment Value: 100uM ABA vs. No Treatment
  misc_feature: MA Experiment ID: 20000349 Result: Up-regulated in Transcription
  misc_feature: MA Experiment 20000349 PARAMETER Experiment Name: At_100uM_ABA_Sub_P Parameter: Age (day) Value: 14
  misc_feature: MA Experiment 20000349 PARAMETER Experiment Name: At_100uM_ABA_Sub_P Parameter: Organism Value: A. thaliana
  misc_feature: MA Experiment 20000349 PARAMETER Experiment Name: At_100uM_ABA_Sub_P Parameter: Plant Line Value: WS
  misc_feature: MA Experiment 20000349 PARAMETER Experiment Name: At_100uM_ABA_Sub_P Parameter: Timepoint (hr) Value: 6
  misc_feature: MA Experiment 20000349 PARAMETER Experiment Name: At_100uM_ABA_Sub_P Parameter: Tissue Value: Aerial
  misc_feature: MA Experiment 20000349 PARAMETER Experiment Name: At_100uM_ABA_Sub_P Parameter: Treatment Value: 100uM ABA vs. No Treatment
  misc_feature: MA Experiment ID: 20000352 Result: Up-regulated in Transcription
  misc_feature: MA Experiment 20000352 PARAMETER Experiment Name: At_Drought_Sub_P Parameter: Age (day) Value: 7
  misc_feature: MA Experiment 20000352 PARAMETER Experiment Name: At_Drought_Sub_P Parameter: Organism Value: A. thaliana
  misc_feature: MA Experiment 20000352 PARAMETER Experiment Name: At_Drought_Sub_P Parameter: Plant Line Value: WS
  misc_feature: MA Experiment 20000352 PARAMETER Experiment Name: At_Drought_Sub_P Parameter: Timepoint (hr) Value: 6
  misc_feature: MA Experiment 20000352 PARAMETER Experiment Name: At_Drought_Sub_P Parameter: Tissue Value: Whole Plant
  misc_feature: MA Experiment 20000352 PARAMETER Experiment Name: At_Drought_Sub_P Parameter: Treatment Value: Drought vs. No Drought
  misc_feature: MA Experiment ID: 20000355 Result: Down-regulated in Transcription
  misc_feature: MA Experiment 20000355 PARAMETER Experiment Name: At_Siliques_Sub_P Parameter: Age (day) Value: 21
  misc_feature: MA Experiment 20000355 PARAMETER Experiment Name: At_Siliques_Sub_P Parameter: Organism Value: A. thaliana
  misc_feature: MA Experiment 20000355 PARAMETER Experiment Name: At_Siliques_Sub_P Parameter: Plant Line Value: WS
  misc_feature: MA Experiment 20000355 PARAMETER Experiment Name: At_Siliques_Sub_P Parameter: Tissue Value: Less Than 5mm Siliques vs. Whole Plant
  misc_feature: MA Experiment ID: 20000440 Result: Down-regulated in Transcription
  misc_feature: MA Experiment 20000440 PARAMETER Experiment Name: At_Closed-Flower__Sub_P Parameter: Tissue Value: Closed Flower vs. Whole Plant

SEQ ID NO: 94163 - protein, 291 aa, Arabidopsis thaliana; identical to SEQ ID NO: 90407
  peptide (1)..(291): Ceres Seq. ID no. 12723777
  misc_feature (24)..(232): Pfam Name: NAD dependent epimerase/dehydratase family Pfam Description: NAD dependent epimerase/dehydratase family
  misc_feature (5)..(291): Homolog of NCBI NO: 15217530 NR Description: putative cinnamyl alcohol dehydrogenase; protein At1g09500.1, supported by cDNA: gi_15983385, supported by cDNA: [Arabidopsis thaliana] >gi|25284020|pir||E86228 hypothetical
  misc_feature (1)..(291): Homolog of NCBI NO: 30681183 NR Description: cinnamyl-alcohol dehydrogenase (CAD) family
  misc_feature (1)..(291): Homolog of NCBI NO: 16648726 NR Description: At1g09500/F14J9_16 [Arabidopsis thaliana]
  misc_feature (5)..(291): Homolog of NCBI NO: 15217531 NR Description: putative cinnamyl alcohol dehydrogenase; protein At1g09510.1 [Arabidopsis thaliana] >gi|25284021|pir||F86228
  misc_feature (5)..(291): Homolog of NCBI NO: 15217529 NR Description: putative cinnamyl alcohol dehydrogenase; protein At1g09490.1, supported by cDNA: 32366., supported by cDNA: [Arabidopsis thaliana] >gi|25284017|pir||D86228 hypothetical
  misc_feature (7)..(291): Homolog of NCBI NO: 15217528 NR Description: putative cinnamyl alcohol dehydrogenase; protein
  misc_feature (7)..(291): Homolog of NCBI NO: 25284016 NR Description: hypothetical protein [imported] - Arabidopsis >gi|3482923|gb|AAC33208.1| Highly similar to cinnamyl alcohol
  misc_feature (4)..(291): Homolog of NCBI NO: 30697406 NR Description: cinnamyl-alcohol dehydrogenase (CAD) family
  misc_feature (20)..(291): Homolog of NCBI NO: 12597772 NR Description: cinnamyl alcohol dehydrogenase, putative
  misc_feature (5)..(288): Homolog of NCBI NO: 15239741 NR Description: cinnamyl-alcohol dehydrogenase - like protein;

SEQ ID NO: 94164 - protein, 196 aa, Arabidopsis thaliana; identical to SEQ ID NO: 81331
  peptide (1)..(196): Ceres Seq. ID no. 12723778
  misc_feature (1)..(137): Pfam Name: NAD dependent epimerase/dehydratase family Pfam Description: NAD dependent epimerase/dehydratase family
  misc_feature (1)..(196): Homolog of NCBI NO: 15217530 NR Description: putative cinnamyl alcohol dehydrogenase; protein At1g09500.1, supported by cDNA: gi_15983385, supported by cDNA: [Arabidopsis thaliana] >gi|25284020|pir||E86228 hypothetical
  misc_feature (1)..(196): Homolog of NCBI NO: 30681183 NR Description: cinnamyl-alcohol dehydrogenase (CAD) family
  misc_feature (1)..(196): Homolog of NCBI NO: 16648726 NR Description: At1g09500/F14J9_16 [Arabidopsis thaliana]
  misc_feature (1)..(196): Homolog of NCBI NO: 15217531 NR Description: putative cinnamyl alcohol dehydrogenase; protein At1g09510.1 [Arabidopsis thaliana] >gi|25284021|pir||F86228
  misc_feature (1)..(196): Homolog of NCBI NO: 15217529 NR Description: putative cinnamyl alcohol dehydrogenase; protein At1g09490.1, supported by cDNA: 32366., supported by cDNA: [Arabidopsis thaliana] >gi|25284017|pir||D86228 hypothetical
  misc_feature (1)..(196): Homolog of NCBI NO: 15217528 NR Description: putative cinnamyl alcohol dehydrogenase; protein
  misc_feature (1)..(196): Homolog of NCBI NO: 25284016 NR Description: hypothetical protein [imported] - Arabidopsis >gi|3482923|gb|AAC33208.1| Highly similar to cinnamyl alcohol
  misc_feature (1)..(196): Homolog of NCBI NO: 30697406 NR Description: cinnamyl-alcohol dehydrogenase (CAD) family
  misc_feature (1)..(196): Homolog of NCBI NO: 12597772 NR Description: cinnamyl alcohol dehydrogenase, putative
  misc_feature (1)..(193): Homolog of NCBI NO: 15239741 NR Description: cinnamyl-alcohol dehydrogenase - like protein;

SEQ ID NO: 94165 - DNA, 1410 bp, Arabidopsis thaliana; identical to SEQ ID NO: 90409
  misc_feature (1)..(1410): Ceres Seq. ID no. 12723783
  misc_feature: MA Experiment ID: 108435 Result: Down-regulated in Transcription
  misc_feature: MA Experiment 108435 PARAMETER Experiment Name: At_stm_Mutants_cDNA_P Parameter: Plant Line Value: wt Landsburg vs stm
  misc_feature: MA Experiment 108435 PARAMETER Experiment Name: At_stm_Mutants_cDNA_P Parameter: Tissue Value: Shoot Apical Meristem Region
  misc_feature: MA Experiment ID: 108461 Result: Up-regulated in Transcription
  misc_feature: MA Experiment 108461 PARAMETER Experiment Name: At_Germinating_Seeds_cDNA_P Parameter: Age (day) Value: 1 vs. 0
  misc_feature: MA Experiment 108461 PARAMETER Experiment Name: At_Germinating_Seeds_cDNA_P Parameter: Tissue Value: Germinating Seeds
  misc_feature: MA Experiment ID: 108462 Result: Up-regulated in Transcription
  misc_feature: MA Experiment 108462 PARAMETER Experiment Name: At_Germinating_Seeds_cDNA_P Parameter: Age (day) Value: 2 vs. 0
  misc_feature: MA Experiment 108462 PARAMETER Experiment Name: At_Germinating_Seeds_cDNA_P Parameter: Tissue Value: Germinating Seeds
  misc_feature: MA Experiment ID: 108463 Result: Up-regulated in Transcription
  misc_feature: MA Experiment 108463 PARAMETER Experiment Name: At_Germinating_Seeds_cDNA_P Parameter: Age (day) Value: 3 vs. 0
  misc_feature: MA Experiment 108463 PARAMETER Experiment Name: At_Germinating_Seeds_cDNA_P Parameter: Tissue Value: Germinating Seeds
  misc_feature: MA Experiment ID: 108464 Result: Up-regulated in Transcription
  misc_feature: MA Experiment 108464 PARAMETER Experiment Name: At_Germinating_Seeds_cDNA_P Parameter: Age (day) Value: 4 vs. 0
  misc_feature: MA Experiment 108464 PARAMETER Experiment Name: At_Germinating_Seeds_cDNA_P Parameter: Tissue Value: Germinating Seeds
  misc_feature: MA Experiment ID: 108488 Result: Up-regulated in Transcription
  misc_feature: MA Experiment ID: 108577 Result: Up-regulated in Transcription
  misc_feature: MA Experiment 108577 PARAMETER Experiment Name: At_42deg_Heat_cDNA_P Parameter: Temperature (deg C) Value: 42 vs. 22
  misc_feature: MA Experiment 108577 PARAMETER Experiment Name: At_42deg_Heat_cDNA_P Parameter: Timepoint (hr) Value: 6
  misc_feature: MA Experiment 108577 PARAMETER Experiment Name: At_42deg_Heat_cDNA_P Parameter: Tissue Value: Aerial
  misc_feature: MA Experiment ID: 108595 Result: Down-regulated in Transcription
  misc_feature: MA Experiment 108595 PARAMETER Experiment Name: At_Ler-pi_Ovule_cDNA_P Parameter: Plant Line Value: null
  misc_feature: MA Experiment ID: 20000069 Result: Down-regulated in Transcription
  misc_feature: MA Experiment 20000069 PARAMETER Experiment Name: At_100uM_ABA_Mutants_cDNA_P Parameter: Plant Line Value: CS23
  misc_feature: MA Experiment 20000069 PARAMETER Experiment Name: At_100uM_ABA_Mutants_cDNA_P Parameter: Timepoint (hr) Value: 6
  misc_feature: MA Experiment 20000069 PARAMETER Experiment Name: At_100uM_ABA_Mutants_cDNA_P Parameter: Tissue Value: Aerial
  misc_feature: MA Experiment 20000069 PARAMETER Experiment Name: At_100uM_ABA_Mutants_cDNA_P Parameter: Treatment Value: 100uM ABA vs. No Treatment
  misc_feature: MA Experiment ID: 20000070 Result: Down-regulated in Transcription
  misc_feature: MA Experiment 20000070 PARAMETER Experiment Name: At_100uM_ABA_Mutants_cDNA_P Parameter: Plant Line Value: CS24
  misc_feature: MA Experiment 20000070 PARAMETER Experiment Name: At_100uM_ABA_Mutants_cDNA_P Parameter: Timepoint (hr) Value: 6
  misc_feature: MA Experiment 20000070 PARAMETER Experiment Name: At_100uM_ABA_Mutants_cDNA_P Parameter: Tissue Value: Aerial
  misc_feature: MA Experiment 20000070 PARAMETER Experiment Name: At_100uM_ABA_Mutants_cDNA_P Parameter: Treatment Value: 100uM ABA vs. No Treatment
  misc_feature: MA Experiment ID: 20000071 Result: Down-regulated in Transcription
  misc_feature: MA Experiment 20000071 PARAMETER Experiment Name: At_100uM_ABA_Mutants_cDNA_P Parameter: Plant Line Value: CS8104
  misc_feature: MA Experiment 20000071 PARAMETER Experiment Name: At_100uM_ABA_Mutants_cDNA_P Parameter: Timepoint (hr) Value: 6
  misc_feature: MA Experiment 20000071 PARAMETER Experiment Name: At_100uM_ABA_Mutants_cDNA_P Parameter: Tissue Value: Aerial
  misc_feature: MA Experiment 20000071 PARAMETER Experiment Name: At_100uM_ABA_Mutants_cDNA_P Parameter: Treatment Value: 100uM ABA vs. No Treatment
  misc_feature: MA Experiment ID: 20000072 Result: Down-regulated in Transcription
  misc_feature: MA Experiment 20000072 PARAMETER Experiment Name: At_100uM_ABA_Mutants_cDNA_P Parameter: Plant Line Value: CS8105
  misc_feature: MA Experiment 20000072 PARAMETER Experiment Name: At_100uM_ABA_Mutants_cDNA_P Parameter: Timepoint (hr) Value: 6
  misc_feature: MA Experiment 20000072 PARAMETER Experiment Name: At_100uM_ABA_Mutants_cDNA_P Parameter: Tissue Value: Aerial
  misc_feature: MA Experiment 20000072 PARAMETER Experiment Name: At_100uM_ABA_Mutants_cDNA_P Parameter: Treatment Value: 100uM ABA vs. No Treatment
  misc_feature: MA Experiment ID: 20000086 Result: Down-regulated in Transcription
  misc_feature: MA Experiment 20000086 PARAMETER Experiment Name: At_100uM_ABA_Mutants_cDNA_P Parameter: Plant Line Value: CS22
  misc_feature: MA Experiment 20000086 PARAMETER Experiment Name: At_100uM_ABA_Mutants_cDNA_P Parameter: Timepoint (hr) Value: 6
  misc_feature: MA Experiment 20000086 PARAMETER Experiment Name: At_100uM_ABA_Mutants_cDNA_P Parameter: Tissue Value: Aerial
  misc_feature: MA Experiment 20000086 PARAMETER Experiment Name: At_100uM_ABA_Mutants_cDNA_P Parameter: Treatment Value: 100uM ABA vs. No Treatment
  misc_feature: MA Experiment ID: 20000087 Result: Down-regulated in Transcription
  misc_feature: MA Experiment 20000087 PARAMETER Experiment Name: At_100uM_ABA_Mutants_cDNA_P Parameter: Plant Line Value: WS
  misc_feature: MA Experiment 20000087 PARAMETER Experiment Name: At_100uM_ABA_Mutants_cDNA_P Parameter: Timepoint (hr) Value: 6
  misc_feature: MA Experiment 20000087 PARAMETER Experiment Name: At_100uM_ABA_Mutants_cDNA_P Parameter: Tissue Value: Aerial
  misc_feature: MA Experiment 20000087 PARAMETER Experiment Name: At_100uM_ABA_Mutants_cDNA_P Parameter: Treatment Value: 100uM ABA vs. No Treatment
  misc_feature: MA Experiment ID: 20000088 Result: Down-regulated in Transcription
  misc_feature: MA Experiment 20000088 PARAMETER Experiment Name: At_100uM_ABA_Mutants_cDNA_P Parameter: Plant Line Value: Landsberg
  misc_feature: MA Experiment 20000088 PARAMETER Experiment Name: At_100uM_ABA_Mutants_cDNA_P Parameter: Timepoint (hr) Value: 6
  misc_feature: MA Experiment 20000088 PARAMETER Experiment Name: At_100uM_ABA_Mutants_cDNA_P Parameter: Tissue Value: Aerial
  misc_feature: MA Experiment 20000088 PARAMETER Experiment Name: At_100uM_ABA_Mutants_cDNA_P Parameter: Treatment Value: 100uM ABA vs. No Treatment
  misc_feature: MA Experiment ID: 20000089 Result: Down-regulated in Transcription
  misc_feature: MA Experiment ID: 20000090 Result: Down-regulated in Transcription
  misc_feature: MA Experiment ID: 20000117 Result: Down-regulated in Transcription
  misc_feature: MA Experiment 20000117 PARAMETER Experiment Name: At_100uM_ABA_Mutants_cDNA_P Parameter: Plant Line Value: Columbia
  misc_feature: MA Experiment 20000117 PARAMETER Experiment Name: At_100uM_ABA_Mutants_cDNA_P Parameter: Timepoint (hr) Value: 6
  misc_feature: MA Experiment 20000117 PARAMETER Experiment Name: At_100uM_ABA_Mutants_cDNA_P Parameter: Tissue Value: Aerial
  misc_feature: MA Experiment 20000117 PARAMETER Experiment Name: At_100uM_ABA_Mutants_cDNA_P Parameter: Treatment Value: 100uM ABA vs. No Treatment
  misc_feature: MA Experiment ID: 20000173 Result: Up-regulated in Transcription
  misc_feature: MA Experiment 20000173 PARAMETER Experiment Name: At_42deg_Heat_P Parameter: Age (day) Value: 14
  misc_feature: MA Experiment 20000173 PARAMETER Experiment Name: At_42deg_Heat_P Parameter: Organism Value: A. thaliana
  misc_feature: MA Experiment 20000173 PARAMETER Experiment Name: At_42deg_Heat_P Parameter: Plant Line Value: WS
  misc_feature: MA Experiment 20000173 PARAMETER Experiment Name: At_42deg_Heat_P Parameter: Temperature (deg C) Value: 42 vs. 22
  misc_feature: MA Experiment 20000173 PARAMETER Experiment Name: At_42deg_Heat_P Parameter: Timepoint (hr) Value: 6
  misc_feature: MA Experiment 20000173 PARAMETER Experiment Name: At_42deg_Heat_P Parameter: Tissue Value: Aerial
  misc_feature: MA Experiment ID: 20000179 Result: Up-regulated in Transcription
  misc_feature: MA Experiment 20000179 PARAMETER Experiment Name: At_Germinating_Seeds_P Parameter: Age (hr) Value: 6 vs. 0
  misc_feature: MA Experiment 20000179 PARAMETER Experiment Name: At_Germinating_Seeds_P Parameter: Tissue Value: Germinating Seeds
  misc_feature: MA Experiment ID: 20000180 Result: Up-regulated in Transcription
  misc_feature: MA Experiment 20000180 PARAMETER Experiment Name: At_Germinating_Seeds_P Parameter: Age (hr) Value: 24 vs. 0
  misc_feature: MA Experiment 20000180 PARAMETER Experiment Name: At_Germinating_Seeds_P Parameter: Tissue Value: Germinating Seeds
  misc_feature: MA Experiment ID: 20000184 Result: Up-regulated in Transcription
  misc_feature: MA Experiment 20000184 PARAMETER Experiment Name: At_Shoots__P Parameter: Age (day) Value: 7
  misc_feature: MA Experiment 20000184 PARAMETER Experiment Name: At_Shoots__P Parameter: Tissue Value: Shoots vs. Whole Plant
  misc_feature: MA Experiment ID: 20000185 Result: Down-regulated in Transcription
  misc_feature: MA Experiment 20000185 PARAMETER Experiment Name: At_Roots__P Parameter: Age (day) Value: 7 vs. 21
  misc_feature: MA Experiment 20000185 PARAMETER Experiment Name: At_Roots__P Parameter: Organism Value: A. thaliana
  misc_feature: MA Experiment 20000185 PARAMETER Experiment Name: At_Roots__P Parameter: Tissue Value: Roots vs. Whole Plant
  misc_feature: MA Experiment ID: 20000214 Result: Up-regulated in Transcription
  misc_feature: MA Experiment 20000214 PARAMETER Experiment Name: At_4deg_Cold_P Parameter: Timepoint (hr) Value: 6
  misc_feature: MA Experiment ID: 20000437 Result: Down-regulated in Transcription
  misc_feature: MA Experiment 20000437 PARAMETER Experiment Name: At_Drought_P Parameter: Age (day) Value: 8
  misc_feature: MA Experiment 20000437 PARAMETER Experiment Name: At_Drought_P Parameter: Organism Value: A. thaliana
  misc_feature: MA Experiment 20000437 PARAMETER Experiment Name: At_Drought_P Parameter: Plant Line Value: WS
  misc_feature: MA Experiment 20000437 PARAMETER Experiment Name: At_Drought_P Parameter: Timepoint (hr) Value: 24
  misc_feature: MA Experiment 20000437 PARAMETER Experiment Name: At_Drought_P Parameter: Tissue Value: Whole Plant
  misc_feature: MA Experiment 20000437 PARAMETER Experiment Name: At_Drought_P Parameter: Treatment Value: Drought vs. No Drought
  misc_feature: MA Experiment ID: 20000438 Result: Up-regulated in Transcription
  misc_feature: MA Experiment 20000438 PARAMETER Experiment Name: At_Shoots__P Parameter: Age (day) Value: 14
  misc_feature: MA Experiment 20000438 PARAMETER Experiment Name: At_Shoots__P Parameter: Tissue Value: Shoots vs. Whole Plant
  misc_feature: MA Experiment ID: 20000439 Result: Down-regulated in Transcription
  misc_feature: MA Experiment 20000439 PARAMETER Experiment Name: At_Roots__P Parameter: Age (day) Value: 14 vs. 21
  misc_feature: MA Experiment 20000439 PARAMETER Experiment Name: At_Roots__P Parameter: Organism Value: A. thaliana
  misc_feature: MA Experiment 20000439 PARAMETER Experiment Name: At_Roots__P Parameter: Tissue Value: Roots vs. Whole Plant
  misc_feature: MA Experiment ID: 20000794 Result: Down-regulated in Transcription
  misc_feature: MA Experiment 20000794 PARAMETER Experiment Name: At_Petals_P Parameter: Age (day) Value: 23-25 days
  misc_feature: MA Experiment 20000794 PARAMETER Experiment Name: At_Petals_P Parameter: Plant Line Value: WS
  misc_feature: MA Experiment 20000794 PARAMETER Experiment Name: At_Petals_P Parameter: Tissue Value: Petals vs. Whole plant
  misc_feature: MA Experiment ID: 20001247 Result: Up-regulated in Transcription
  misc_feature: MA Experiment 20001247 PARAMETER Experiment Name: At_Far-red-induction_P Parameter: Age (day) Value: 7
  misc_feature: MA Experiment 20001247 PARAMETER Experiment Name: At_Far-red-induction_P Parameter: Light Value: Far-red vs. White
  misc_feature: MA Experiment 20001247 PARAMETER Experiment Name: At_Far-red-induction_P Parameter: Organism Value: A. thaliana
  misc_feature: MA Experiment 20001247 PARAMETER Experiment Name: At_Far-red-induction_P Parameter: Plant Line Value: Columbia
  misc_feature: MA Experiment 20001247 PARAMETER Experiment Name: At_Far-red-induction_P Parameter: Timepoint (hr) Value: 1
  misc_feature: MA Experiment 20001247 PARAMETER Experiment Name: At_Far-red-induction_P Parameter: Tissue Value: Whole Plant
  misc_feature: MA Experiment ID: 20001248 Result: Down-regulated in Transcription
  misc_feature: MA Experiment 20001248 PARAMETER Experiment Name: At_Far-red-induction_P Parameter: Age (day) Value: 7
  misc_feature: MA Experiment 20001248 PARAMETER Experiment Name: At_Far-red-induction_P Parameter: Light Value: Far-red vs. White
  misc_feature: MA Experiment 20001248 PARAMETER Experiment Name: At_Far-red-induction_P Parameter: Organism Value: A. thaliana
  misc_feature: MA Experiment 20001248 PARAMETER Experiment Name: At_Far-red-induction_P Parameter: Plant Line Value: Columbia
  misc_feature: MA Experiment 20001248 PARAMETER Experiment Name: At_Far-red-induction_P Parameter: Timepoint (hr) Value: 4
  misc_feature: MA Experiment 20001248 PARAMETER Experiment Name: At_Far-red-induction_P Parameter: Tissue Value: Whole Plant
  misc_feature: MA Experiment ID: 20001450 Result: Down-regulated in Transcription
  misc_feature: MA Experiment 20001450 PARAMETER Experiment Name: At_Far-red-induction_P Parameter: Age (day) Value: 7
  misc_feature: MA Experiment 20001450 PARAMETER Experiment Name: At_Far-red-induction_P Parameter: Light Value: Far-red vs. White
  misc_feature: MA Experiment 20001450 PARAMETER Experiment Name: At_Far-red-induction_P Parameter: Organism Value: A. thaliana
  misc_feature: MA Experiment 20001450 PARAMETER Experiment Name: At_Far-red-induction_P Parameter: Plant Line Value: Columbia
  misc_feature: MA Experiment 20001450 PARAMETER Experiment Name: At_Far-red-induction_P Parameter: Timepoint (hr) Value: 8
  misc_feature: MA Experiment 20001450 PARAMETER Experiment Name: At_Far-red-induction_P Parameter: Tissue Value: Whole Plant
  misc_feature: MA Experiment ID: 20001555 Result: Down-regulated in Transcription
  misc_feature: MA Experiment 20001555 PARAMETER Experiment Name: At_Drought_Soil_Dry_P Parameter: Age (day) Value: 24
  misc_feature: MA Experiment 20001555 PARAMETER Experiment Name: At_Drought_Soil_Dry_P Parameter: Organism Value: A. thaliana
  misc_feature: MA Experiment 20001555 PARAMETER Experiment Name: At_Drought_Soil_Dry_P Parameter: Plant Line Value: WS
  misc_feature: MA Experiment 20001555 PARAMETER Experiment Name: At_Drought_Soil_Dry_P Parameter: Post Timepoint (hr) Value: None
  misc_feature: MA Experiment 20001555 PARAMETER Experiment Name: At_Drought_Soil_Dry_P Parameter: Post-Treatment Value: None
  misc_feature: MA Experiment 20001555 PARAMETER Experiment Name: At_Drought_Soil_Dry_P Parameter: Timepoint (day) Value: 10
  misc_feature: MA Experiment 20001555 PARAMETER Experiment Name: At_Drought_Soil_Dry_P Parameter: Treatment Value: Drought vs. No Drought
  misc_feature: MA Experiment ID: 20001559 Result: Down-regulated in Transcription
  misc_feature: MA Experiment 20001559 PARAMETER Experiment Name: At_Drought_Soil_Dry_P Parameter: Age (day) Value: 28
  misc_feature: MA Experiment 20001559 PARAMETER Experiment Name: At_Drought_Soil_Dry_P Parameter: Organism Value: A. thaliana
  misc_feature: MA Experiment 20001559 PARAMETER Experiment Name: At_Drought_Soil_Dry_P Parameter: Plant Line Value: WS
  misc_feature: MA Experiment 20001559 PARAMETER Experiment Name: At_Drought_Soil_Dry_P Parameter: Post Timepoint (hr) Value: 29
  misc_feature: MA Experiment 20001559 PARAMETER Experiment Name: At_Drought_Soil_Dry_P Parameter: Post-Treatment Value: Re-Water vs. No Drought
  misc_feature: MA Experiment 20001559 PARAMETER Experiment Name: At_Drought_Soil_Dry_P Parameter: Timepoint (day) Value: 14
  misc_feature: MA Experiment 20001559 PARAMETER Experiment Name: At_Drought_Soil_Dry_P Parameter: Treatment Value: Drought vs. No Drought
  misc_feature: MA Experiment ID: 20001757 Result: Up-regulated in Transcription
  misc_feature: MA Experiment 20001757 PARAMETER Experiment Name: At_50mM_NH4NO3_L-to-H_P Parameter: Timepoint (hr) Value: 6
  misc_feature: MA Experiment 20001757 PARAMETER Experiment Name: At_50mM_NH4NO3_L-to-H_P Parameter: Tissue Value: Leaf
  misc_feature: MA Experiment 20001757 PARAMETER Experiment Name: At_50mM_NH4NO3_L-to-H_P Parameter: Treatment Value: 50mM NH4NO3 vs 100mM Mannitol
  misc_feature: MA Experiment ID: 20001904 Result: Down-regulated in Transcription
  misc_feature: MA Experiment 20001904 PARAMETER Experiment Name: At_Drought_Reproduction_P Parameter: Age (day) Value: 37
  misc_feature: MA Experiment 20001904 PARAMETER Experiment Name: At_Drought_Reproduction_P Parameter: Organism Value: A. thaliana
  misc_feature: MA Experiment 20001904 PARAMETER Experiment Name: At_Drought_Reproduction_P Parameter: Plant Line Value: WS
  misc_feature: MA Experiment 20001904 PARAMETER Experiment Name: At_Drought_Reproduction_P Parameter: Timepoint (day) Value: 7
  misc_feature: MA Experiment 20001904 PARAMETER Experiment Name: At_Drought_Reproduction_P Parameter: Tissue Value: Rosettes
  misc_feature: MA Experiment 20001904 PARAMETER Experiment Name: At_Drought_Reproduction_P Parameter: Treatment Value: Drought vs. No Drought
  misc_feature: MA Experiment ID: 20001906 Result: Down-regulated in Transcription
  misc_feature: MA Experiment 20001906 PARAMETER Experiment Name: At_Drought_Reproduction_P Parameter: Age (day) Value: 35
  misc_feature: MA Experiment 20001906 PARAMETER Experiment Name: At_Drought_Reproduction_P Parameter: Organism Value: A. thaliana
  misc_feature: MA Experiment 20001906 PARAMETER Experiment Name: At_Drought_Reproduction_P Parameter: Plant Line Value: WS
  misc_feature: MA Experiment 20001906 PARAMETER Experiment Name: At_Drought_Reproduction_P Parameter: Timepoint (day) Value: 5
  misc_feature: MA Experiment 20001906 PARAMETER Experiment Name: At_Drought_Reproduction_P Parameter: Tissue Value: Siliques
  misc_feature: MA Experiment 20001906 PARAMETER Experiment Name: At_Drought_Reproduction_P Parameter: Treatment Value: Drought vs. No Drought
  misc_feature: MA Experiment ID: 20001911 Result: Down-regulated in Transcription
  misc_feature: MA Experiment 20001911 PARAMETER Experiment Name: At_Drought_Reproduction_P Parameter: Age (day) Value: 40
  misc_feature: MA Experiment 20001911 PARAMETER Experiment Name: At_Drought_Reproduction_P Parameter: Organism Value: A. thaliana
  misc_feature: MA Experiment 20001911 PARAMETER Experiment Name: At_Drought_Reproduction_P Parameter: Plant Line Value: WS
  misc_feature: MA Experiment 20001911 PARAMETER Experiment Name: At_Drought_Reproduction_P Parameter: Timepoint (day) Value: 10
  misc_feature: MA Experiment 20001911 PARAMETER Experiment Name: At_Drought_Reproduction_P Parameter: Tissue Value: Flowers
  misc_feature: MA Experiment 20001911 PARAMETER Experiment Name: At_Drought_Reproduction_P Parameter: Treatment Value: Drought vs. No Drought

SEQ ID NO: 94166 - protein, 402 aa, Arabidopsis thaliana; identical to SEQ ID NO: 90410
  peptide (1)..(402): Ceres Seq. ID no. 12723784
  misc_feature (80)..(372): Pfam Name: NAD dependent epimerase/dehydratase family Pfam Description: NAD dependent epimerase/dehydratase family
  misc_feature (25)..(402): Homolog of NCBI NO: 15217485 NR Description: putative RNA-binding protein; protein id: supported by cDNA: 37028., supported by cDNA: gi_13358232, by cDNA: gi_14334753, supported by cDNA: gi_16226246, supported
  misc_feature (25)..(402): Homolog of NCBI NO: 17064988 NR Description: g5bf protein [Arabidopsis thaliana]
  misc_feature (25)..(402): Homolog of NCBI NO: 21593201 NR Description: putative RNA-binding protein [Arabidopsis
  misc_feature (25)..(402): Homolog of NCBI NO: 25454619 NR Description: hypothetical protein g5bf [imported] -
  misc_feature (29)..(402): Homolog of NCBI NO: 25456171 NR Description: probable RNA binding protein [imported] - thaliana >gi|3850621|emb|CAA75602.1| putative RNA binding protein
  misc_feature (71)..(398): Homolog of NCBI NO: 34398360 NR Description: 38 kDa ribosome-associated protein precursor
  misc_feature (79)..(395): Homolog of NCBI NO: 17232323 NR Description: mRNA-binding protein [Nostoc sp. PCC 7120]
  misc_feature (79)..(395): Homolog of NCBI NO: 23040971 NR Description: hypothetical protein [Trichodesmium erythraeum
  misc_feature (79)..(395): Homolog of NCBI NO: 23128166 NR Description: hypothetical protein [Nostoc punctiforme]
  misc_feature (79)..(396): Homolog of NCBI NO: 16330056 NR Description: hypothetical protein [Synechocystis sp. PCC 6803]

SEQ ID NO: 94167 - protein, 378 aa, Arabidopsis thaliana; identical to SEQ ID NO: 23756
  peptide (1)..(378): Ceres Seq. ID no. 12723785
  misc_feature (56)..(348): Pfam Name: NAD dependent epimerase/dehydratase family Pfam Description: NAD dependent epimerase/dehydratase family
  misc_feature (1)..(378): Homolog of NCBI NO: 15217485 NR Description: putative RNA-binding protein; protein id: supported by cDNA: 37028., supported by cDNA: gi_13358232, by cDNA: gi_14334753, supported by cDNA: gi_16226246, supported
  misc_feature (1)..(378): Homolog of NCBI NO: 17064988 NR Description: g5bf protein [Arabidopsis thaliana]
  misc_feature (1)..(378): Homolog of NCBI NO: 21593201 NR Description: putative RNA-binding protein [Arabidopsis
  misc_feature (1)..(378): Homolog of NCBI NO: 25454619 NR Description: hypothetical protein g5bf [imported] -
  misc_feature (5)..(378): Homolog of NCBI NO: 25456171 NR Description: probable RNA binding protein [imported] - thaliana >gi|3850621|emb|CAA75602.1| putative RNA binding protein
  misc_feature (47)..(374): Homolog of NCBI NO: 34398360 NR Description: 38 kDa ribosome-associated protein precursor
  misc_feature (55)..(371): Homolog of NCBI NO: 17232323 NR Description: mRNA-binding protein [Nostoc sp. PCC 7120]
  misc_feature (55)..(371): Homolog of NCBI NO: 23040971 NR Description: hypothetical protein [Trichodesmium erythraeum
  misc_feature (55)..(371): Homolog of NCBI NO: 23128166 NR Description: hypothetical protein [Nostoc punctiforme]
  misc_feature (55)..(372): Homolog of NCBI NO: 16330056 NR Description: hypothetical protein [Synechocystis sp. PCC 6803]

SEQ ID NO: 94168 - protein, 375 aa, Arabidopsis thaliana; identical to SEQ ID NO: 23757
  peptide (1)..(375): Ceres Seq. ID no. 12723786
  misc_feature (53)..(345): Pfam Name: NAD dependent epimerase/dehydratase family Pfam Description: NAD dependent epimerase/dehydratase family
  misc_feature (1)..(375): Homolog of NCBI NO: 15217485 NR Description: putative RNA-binding protein; protein id: supported by cDNA: 37028., supported by cDNA: gi_13358232, by cDNA: gi_14334753, supported by cDNA: gi_16226246, supported
  misc_feature (1)..(375): Homolog of NCBI NO: 17064988 NR Description: g5bf protein [Arabidopsis thaliana]
  misc_feature (1)..(375): Homolog of NCBI NO: 21593201 NR Description: putative RNA-binding protein [Arabidopsis
  misc_feature (1)..(375): Homolog of NCBI NO: 25454619 NR Description: hypothetical protein g5bf [imported] -
  misc_feature (2)..(375): Homolog of NCBI NO: 25456171 NR Description: probable RNA binding protein [imported] - thaliana >gi|3850621|emb|CAA75602.1| putative RNA binding protein
  misc_feature (44)..(371): Homolog of NCBI NO: 34398360 NR Description: 38 kDa ribosome-associated protein precursor
  misc_feature (52)..(368): Homolog of NCBI NO: 17232323 NR Description: mRNA-binding protein [Nostoc sp. PCC 7120]
  misc_feature (52)..(368): Homolog of NCBI NO: 23040971 NR Description: hypothetical protein [Trichodesmium erythraeum
  misc_feature (52)..(368): Homolog of NCBI NO: 23128166 NR Description: hypothetical protein [Nostoc punctiforme]
  misc_feature (52)..(369): Homolog of NCBI NO: 16330056 NR Description: hypothetical protein [Synechocystis sp. PCC 6803]

SEQ ID NO: 94169 - DNA, 1229 bp, Arabidopsis thaliana; identical to SEQ ID NO: 90413
  misc_feature (1)..(1229): Ceres Seq. ID no. 12723798
  misc_feature: MA Experiment ID: 20000171 Result: Up-regulated in Transcription
  misc_feature: MA Experiment 20000171 PARAMETER Experiment Name: At_42deg_Heat_P Parameter: Age (day) Value: 14
  misc_feature: MA Experiment 20000171 PARAMETER Experiment Name: At_42deg_Heat_P Parameter: Organism Value: A. thaliana
  misc_feature: MA Experiment 20000171 PARAMETER Experiment Name: At_42deg_Heat_P Parameter: Plant Line Value: WS
  misc_feature: MA Experiment 20000171 PARAMETER Experiment Name: At_42deg_Heat_P Parameter: Temperature (deg C) Value: 42 vs. 22
  misc_feature: MA Experiment 20000171 PARAMETER Experiment Name: At_42deg_Heat_P Parameter: Timepoint (hr) Value: 1
  misc_feature: MA Experiment 20000171 PARAMETER Experiment Name: At_42deg_Heat_P Parameter: Tissue Value: Aerial
  misc_feature: MA Experiment ID: 20000173 Result: Up-regulated in Transcription
  misc_feature: MA Experiment 20000173 PARAMETER Experiment Name: At_42deg_Heat_P Parameter: Age (day) Value: 14
  misc_feature: MA Experiment 20000173 PARAMETER Experiment Name: At_42deg_Heat_P Parameter: Organism Value: A. thaliana
  misc_feature: MA Experiment 20000173 PARAMETER Experiment Name: At_42deg_Heat_P Parameter: Plant Line Value: WS
  misc_feature: MA Experiment 20000173 PARAMETER Experiment Name: At_42deg_Heat_P Parameter: Temperature (deg C) Value: 42 vs. 22
  misc_feature: MA Experiment 20000173 PARAMETER Experiment Name: At_42deg_Heat_P Parameter: Timepoint (hr) Value: 6
  misc_feature: MA Experiment 20000173 PARAMETER Experiment Name: At_42deg_Heat_P Parameter: Tissue Value: Aerial
  misc_feature: MA Experiment ID: 20000185 Result: Up-regulated in Transcription
  misc_feature: MA Experiment 20000185 PARAMETER Experiment Name: At_Roots__P Parameter: Age (day) Value: 7 vs. 21
  misc_feature: MA Experiment 20000185 PARAMETER Experiment Name: At_Roots__P Parameter: Organism Value: A. thaliana
  misc_feature: MA Experiment 20000185 PARAMETER Experiment Name: At_Roots__P Parameter: Tissue Value: Roots vs. Whole Plant
  misc_feature: MA Experiment ID: 20000265 Result: Up-regulated in Transcription
  misc_feature: MA Experiment 20000265 PARAMETER Experiment Name: At_Open_Flower_P Parameter: Age (day) Value: 21
  misc_feature: MA Experiment 20000265 PARAMETER Experiment Name: At_Open_Flower_P Parameter: Plant Line Value: WS
  misc_feature: MA Experiment 20000265 PARAMETER Experiment Name: At_Open_Flower_P Parameter: Tissue Value: Closed Flower vs. Whole Plant
  misc_feature: MA Experiment ID: 20000437 Result: Up-regulated in Transcription
  misc_feature: MA Experiment 20000437 PARAMETER Experiment Name: At_Drought_P Parameter: Age (day) Value: 8
  misc_feature: MA Experiment 20000437 PARAMETER Experiment Name: At_Drought_P Parameter: Organism Value: A. thaliana
  misc_feature: MA Experiment 20000437 PARAMETER Experiment Name: At_Drought_P Parameter: Plant Line Value: WS
  misc_feature: MA Experiment 20000437 PARAMETER Experiment Name: At_Drought_P Parameter: Timepoint (hr) Value: 24
  misc_feature: MA Experiment 20000437 PARAMETER Experiment Name: At_Drought_P Parameter: Tissue Value: Whole Plant
  misc_feature: MA Experiment 20000437 PARAMETER Experiment Name: At_Drought_P Parameter: Treatment Value: Drought vs. No Drought
  misc_feature: MA Experiment ID: 20000794 Result: Up-regulated in Transcription
  misc_feature: MA Experiment 20000794 PARAMETER Experiment Name: At_Petals_P Parameter: Age (day) Value: 23-25 days
  misc_feature: MA Experiment 20000794 PARAMETER Experiment Name: At_Petals_P Parameter: Plant Line Value: WS
  misc_feature: MA Experiment 20000794 PARAMETER Experiment Name: At_Petals_P Parameter: Tissue Value: Petals vs. Whole plant
  misc_feature: MA Experiment ID: 20001248 Result: Down-regulated in Transcription
  misc_feature: MA Experiment 20001248 PARAMETER Experiment Name: At_Far-red-induction_P Parameter: Age (day) Value: 7
  misc_feature: MA Experiment 20001248 PARAMETER Experiment Name: At_Far-red-induction_P Parameter: Light Value: Far-red vs. White
  misc_feature: MA Experiment 20001248 PARAMETER Experiment Name: At_Far-red-induction_P Parameter: Organism Value: A. thaliana
  misc_feature: MA Experiment 20001248 PARAMETER Experiment Name: At_Far-red-induction_P Parameter: Plant Line Value: Columbia
  misc_feature: MA Experiment 20001248 PARAMETER Experiment Name: At_Far-red-induction_P Parameter: Timepoint (hr) Value: 4
  misc_feature: MA Experiment 20001248 PARAMETER Experiment Name: At_Far-red-induction_P Parameter: Tissue Value: Whole Plant
  misc_feature: MA Experiment ID: 20001559 Result: Up-regulated in Transcription
  misc_feature: MA Experiment 20001559 PARAMETER Experiment Name: At_Drought_Soil_Dry_P Parameter: Age (day) Value: 28
  misc_feature: MA Experiment 20001559 PARAMETER Experiment Name: At_Drought_Soil_Dry_P Parameter: Organism Value: A. thaliana
  misc_feature: MA Experiment 20001559 PARAMETER Experiment Name: At_Drought_Soil_Dry_P Parameter: Plant Line Value: WS
  misc_feature: MA Experiment 20001559 PARAMETER Experiment Name: At_Drought_Soil_Dry_P Parameter: Post Timepoint (hr) Value: 29
  misc_feature: MA Experiment 20001559 PARAMETER Experiment Name: At_Drought_Soil_Dry_P Parameter: Post-Treatment Value: Re-Water vs. No Drought
  misc_feature: MA Experiment 20001559 PARAMETER Experiment Name: At_Drought_Soil_Dry_P Parameter: Timepoint (day) Value: 14
  misc_feature: MA Experiment 20001559 PARAMETER Experiment Name: At_Drought_Soil_Dry_P Parameter: Treatment Value: Drought vs. No Drought
  misc_feature: MA Experiment ID: 20001757 Result: Down-regulated in Transcription
  misc_feature: MA Experiment 20001757 PARAMETER Experiment Name: At_50mM_NH4NO3_L-to-H_P Parameter: Timepoint (hr) Value: 6
  misc_feature: MA Experiment 20001757 PARAMETER Experiment Name: At_50mM_NH4NO3_L-to-H_P Parameter: Tissue Value: Leaf
  misc_feature: MA Experiment 20001757 PARAMETER Experiment Name: At_50mM_NH4NO3_L-to-H_P Parameter: Treatment Value: 50mM NH4NO3 vs 100mM Mannitol
  misc_feature: MA Experiment ID: 20001905 Result: Up-regulated in Transcription
  misc_feature: MA Experiment 20001905 PARAMETER Experiment Name: At_Drought_Reproduction_P Parameter: Age (day) Value: 40
  misc_feature: MA Experiment 20001905 PARAMETER Experiment Name: At_Drought_Reproduction_P Parameter: Organism Value: A. thaliana
  misc_feature: MA Experiment 20001905 PARAMETER Experiment Name: At_Drought_Reproduction_P Parameter: Plant Line Value: WS
  misc_feature: MA Experiment 20001905 PARAMETER Experiment Name: At_Drought_Reproduction_P Parameter: Timepoint (day) Value: 10
  misc_feature: MA Experiment 20001905 PARAMETER Experiment Name: At_Drought_Reproduction_P Parameter: Tissue Value: Rosettes
  misc_feature: MA Experiment 20001905 PARAMETER Experiment Name: At_Drought_Reproduction_P Parameter: Treatment Value: Drought vs. No Drought
  misc_feature: MA Experiment ID: 20001911 Result: Up-regulated in Transcription
  misc_feature: MA Experiment 20001911 PARAMETER Experiment Name: At_Drought_Reproduction_P Parameter: Age (day) Value: 40
  misc_feature: MA Experiment 20001911 PARAMETER Experiment Name: At_Drought_Reproduction_P Parameter: Organism Value: A. thaliana
  misc_feature: MA Experiment 20001911 PARAMETER Experiment Name: At_Drought_Reproduction_P Parameter: Plant Line Value: WS
  misc_feature: MA Experiment 20001911 PARAMETER Experiment Name: At_Drought_Reproduction_P Parameter: Timepoint (day) Value: 10
  misc_feature: MA Experiment 20001911 PARAMETER Experiment Name: At_Drought_Reproduction_P Parameter: Tissue Value: Flowers
  misc_feature: MA Experiment 20001911 PARAMETER Experiment Name: At_Drought_Reproduction_P Parameter: Treatment Value: Drought vs. No Drought

SEQ ID NO: 94170 - protein, 268 aa, Arabidopsis thaliana; identical to SEQ ID NO: 35071
  peptide (1)..(268): Ceres Seq. ID no. 12723799
  misc_feature (9)..(77): Pfam Name: RNA recognition motif. (a.k.a. RRM, RBD, or RNP domain) Pfam Description: RNA recognition motif. (a.k.a. RRM, RBD, or RNP
  misc_feature (1)..(268): Homolog of NCBI NO: 4775270 NR Description: SF2/ASF-like splicing modulator Srp30 thaliana] >gi|23297699|gb|AAN13011.1| putative SF2/ASF splicing
  misc_feature (1)..(265): Homolog of NCBI NO: 22329428 NR Description: arginine/serine-rich splicing factor, atSRp30;
  misc_feature (1)..(248): Homolog of NCBI NO: 4775271 NR Description: SF2/ASF-like splicing modulator Srp30, variant 1
  misc_feature (1)..(218): Homolog of NCBI NO: 25386570 NR Description: hypothetical protein [imported] - Arabidopsis
  misc_feature (62)..(268): Homolog of NCBI NO: 21954085 NR Description: putative SF2/ASF splicing modulator Srp30 protein
  misc_feature (1)..(265): Homolog of NCBI NO: 30678391 NR Description: pre-mRNA splicing factor SF2 (SR1 protein)
  misc_feature (1)..(265): Homolog of NCBI NO: 5815235 NR Description: splicing factor SR1 [Arabidopsis thaliana]
  misc_feature (1)..(256): Homolog of NCBI NO: 2443473 NR Description: ASF/SF2 homolog [Arabidopsis thaliana]
  misc_feature (1)..(256): Homolog of NCBI NO: 30678395 NR Description: pre-mRNA splicing factor SF2 (SR1 protein)
  misc_feature (1)..(264): Homolog of NCBI NO: 33146854 NR Description: putative pre-mRNA splicing factor SF2 [Oryza

SEQ ID NO: 94171 - protein, 140 aa, Arabidopsis thaliana; identical to SEQ ID NO: 35072
  peptide (1)..(140): Ceres Seq. ID no. 12723800
  misc_feature (1)..(140): Homolog of NCBI NO: 4775270 NR Description: SF2/ASF-like splicing modulator Srp30 thaliana] >gi|23297699|gb|AAN13011.1| putative SF2/ASF splicing
  misc_feature (1)..(137): Homolog of NCBI NO: 22329428 NR Description: arginine/serine-rich splicing factor, atSRp30;
  misc_feature (1)..(120): Homolog of NCBI NO: 4775271 NR Description: SF2/ASF-like splicing modulator Srp30, variant 1
  misc_feature (1)..(90): Homolog of NCBI NO: 25386570 NR Description: hypothetical protein [imported] - Arabidopsis
  misc_feature (1)..(140): Homolog of NCBI NO: 21954085 NR Description: putative SF2/ASF splicing modulator Srp30 protein
  misc_feature (1)..(137): Homolog of NCBI NO: 30678391 NR Description: pre-mRNA splicing factor SF2 (SR1 protein)
  misc_feature (1)..(137): Homolog of NCBI NO: 5815235 NR Description: splicing factor SR1 [Arabidopsis thaliana]
  misc_feature (1)..(128): Homolog of NCBI NO: 2443473 NR Description: ASF/SF2 homolog [Arabidopsis thaliana]
  misc_feature (1)..(128): Homolog of NCBI NO: 30678395 NR Description: pre-mRNA splicing factor SF2 (SR1 protein)
  misc_feature (1)..(136): Homolog of NCBI NO: 33146854 NR Description: putative pre-mRNA splicing factor SF2 [Oryza

SEQ ID NO: 94172 - DNA, 842 bp, Arabidopsis thaliana; identical to SEQ ID NO: 90416
  misc_feature (1)..(842): Ceres Seq. ID no. 12723809
  misc_feature: MA Experiment ID: 108461 Result: Up-regulated in Transcription
  misc_feature: MA Experiment 108461 PARAMETER Experiment Name: At_Germinating_Seeds_cDNA_P Parameter: Age (day) Value: 1 vs. 0
  misc_feature: MA Experiment 108461 PARAMETER Experiment Name: At_Germinating_Seeds_cDNA_P Parameter: Tissue Value: Germinating Seeds
  misc_feature: MA Experiment ID: 108573 Result: Down-regulated in Transcription
  misc_feature: MA Experiment 108573 PARAMETER Experiment Name: At_Drought_cDNA_P Parameter: Timepoint (hr) Value: 6
  misc_feature: MA Experiment 108573 PARAMETER Experiment Name: At_Drought_cDNA_P Parameter: Tissue Value: Aerial
  misc_feature: MA Experiment 108573 PARAMETER Experiment Name: At_Drought_cDNA_P Parameter: Treatment Value: Drought vs. No Drought
  misc_feature: MA Experiment ID: 108577 Result: Down-regulated in Transcription
  misc_feature: MA Experiment 108577 PARAMETER Experiment Name: At_42deg_Heat_cDNA_P Parameter: Temperature (deg C) Value: 42 vs. 22
  misc_feature: MA Experiment 108577 PARAMETER Experiment Name: At_42deg_Heat_cDNA_P Parameter: Timepoint (hr) Value: 6
  misc_feature: MA Experiment 108577 PARAMETER Experiment Name: At_42deg_Heat_cDNA_P Parameter: Tissue Value: Aerial
  misc_feature: MA Experiment ID: 20000112 Result: Down-regulated in Transcription
  misc_feature: MA Experiment 20000112 PARAMETER Experiment Name: At_42deg_Heat_cDNA_P Parameter: Temperature (deg C) Value: 42 vs. 22
  misc_feature: MA Experiment 20000112 PARAMETER Experiment Name: At_42deg_Heat_cDNA_P Parameter: Timepoint (hr) Value: 2
  misc_feature: MA Experiment 20000112 PARAMETER Experiment Name: At_42deg_Heat_cDNA_P Parameter: Tissue Value: Aerial
  misc_feature: MA Experiment ID: 20000113 Result: Down-regulated in Transcription
  misc_feature: MA Experiment 20000113 PARAMETER Experiment Name: At_42deg_Heat_cDNA_P Parameter: Temperature (deg C) Value: 42 vs. 22
  misc_feature: MA Experiment 20000113 PARAMETER Experiment Name: At_42deg_Heat_cDNA_P Parameter: Timepoint (hr) Value: 8
  misc_feature: MA Experiment 20000113 PARAMETER Experiment Name: At_42deg_Heat_cDNA_P Parameter: Tissue Value: Aerial
  misc_feature: MA Experiment ID: 20000173 Result: Down-regulated in Transcription
  misc_feature: MA Experiment 20000173 PARAMETER Experiment Name: At_42deg_Heat_P Parameter: Age (day) Value: 14
  misc_feature: MA Experiment 20000173 PARAMETER Experiment Name: At_42deg_Heat_P Parameter: Organism Value: A. thaliana
  misc_feature: MA Experiment 20000173 PARAMETER Experiment Name: At_42deg_Heat_P Parameter: Plant Line Value: WS
  misc_feature: MA Experiment 20000173 PARAMETER Experiment Name: At_42deg_Heat_P Parameter: Temperature (deg C) Value: 42 vs. 22
  misc_feature: MA Experiment 20000173 PARAMETER Experiment Name: At_42deg_Heat_P Parameter: Timepoint (hr) Value: 6
  misc_feature: MA Experiment 20000173 PARAMETER Experiment Name: At_42deg_Heat_P Parameter: Tissue Value: Aerial
  misc_feature: MA Experiment ID: 20000179 Result: Up-regulated in Transcription
  misc_feature: MA Experiment 20000179 PARAMETER Experiment Name: At_Germinating_Seeds_P Parameter: Age (hr) Value: 6 vs. 0
  misc_feature: MA Experiment 20000179 PARAMETER Experiment Name: At_Germinating_Seeds_P Parameter: Tissue Value: Germinating Seeds
  misc_feature: MA Experiment ID: 20000180 Result: Up-regulated in Transcription
  misc_feature: MA Experiment 20000180 PARAMETER Experiment Name: At_Germinating_Seeds_P Parameter: Age (hr) Value: 24 vs. 0
  misc_feature: MA Experiment 20000180 PARAMETER Experiment Name: At_Germinating_Seeds_P Parameter: Tissue Value: Germinating Seeds
  misc_feature: MA Experiment ID: 20000437 Result: Down-regulated in Transcription
  misc_feature: MA Experiment 20000437 PARAMETER Experiment Name: At_Drought_P Parameter: Age (day) Value: 8
  misc_feature: MA Experiment 20000437 PARAMETER Experiment Name: At_Drought_P Parameter: Organism Value: A. thaliana
  misc_feature: MA Experiment 20000437 PARAMETER Experiment Name: At_Drought_P Parameter: Plant Line Value: WS
  misc_feature: MA Experiment 20000437 PARAMETER Experiment Name: At_Drought_P Parameter: Timepoint (hr) Value: 24
  misc_feature: MA Experiment 20000437 PARAMETER Experiment Name: At_Drought_P Parameter: Tissue Value: Whole Plant
  misc_feature: MA Experiment 20000437 PARAMETER Experiment Name: At_Drought_P Parameter: Treatment Value: Drought vs. No Drought
  misc_feature: MA Experiment ID: 20000794 Result: Down-regulated in Transcription
  misc_feature: MA Experiment 20000794 PARAMETER Experiment Name: At_Petals_P Parameter: Age (day) Value: 23-25 days
  misc_feature: MA Experiment 20000794 PARAMETER Experiment Name: At_Petals_P Parameter: Plant Line Value: WS
  misc_feature: MA Experiment 20000794 PARAMETER Experiment Name: At_Petals_P Parameter: Tissue Value: Petals vs. Whole plant
  misc_feature: MA Experiment ID: 20001911 Result: Down-regulated in Transcription
  misc_feature: MA Experiment 20001911 PARAMETER Experiment Name: At_Drought_Reproduction_P Parameter: Age (day) Value: 40
  misc_feature: MA Experiment 20001911 PARAMETER Experiment Name: At_Drought_Reproduction_P Parameter: Organism Value: A. thaliana
  misc_feature: MA Experiment 20001911 PARAMETER Experiment Name: At_Drought_Reproduction_P Parameter: Plant Line Value: WS
  misc_feature: MA Experiment 20001911 PARAMETER Experiment Name: At_Drought_Reproduction_P Parameter: Timepoint (day) Value: 10
  misc_feature: MA Experiment 20001911 PARAMETER Experiment Name: At_Drought_Reproduction_P Parameter: Tissue Value: Flowers
  misc_feature: MA Experiment 20001911 PARAMETER Experiment Name: At_Drought_Reproduction_P Parameter: Treatment Value: Drought vs. No Drought

SEQ ID NO: 94173 - protein, 232 aa, Arabidopsis thaliana; identical to SEQ ID NO: 90417
  peptide (1)..(232): Ceres Seq. ID no. 12723810
  misc_feature (29)..(190): Pfam Name: Ras family Pfam Description: Ras family
  misc_feature (16)..(232): Homolog of NCBI NO: 15217568 NR Description: GTP-binding protein, putative; protein id: supported by cDNA: 17081., supported by cDNA: gi_15010637,
  misc_feature (16)..(231): Homolog of NCBI NO: 3024501 NR Description: RAS-RELATED PROTEIN RAB11C
  misc_feature (16)..(231): Homolog of NCBI NO: 3024528 NR Description: RAS-RELATED PROTEIN RAB2BV
  misc_feature (16)..(231): Homolog of NCBI NO: 1405561 NR Description: FSGTP1 [Fagus sylvatica]
  misc_feature (16)..(231): Homolog of NCBI NO: 34897394 NR Description: Ras-related GTP-binding protein [Oryza sativa
  misc_feature (16)..(231): Homolog of NCBI NO: 15232652 NR Description: GTP-binding protein, putative; protein id: supported by cDNA: 35596., supported by cDNA: gi_20465470
  misc_feature (16)..(231): Homolog of NCBI NO: 15222396 NR Description: GTP-binding protein, putative; protein id:
  misc_feature (16)..(231): Homolog of NCBI NO: 3024506 NR Description: RAS-RELATED PROTEIN RAB11A
  misc_feature (16)..(231): Homolog of NCBI NO: 15237828 NR Description: Ras-related GTP-binding protein, putative; id: At5g59150.1, supported by cDNA: gi_13877728 [Arabidopsis
  misc_feature (73)..(231): Homolog of NCBI NO: 25294121 NR Description: protein F22G5.24 [imported] - Arabidopsis >gi|8778562|gb|AAF79570.1|AC022464_28 F22G5.24 [Arabidopsis

SEQ ID NO: 94174 - protein, 217 aa, Arabidopsis thaliana; identical to SEQ ID NO: 30179
  peptide (1)..(217): Ceres Seq. ID no. 12723811
  misc_feature (14)..(175): Pfam Name: Ras family Pfam Description: Ras family
  misc_feature (1)..(217): Homolog of NCBI NO: 15217568 NR Description: GTP-binding protein, putative; protein id: supported by cDNA: 17081., supported by cDNA: gi_15010637,
  misc_feature (1)..(216): Homolog of NCBI NO: 3024501 NR Description: RAS-RELATED PROTEIN RAB11C
  misc_feature (1)..(216): Homolog of NCBI NO: 3024528 NR Description: RAS-RELATED PROTEIN RAB2BV
  misc_feature (1)..(216): Homolog of NCBI NO: 1405561 NR Description: FSGTP1 [Fagus sylvatica]
  misc_feature (1)..(216): Homolog of NCBI NO: 34897394 NR Description: Ras-related GTP-binding protein [Oryza sativa
  misc_feature (1)..(216): Homolog of NCBI NO: 15232652 NR Description: GTP-binding protein, putative; protein id: supported by cDNA: 35596., supported by cDNA: gi_20465470
  misc_feature (1)..(216): Homolog of NCBI NO: 15222396 NR Description: GTP-binding protein, putative; protein id:
  misc_feature (1)..(216): Homolog of NCBI NO: 3024506 NR Description: RAS-RELATED PROTEIN RAB11A
  misc_feature (1)..(216): Homolog of NCBI NO: 15237828 NR Description: Ras-related GTP-binding protein, putative; id: At5g59150.1, supported by cDNA: gi_13877728 [Arabidopsis
  misc_feature (58)..(216): Homolog of NCBI NO: 25294121 NR Description: protein F22G5.24 [imported] - Arabidopsis >gi|8778562|gb|AAF79570.1|AC022464_28 F22G5.24 [Arabidopsis

SEQ ID NO: 94175 - DNA, 800 bp, Arabidopsis thaliana; identical to SEQ ID NO: 90419
  misc_feature (1)..(800): Ceres Seq. ID no. 12723812
  misc_feature: MA Experiment ID: 108461 Result: Up-regulated in Transcription
  misc_feature: MA Experiment 108461 PARAMETER Experiment Name: At_Germinating_Seeds_cDNA_P Parameter: Age (day) Value: 1 vs. 0
  misc_feature: MA Experiment 108461 PARAMETER Experiment Name: At_Germinating_Seeds_cDNA_P Parameter: Tissue Value: Germinating Seeds
  misc_feature: MA Experiment ID: 108573 Result: Down-regulated in Transcription
  misc_feature: MA Experiment 108573 PARAMETER Experiment Name: At_Drought_cDNA_P Parameter: Timepoint (hr) Value: 6
  misc_feature: MA Experiment 108573 PARAMETER Experiment Name: At_Drought_cDNA_P Parameter: Tissue Value: Aerial
  misc_feature: MA Experiment 108573 PARAMETER Experiment Name: At_Drought_cDNA_P Parameter: Treatment Value: Drought vs. No Drought
  misc_feature: MA Experiment ID: 108577 Result: Down-regulated in Transcription
  misc_feature: MA Experiment 108577 PARAMETER Experiment Name: At_42deg_Heat_cDNA_P Parameter: Temperature (deg C) Value: 42 vs. 22
  misc_feature: MA Experiment 108577 PARAMETER Experiment Name: At_42deg_Heat_cDNA_P Parameter: Timepoint (hr) Value: 6
  misc_feature: MA Experiment 108577 PARAMETER Experiment Name: At_42deg_Heat_cDNA_P Parameter: Tissue Value: Aerial
  misc_feature: MA Experiment ID: 20000112 Result: Down-regulated in Transcription
  misc_feature: MA Experiment 20000112 PARAMETER Experiment Name: At_42deg_Heat_cDNA_P Parameter: Temperature (deg C) Value: 42 vs. 22
  misc_feature: MA Experiment 20000112 PARAMETER Experiment Name: At_42deg_Heat_cDNA_P Parameter: Timepoint (hr) Value: 2
  misc_feature: MA Experiment 20000112 PARAMETER Experiment Name: At_42deg_Heat_cDNA_P Parameter: Tissue Value: Aerial
  misc_feature: MA Experiment ID: 20000113 Result: Down-regulated in Transcription
  misc_feature: MA Experiment 20000113 PARAMETER Experiment Name: At_42deg_Heat_cDNA_P Parameter: Temperature (deg C) Value: 42 vs. 22
  misc_feature: MA Experiment 20000113 PARAMETER Experiment Name: At_42deg_Heat_cDNA_P Parameter: Timepoint (hr) Value: 8
  misc_feature: MA Experiment 20000113 PARAMETER Experiment Name: At_42deg_Heat_cDNA_P Parameter: Tissue Value: Aerial
  misc_feature: MA Experiment ID: 20000173 Result: Down-regulated in Transcription
  misc_feature: MA Experiment 20000173 PARAMETER Experiment Name: At_42deg_Heat_P Parameter: Age (day) Value: 14
  misc_feature: MA Experiment 20000173 PARAMETER Experiment Name: At_42deg_Heat_P Parameter: Organism Value: A. thaliana
  misc_feature: MA Experiment 20000173 PARAMETER Experiment Name: At_42deg_Heat_P Parameter: Plant Line Value: WS
  misc_feature: MA Experiment 20000173 PARAMETER Experiment Name: At_42deg_Heat_P Parameter: Temperature (deg C) Value: 42 vs. 22
  misc_feature: MA Experiment 20000173 PARAMETER Experiment Name: At_42deg_Heat_P Parameter: Timepoint (hr) Value: 6
  misc_feature: MA Experiment 20000173 PARAMETER Experiment Name: At_42deg_Heat_P Parameter: Tissue Value: Aerial
  misc_feature: MA Experiment ID: 20000179 Result: Up-regulated in Transcription
  misc_feature: MA Experiment 20000179 PARAMETER Experiment Name: At_Germinating_Seeds_P Parameter: Age (hr) Value: 6 vs. 0
  misc_feature: MA Experiment 20000179 PARAMETER Experiment Name: At_Germinating_Seeds_P Parameter: Tissue Value: Germinating Seeds
  misc_feature: MA Experiment ID: 20000180 Result: Up-regulated in Transcription
  misc_feature: MA Experiment 20000180 PARAMETER Experiment Name: At_Germinating_Seeds_P Parameter: Age (hr) Value: 24 vs. 0
  misc_feature: MA Experiment 20000180 PARAMETER Experiment Name: At_Germinating_Seeds_P Parameter: Tissue Value: Germinating Seeds
  misc_feature: MA Experiment ID: 20000437 Result: Down-regulated in Transcription
  misc_feature: MA Experiment 20000437 PARAMETER Experiment Name: At_Drought_P Parameter: Age (day) Value: 8
  misc_feature: MA Experiment 20000437 PARAMETER Experiment Name: At_Drought_P Parameter: Organism Value: A. thaliana
  misc_feature: MA Experiment 20000437 PARAMETER Experiment Name: At_Drought_P Parameter: Plant Line Value: WS
  misc_feature: MA Experiment 20000437 PARAMETER Experiment Name: At_Drought_P Parameter: Timepoint (hr) Value: 24
  misc_feature: MA Experiment 20000437 PARAMETER Experiment Name: At_Drought_P Parameter: Tissue Value: Whole Plant
  misc_feature: MA Experiment 20000437 PARAMETER Experiment Name: At_Drought_P Parameter: Treatment Value: Drought vs. No Drought
  misc_feature: MA Experiment ID: 20000794 Result: Down-regulated in Transcription
  misc_feature: MA Experiment 20000794 PARAMETER Experiment Name: At_Petals_P Parameter: Age (day) Value: 23-25 days
  misc_feature: MA Experiment 20000794 PARAMETER Experiment Name: At_Petals_P Parameter: Plant Line Value: WS
  misc_feature: MA Experiment 20000794 PARAMETER Experiment Name: At_Petals_P Parameter: Tissue Value: Petals vs. Whole plant
  misc_feature: MA Experiment ID: 20001911 Result: Down-regulated in Transcription
  misc_feature: MA Experiment 20001911 PARAMETER Experiment Name: At_Drought_Reproduction_P Parameter: Age (day) Value: 40
  misc_feature: MA Experiment 20001911 PARAMETER Experiment Name: At_Drought_Reproduction_P Parameter: Organism Value: A. thaliana
  misc_feature: MA Experiment 20001911 PARAMETER Experiment Name: At_Drought_Reproduction_P Parameter: Plant Line Value: WS
  misc_feature: MA Experiment 20001911 PARAMETER Experiment Name: At_Drought_Reproduction_P Parameter: Timepoint (day) Value: 10
  misc_feature: MA Experiment 20001911 PARAMETER Experiment Name: At_Drought_Reproduction_P Parameter: Tissue Value: Flowers
  misc_feature: MA Experiment 20001911 PARAMETER Experiment Name: At_Drought_Reproduction_P Parameter: Treatment Value: Drought vs. No Drought

SEQ ID NO: 94176 - protein, 217 aa, Arabidopsis thaliana; identical to SEQ ID NO: 30179
  peptide (1)..(217): Ceres Seq. ID no. 12723813
  misc_feature (14)..(175): Pfam Name: Ras family Pfam Description: Ras family
  misc_feature (1)..(217): Homolog of NCBI NO: 15217568 NR Description: GTP-binding protein, putative; protein id: supported by cDNA: 17081., supported by cDNA: gi_15010637,
  misc_feature (1)..(216): Homolog of NCBI NO: 3024501 NR Description: RAS-RELATED PROTEIN RAB11C
  misc_feature (1)..(216): Homolog of NCBI NO: 3024528 NR Description: RAS-RELATED PROTEIN RAB2BV
  misc_feature (1)..(216): Homolog of NCBI NO: 1405561 NR Description: FSGTP1 [Fagus sylvatica]
  misc_feature (1)..(216): Homolog of NCBI NO: 34897394 NR Description: Ras-related GTP-binding protein [Oryza sativa
  misc_feature (1)..(216): Homolog of NCBI NO: 15232652 NR Description: GTP-binding protein, putative; protein id: supported by cDNA: 35596., supported by cDNA: gi_20465470
  misc_feature (1)..(216): Homolog of NCBI NO: 15222396 NR Description: GTP-binding protein, putative; protein id:
  misc_feature (1)..(216): Homolog of NCBI NO: 3024506 NR Description: RAS-RELATED PROTEIN RAB11A
  misc_feature (1)..(216): Homolog of NCBI NO: 15237828 NR Description: Ras-related GTP-binding protein, putative; id: At5g59150.1, supported by cDNA: gi_13877728 [Arabidopsis
  misc_feature (58)..(216): Homolog of NCBI NO: 25294121 NR Description: protein F22G5.24 [imported] - Arabidopsis >gi|8778562|gb|AAF79570.1|AC022464_28 F22G5.24 [Arabidopsis

SEQ ID NO: 94177 - DNA, 1278 bp, Arabidopsis thaliana; identical to SEQ ID NO: 90421
  misc_feature (1)..(1278): Ceres Seq. ID no. 12723829
  misc_feature: MA Experiment ID: 20000184 Result: Up-regulated in Transcription
  misc_feature: MA Experiment 20000184 PARAMETER Experiment Name: At_Shoots__P Parameter: Age (day) Value: 7
  misc_feature: MA Experiment 20000184 PARAMETER Experiment Name: At_Shoots__P Parameter: Tissue Value: Shoots vs. Whole Plant
  misc_feature: MA Experiment ID: 20000185 Result: Down-regulated in Transcription
  misc_feature: MA Experiment 20000185 PARAMETER Experiment Name: At_Roots__P Parameter: Age (day) Value: 7 vs. 21
  misc_feature: MA Experiment 20000185 PARAMETER Experiment Name: At_Roots__P Parameter: Organism Value: A. thaliana
  misc_feature: MA Experiment 20000185 PARAMETER Experiment Name: At_Roots__P Parameter: Tissue Value: Roots vs. Whole Plant
  misc_feature: MA Experiment ID: 20000227 Result: Down-regulated in Transcription
  misc_feature: MA Experiment 20000227 PARAMETER Experiment Name: At_Root-Tips-vs-Tops_P Parameter: Tissue Value: Root Tips vs. Root Tops
  misc_feature: MA Experiment ID: 20000264 Result: Up-regulated in Transcription
  misc_feature: MA Experiment 20000264 PARAMETER Experiment Name: At_Open_Flower_P Parameter: Age (day) Value: 21
  misc_feature: MA Experiment 20000264 PARAMETER Experiment Name: At_Open_Flower_P Parameter: Plant Line Value: WS
  misc_feature: MA Experiment 20000264 PARAMETER Experiment Name: At_Open_Flower_P Parameter: Tissue Value: Open Flower vs. Whole Plant
  misc_feature: MA Experiment ID: 20000438 Result: Up-regulated in Transcription
  misc_feature: MA Experiment 20000438 PARAMETER Experiment Name: At_Shoots__P Parameter: Age (day) Value: 14
  misc_feature: MA Experiment 20000438 PARAMETER Experiment Name: At_Shoots__P Parameter: Tissue Value: Shoots vs. Whole Plant
  misc_feature: MA Experiment ID: 20000451 Result: Down-regulated in Transcription
  misc_feature: MA Experiment 20000451 PARAMETER Experiment Name: At_CS6879_Shoots-Roots_P Parameter: Age (day) Value: 14
  misc_feature: MA Experiment 20000451 PARAMETER Experiment Name: At_CS6879_Shoots-Roots_P Parameter: Organism Value: A. thaliana
  misc_feature: MA Experiment 20000451 PARAMETER Experiment Name: At_CS6879_Shoots-Roots_P Parameter: Plant Line Value: CS6879 vs. WS
  misc_feature: MA Experiment 20000451 PARAMETER Experiment Name: At_CS6879_Shoots-Roots_P Parameter: Tissue Value: Roots
  misc_feature: MA Experiment ID: 20000794 Result: Up-regulated in Transcription
  misc_feature: MA Experiment 20000794 PARAMETER Experiment Name: At_Petals_P Parameter: Age (day) Value: 23-25 days
  misc_feature: MA Experiment 20000794 PARAMETER Experiment Name: At_Petals_P Parameter: Plant Line Value: WS
  misc_feature: MA Experiment 20000794 PARAMETER Experiment Name: At_Petals_P Parameter: Tissue Value: Petals vs. Whole plant
  misc_feature: MA Experiment ID: 20001248 Result: Down-regulated in Transcription
  misc_feature: MA Experiment 20001248 PARAMETER Experiment Name: At_Far-red-induction_P Parameter: Age (day) Value: 7
  misc_feature: MA Experiment 20001248 PARAMETER Experiment Name: At_Far-red-induction_P Parameter: Light Value: Far-red vs. White
  misc_feature: MA Experiment 20001248 PARAMETER Experiment Name: At_Far-red-induction_P Parameter: Organism Value: A. thaliana
  misc_feature: MA Experiment 20001248 PARAMETER Experiment Name: At_Far-red-induction_P Parameter: Plant Line Value: Columbia
  misc_feature: MA Experiment 20001248 PARAMETER Experiment Name: At_Far-red-induction_P Parameter: Timepoint (hr) Value: 4
  misc_feature: MA Experiment 20001248 PARAMETER Experiment Name: At_Far-red-induction_P Parameter: Tissue Value: Whole Plant
  misc_feature: MA Experiment ID: 20001450 Result: Down-regulated in Transcription
  misc_feature: MA Experiment 20001450 PARAMETER Experiment Name: At_Far-red-induction_P Parameter: Age (day) Value: 7
  misc_feature: MA Experiment 20001450 PARAMETER Experiment Name: At_Far-red-induction_P Parameter: Light Value: Far-red vs. White
  misc_feature: MA Experiment 20001450 PARAMETER Experiment Name: At_Far-red-induction_P Parameter: Organism Value: A. thaliana
  misc_feature: MA Experiment 20001450 PARAMETER Experiment Name: At_Far-red-induction_P Parameter: Plant Line Value: Columbia
  misc_feature: MA Experiment 20001450 PARAMETER Experiment Name: At_Far-red-induction_P Parameter: Timepoint (hr) Value: 8
  misc_feature: MA Experiment 20001450 PARAMETER Experiment Name: At_Far-red-induction_P Parameter: Tissue Value: Whole Plant
  misc_feature: MA Experiment ID: 20001557 Result: Down-regulated in Transcription
  misc_feature: MA Experiment 20001557 PARAMETER Experiment Name: At_Drought_Soil_Dry_P Parameter: Age (day) Value: 27
  misc_feature: MA Experiment 20001557 PARAMETER Experiment Name: At_Drought_Soil_Dry_P Parameter: Organism Value: A. thaliana
  misc_feature: MA Experiment 20001557 PARAMETER Experiment Name: At_Drought_Soil_Dry_P Parameter: Plant Line Value: WS
  misc_feature: MA Experiment 20001557 PARAMETER Experiment Name: At_Drought_Soil_Dry_P Parameter: Post Timepoint (hr) Value: 3
  misc_feature: MA Experiment 20001557 PARAMETER Experiment Name: At_Drought_Soil_Dry_P Parameter: Post-Treatment Value: Re-Water vs. No Drought
  misc_feature: MA Experiment 20001557 PARAMETER Experiment Name: At_Drought_Soil_Dry_P Parameter: Timepoint (day) Value: 13
  misc_feature: MA Experiment 20001557 PARAMETER Experiment Name: At_Drought_Soil_Dry_P Parameter: Treatment Value: Drought vs. No Drought
  misc_feature: MA Experiment ID: 20001558 Result: Down-regulated in Transcription
  misc_feature: MA Experiment 20001558 PARAMETER Experiment Name: At_Drought_Soil_Dry_P Parameter: Age (day) Value: 27
  misc_feature: MA Experiment 20001558 PARAMETER Experiment Name: At_Drought_Soil_Dry_P Parameter: Organism Value: A. thaliana
  misc_feature: MA Experiment 20001558 PARAMETER Experiment Name: At_Drought_Soil_Dry_P Parameter: Plant Line Value: WS
  misc_feature: MA Experiment 20001558 PARAMETER Experiment Name: At_Drought_Soil_Dry_P Parameter: Post Timepoint (hr) Value: 6
  misc_feature: MA Experiment 20001558 PARAMETER Experiment Name: At_Drought_Soil_Dry_P Parameter: Post-Treatment Value: Re-Water vs. No Drought
  misc_feature: MA Experiment 20001558 PARAMETER Experiment Name: At_Drought_Soil_Dry_P Parameter: Timepoint (day) Value: 13
  misc_feature: MA Experiment 20001558 PARAMETER Experiment Name: At_Drought_Soil_Dry_P Parameter: Treatment Value: Drought vs. No Drought
  misc_feature: MA Experiment ID: 20001905 Result: Down-regulated in Transcription
  misc_feature: MA Experiment 20001905 PARAMETER Experiment Name: At_Drought_Reproduction_P Parameter: Age (day) Value: 40
  misc_feature: MA Experiment 20001905 PARAMETER Experiment Name: At_Drought_Reproduction_P Parameter: Organism Value: A. thaliana
  misc_feature: MA Experiment 20001905 PARAMETER Experiment Name: At_Drought_Reproduction_P Parameter: Plant Line Value: WS
  misc_feature: MA Experiment 20001905 PARAMETER Experiment Name: At_Drought_Reproduction_P Parameter: Timepoint (day) Value: 10
  misc_feature: MA Experiment 20001905 PARAMETER Experiment Name: At_Drought_Reproduction_P Parameter: Tissue Value: Rosettes
  misc_feature: MA Experiment 20001905 PARAMETER Experiment Name: At_Drought_Reproduction_P Parameter: Treatment Value: Drought vs. No Drought

SEQ ID NO: 94178 - protein, 137 aa, Arabidopsis thaliana; identical to SEQ ID NO: 90422
  peptide (1)..(137): Ceres Seq. ID no. 12723830
  misc_feature (16)..(122): Homolog of NCBI NO: 15218517 NR Description: glutathione transferase, putative; protein id:
  misc_feature (16)..(125): Homolog of NCBI NO: 4914338 NR Description: F14N23.24 [Arabidopsis thaliana]
  misc_feature (16)..(122): Homolog of NCBI NO: 11096016 NR Description: glutathione S-transferase [Arabidopsis thaliana]
  misc_feature (16)..(122): Homolog of NCBI NO: 15375408 NR Description: glutathione S-transferase [Arabidopsis thaliana]
  misc_feature (16)..(122): Homolog of NCBI NO: 11096018 NR Description: glutathione S-transferase [Arabidopsis thaliana]
  misc_feature (11)..(122): Homolog of NCBI NO: 6856103 NR Description: glutathione S-transferase [Gossypium hirsutum]
  misc_feature (18)..(122): Homolog of NCBI NO: 6652870 NR Description: glutathione S-transferase 1 [Papaver somniferum]
  misc_feature (18)..(122): Homolog of NCBI NO: 6652874 NR Description: glutathione S-transferase 3 [Papaver somniferum]
  misc_feature (16)..(122): Homolog of NCBI NO: 15218518 NR Description: glutathione transferase, putative; protein id: supported by cDNA: gi_11096015, supported by cDNA: gi_15375407

SEQ ID NO: 94179 - protein, 122 aa, Arabidopsis thaliana; identical to SEQ ID NO: 90423
  peptide (1)..(122): Ceres Seq. ID no. 12723831
  misc_feature (1)..(107): Homolog of NCBI NO: 15218517 NR Description: glutathione transferase, putative; protein id:
  misc_feature (1)..(110): Homolog of NCBI NO: 4914338 NR Description: F14N23.24 [Arabidopsis thaliana]
  misc_feature (1)..(107): Homolog of NCBI NO: 11096016 NR Description: glutathione S-transferase [Arabidopsis thaliana]
  misc_feature (1)..(107): Homolog of NCBI NO: 15375408 NR Description: glutathione S-transferase [Arabidopsis thaliana]
  misc_feature (1)..(107): Homolog of NCBI NO: 11096018 NR Description: glutathione S-transferase [Arabidopsis thaliana]
  misc_feature (1)..(107): Homolog of NCBI NO: 6856103 NR Description: glutathione S-transferase [Gossypium hirsutum]
  misc_feature (3)..(107): Homolog of NCBI NO: 6652870 NR Description: glutathione S-transferase 1 [Papaver somniferum]
  misc_feature (3)..(107): Homolog of NCBI NO: 6652874 NR Description: glutathione S-transferase 3 [Papaver somniferum]
  misc_feature (1)..(107): Homolog of NCBI NO: 15218518 NR Description: glutathione transferase, putative; protein id: supported by cDNA: gi_11096015, supported by cDNA: gi_15375407

SEQ ID NO: 94180 - protein, 105 aa, Arabidopsis thaliana; identical to SEQ ID NO: 90424
  peptide (1)..(105): Ceres Seq. ID no. 12723832
  misc_feature (1)..(90): Homolog of NCBI NO: 15218517 NR Description: glutathione transferase, putative; protein id:
  misc_feature (1)..(93): Homolog of NCBI NO: 4914338 NR Description: F14N23.24 [Arabidopsis thaliana]
  misc_feature (1)..(90): Homolog of NCBI NO: 11096016 NR Description: glutathione S-transferase [Arabidopsis thaliana]
  misc_feature (1)..(90): Homolog of NCBI NO: 15375408 NR Description: glutathione S-transferase [Arabidopsis thaliana]
  misc_feature (1)..(90): Homolog of NCBI NO: 11096018 NR Description: glutathione S-transferase [Arabidopsis thaliana]
  misc_feature (1)..(90): Homolog of NCBI NO: 6856103 NR Description: glutathione S-transferase [Gossypium hirsutum]
  misc_feature (1)..(90): Homolog of NCBI NO: 6652870 NR Description: glutathione S-transferase 1 [Papaver somniferum]
  misc_feature (1)..(90): Homolog of NCBI NO: 6652874 NR Description: glutathione S-transferase 3 [Papaver somniferum]
  misc_feature (1)..(90): Homolog of NCBI NO: 15218518 NR Description: glutathione transferase, putative; protein id: supported by cDNA: gi_11096015, supported by cDNA: gi_15375407

SEQ ID NO: 94181 - DNA, 1930 bp, Arabidopsis thaliana; identical to SEQ ID NO: 90425
  misc_feature (1)..(1930): Ceres Seq. ID no. 12723854
  misc_feature: MA Experiment ID: 20000355 Result: Down-regulated in Transcription
  misc_feature: MA Experiment 20000355 PARAMETER Experiment Name: At_Siliques_Sub_P Parameter: Age (day) Value: 21
  misc_feature: MA Experiment 20000355 PARAMETER Experiment Name: At_Siliques_Sub_P Parameter: Organism Value: A. thaliana
  misc_feature: MA Experiment 20000355 PARAMETER Experiment Name: At_Siliques_Sub_P Parameter: Plant Line Value: WS
  misc_feature: MA Experiment 20000355 PARAMETER Experiment Name: At_Siliques_Sub_P Parameter: Tissue Value: Less Than 5mm Siliques vs. Whole Plant

SEQ ID NO: 94182 - protein, 487 aa, Arabidopsis thaliana; identical to SEQ ID NO: 90426
  peptide (1)..(487): Ceres Seq. ID no. 12723855
  misc_feature (1)..(487): Homolog of NCBI NO: 30683544 NR Description: WRKY family transcription factor [Arabidopsis
  misc_feature (112)..(487): Homolog of NCBI NO: 8778394 NR Description: F16A14.18 [Arabidopsis thaliana]
  misc_feature (1)..(114): Homolog of NCBI NO: 8778394 NR Description: F16A14.18 [Arabidopsis thaliana]
  misc_feature (121)..(487): Homolog of NCBI NO: 15223004 NR Description: WRKY family transcription factor; protein id: supported by cDNA: gi_15010749, supported by cDNA: gi_15991741 thaliana] >gi|20978796|sp|Q9XI90|WRK4_ARATH Probable
  misc_feature (1)..(114): Homolog of NCBI NO: 15223004 NR Description: WRKY family transcription factor; protein id: supported by cDNA: gi_15010749, supported by cDNA: gi_15991741 thaliana] >gi|20978796|sp|Q9XI90|WRK4_ARATH Probable
  misc_feature (121)..(487): Homolog of NCBI NO: 15227612 NR Description: WRKY family transcription factor; protein id: supported by cDNA: gi_13506736 [Arabidopsis thaliana]
  misc_feature (1)..(114): Homolog of NCBI NO: 15227612 NR Description: WRKY family transcription factor; protein id: supported by cDNA: gi_13506736 [Arabidopsis thaliana]
  misc_feature (122)..(487): Homolog of NCBI NO: 25348323 NR Description: DNA-binding protein WRKY2 [imported] - common
  misc_feature (7)..(114): Homolog of NCBI NO: 25348323 NR Description: DNA-binding protein WRKY2 [imported] - common
  misc_feature (36)..(402): Homolog of NCBI NO: 30681996 NR Description: disease resistance protein -related [Arabidopsis

SEQ ID NO: 94183 - protein, 456 aa, Arabidopsis thaliana; identical to SEQ ID NO: 90427
  peptide (1)..(456): Ceres Seq. ID no. 12723856
  misc_feature (1)..(456): Homolog of NCBI NO: 30683544 NR Description: WRKY family transcription factor [Arabidopsis
  misc_feature (81)..(456): Homolog of NCBI NO: 8778394 NR Description: F16A14.18 [Arabidopsis thaliana]
  misc_feature (1)..(83): Homolog of NCBI NO: 8778394 NR Description: F16A14.18 [Arabidopsis thaliana]
  misc_feature (90)..(456): Homolog of NCBI NO: 15223004 NR Description: WRKY family transcription factor; protein id: supported by cDNA: gi_15010749, supported by cDNA: gi_15991741 thaliana] >gi|20978796|sp|Q9XI90|WRK4_ARATH Probable
  misc_feature (1)..(83): Homolog of NCBI NO: 15223004 NR Description: WRKY family transcription factor; protein id: supported by cDNA: gi_15010749, supported by cDNA: gi_15991741 thaliana] >gi|20978796|sp|Q9XI90|WRK4_ARATH Probable
  misc_feature (90)..(456): Homolog of NCBI NO: 15227612 NR Description: WRKY family transcription factor; protein id: supported by cDNA: gi_13506736 [Arabidopsis thaliana]
  misc_feature (1)..(83): Homolog of NCBI NO: 15227612 NR Description: WRKY family transcription factor; protein id: supported by cDNA: gi_13506736 [Arabidopsis thaliana]
  misc_feature (91)..(456): Homolog of NCBI NO: 25348323 NR Description: DNA-binding protein WRKY2 [imported] - common
  misc_feature (1)..(83): Homolog of NCBI NO: 25348323 NR Description: DNA-binding protein WRKY2 [imported] - common
  misc_feature (5)..(371): Homolog of NCBI NO: 30681996 NR Description: disease resistance protein -related [Arabidopsis

SEQ ID NO: 94184 - protein, 443 aa, Arabidopsis thaliana; identical to SEQ ID NO: 90428
  peptide (1)..(443): Ceres Seq. ID no. 12723857
  misc_feature (1)..(443): Homolog of NCBI NO: 30683544 NR Description: WRKY family transcription factor [Arabidopsis
  misc_feature (68)..(443): Homolog of NCBI NO: 8778394 NR Description: F16A14.18 [Arabidopsis thaliana]
  misc_feature (1)..(70): Homolog of NCBI NO: 8778394 NR Description: F16A14.18 [Arabidopsis thaliana]
  misc_feature (77)..(443): Homolog of NCBI NO: 15223004 NR Description: WRKY family transcription factor; protein id: supported by cDNA: gi_15010749, supported by cDNA: gi_15991741 thaliana] >gi|20978796|sp|Q9XI90|WRK4_ARATH Probable
  misc_feature (1)..(70): Homolog of NCBI NO: 15223004 NR Description: WRKY family transcription factor; protein id: supported by cDNA: gi_15010749, supported by cDNA: gi_15991741 thaliana] >gi|20978796|sp|Q9XI90|WRK4_ARATH Probable
  misc_feature (77)..(443): Homolog of NCBI NO: 15227612 NR Description: WRKY family transcription factor; protein id: supported by cDNA: gi_13506736 [Arabidopsis thaliana]
  misc_feature (1)..(70): Homolog of NCBI NO: 15227612 NR Description: WRKY family transcription factor; protein id: supported by cDNA: gi_13506736 [Arabidopsis thaliana]
  misc_feature (78)..(443): Homolog of NCBI NO: 25348323 NR Description: DNA-binding protein WRKY2 [imported] - common
  misc_feature (1)..(70): Homolog of NCBI NO: 25348323 NR Description: DNA-binding protein WRKY2 [imported] - common
  misc_feature (1)..(358): Homolog of NCBI NO: 30681996 NR Description: disease resistance protein -related [Arabidopsis

SEQ ID NO: 94185 - DNA, 1391 bp, Arabidopsis thaliana; identical to SEQ ID NO: 90429
  misc_feature (1)..(1391): Ceres Seq. ID no. 12723858
  misc_feature: MA Experiment ID: 20000171 Result: Down-regulated in Transcription
  misc_feature: MA Experiment 20000171 PARAMETER Experiment Name: At_42deg_Heat_P Parameter: Age (day) Value: 14
  misc_feature: MA Experiment 20000171 PARAMETER Experiment Name: At_42deg_Heat_P Parameter: Organism Value: A. thaliana
  misc_feature: MA Experiment 20000171 PARAMETER Experiment Name: At_42deg_Heat_P Parameter: Plant Line Value: WS
  misc_feature: MA Experiment 20000171 PARAMETER Experiment Name: At_42deg_Heat_P Parameter: Temperature (deg C) Value: 42 vs. 22
  misc_feature: MA Experiment 20000171 PARAMETER Experiment Name: At_42deg_Heat_P Parameter: Timepoint (hr) Value: 1
  misc_feature: MA Experiment 20000171 PARAMETER Experiment Name: At_42deg_Heat_P Parameter: Tissue Value: Aerial
  misc_feature: MA Experiment ID: 20000173 Result: Down-regulated in Transcription
  misc_feature: MA Experiment 20000173 PARAMETER Experiment Name: At_42deg_Heat_P Parameter: Age (day) Value: 14
  misc_feature: MA Experiment 20000173 PARAMETER Experiment Name: At_42deg_Heat_P Parameter: Organism Value: A. thaliana
  misc_feature: MA Experiment 20000173 PARAMETER Experiment Name: At_42deg_Heat_P Parameter: Plant Line Value: WS
  misc_feature: MA Experiment 20000173 PARAMETER Experiment Name: At_42deg_Heat_P Parameter: Temperature (deg C) Value: 42 vs. 22
  misc_feature: MA Experiment 20000173 PARAMETER Experiment Name: At_42deg_Heat_P Parameter: Timepoint (hr) Value: 6
  misc_feature: MA Experiment 20000173 PARAMETER Experiment Name: At_42deg_Heat_P Parameter: Tissue Value: Aerial
  misc_feature: MA Experiment ID: 20000234 Result: Up-regulated in Transcription
  misc_feature: MA Experiment 20000234 PARAMETER Experiment Name: At_Siliques_P Parameter: Age (day) Value: 21
  misc_feature: MA Experiment 20000234 PARAMETER Experiment Name: At_Siliques_P Parameter: Organism Value: A. thaliana
  misc_feature: MA Experiment 20000234 PARAMETER Experiment Name: At_Siliques_P Parameter: Plant Line Value: WS
  misc_feature: MA Experiment 20000234 PARAMETER Experiment Name: At_Siliques_P Parameter: Tissue Value: Less Than 5mm Siliques vs. Whole Plant
  misc_feature: MA Experiment ID: 20000265 Result: Up-regulated in Transcription
  misc_feature: MA Experiment 20000265 PARAMETER Experiment Name: At_Open_Flower_P Parameter: Age (day) Value: 21
  misc_feature: MA Experiment 20000265 PARAMETER Experiment Name: At_Open_Flower_P Parameter: Plant Line Value: WS
  misc_feature: MA Experiment 20000265 PARAMETER Experiment Name: At_Open_Flower_P Parameter: Tissue Value: Closed Flower vs. Whole Plant
  misc_feature: MA Experiment ID: 20000439 Result: Up-regulated in Transcription
  misc_feature: MA Experiment 20000439 PARAMETER Experiment Name: At_Roots__P Parameter: Age (day) Value: 14 vs. 21
  misc_feature: MA Experiment 20000439 PARAMETER Experiment Name: At_Roots__P Parameter: Organism Value: A. thaliana
  misc_feature: MA Experiment 20000439 PARAMETER Experiment Name: At_Roots__P Parameter: Tissue Value: Roots vs. Whole Plant
  misc_feature: MA Experiment ID: 20001451 Result: Down-regulated in Transcription
  misc_feature: MA Experiment 20001451 PARAMETER Experiment Name: At_Far-red-induction_P Parameter: Age (day) Value: 7
  misc_feature: MA Experiment 20001451 PARAMETER Experiment Name: At_Far-red-induction_P Parameter: Light Value: Far-red vs. White
  misc_feature: MA Experiment 20001451 PARAMETER Experiment Name: At_Far-red-induction_P Parameter: Organism Value: A. thaliana
  misc_feature: MA Experiment 20001451 PARAMETER Experiment Name: At_Far-red-induction_P Parameter: Plant Line Value: Columbia
  misc_feature: MA Experiment 20001451 PARAMETER Experiment Name: At_Far-red-induction_P Parameter: Timepoint (hr) Value: 24
  misc_feature: MA Experiment 20001451 PARAMETER Experiment Name: At_Far-red-induction_P Parameter: Tissue Value: Whole Plant
  misc_feature: MA Experiment ID: 20001911 Result: Down-regulated in Transcription
  misc_feature: MA Experiment 20001911 PARAMETER Experiment Name: At_Drought_Reproduction_P Parameter: Age (day) Value: 40
  misc_feature: MA Experiment 20001911 PARAMETER Experiment Name: At_Drought_Reproduction_P Parameter: Organism Value: A. thaliana
  misc_feature: MA Experiment 20001911 PARAMETER Experiment Name: At_Drought_Reproduction_P Parameter: Plant Line Value: WS
  misc_feature: MA Experiment 20001911 PARAMETER Experiment Name: At_Drought_Reproduction_P Parameter: Timepoint (day) Value: 10
  misc_feature: MA Experiment 20001911 PARAMETER Experiment Name: At_Drought_Reproduction_P Parameter: Tissue Value: Flowers
  misc_feature: MA Experiment 20001911 PARAMETER Experiment Name: At_Drought_Reproduction_P Parameter: Treatment Value: Drought vs. No Drought

SEQ ID NO: 94186 - protein, 239 aa, Arabidopsis thaliana; identical to SEQ ID NO: 90430
  peptide (1)..(239): Ceres Seq. ID no. 12723859
  misc_feature (93)..(238): Pfam Name: Longevity-assurance protein (LAG1) Pfam Description: Longevity-assurance protein (LAG1)
  misc_feature (1)..(239): Homolog of NCBI NO: 30683361 NR Description: longevity assurance protein -related [Arabidopsis
  misc_feature (1)..(238): Homolog of NCBI NO: 25518747 NR Description: hypothetical protein F13B4.7 - Arabidopsis >gi|9802756|gb|AAF99825.1|AC027134_7 Highly similar to fungal
  misc_feature (1)..(238): Homolog of NCBI NO: 16974114 NR Description: putative resistance protein [Lycopersicon
  misc_feature (1)..(238): Homolog of NCBI NO: 18404559 NR Description: expressed protein; protein id: At3g25540.1, by cDNA: gi_13430479, supported by cDNA: gi_7658238 [Arabidopsis >gi|7658239|gb|AAF66102.1|AF198179_1 LAG1 homolog 1 [Arabidopsis
  misc_feature (9)..(239): Homolog of NCBI NO: 7688742 NR Description: ASC1 [Lycopersicon esculentum] alternaria stem canker resistance protein [Lycopersicon
  misc_feature (1)..(123): Homolog of NCBI NO: 8920562 NR Description: Contains similarity to LAG1 homolog 1 from
  misc_feature (23)..(239): Homolog of NCBI NO: 34901974 NR Description: unknown protein [Oryza sativa (japonica
  misc_feature (4)..(236): Homolog of NCBI NO: 7658241 NR Description: LAG1 homolog 2 [Arabidopsis thaliana]
  misc_feature (4)..(236): Homolog of NCBI NO: 15230323 NR Description: longevity factor-like protein; protein id: supported by cDNA: 123372., supported by cDNA: gi_7658240 thaliana] >gi|9294628|dbj|BAB02967.1| contains similarity to
  misc_feature (67)..(239): Homolog of NCBI NO: 24119257 NR Description: trh3 protein [Danio rerio] Trh3 [Danio rerio] >gi|28278814|gb|AAH45284.1| Similar to RIKEN

SEQ ID NO: 94187 - protein, 179 aa, Arabidopsis thaliana; identical to SEQ ID NO: 90431
  peptide (1)..(179): Ceres Seq. ID no. 12723860
  misc_feature (33)..(178): Pfam Name: Longevity-assurance protein (LAG1) Pfam Description: Longevity-assurance protein (LAG1)
  misc_feature (1)..(179): Homolog of NCBI NO: 30683361 NR Description: longevity assurance protein -related [Arabidopsis
  misc_feature (1)..(178): Homolog of NCBI NO: 25518747 NR Description: hypothetical protein F13B4.7 - Arabidopsis >gi|9802756|gb|AAF99825.1|AC027134_7 Highly similar to fungal
  misc_feature (1)..(178): Homolog of NCBI NO: 16974114 NR Description: putative resistance protein [Lycopersicon
  misc_feature (1)..(178): Homolog of NCBI NO: 18404559 NR Description: expressed protein; protein id: At3g25540.1, by cDNA: gi_13430479, supported by cDNA: gi_7658238 [Arabidopsis >gi|7658239|gb|AAF66102.1|AF198179_1 LAG1 homolog 1 [Arabidopsis
  misc_feature (1)..(179): Homolog of NCBI NO: 7688742 NR Description: ASC1 [Lycopersicon esculentum] alternaria stem canker resistance protein [Lycopersicon
  misc_feature (1)..(63): Homolog of NCBI NO: 8920562 NR Description: Contains similarity to LAG1 homolog 1 from
  misc_feature (1)..(179): Homolog of NCBI NO: 34901974 NR Description: unknown protein [Oryza sativa (japonica
  misc_feature (1)..(176): Homolog of NCBI NO: 7658241 NR Description: LAG1 homolog 2 [Arabidopsis thaliana]
  misc_feature (1)..(176): Homolog of NCBI NO: 15230323 NR Description: longevity factor-like protein; protein id: supported by cDNA: 123372., supported by cDNA: gi_7658240 thaliana] >gi|9294628|dbj|BAB02967.1| contains similarity to
  misc_feature (7)..(179): Homolog of NCBI NO: 24119257 NR Description: trh3 protein [Danio rerio] Trh3 [Danio rerio] >gi|28278814|gb|AAH45284.1| Similar to RIKEN

SEQ ID NO: 94188 - protein, 137 aa, Arabidopsis thaliana; identical to SEQ ID NO: 90432
  peptide (1)..(137): Ceres Seq. ID no. 12723861
  misc_feature (1)..(136): Pfam Name: Longevity-assurance protein (LAG1) Pfam Description: Longevity-assurance protein (LAG1)
  misc_feature (1)..(137): Homolog of NCBI NO: 30683361 NR Description: longevity assurance protein -related [Arabidopsis
  misc_feature (1)..(136): Homolog of NCBI NO: 25518747 NR Description: hypothetical protein F13B4.7 - Arabidopsis >gi|9802756|gb|AAF99825.1|AC027134_7 Highly similar to fungal
  misc_feature (1)..(136): Homolog of NCBI NO: 16974114 NR Description: putative resistance protein [Lycopersicon
  misc_feature (1)..(136): Homolog of NCBI NO: 18404559 NR Description: expressed protein; protein id: At3g25540.1, by cDNA: gi_13430479, supported by cDNA: gi_7658238 [Arabidopsis >gi|7658239|gb|AAF66102.1|AF198179_1 LAG1 homolog 1 [Arabidopsis
  misc_feature (1)..(137): Homolog of NCBI NO: 7688742 NR Description: ASC1 [Lycopersicon esculentum] alternaria stem canker resistance protein [Lycopersicon
  misc_feature (1)..(21): Homolog of NCBI NO: 8920562 NR Description: Contains similarity to LAG1 homolog 1 from
  misc_feature (1)..(137): Homolog of NCBI NO: 34901974 NR Description: unknown protein [Oryza sativa (japonica
  misc_feature (1)..(134): Homolog of NCBI NO: 7658241 NR Description: LAG1 homolog 2 [Arabidopsis thaliana]
  misc_feature (1)..(134): Homolog of NCBI NO: 15230323 NR Description: longevity factor-like protein; protein id: supported by cDNA: 123372., supported by cDNA: gi_7658240 thaliana] >gi|9294628|dbj|BAB02967.1| contains similarity to
  misc_feature (1)..(137): Homolog of NCBI NO: 24119257 NR Description: trh3 protein [Danio rerio] Trh3 [Danio rerio] >gi|28278814|gb|AAH45284.1| Similar to RIKEN

SEQ ID NO: 94189 - DNA, 1149 bp, Arabidopsis thaliana; identical to SEQ ID NO: 90433
  misc_feature (1)..(1149): Ceres Seq. ID no. 12723870
  misc_feature: MA Experiment ID: 20000315 Result: Down-regulated in Transcription
  misc_feature: MA Experiment 20000315 PARAMETER Experiment Name: At_14day_Shoots-Roots_Sub_P Parameter: Age (day) Value: 14
  misc_feature: MA Experiment 20000315 PARAMETER Experiment Name: At_14day_Shoots-Roots_Sub_P Parameter: Organism Value: A. thaliana
  misc_feature: MA Experiment 20000315 PARAMETER Experiment Name: At_14day_Shoots-Roots_Sub_P Parameter: Plant Line Value: WS
  misc_feature: MA Experiment 20000315 PARAMETER Experiment Name: At_14day_Shoots-Roots_Sub_P Parameter: Tissue Value: Shoots vs. Whole Plant

SEQ ID NO: 94190 - protein, 382 aa, Arabidopsis thaliana; identical to SEQ ID NO: 90434
  peptide (1)..(382): Ceres Seq. ID no. 12723871
  misc_feature (97)..(355): Pfam Name: Protein kinase domain Pfam Description: Protein kinase domain
  misc_feature (1)..(382): Homolog of NCBI NO: 11358840 NR Description: serine/threonine-protein kinase-like protein -
  misc_feature (1)..(382): Homolog of NCBI NO: 30692568 NR Description: protein kinase family [Arabidopsis thaliana]
  misc_feature (1)..(382): Homolog of NCBI NO: 9757757 NR Description: serine/threonine-protein kinase-like protein
  misc_feature (1)..(382): Homolog of NCBI NO: 22327987 NR Description: serine/threonine-protein kinase - like protein; id: At5g60550.1, supported by cDNA: gi_20466759 [Arabidopsis
  misc_feature (1)..(382): Homolog of NCBI NO: 20466760 NR Description: serine/threonine-protein kinase-like protein
  misc_feature (11)..(375): Homolog of NCBI NO: 13324784 NR Description: putative protein kinase [Oryza sativa]
  misc_feature (202)..(380): Homolog of NCBI NO: 27437013 NR Description: calcium/calmodulin-dependent protein kinase 1 isoform b; CAMKK alpha protein [Homo sapiens]
  misc_feature (75)..(133): Homolog of NCBI NO: 27437013 NR Description: calcium/calmodulin-dependent protein kinase 1 isoform b; CAMKK alpha protein [Homo sapiens]
  misc_feature (148)..(183): Homolog of NCBI NO: 27437013 NR Description: calcium/calmodulin-dependent protein kinase 1 isoform b; CAMKK alpha protein [Homo sapiens]
  misc_feature (76)..(354): Homolog of NCBI NO: 19075860 NR Description: serine/threonine-protein kinase ssp1

SEQ ID NO: 94191 - protein, 238 aa, Arabidopsis thaliana; identical to SEQ ID NO: 90435
  peptide (1)..(238): Ceres Seq. ID no. 12723872
  misc_feature (1)..(211): Pfam Name: Protein kinase domain Pfam Description: Protein kinase domain
  misc_feature (1)..(238): Homolog of NCBI NO: 11358840 NR Description: serine/threonine-protein kinase-like protein -
  misc_feature (1)..(238): Homolog of NCBI NO: 30692568 NR Description: protein kinase family [Arabidopsis thaliana]
  misc_feature (1)..(238): Homolog of NCBI NO: 9757757 NR Description: serine/threonine-protein kinase-like protein
  misc_feature (1)..(238): Homolog of NCBI NO: 22327987 NR Description: serine/threonine-protein kinase - like protein; id: At5g60550.1, supported by cDNA: gi_20466759 [Arabidopsis
  misc_feature (1)..(238): Homolog of NCBI NO: 20466760 NR Description: serine/threonine-protein kinase-like protein
  misc_feature (1)..(231): Homolog of NCBI NO: 13324784 NR Description: putative protein kinase [Oryza sativa]
  misc_feature (58)..(236): Homolog of NCBI NO: 27437013 NR Description: calcium/calmodulin-dependent protein kinase 1 isoform b; CAMKK alpha protein [Homo sapiens]
  misc_feature (4)..(39): Homolog of NCBI NO: 27437013 NR Description: calcium/calmodulin-dependent protein kinase 1 isoform b; CAMKK alpha protein [Homo sapiens]
  misc_feature (1)..(210): Homolog of NCBI NO: 19075860 NR Description: serine/threonine-protein kinase ssp1
  misc_feature (1)..(232): Homolog of NCBI NO: 23491819 NR Description: calcium/calmodulin-dependent protein kinase

SEQ ID NO: 94192 - protein, 230 aa, Arabidopsis thaliana; identical to SEQ ID NO: 90436
  peptide (1)..(230): Ceres Seq. ID no. 12723873
  misc_feature (1)..(203): Pfam Name: Protein kinase domain Pfam Description: Protein kinase domain
  misc_feature (1)..(230): Homolog of NCBI NO: 11358840 NR Description: serine/threonine-protein kinase-like protein -
  misc_feature (1)..(230): Homolog of NCBI NO: 30692568 NR Description: protein kinase family [Arabidopsis thaliana]
  misc_feature (1)..(230): Homolog of NCBI NO: 9757757 NR Description: serine/threonine-protein kinase-like protein
  misc_feature (1)..(230): Homolog of NCBI NO: 22327987 NR Description: serine/threonine-protein kinase - like protein; id: At5g60550.1, supported by cDNA: gi_20466759 [Arabidopsis
  misc_feature (1)..(230): Homolog of NCBI NO: 20466760 NR Description: serine/threonine-protein kinase-like protein
  misc_feature (1)..(223): Homolog of NCBI NO: 13324784 NR Description: putative protein kinase [Oryza sativa]
  misc_feature (50)..(228): Homolog of NCBI NO: 27437013 NR Description: calcium/calmodulin-dependent protein kinase 1 isoform b; CAMKK alpha protein [Homo sapiens]
  misc_feature (1)..(31): Homolog of NCBI NO: 27437013 NR Description: calcium/calmodulin-dependent protein kinase 1 isoform b; CAMKK alpha protein [Homo sapiens]
  misc_feature (1)..(202): Homolog of NCBI NO: 19075860 NR Description: serine/threonine-protein kinase ssp1
  misc_feature (1)..(224): Homolog of NCBI NO: 23491819 NR Description: calcium/calmodulin-dependent protein kinase

SEQ ID NO: 94193 - DNA, 1428 bp, Arabidopsis thaliana; identical to SEQ ID NO: 90437
  misc_feature (1)..(1428): Ceres Seq. ID no. 12723898
  misc_feature: MA Experiment ID: 20000495 Result: Up-regulated in Transcription
  misc_feature: MA Experiment 20000495 PARAMETER Experiment Name: At_Guard_Cells_P Parameter: Harvest Date Value: 8/2/2002
  misc_feature: MA Experiment 20000495 PARAMETER Experiment Name: At_Guard_Cells_P Parameter: Organism Value: A. thaliana
  misc_feature: MA Experiment 20000495 PARAMETER Experiment Name: At_Guard_Cells_P Parameter: Tissue Value: Guard Cells vs. Leaves

SEQ ID NO: 94194 - protein, 475 aa, Arabidopsis thaliana; identical to SEQ ID NO: 90438
  peptide (1)..(475): Ceres Seq. ID no. 12723899
  misc_feature (83)..(410): Pfam Name: Exostosin family Pfam Description: Exostosin family
  misc_feature (1)..(475): Homolog of NCBI NO: 15230692 NR Description: Exostosin family; protein id: At3g45400.1
  misc_feature (67)..(454): Homolog of NCBI NO: 15228598 NR Description: Exostosin family; protein id: At3g03650.1 thaliana] >gi|6091757|gb|AAF03467.1|AC009327_6 hypothetical
  misc_feature (3)..(456): Homolog of NCBI NO: 18410670 NR Description: Exostosin family; protein id: At1g74680.1, by cDNA: gi_16209708 [Arabidopsis thaliana] At1g74680/F1M20_36 [Arabidopsis thaliana]
  misc_feature (14)..(456): Homolog of NCBI NO: 25406363 NR Description: F25A4.34 [imported] - Arabidopsis thaliana
  misc_feature (28)..(452): Homolog of NCBI NO: 19386797 NR Description: OJ1485_B09.5 [Oryza sativa (japonica
  misc_feature (35)..(452): Homolog of NCBI NO: 22330483 NR Description: Exostosin family; protein id: At1g67410.1
  misc_feature (35)..(325): Homolog of NCBI NO: 7487224 NR Description: hypothetical protein T1F15.13 - Arabidopsis
  misc_feature (322)..(440): Homolog of NCBI NO: 7487224 NR Description: hypothetical protein T1F15.13 - Arabidopsis
  misc_feature (14)..(452): Homolog of NCBI NO: 30686300 NR Description: Exostosin family [Arabidopsis thaliana]
  misc_feature (47)..(452): Homolog of NCBI NO: 34899802 NR Description: OJ1092_A07.9 [Oryza sativa (japonica

SEQ ID NO: 94195 - protein, 473 aa, Arabidopsis thaliana; identical to SEQ ID NO: 90439
  peptide (1)..(473): Ceres Seq. ID no. 12723900
  misc_feature (81)..(408): Pfam Name: Exostosin family Pfam Description: Exostosin family
  misc_feature (1)..(473): Homolog of NCBI NO: 15230692 NR Description: Exostosin family; protein id: At3g45400.1
  misc_feature (65)..(452): Homolog of NCBI NO: 15228598 NR Description: Exostosin family; protein id: At3g03650.1 thaliana] >gi|6091757|gb|AAF03467.1|AC009327_6 hypothetical
  misc_feature (1)..(454): Homolog of NCBI NO: 18410670 NR Description: Exostosin family; protein id: At1g74680.1, by cDNA: gi_16209708 [Arabidopsis thaliana] At1g74680/F1M20_36 [Arabidopsis thaliana]
  misc_feature (12)..(454): Homolog of NCBI NO: 25406363 NR Description: F25A4.34 [imported] - Arabidopsis thaliana
  misc_feature (26)..(450): Homolog of NCBI NO: 19386797 NR Description: OJ1485_B09.5 [Oryza sativa (japonica
  misc_feature (33)..(450): Homolog of NCBI NO: 22330483 NR Description: Exostosin family; protein id: At1g67410.1
  misc_feature (33)..(323): Homolog of NCBI NO: 7487224 NR Description: hypothetical protein T1F15.13 - Arabidopsis
  misc_feature (320)..(438): Homolog of NCBI NO: 7487224 NR Description: hypothetical protein T1F15.13 - Arabidopsis
  misc_feature (12)..(450): Homolog of NCBI NO: 30686300 NR Description: Exostosin family [Arabidopsis thaliana]
  misc_feature (45)..(450): Homolog of NCBI NO: 34899802 NR Description: OJ1092_A07.9 [Oryza sativa (japonica

SEQ ID NO: 94196 - protein, 391 aa, Arabidopsis thaliana; identical to SEQ ID NO: 90440
  peptide (1)..(391): Ceres Seq. ID no. 12723901
  misc_feature (1)..(326): Pfam Name: Exostosin family Pfam Description: Exostosin family
  misc_feature (1)..(391): Homolog of NCBI NO: 15230692 NR Description: Exostosin family; protein id: At3g45400.1
  misc_feature (1)..(370): Homolog of NCBI NO: 15228598 NR Description: Exostosin family; protein id: At3g03650.1 thaliana] >gi|6091757|gb|AAF03467.1|AC009327_6 hypothetical
  misc_feature (1)..(372): Homolog of NCBI NO: 18410670 NR Description: Exostosin family; protein id: At1g74680.1, by cDNA: gi_16209708 [Arabidopsis thaliana] At1g74680/F1M20_36 [Arabidopsis thaliana]
  misc_feature (1)..(372): Homolog of NCBI NO: 25406363 NR Description: F25A4.34 [imported] - Arabidopsis thaliana
  misc_feature (1)..(368): Homolog of NCBI NO: 19386797 NR Description: OJ1485_B09.5 [Oryza sativa (japonica
  misc_feature (1)..(368): Homolog of NCBI NO: 22330483 NR Description: Exostosin family; protein id: At1g67410.1
  misc_feature (1)..(241): Homolog of NCBI NO: 7487224 NR Description: hypothetical protein T1F15.13 - Arabidopsis
  misc_feature (238)..(356): Homolog of NCBI NO: 7487224 NR Description: hypothetical protein T1F15.13 - Arabidopsis
  misc_feature (1)..(368): Homolog of NCBI NO: 30686300 NR Description: Exostosin family [Arabidopsis thaliana]
  misc_feature (1)..(368): Homolog of NCBI NO: 34899802 NR Description: OJ1092_A07.9 [Oryza sativa (japonica

SEQ ID NO: 94197 - DNA, 1995 bp, Arabidopsis thaliana; identical to SEQ ID NO: 90441
  misc_feature (1)..(1995): Ceres Seq. ID no. 12723902
  misc_feature: MA Experiment ID: 20000185 Result: Up-regulated in Transcription
  misc_feature: MA Experiment 20000185 PARAMETER Experiment Name: At_Roots__P Parameter: Age (day) Value: 7 vs. 21
  misc_feature: MA Experiment 20000185 PARAMETER Experiment Name: At_Roots__P Parameter: Organism Value: A. thaliana
  misc_feature: MA Experiment 20000185 PARAMETER Experiment Name: At_Roots__P Parameter: Tissue Value: Roots vs. Whole Plant
  misc_feature: MA Experiment ID: 20000227 Result: Down-regulated in Transcription
  misc_feature: MA Experiment 20000227 PARAMETER Experiment Name: At_Root-Tips-vs-Tops_P Parameter: Tissue Value: Root Tips vs. Root Tops
  misc_feature: MA Experiment ID: 20000437 Result: Down-regulated in Transcription
  misc_feature: MA Experiment 20000437 PARAMETER Experiment Name: At_Drought_P Parameter: Age (day) Value: 8
  misc_feature: MA Experiment 20000437 PARAMETER Experiment Name: At_Drought_P Parameter: Organism Value: A. thaliana
  misc_feature: MA Experiment 20000437 PARAMETER Experiment Name: At_Drought_P Parameter: Plant Line Value: WS
  misc_feature: MA Experiment 20000437 PARAMETER Experiment Name: At_Drought_P Parameter: Timepoint (hr) Value: 24
  misc_feature: MA Experiment 20000437 PARAMETER Experiment Name: At_Drought_P Parameter: Tissue Value: Whole Plant
  misc_feature: MA Experiment 20000437 PARAMETER Experiment Name: At_Drought_P Parameter: Treatment Value: Drought vs. No Drought
  misc_feature: MA Experiment ID: 20000439 Result: Up-regulated in Transcription
  misc_feature: MA Experiment 20000439 PARAMETER Experiment Name: At_Roots__P Parameter: Age (day) Value: 14 vs. 21
  misc_feature: MA Experiment 20000439 PARAMETER Experiment Name: At_Roots__P Parameter: Organism Value: A. thaliana
  misc_feature: MA Experiment 20000439 PARAMETER Experiment Name: At_Roots__P Parameter: Tissue Value: Roots vs. Whole Plant

SEQ ID NO: 94198 - protein, 664 aa, Arabidopsis thaliana; identical to SEQ ID NO: 90442
  peptide (1)..(664): Ceres Seq. ID no. 12723903
  misc_feature (1)..(664): Homolog of NCBI NO: 15230696 NR Description: receptor-like protein kinase; protein id:
  misc_feature (4)..(664): Homolog of NCBI NO: 15239268 NR Description: receptor-like protein kinase; protein id:
  misc_feature (1)..(664): Homolog of NCBI NO: 15230700 NR Description: receptor like protein kinase; protein id:
  misc_feature (1)..(664): Homolog of NCBI NO: 15230670 NR Description: receptor-like protein kinase; protein id:
  misc_feature (9)..(664): Homolog of NCBI NO: 15239261 NR Description: receptor like protein kinase; protein id:
  misc_feature (1)..(644): Homolog of NCBI NO: 15239263 NR Description: receptor like protein kinase; protein id:
  misc_feature (1)..(644): Homolog of NCBI NO: 15810557 NR Description: putative receptor protein kinase [Arabidopsis
  misc_feature (61)..(649): Homolog of NCBI NO: 15230698 NR Description: receptor like protein kinase; protein id:
  misc_feature (5)..(664): Homolog of NCBI NO: 15239260 NR Description: receptor like protein kinase; protein id:
  misc_feature (4)..(621): Homolog of NCBI NO: 34899542 NR Description: putative receptor-type protein kinase LRK1 [Oryza

SEQ ID NO: 94199 - protein, 604 aa, Arabidopsis thaliana; identical to SEQ ID NO: 90443
  peptide (1)..(604): Ceres Seq. ID no. 12723904
  misc_feature (1)..(604): Homolog of NCBI NO: 15230696 NR Description: receptor-like protein kinase; protein id:
  misc_feature (1)..(604): Homolog of NCBI NO: 15239268 NR Description: receptor-like protein kinase; protein id:
  misc_feature (1)..(604): Homolog of NCBI NO: 15230700 NR Description: receptor like protein kinase; protein id:
  misc_feature (1)..(604): Homolog of NCBI NO: 15230670 NR Description: receptor-like protein kinase; protein id:
  misc_feature (1)..(604): Homolog of NCBI NO: 15239261 NR Description: receptor like protein kinase; protein id:
  misc_feature (1)..(584): Homolog of NCBI NO: 15239263 NR Description: receptor like protein kinase; protein id:
  misc_feature (1)..(584): Homolog of NCBI NO: 15810557 NR Description: putative receptor protein kinase [Arabidopsis
  misc_feature (1)..(589): Homolog of NCBI NO: 15230698 NR Description: receptor like protein kinase; protein id:
  misc_feature (1)..(604): Homolog of NCBI NO: 15239260 NR Description: receptor like protein kinase; protein id:
  misc_feature (1)..(561): Homolog of NCBI NO: 34899542 NR Description: putative receptor-type protein kinase LRK1 [Oryza

SEQ ID NO: 94200 - protein, 431 aa, Arabidopsis thaliana; identical to SEQ ID NO: 90444
  peptide (1)..(431): Ceres Seq. ID no. 12723905
  misc_feature (1)..(431): Homolog of NCBI NO: 15230696 NR Description: receptor-like protein kinase; protein id:
  misc_feature (1)..(431): Homolog of NCBI NO: 15239268 NR Description: receptor-like protein kinase; protein id:
  misc_feature (1)..(431): Homolog of NCBI NO: 15230700 NR Description: receptor like protein kinase; protein id:
  misc_feature (1)..(431): Homolog of NCBI NO: 15230670 NR Description: receptor-like protein kinase; protein id:
  misc_feature (1)..(431): Homolog of NCBI NO: 15239261 NR Description: receptor like protein kinase; protein id:
  misc_feature (1)..(411): Homolog of NCBI NO: 15239263 NR Description: receptor like protein kinase; protein id:
  misc_feature (1)..(411): Homolog of NCBI NO: 15810557 NR Description: putative receptor protein kinase [Arabidopsis
  misc_feature (1)..(416): Homolog of NCBI NO: 15230698 NR Description: receptor like protein kinase; protein id:
  misc_feature (1)..(431): Homolog of NCBI NO: 15239260 NR Description: receptor like protein kinase; protein id:
  misc_feature (1)..(388): Homolog of NCBI NO: 34899542 NR Description: putative receptor-type protein kinase LRK1 [Oryza

SEQ ID NO: 94201 - DNA, 1293 bp, Arabidopsis thaliana; identical to SEQ ID NO: 90445
  misc_feature (1)..(1293): Ceres Seq. ID no. 12723962
  misc_feature: MA Experiment ID: 20000314 Result: Down-regulated in Transcription
  misc_feature: MA Experiment 20000314 PARAMETER Experiment Name: At_14day_Shoots-Roots_Sub_P Parameter: Age (day) Value: 14
  misc_feature: MA Experiment 20000314 PARAMETER Experiment Name: At_14day_Shoots-Roots_Sub_P Parameter: Organism Value: A. thaliana
  misc_feature: MA Experiment 20000314 PARAMETER Experiment Name: At_14day_Shoots-Roots_Sub_P Parameter: Plant Line Value: WS
  misc_feature: MA Experiment 20000314 PARAMETER Experiment Name: At_14day_Shoots-Roots_Sub_P Parameter: Tissue Value: Roots vs. Whole Plant
  misc_feature: MA Experiment ID: 20000328 Result: Down-regulated in Transcription
  misc_feature: MA Experiment 20000328 PARAMETER Experiment Name: At_42deg_Heat_Sub_P Parameter: Age (day) Value: 14
  misc_feature: MA Experiment 20000328 PARAMETER Experiment Name: At_42deg_Heat_Sub_P Parameter: Organism Value: A. thaliana
  misc_feature: MA Experiment 20000328 PARAMETER Experiment Name: At_42deg_Heat_Sub_P Parameter: Plant Line Value: WS
  misc_feature: MA Experiment 20000328 PARAMETER Experiment Name: At_42deg_Heat_Sub_P Parameter: Temperature (deg C) Value: 42 vs. 22
  misc_feature: MA Experiment 20000328 PARAMETER Experiment Name: At_42deg_Heat_Sub_P Parameter: Timepoint (hr) Value: 6
  misc_feature: MA Experiment 20000328 PARAMETER Experiment Name: At_42deg_Heat_Sub_P Parameter: Tissue Value: Aerial
  misc_feature: MA Experiment ID: 20000440 Result: Down-regulated in Transcription
  misc_feature: MA Experiment 20000440 PARAMETER Experiment Name: At_Closed-Flower__Sub_P Parameter: Tissue Value: Closed Flower vs. Whole Plant

SEQ ID NO: 94202 - protein, 430 aa, Arabidopsis thaliana; identical to SEQ ID NO: 90446
  peptide (1)..(430): Ceres Seq. ID no. 12723963
  misc_feature (7)..(428): Pfam Name: Transferase family Pfam Description: Transferase family
  misc_feature (1)..(430): Homolog of NCBI NO: 15229017 NR Description: putative protein; protein id: At3g48720.1
  misc_feature (1)..(430): Homolog of NCBI NO: 34222064 NR Description: At3g48720 [Arabidopsis thaliana]
  misc_feature (1)..(430): Homolog of NCBI NO: 15242820 NR Description: acyltransferase-like protein; protein id: supported by cDNA: 157547., supported by cDNA: gi_14334863
  misc_feature (1)..(430): Homolog of NCBI NO: 21553692 NR Description: acyltransferase-like protein [Arabidopsis
  misc_feature (9)..(426): Homolog of NCBI NO: 30693723 NR Description: transferase family [Arabidopsis thaliana]
  misc_feature (9)..(426): Homolog of NCBI NO: 30693725 NR Description: transferase family [Arabidopsis thaliana]
  misc_feature (3)..(428): Homolog of NCBI NO: 20161743 NR Description: N-hydroxycinnamoyl/benzoyltransferase-like
  misc_feature (2)..(428): Homolog of NCBI NO: 6469032 NR Description: N-hydroxycinnamoyl/benzoyltransferase [Ipomoea
  misc_feature (12)..(428): Homolog of NCBI NO: 27475616 NR Description: hydroxycinnamoyl transferase [Nicotiana tabacum]
  misc_feature (12)..(428): Homolog of NCBI NO: 40644084 NR Description: hydroxycinnamoyl CoA quinate transferase

SEQ ID NO: 94203 - protein, 312 aa, Arabidopsis thaliana; identical to SEQ ID NO: 90447
  peptide (1)..(312): Ceres Seq. ID no. 12723964
  misc_feature (1)..(310): Pfam Name: Transferase family Pfam Description: Transferase family
  misc_feature (1)..(312): Homolog of NCBI NO: 15229017 NR Description: putative protein; protein id: At3g48720.1
  misc_feature (1)..(312): Homolog of NCBI NO: 34222064 NR Description: At3g48720 [Arabidopsis thaliana]
  misc_feature (1)..(312): Homolog of NCBI NO: 15242820 NR Description: acyltransferase-like protein; protein id: supported by cDNA: 157547., supported by cDNA: gi_14334863
  misc_feature (1)..(312): Homolog of NCBI NO: 21553692 NR Description: acyltransferase-like protein [Arabidopsis
  misc_feature (1)..(308): Homolog of NCBI NO: 30693723 NR Description: transferase family [Arabidopsis thaliana]
  misc_feature (1)..(308): Homolog of NCBI NO: 30693725 NR Description: transferase family [Arabidopsis thaliana]
  misc_feature (1)..(310): Homolog of NCBI NO: 20161743 NR Description: N-hydroxycinnamoyl/benzoyltransferase-like
  misc_feature (1)..(310): Homolog of NCBI NO: 6469032 NR Description: N-hydroxycinnamoyl/benzoyltransferase [Ipomoea
  misc_feature (1)..(310): Homolog of NCBI NO: 27475616 NR Description: hydroxycinnamoyl transferase [Nicotiana tabacum]
  misc_feature (1)..(310): Homolog of NCBI NO: 40644084 NR Description: hydroxycinnamoyl CoA quinate transferase

SEQ ID NO: 94204 - protein, 272 aa, Arabidopsis thaliana; identical to SEQ ID NO: 90448
  peptide (1)..(272): Ceres Seq. ID no. 12723965
  misc_feature (1)..(270): Pfam Name: Transferase family Pfam Description: Transferase family
  misc_feature (1)..(272): Homolog of NCBI NO: 15229017 NR Description: putative protein; protein id: At3g48720.1
  misc_feature (1)..(272): Homolog of NCBI NO: 34222064 NR Description: At3g48720 [Arabidopsis thaliana]
  misc_feature (1)..(272): Homolog of NCBI NO: 15242820 NR Description: acyltransferase-like protein; protein id: supported by cDNA: 157547., supported by cDNA: gi_14334863
  misc_feature (1)..(272): Homolog of NCBI NO: 21553692 NR Description: acyltransferase-like protein [Arabidopsis
  misc_feature (1)..(268): Homolog of NCBI NO: 30693723 NR Description: transferase family [Arabidopsis thaliana]
  misc_feature (1)..(268): Homolog of NCBI NO: 30693725 NR Description: transferase family [Arabidopsis thaliana]
  misc_feature (1)..(270): Homolog of NCBI NO: 20161743 NR Description: N-hydroxycinnamoyl/benzoyltransferase-like
  misc_feature (1)..(270): Homolog of NCBI NO: 6469032 NR Description: N-hydroxycinnamoyl/benzoyltransferase [Ipomoea
  misc_feature (1)..(270): Homolog of NCBI NO: 27475616 NR Description: hydroxycinnamoyl transferase [Nicotiana tabacum]
  misc_feature (1)..(270): Homolog of NCBI NO: 40644084 NR Description: hydroxycinnamoyl CoA quinate transferase

SEQ ID NO: 94205 - DNA, 786 bp, Arabidopsis thaliana; identical to SEQ ID NO: 90449
  misc_feature (1)..(786): Ceres Seq. ID no. 12723988
  misc_feature: MA Experiment ID: 20000182 Result: Up-regulated in Transcription
  misc_feature: MA Experiment 20000182 PARAMETER Experiment Name: At_2mM_SA_P Parameter: Age (day) Value: 14
  misc_feature: MA Experiment 20000182 PARAMETER Experiment Name: At_2mM_SA_P Parameter: Organism Value: A. thaliana
  misc_feature: MA Experiment 20000182 PARAMETER Experiment Name: At_2mM_SA_P Parameter: Plant Line Value: WS
  misc_feature: MA Experiment 20000182 PARAMETER Experiment Name: At_2mM_SA_P Parameter: Timepoint (hr) Value: 6
  misc_feature: MA Experiment 20000182 PARAMETER Experiment Name: At_2mM_SA_P Parameter: Tissue Value: Aerial
  misc_feature: MA Experiment 20000182 PARAMETER Experiment Name: At_2mM_SA_P Parameter: Treatment Value: 2mM SA vs. No Treatment
  misc_feature: MA Experiment ID: 20000185 Result: Up-regulated in Transcription
  misc_feature: MA Experiment 20000185 PARAMETER Experiment Name: At_Roots__P Parameter: Age (day) Value: 7 vs. 21
  misc_feature: MA Experiment 20000185 PARAMETER Experiment Name: At_Roots__P Parameter: Organism Value: A. thaliana
  misc_feature: MA Experiment 20000185 PARAMETER Experiment Name: At_Roots__P Parameter: Tissue Value: Roots vs. Whole Plant
  misc_feature: MA Experiment ID: 20000439 Result: Up-regulated in Transcription
  misc_feature: MA Experiment 20000439 PARAMETER Experiment Name: At_Roots__P Parameter: Age (day) Value: 14 vs. 21
  misc_feature: MA Experiment 20000439 PARAMETER Experiment Name: At_Roots__P Parameter: Organism Value: A. thaliana
  misc_feature: MA Experiment 20000439 PARAMETER Experiment Name: At_Roots__P Parameter: Tissue Value: Roots vs. Whole Plant
  misc_feature: MA Experiment ID: 20000460 Result: Down-regulated in Transcription
  misc_feature: MA Experiment 20000460 PARAMETER Experiment Name: At_10percent_PEG_P Parameter: Age (day) Value: 12
  misc_feature: MA Experiment 20000460 PARAMETER Experiment Name: At_10percent_PEG_P Parameter: Organism Value: A. thaliana
  misc_feature: MA Experiment 20000460 PARAMETER Experiment Name: At_10percent_PEG_P Parameter: Plant Line Value: WS
  misc_feature: MA Experiment 20000460 PARAMETER Experiment Name: At_10percent_PEG_P Parameter: Timepoint (day) Value: 12
  misc_feature: MA Experiment 20000460 PARAMETER Experiment Name: At_10percent_PEG_P Parameter: Tissue Value: Whole Plant
  misc_feature: MA Experiment 20000460 PARAMETER Experiment Name: At_10percent_PEG_P Parameter: Treatment Value: 10percent PEG vs. No Treatment
  misc_feature: MA Experiment ID: 20000527 Result: Down-regulated in Transcription
  misc_feature: MA Experiment 20000527 PARAMETER Experiment Name: At_10percent_PEG_P Parameter: Age (day) Value: 20
  misc_feature: MA Experiment 20000527 PARAMETER Experiment Name: At_10percent_PEG_P Parameter: Organism Value: A. thaliana
  misc_feature: MA Experiment 20000527 PARAMETER Experiment Name: At_10percent_PEG_P Parameter: Plant Line Value: WS
  misc_feature: MA Experiment 20000527 PARAMETER Experiment Name: At_10percent_PEG_P Parameter: Timepoint (day) Value: 20
  misc_feature: MA Experiment 20000527 PARAMETER Experiment Name: At_10percent_PEG_P Parameter: Tissue Value: Whole Plant
  misc_feature: MA Experiment 20000527 PARAMETER Experiment Name: At_10percent_PEG_P Parameter: Treatment Value: 10percent PEG vs. No Treatment
  misc_feature: MA Experiment ID: 20001557 Result: Down-regulated in Transcription
  misc_feature: MA Experiment 20001557 PARAMETER Experiment Name: At_Drought_Soil_Dry_P Parameter: Age (day) Value: 27
  misc_feature: MA Experiment 20001557 PARAMETER Experiment Name: At_Drought_Soil_Dry_P Parameter: Organism Value: A. thaliana
  misc_feature: MA Experiment 20001557 PARAMETER Experiment Name: At_Drought_Soil_Dry_P Parameter: Plant Line Value: WS
  misc_feature: MA Experiment 20001557 PARAMETER Experiment Name: At_Drought_Soil_Dry_P Parameter: Post Timepoint (hr) Value: 3
  misc_feature: MA Experiment 20001557 PARAMETER Experiment Name: At_Drought_Soil_Dry_P Parameter: Post-Treatment Value: Re-Water vs. No Drought
  misc_feature: MA Experiment 20001557 PARAMETER Experiment Name: At_Drought_Soil_Dry_P Parameter: Timepoint (day) Value: 13
  misc_feature: MA Experiment 20001557 PARAMETER Experiment Name: At_Drought_Soil_Dry_P Parameter: Treatment Value: Drought vs. No Drought
  misc_feature: MA Experiment ID: 20001558 Result: Down-regulated in Transcription
  misc_feature: MA Experiment 20001558 PARAMETER Experiment Name: At_Drought_Soil_Dry_P Parameter: Age (day) Value: 27
  misc_feature: MA Experiment 20001558 PARAMETER Experiment Name: At_Drought_Soil_Dry_P Parameter: Organism Value: A. thaliana
  misc_feature: MA Experiment 20001558 PARAMETER Experiment Name: At_Drought_Soil_Dry_P Parameter: Plant Line Value: WS
  misc_feature: MA Experiment 20001558 PARAMETER Experiment Name: At_Drought_Soil_Dry_P Parameter: Post Timepoint (hr) Value: 6
  misc_feature: MA Experiment 20001558 PARAMETER Experiment Name: At_Drought_Soil_Dry_P Parameter: Post-Treatment Value: Re-Water vs. No Drought
  misc_feature: MA Experiment 20001558 PARAMETER Experiment Name: At_Drought_Soil_Dry_P Parameter: Timepoint (day) Value: 13
  misc_feature: MA Experiment 20001558 PARAMETER Experiment Name: At_Drought_Soil_Dry_P Parameter: Treatment Value: Drought vs. No Drought

SEQ ID NO: 94206 - protein, 261 aa, Arabidopsis thaliana; identical to SEQ ID NO: 90450
  peptide (1)..(261): Ceres Seq. ID no. 12723989
  misc_feature (20)..(67): Pfam Name: Myb-like DNA-binding domain Pfam Description: Myb-like DNA-binding domain
  misc_feature (1)..(261): Homolog of NCBI NO: 15229055 NR Description: myb family transcription factor; protein id:
  misc_feature (84)..(261): Homolog of NCBI NO: 11358539 NR Description: myb-related transcription factor MYB45 [imported] Arabidopsis thaliana (fragment) >gi|3941458|gb|AAC83605.1|
  misc_feature (13)..(188): Homolog of NCBI NO: 15242947 NR Description: myb family transcription factor(MYB19); protein At5g52260.1 [Arabidopsis thaliana] >gi|8885539|dbj|BAA97469.1|
  misc_feature (13)..(156): Homolog of NCBI NO: 15235149 NR Description: myb family transcription factor; protein id:
  misc_feature (13)..(156): Homolog of NCBI NO: 25387539 NR Description: myb-like protein [imported] - Arabidopsis thaliana
  misc_feature (15)..(163): Homolog of NCBI NO: 2280530 NR Description: ATMYB4 [Arabidopsis thaliana]
  misc_feature (15)..(163): Homolog of NCBI NO: 30690317 NR Description: myb transcription factor (ATMYB4) [Arabidopsis >gi|20466622|gb|AAM20628.1| transcription factor ATMYB4 thaliana] >gi|30984580|gb|AAP42753.1| At5g26655 [Arabidopsis
  misc_feature (15)..(172): Homolog of NCBI NO: 15234262 NR Description: myb family transcription factor; protein id: supported by cDNA: gi_15375280, supported by cDNA: gi_15450989
  misc_feature (49)..(163): Homolog of NCBI NO: 7446174 NR Description: transcription factor MYB4 - Arabidopsis thaliana
  misc_feature (15)..(47): Homolog of NCBI NO: 7446174 NR Description: transcription factor MYB4 - Arabidopsis thaliana

SEQ ID NO: 94207 - protein, 250 aa, Arabidopsis thaliana; identical to SEQ ID NO: 90451
  peptide (1)..(250): Ceres Seq. ID no. 12723990
  misc_feature (9)..(56): Pfam Name: Myb-like DNA-binding domain Pfam Description: Myb-like DNA-binding domain
  misc_feature (1)..(250): Homolog of NCBI NO: 15229055 NR Description: myb family transcription factor; protein id:
  misc_feature (73)..(250): Homolog of NCBI NO: 11358539 NR Description: myb-related transcription factor MYB45 [imported] Arabidopsis thaliana (fragment) >gi|3941458|gb|AAC83605.1|
  misc_feature (2)..(177): Homolog of NCBI NO: 15242947 NR Description: myb family transcription factor(MYB19); protein At5g52260.1 [Arabidopsis thaliana] >gi|8885539|dbj|BAA97469.1|
  misc_feature (2)..(145): Homolog of NCBI NO: 15235149 NR Description: myb family transcription factor; protein id:
  misc_feature (2)..(145): Homolog of NCBI NO: 25387539 NR Description: myb-like protein [imported] - Arabidopsis thaliana
  misc_feature (4)..(152): Homolog of NCBI NO: 2280530 NR Description: ATMYB4 [Arabidopsis thaliana]
  misc_feature (4)..(152): Homolog of NCBI NO: 30690317 NR Description: myb transcription factor (ATMYB4) [Arabidopsis >gi|20466622|gb|AAM20628.1| transcription factor ATMYB4 thaliana] >gi|30984580|gb|AAP42753.1| At5g26655 [Arabidopsis
  misc_feature (4)..(161): Homolog of NCBI NO: 15234262 NR Description: myb family transcription factor; protein id: supported by cDNA: gi_15375280, supported by cDNA: gi_15450989
  misc_feature (38)..(152): Homolog of NCBI NO: 7446174 NR Description: transcription factor MYB4 - Arabidopsis thaliana
  misc_feature (4)..(36): Homolog of NCBI NO: 7446174 NR Description: transcription factor MYB4 - Arabidopsis thaliana

SEQ ID NO: 94208 - protein, 172 aa, Arabidopsis thaliana; identical to SEQ ID NO: 90452
  peptide (1)..(172): Ceres Seq. ID no. 12723991
  misc_feature (1)..(172): Homolog of NCBI NO: 15229055 NR Description: myb family transcription factor; protein id:
  misc_feature (1)..(172): Homolog of NCBI NO: 11358539 NR Description: myb-related transcription factor MYB45 [imported] Arabidopsis thaliana (fragment) >gi|3941458|gb|AAC83605.1|
  misc_feature (1)..(99): Homolog of NCBI NO: 15242947 NR Description: myb family transcription factor(MYB19); protein At5g52260.1 [Arabidopsis thaliana] >gi|8885539|dbj|BAA97469.1|
  misc_feature (1)..(67): Homolog of NCBI NO: 15235149 NR Description: myb family transcription factor; protein id:
  misc_feature (1)..(67): Homolog of NCBI NO: 25387539 NR Description: myb-like protein [imported] - Arabidopsis thaliana
  misc_feature (1)..(74): Homolog of NCBI NO: 2280530 NR Description: ATMYB4 [Arabidopsis thaliana]
  misc_feature (1)..(74): Homolog of NCBI NO: 30690317 NR Description: myb transcription factor (ATMYB4) [Arabidopsis >gi|20466622|gb|AAM20628.1| transcription factor ATMYB4 thaliana] >gi|30984580|gb|AAP42753.1| At5g26655 [Arabidopsis
  misc_feature (1)..(83): Homolog of NCBI NO: 15234262 NR Description: myb family transcription factor; protein id: supported by cDNA: gi_15375280, supported by cDNA: gi_15450989
  misc_feature (1)..(74): Homolog of NCBI NO: 7446174 NR Description: transcription factor MYB4 - Arabidopsis thaliana
  misc_feature (1)..(81): Homolog of NCBI NO: 34902542 NR Description: putative transcription factor (myb) [Oryza sativa

SEQ ID NO: 94209 - DNA, 1410 bp, Arabidopsis thaliana; identical to SEQ ID NO: 90453
  misc_feature (1)..(1410): Ceres Seq. ID no. 12723995
  misc_feature: MA Experiment ID: 20000171 Result: Up-regulated in Transcription
  misc_feature: MA Experiment 20000171 PARAMETER Experiment Name: At_42deg_Heat_P Parameter: Age (day) Value: 14
  misc_feature: MA Experiment 20000171 PARAMETER Experiment Name: At_42deg_Heat_P Parameter: Organism Value: A. thaliana
  misc_feature: MA Experiment 20000171 PARAMETER Experiment Name: At_42deg_Heat_P Parameter: Plant Line Value: WS
  misc_feature: MA Experiment 20000171 PARAMETER Experiment Name: At_42deg_Heat_P Parameter: Temperature (deg C) Value: 42 vs. 22
  misc_feature: MA Experiment 20000171 PARAMETER Experiment Name: At_42deg_Heat_P Parameter: Timepoint (hr) Value: 1
  misc_feature: MA Experiment 20000171 PARAMETER Experiment Name: At_42deg_Heat_P Parameter: Tissue Value: Aerial
  misc_feature: MA Experiment ID: 20000235 Result: Up-regulated in Transcription
  misc_feature: MA Experiment 20000235 PARAMETER Experiment Name: At_Siliques_P Parameter: Age (day) Value: 21
  misc_feature: MA Experiment 20000235 PARAMETER Experiment Name: At_Siliques_P Parameter: Organism Value: A. thaliana
  misc_feature: MA Experiment 20000235 PARAMETER Experiment Name: At_Siliques_P Parameter: Plant Line Value: WS
  misc_feature: MA Experiment 20000235 PARAMETER Experiment Name: At_Siliques_P Parameter: Tissue Value: 5-10mm Siliques vs. Whole Plant

SEQ ID NO: 94210 - protein, 469 aa, Arabidopsis thaliana; identical to SEQ ID NO: 90454
  peptide (1)..(469): Ceres Seq. ID no. 12723996
  misc_feature (78)..(435): Pfam Name: Glycosyl hydrolases family 28 Pfam Description: Glycosyl hydrolases family 28
  misc_feature (1)..(469): Homolog of NCBI NO: 15229058 NR Description: polygalacturonase, putative; protein id:
  misc_feature (1)..(467): Homolog of NCBI NO: 15224072 NR Description: polygalacturonase, putative; protein id: [Arabidopsis thaliana] >gi|25412169|pir||B84630 probable
  misc_feature (34)..(467): Homolog of NCBI NO: 30692538 NR Description: polygalacturonase-like protein [Fragaria x
  misc_feature (23)..(468): Homolog of NCBI NO: 15236514 NR Description: polygalacturonase, putative; protein id:
  misc_feature (34)..(467): Homolog of NCBI NO: 15233124 NR Description: polygalacturonase, putative; protein id:
  misc_feature (3)..(467): Homolog of NCBI NO: 34897760 NR Description: ESTs AU029388(E30287),D49277(S16474) correspond a region of the predicted gene.~Similar to Arabidopsis thaliana
  misc_feature (41)..(450): Homolog of NCBI NO: 18412253 NR Description: polygalacturonase, putative; protein id: supported by cDNA: gi_13358184 [Arabidopsis thaliana] AT3g62110 [Arabidopsis thaliana] >gi|23397166|gb|AAN31866.1|
  misc_feature (41)..(450): Homolog of NCBI NO: 11263971 NR Description: hypothetical protein T17J13.70 - Arabidopsis >gi|6899921|emb|CAB71871.1| putative protein [Arabidopsis
  misc_feature (2)..(438): Homolog of NCBI NO: 40714685 NR Description: putative polygalacturonase [Oryza sativa
  misc_feature (12)..(438): Homolog of NCBI NO: 15236625 NR Description: polygalacturonase, putative; protein id: supported by cDNA: gi_17065241 [Arabidopsis thaliana]

SEQ ID NO: 94211 - protein, 396 aa, Arabidopsis thaliana; identical to SEQ ID NO: 90455
  peptide (1)..(396): Ceres Seq. ID no. 12723997
  misc_feature (5)..(362): Pfam Name: Glycosyl hydrolases family 28 Pfam Description: Glycosyl hydrolases family 28
  misc_feature (1)..(396): Homolog of NCBI NO: 15229058 NR Description: polygalacturonase, putative; protein id:
  misc_feature (1)..(394): Homolog of NCBI NO: 15224072 NR Description: polygalacturonase, putative; protein id: [Arabidopsis thaliana] >gi|25412169|pir||B84630 probable
  misc_feature (1)..(394): Homolog of NCBI NO: 30692538 NR Description: polygalacturonase-like protein [Fragaria x
  misc_feature (1)..(395): Homolog of NCBI NO: 15236514 NR Description: polygalacturonase, putative; protein id:
  misc_feature (1)..(394): Homolog of NCBI NO: 15233124 NR Description: polygalacturonase, putative; protein id:
  misc_feature (1)..(394): Homolog of NCBI NO: 34897760 NR Description: ESTs AU029388(E30287),D49277(S16474) correspond a region of the predicted gene.~Similar to Arabidopsis thaliana
  misc_feature (1)..(377): Homolog of NCBI NO: 18412253 NR Description: polygalacturonase, putative; protein id: supported by cDNA: gi_13358184 [Arabidopsis thaliana] AT3g62110 [Arabidopsis thaliana] >gi|23397166|gb|AAN31866.1|
  misc_feature (1)..(377): Homolog of NCBI NO: 11263971 NR Description: hypothetical protein T17J13.70 - Arabidopsis >gi|6899921|emb|CAB71871.1| putative protein [Arabidopsis
  misc_feature (1)..(365): Homolog of NCBI NO: 40714685 NR Description: putative polygalacturonase [Oryza sativa
  misc_feature (1)..(365): Homolog of NCBI NO: 15236625 NR Description: polygalacturonase, putative; protein id: supported by cDNA: gi_17065241 [Arabidopsis thaliana]

SEQ ID NO: 94212 - DNA, 1365 bp, Arabidopsis thaliana; identical to SEQ ID NO: 90456
  misc_feature (1)..(1365): Ceres Seq. ID no. 12724024
  misc_feature: MA Experiment ID: 20000169 Result: Down-regulated in Transcription
  misc_feature: MA Experiment 20000169 PARAMETER Experiment Name: At_100uM_ABA_P Parameter: Age (day) Value: 14
  misc_feature: MA Experiment 20000169 PARAMETER Experiment Name: At_100uM_ABA_P Parameter: Organism Value: A. thaliana
  misc_feature: MA Experiment 20000169 PARAMETER Experiment Name: At_100uM_ABA_P Parameter: Plant Line Value: WS
  misc_feature: MA Experiment 20000169 PARAMETER Experiment Name: At_100uM_ABA_P Parameter: Timepoint (hr) Value: 6
  misc_feature: MA Experiment 20000169 PARAMETER Experiment Name: At_100uM_ABA_P Parameter: Tissue Value: Aerial
  misc_feature: MA Experiment 20000169 PARAMETER Experiment Name: At_100uM_ABA_P Parameter: Treatment Value: 100uM ABA vs. No Treatment
  misc_feature: MA Experiment ID: 20000171 Result: Down-regulated in Transcription
  misc_feature: MA Experiment 20000171 PARAMETER Experiment Name: At_42deg_Heat_P Parameter: Age (day) Value: 14
  misc_feature: MA Experiment 20000171 PARAMETER Experiment Name: At_42deg_Heat_P Parameter: Organism Value: A. thaliana
  misc_feature: MA Experiment 20000171 PARAMETER Experiment Name: At_42deg_Heat_P Parameter: Plant Line Value: WS
  misc_feature: MA Experiment 20000171 PARAMETER Experiment Name: At_42deg_Heat_P Parameter: Temperature (deg C) Value: 42 vs. 22
  misc_feature: MA Experiment 20000171 PARAMETER Experiment Name: At_42deg_Heat_P Parameter: Timepoint (hr) Value: 1
  misc_feature: MA Experiment 20000171 PARAMETER Experiment Name: At_42deg_Heat_P Parameter: Tissue Value: Aerial
  misc_feature: MA Experiment ID: 20000173 Result: Down-regulated in Transcription
  misc_feature: MA Experiment 20000173 PARAMETER Experiment Name: At_42deg_Heat_P Parameter: Age (day) Value: 14
  misc_feature: MA Experiment 20000173 PARAMETER Experiment Name: At_42deg_Heat_P Parameter: Organism Value: A. thaliana
  misc_feature: MA Experiment 20000173 PARAMETER Experiment Name: At_42deg_Heat_P Parameter: Plant Line Value: WS
  misc_feature: MA Experiment 20000173 PARAMETER Experiment Name: At_42deg_Heat_P Parameter: Temperature (deg C) Value: 42 vs. 22
  misc_feature: MA Experiment 20000173 PARAMETER Experiment Name: At_42deg_Heat_P Parameter: Timepoint (hr) Value: 6
  misc_feature: MA Experiment 20000173 PARAMETER Experiment Name: At_42deg_Heat_P Parameter: Tissue Value: Aerial
  misc_feature: MA Experiment ID: 20000184 Result: Down-regulated in Transcription
  misc_feature: MA Experiment 20000184 PARAMETER Experiment Name: At_Shoots__P Parameter: Age (day) Value: 7
  misc_feature: MA Experiment 20000184 PARAMETER Experiment Name: At_Shoots__P Parameter: Tissue Value: Shoots vs. Whole Plant
  misc_feature: MA Experiment ID: 20000185 Result: Down-regulated in Transcription
  misc_feature: MA Experiment 20000185 PARAMETER Experiment Name: At_Roots__P Parameter: Age (day) Value: 7 vs. 21
  misc_feature: MA Experiment 20000185 PARAMETER Experiment Name: At_Roots__P Parameter: Organism Value: A. thaliana
  misc_feature: MA Experiment 20000185 PARAMETER Experiment Name: At_Roots__P Parameter: Tissue Value: Roots vs. Whole Plant
  misc_feature: MA Experiment ID: 20000234 Result: Down-regulated in Transcription
  misc_feature: MA Experiment 20000234 PARAMETER Experiment Name: At_Siliques_P Parameter: Age (day) Value: 21
  misc_feature: MA Experiment 20000234 PARAMETER Experiment Name: At_Siliques_P Parameter: Organism Value: A. thaliana
  misc_feature: MA Experiment 20000234 PARAMETER Experiment Name: At_Siliques_P Parameter: Plant Line Value: WS
  misc_feature: MA Experiment 20000234 PARAMETER Experiment Name: At_Siliques_P Parameter: Tissue Value: Less Than 5mm Siliques vs. Whole Plant
  misc_feature: MA Experiment ID: 20000235 Result: Down-regulated in Transcription
  misc_feature: MA Experiment 20000235 PARAMETER Experiment Name: At_Siliques_P Parameter: Age (day) Value: 21
  misc_feature: MA Experiment 20000235 PARAMETER Experiment Name: At_Siliques_P Parameter: Organism Value: A. thaliana
  misc_feature: MA Experiment 20000235 PARAMETER Experiment Name: At_Siliques_P Parameter: Plant Line Value: WS
  misc_feature: MA Experiment 20000235 PARAMETER Experiment Name: At_Siliques_P Parameter: Tissue Value: 5-10mm Siliques vs. Whole Plant
  misc_feature: MA Experiment ID: 20000264 Result: Down-regulated in Transcription
  misc_feature: MA Experiment 20000264 PARAMETER Experiment Name: At_Open_Flower_P Parameter: Age (day) Value: 21
  misc_feature: MA Experiment 20000264 PARAMETER Experiment Name: At_Open_Flower_P Parameter: Plant Line Value: WS
  misc_feature: MA Experiment 20000264 PARAMETER Experiment Name: At_Open_Flower_P Parameter: Tissue Value: Open Flower vs. Whole Plant
  misc_feature: MA Experiment ID: 20000265 Result: Down-regulated in Transcription
  misc_feature: MA Experiment 20000265 PARAMETER Experiment Name: At_Open_Flower_P Parameter: Age (day) Value: 21
  misc_feature: MA Experiment 20000265 PARAMETER Experiment Name: At_Open_Flower_P Parameter: Plant Line Value: WS
  misc_feature: MA Experiment 20000265 PARAMETER Experiment Name: At_Open_Flower_P Parameter: Tissue Value: Closed Flower vs. Whole Plant
  misc_feature: MA Experiment ID: 20000286 Result: Down-regulated in Transcription
  misc_feature: MA Experiment 20000286 PARAMETER Experiment Name: At_Open_Flower_P Parameter: Age (day) Value: 21
  misc_feature: MA Experiment 20000286 PARAMETER Experiment Name: At_Open_Flower_P Parameter: Plant Line Value: WS
  misc_feature: MA Experiment 20000286 PARAMETER Experiment Name: At_Open_Flower_P Parameter: Tissue Value: Half Open vs. Whole Plant
  misc_feature: MA Experiment ID: 20000439 Result: Down-regulated in Transcription
  misc_feature: MA Experiment 20000439 PARAMETER Experiment Name: At_Roots__P Parameter: Age (day) Value: 14 vs. 21
  misc_feature: MA Experiment 20000439 PARAMETER Experiment Name: At_Roots__P Parameter: Organism Value: A. thaliana
  misc_feature: MA Experiment 20000439 PARAMETER Experiment Name: At_Roots__P Parameter: Tissue Value: Roots vs. Whole Plant
  misc_feature: MA Experiment ID: 20000441 Result: Up-regulated in Transcription
  misc_feature: MA Experiment 20000441 PARAMETER Experiment Name: At_1uM_BR-BRZ__P Parameter: Tissue Value: Shoot Apices
  misc_feature: MA Experiment 20000441 PARAMETER Experiment Name: At_1uM_BR-BRZ__P Parameter: Treatment Value: 1uM BR vs. No Treatment
  misc_feature: MA Experiment ID: 20000453 Result: Down-regulated in Transcription
  misc_feature: MA Experiment 20000453 PARAMETER Experiment Name: At_100uM_ABA_P Parameter: Age (day) Value: 15
  misc_feature: MA Experiment 20000453 PARAMETER Experiment Name: At_100uM_ABA_P Parameter: Organism Value: A. thaliana
  misc_feature: MA Experiment 20000453 PARAMETER Experiment Name: At_100uM_ABA_P Parameter: Plant Line Value: WS
  misc_feature: MA Experiment 20000453 PARAMETER Experiment Name: At_100uM_ABA_P Parameter: Timepoint (hr) Value: 24
  misc_feature: MA Experiment 20000453 PARAMETER Experiment Name: At_100uM_ABA_P Parameter: Tissue Value: Aerial
  misc_feature: MA Experiment 20000453 PARAMETER Experiment Name: At_100uM_ABA_P Parameter: Treatment Value: 100uM ABA vs. No Treatment
  misc_feature: MA Experiment ID: 20000455 Result: Down-regulated in Transcription
  misc_feature: MA Experiment 20000455 PARAMETER Experiment Name: At_100uM_ABA_P Parameter: Age (day) Value: 16
  misc_feature: MA Experiment 20000455 PARAMETER Experiment Name: At_100uM_ABA_P Parameter: Organism Value: A. thaliana
  misc_feature: MA Experiment 20000455 PARAMETER Experiment Name: At_100uM_ABA_P Parameter: Plant Line Value: WS
  misc_feature: MA Experiment 20000455 PARAMETER Experiment Name: At_100uM_ABA_P Parameter: Timepoint (hr) Value: 48
  misc_feature: MA Experiment 20000455 PARAMETER Experiment Name: At_100uM_ABA_P Parameter: Tissue Value: Aerial
  misc_feature: MA Experiment 20000455 PARAMETER Experiment Name: At_100uM_ABA_P Parameter: Treatment Value: 100uM ABA vs. No Treatment
  misc_feature: MA Experiment ID: 20000794 Result: Down-regulated in Transcription
  misc_feature: MA Experiment 20000794 PARAMETER Experiment Name: At_Petals_P Parameter: Age (day) Value: 23-25 days
  misc_feature: MA Experiment 20000794 PARAMETER Experiment Name: At_Petals_P Parameter: Plant Line Value: WS
  misc_feature: MA Experiment 20000794 PARAMETER Experiment Name: At_Petals_P Parameter: Tissue Value: Petals vs. Whole plant
  misc_feature: MA Experiment ID: 20001248 Result: Up-regulated in Transcription
  misc_feature: MA Experiment 20001248 PARAMETER Experiment Name: At_Far-red-induction_P Parameter: Age (day) Value: 7
  misc_feature: MA Experiment 20001248 PARAMETER Experiment Name: At_Far-red-induction_P Parameter: Light Value: Far-red vs. White
  misc_feature: MA Experiment 20001248 PARAMETER Experiment Name: At_Far-red-induction_P Parameter: Organism Value: A. thaliana
  misc_feature: MA Experiment 20001248 PARAMETER Experiment Name: At_Far-red-induction_P Parameter: Plant Line Value: Columbia
  misc_feature: MA Experiment 20001248 PARAMETER Experiment Name: At_Far-red-induction_P Parameter: Timepoint (hr) Value: 4
  misc_feature: MA Experiment 20001248 PARAMETER Experiment Name: At_Far-red-induction_P Parameter: Tissue Value: Whole Plant
  misc_feature: MA Experiment ID: 20001554 Result: Down-regulated in Transcription
  misc_feature: MA Experiment 20001554 PARAMETER Experiment Name: At_Drought_Soil_Dry_P Parameter: Age (day) Value: 21
  misc_feature: MA Experiment 20001554 PARAMETER Experiment Name: At_Drought_Soil_Dry_P Parameter: Organism Value: A. thaliana
  misc_feature: MA Experiment 20001554 PARAMETER Experiment Name: At_Drought_Soil_Dry_P Parameter: Plant Line Value: WS
  misc_feature: MA Experiment 20001554 PARAMETER Experiment Name: At_Drought_Soil_Dry_P Parameter: Post Timepoint (hr) Value: None
  misc_feature: MA Experiment 20001554 PARAMETER Experiment Name: At_Drought_Soil_Dry_P Parameter: Post-Treatment Value: None
  misc_feature: MA Experiment 20001554 PARAMETER Experiment Name: At_Drought_Soil_Dry_P Parameter: Timepoint (day) Value: 7
  misc_feature: MA Experiment 20001554 PARAMETER Experiment Name: At_Drought_Soil_Dry_P Parameter: Treatment Value: Drought vs. No Drought
  misc_feature: MA Experiment ID: 20001555 Result: Down-regulated in Transcription
  misc_feature: MA Experiment 20001555 PARAMETER Experiment Name: At_Drought_Soil_Dry_P Parameter: Age (day) Value: 24
  misc_feature: MA Experiment 20001555 PARAMETER Experiment Name: At_Drought_Soil_Dry_P Parameter: Organism Value: A. thaliana
  misc_feature: MA Experiment 20001555 PARAMETER Experiment Name: At_Drought_Soil_Dry_P Parameter: Plant Line Value: WS
  misc_feature: MA Experiment 20001555 PARAMETER Experiment Name: At_Drought_Soil_Dry_P Parameter: Post Timepoint (hr) Value: None
  misc_feature: MA Experiment 20001555 PARAMETER Experiment Name: At_Drought_Soil_Dry_P Parameter: Post-Treatment Value: None
  misc_feature: MA Experiment 20001555 PARAMETER Experiment Name: At_Drought_Soil_Dry_P Parameter: Timepoint (day) Value: 10
  misc_feature: MA Experiment 20001555 PARAMETER Experiment Name: At_Drought_Soil_Dry_P Parameter: Treatment Value: Drought vs. No Drought
  misc_feature: MA Experiment ID: 20001556 Result: Down-regulated in Transcription
  misc_feature: MA Experiment 20001556 PARAMETER Experiment Name: At_Drought_Soil_Dry_P Parameter: Age (day) Value: 26
  misc_feature: MA Experiment 20001556 PARAMETER Experiment Name: At_Drought_Soil_Dry_P Parameter: Organism Value: A. thaliana
  misc_feature: MA Experiment 20001556 PARAMETER Experiment Name: At_Drought_Soil_Dry_P Parameter: Plant Line Value: WS
  misc_feature: MA Experiment 20001556 PARAMETER Experiment Name: At_Drought_Soil_Dry_P Parameter: Post Timepoint (hr) Value: None
  misc_feature: MA Experiment 20001556 PARAMETER Experiment Name: At_Drought_Soil_Dry_P Parameter: Post-Treatment Value: None
  misc_feature: MA Experiment 20001556 PARAMETER Experiment Name: At_Drought_Soil_Dry_P Parameter: Timepoint (day) Value: 12
  misc_feature: MA Experiment 20001556 PARAMETER Experiment Name: At_Drought_Soil_Dry_P Parameter: Treatment Value: Drought vs. No Drought
  misc_feature: MA Experiment ID: 20001757 Result: Up-regulated in Transcription
  misc_feature: MA Experiment 20001757 PARAMETER Experiment Name: At_50mM_NH4NO3_L-to-H_P Parameter: Timepoint (hr) Value: 6
  misc_feature: MA Experiment 20001757 PARAMETER Experiment Name: At_50mM_NH4NO3_L-to-H_P Parameter: Tissue Value: Leaf
  misc_feature: MA Experiment 20001757 PARAMETER Experiment Name: At_50mM_NH4NO3_L-to-H_P Parameter: Treatment Value: 50mM NH4NO3 vs 100mM Mannitol

SEQ ID NO: 94213 - protein, 354 aa, Arabidopsis thaliana; identical to SEQ ID NO: 90457
  peptide (1)..(354): Ceres Seq. ID no. 12724025
  misc_feature (49)..(300): Pfam Name: Peroxidase Pfam Description: Peroxidase
  misc_feature (1)..(354): Homolog of NCBI NO: 15229084 NR Description: peroxidase; protein id: At3g49110.1, supported by gi_15146325, supported by cDNA: gi_15450610 [Arabidopsis >gi|129815|sp|P24101|PE33_ARATH Peroxidase 33 precursor (Atperox
  misc_feature (1)..(354): Homolog of NCBI NO: 15229095 NR Description: peroxidase, putative; protein id: At3g49120.1, by cDNA: 39678., supported by cDNA: gi_11908065, supported by gi_12642879, supported by cDNA: gi_13265526, supported by cDNA:
  misc_feature (1)..(354): Homolog of NCBI NO: 480907 NR Description: peroxidase (EC 1.11.1.7) Cb - Arabidopsis
  misc_feature (5)..(354): Homolog of NCBI NO: 129814 NR Description: Peroxidase C1B precursor >gi|81666|pir||S00626
  misc_feature (1)..(354): Homolog of NCBI NO: 30690396 NR Description: peroxidase, putative [Arabidopsis thaliana] peroxidase [Arabidopsis thaliana] >gi|19347733|gb|AAL86292.1| protein [Arabidopsis thaliana] >gi|22136690|gb|AAM91664.1|
  misc_feature (1)..(354): Homolog of NCBI NO: 25453209 NR Description: Peroxidase 32 precursor (Atperox P32) (PRXR3) >gi|1402908|emb|CAA66959.1| peroxidase [Arabidopsis thaliana] peroxidase ATP16a [Arabidopsis thaliana]
  misc_feature (1)..(354): Homolog of NCBI NO: 129813 NR Description: PEROXIDASE C1A PRECURSOR >gi|2144377|pir||OPRHC
  misc_feature (1)..(354): Homolog of NCBI NO: 21592888 NR Description: peroxidase [Arabidopsis thaliana]
  misc_feature (1)..(354): Homolog of NCBI NO: 168241 NR Description: HRPC1
  misc_feature (23)..(354): Homolog of NCBI NO: 129816 NR Description: Peroxidase C1C precursor >gi|81668|pir||S00627

SEQ ID NO: 94214 - protein, 332 aa, Arabidopsis thaliana; identical to SEQ ID NO: 90458
  peptide (1)..(332): Ceres Seq. ID no. 12724026
  misc_feature (27)..(278): Pfam Name: Peroxidase Pfam Description: Peroxidase
  misc_feature (1)..(332): Homolog of NCBI NO: 15229084 NR Description: peroxidase; protein id: At3g49110.1, supported by gi_15146325, supported by cDNA: gi_15450610 [Arabidopsis >gi|129815|sp|P24101|PE33_ARATH Peroxidase 33 precursor (Atperox
  misc_feature (1)..(332): Homolog of NCBI NO: 15229095 NR Description: peroxidase, putative; protein id: At3g49120.1, by cDNA: 39678., supported by cDNA: gi_11908065, supported by gi_12642879, supported by cDNA: gi_13265526, supported by cDNA:
  misc_feature (1)..(332): Homolog of NCBI NO: 480907 NR Description: peroxidase (EC 1.11.1.7) Cb - Arabidopsis
  misc_feature (1)..(332): Homolog of NCBI NO: 129814 NR Description: Peroxidase C1B precursor >gi|81666|pir||S00626
  misc_feature (1)..(332): Homolog of NCBI NO: 30690396 NR Description: peroxidase, putative [Arabidopsis thaliana] peroxidase [Arabidopsis thaliana] >gi|19347733|gb|AAL86292.1| protein [Arabidopsis thaliana] >gi|22136690|gb|AAM91664.1|
  misc_feature (1)..(332): Homolog of NCBI NO: 25453209 NR Description: Peroxidase 32 precursor (Atperox P32) (PRXR3) >gi|1402908|emb|CAA66959.1| peroxidase [Arabidopsis thaliana] peroxidase ATP16a [Arabidopsis thaliana]
  misc_feature (1)..(332): Homolog of NCBI NO: 129813 NR Description: PEROXIDASE C1A PRECURSOR >gi|2144377|pir||OPRHC
  misc_feature (1)..(332): Homolog of NCBI NO: 21592888 NR Description: peroxidase [Arabidopsis thaliana]
  misc_feature (1)..(332): Homolog of NCBI NO: 168241 NR Description: HRPC1
  misc_feature (1)..(332): Homolog of NCBI NO: 129816 NR Description: Peroxidase C1C precursor >gi|81668|pir||S00627

SEQ ID NO: 94215 - protein, 241 aa, Arabidopsis thaliana; identical to SEQ ID NO: 90459
  peptide (1)..(241): Ceres Seq. ID no. 12724027
  misc_feature (1)..(187): Pfam Name: Peroxidase Pfam Description: Peroxidase
  misc_feature (1)..(241): Homolog of NCBI NO: 15229084 NR Description: peroxidase; protein id: At3g49110.1, supported by gi_15146325, supported by cDNA: gi_15450610 [Arabidopsis >gi|129815|sp|P24101|PE33_ARATH Peroxidase 33 precursor (Atperox
  misc_feature (1)..(241): Homolog of NCBI NO: 15229095 NR Description: peroxidase, putative; protein id: At3g49120.1, by cDNA: 39678., supported by cDNA: gi_11908065, supported by gi_12642879, supported by cDNA: gi_13265526, supported by cDNA:
  misc_feature (1)..(241): Homolog of NCBI NO: 480907 NR Description: peroxidase (EC 1.11.1.7) Cb - Arabidopsis
  misc_feature (1)..(241): Homolog of NCBI NO: 129814 NR Description: Peroxidase C1B precursor >gi|81666|pir||S00626
  misc_feature (1)..(241): Homolog of NCBI NO: 30690396 NR Description: peroxidase, putative [Arabidopsis thaliana] peroxidase [Arabidopsis thaliana] >gi|19347733|gb|AAL86292.1| protein [Arabidopsis thaliana] >gi|22136690|gb|AAM91664.1|
  misc_feature (1)..(241): Homolog of NCBI NO: 25453209 NR Description: Peroxidase 32 precursor (Atperox P32) (PRXR3) >gi|1402908|emb|CAA66959.1| peroxidase [Arabidopsis thaliana] peroxidase ATP16a [Arabidopsis thaliana]
  misc_feature (1)..(241): Homolog of NCBI NO: 129813 NR Description: PEROXIDASE C1A PRECURSOR >gi|2144377|pir||OPRHC
  misc_feature (1)..(241): Homolog of NCBI NO: 21592888 NR Description: peroxidase [Arabidopsis thaliana]
  misc_feature (1)..(241): Homolog of NCBI NO: 168241 NR Description: HRPC1
  misc_feature (1)..(241): Homolog of NCBI NO: 129816 NR Description: Peroxidase C1C precursor >gi|81668|pir||S00627

SEQ ID NO: 94216 - DNA, 1758 bp, Arabidopsis thaliana; identical to SEQ ID NO: 90460
  misc_feature (1)..(1758): Ceres Seq. ID no. 12724048
  misc_feature: MA Experiment ID: 20000184 Result: Up-regulated in Transcription
  misc_feature: MA Experiment 20000184 PARAMETER Experiment Name: At_Shoots__P Parameter: Age (day) Value: 7
  misc_feature: MA Experiment 20000184 PARAMETER Experiment Name: At_Shoots__P Parameter: Tissue Value: Shoots vs. Whole Plant

SEQ ID NO: 94217 - protein, 420 aa, Arabidopsis thaliana; identical to SEQ ID NO: 90461
  peptide (1)..(420): Ceres Seq. ID no. 12724049
  misc_feature (1)..(420): Homolog of NCBI NO: 18408807 NR Description: expressed protein; protein id: At3g49250.1, by cDNA: gi_15146293, supported by cDNA: gi_19699161 [Arabidopsis >gi|15146294|gb|AAK83630.1| AT3g49250/F2K15_110 [Arabidopsis
  misc_feature (73)..(414): Homolog of NCBI NO: 11285606 NR Description: hypothetical protein F2K15.110 - Arabidopsis >gi|6723395|emb|CAB66404.1| hypothetical protein [Arabidopsis
  misc_feature (1)..(170): Homolog of NCBI NO: 11285606 NR Description: hypothetical protein F2K15.110 - Arabidopsis >gi|6723395|emb|CAB66404.1| hypothetical protein [Arabidopsis
  misc_feature (87)..(238): Homolog of NCBI NO: 34904396 NR Description: unnamed protein product [Oryza sativa (japonica group)] >gi|7339694|dbj|BAA92899.1| unnamed protein product
  misc_feature (325)..(408): Homolog of NCBI NO: 34904396 NR Description: unnamed protein product [Oryza sativa (japonica group)] >gi|7339694|dbj|BAA92899.1| unnamed protein product
  misc_feature (71)..(402): Homolog of NCBI NO: 15237930 NR Description: putative protein; protein id: At5g24280.1 thaliana] >gi|10177088|dbj|BAB10394.1|
  misc_feature (225)..(394): Homolog of NCBI NO: 10177087 NR Description: contains similarity to En/Spm-like transposon
  misc_feature (20)..(188): Homolog of NCBI NO: 10177087 NR Description: contains similarity to En/Spm-like transposon

SEQ ID NO: 94218 - protein, 398 aa, Arabidopsis thaliana; identical to SEQ ID NO: 90462
  peptide (1)..(398): Ceres Seq. ID no. 12724050
  misc_feature (1)..(398): Homolog of NCBI NO: 18408807 NR Description: expressed protein; protein id: At3g49250.1, by cDNA: gi_15146293, supported by cDNA: gi_19699161 [Arabidopsis >gi|15146294|gb|AAK83630.1| AT3g49250/F2K15_110 [Arabidopsis
  misc_feature (51)..(392): Homolog of NCBI NO: 11285606 NR Description: hypothetical protein F2K15.110 - Arabidopsis >gi|6723395|emb|CAB66404.1| hypothetical protein [Arabidopsis
  misc_feature (1)..(148): Homolog of NCBI NO: 11285606 NR Description: hypothetical protein F2K15.110 - Arabidopsis >gi|6723395|emb|CAB66404.1| hypothetical protein [Arabidopsis
  misc_feature (65)..(216): Homolog of NCBI NO: 34904396 NR Description: unnamed protein product [Oryza sativa (japonica group)] >gi|7339694|dbj|BAA92899.1| unnamed protein product
  misc_feature (303)..(386): Homolog of NCBI NO: 34904396 NR Description: unnamed protein product [Oryza sativa (japonica group)] >gi|7339694|dbj|BAA92899.1| unnamed protein product
  misc_feature (49)..(380): Homolog of NCBI NO: 15237930 NR Description: putative protein; protein id: At5g24280.1 thaliana] >gi|10177088|dbj|BAB10394.1|
  misc_feature (203)..(372): Homolog of NCBI NO: 10177087 NR Description: contains similarity to En/Spm-like transposon
  misc_feature (1)..(166): Homolog of NCBI NO: 10177087 NR Description: contains similarity to En/Spm-like transposon

SEQ ID NO: 94219 - protein, 397 aa, Arabidopsis thaliana; identical to SEQ ID NO: 90463
  peptide (1)..(397): Ceres Seq. ID no. 12724051
  misc_feature (1)..(397): Homolog of NCBI NO: 18408807 NR Description: expressed protein; protein id: At3g49250.1, by cDNA: gi_15146293, supported by cDNA: gi_19699161 [Arabidopsis >gi|15146294|gb|AAK83630.1| AT3g49250/F2K15_110 [Arabidopsis
  misc_feature (50)..(391): Homolog of NCBI NO: 11285606 NR Description: hypothetical protein F2K15.110 - Arabidopsis >gi|6723395|emb|CAB66404.1| hypothetical protein [Arabidopsis
  misc_feature (1)..(147): Homolog of NCBI NO: 11285606 NR Description: hypothetical protein F2K15.110 - Arabidopsis >gi|6723395|emb|CAB66404.1| hypothetical protein [Arabidopsis
  misc_feature (64)..(215): Homolog of NCBI NO: 34904396 NR Description: unnamed protein product [Oryza sativa (japonica group)] >gi|7339694|dbj|BAA92899.1| unnamed protein product
  misc_feature (302)..(385): Homolog of NCBI NO: 34904396 NR Description: unnamed protein product [Oryza sativa (japonica group)] >gi|7339694|dbj|BAA92899.1| unnamed protein product
  misc_feature (48)..(379): Homolog of NCBI NO: 15237930 NR Description: putative protein; protein id: At5g24280.1 thaliana] >gi|10177088|dbj|BAB10394.1|
  misc_feature (202)..(371): Homolog of NCBI NO: 10177087 NR Description: contains similarity to En/Spm-like transposon
  misc_feature (1)..(165): Homolog of NCBI NO: 10177087 NR Description: contains similarity to En/Spm-like transposon

SEQ ID NO: 94220 - DNA, 939 bp, Arabidopsis thaliana; identical to SEQ ID NO: 90464
  misc_feature (1)..(939): Ceres Seq. ID no. 12724052
  misc_feature: MA Experiment ID: 20000328 Result: Down-regulated in Transcription
  misc_feature: MA Experiment 20000328 PARAMETER Experiment Name: At_42deg_Heat_Sub_P Parameter: Age (day) Value: 14
  misc_feature: MA Experiment 20000328 PARAMETER Experiment Name: At_42deg_Heat_Sub_P Parameter: Organism Value: A. thaliana
  misc_feature: MA Experiment 20000328 PARAMETER Experiment Name: At_42deg_Heat_Sub_P Parameter: Plant Line Value: WS
  misc_feature: MA Experiment 20000328 PARAMETER Experiment Name: At_42deg_Heat_Sub_P Parameter: Temperature (deg C) Value: 42 vs. 22
  misc_feature: MA Experiment 20000328 PARAMETER Experiment Name: At_42deg_Heat_Sub_P Parameter: Timepoint (hr) Value: 6
  misc_feature: MA Experiment 20000328 PARAMETER Experiment Name: At_42deg_Heat_Sub_P Parameter: Tissue Value: Aerial
  misc_feature: MA Experiment ID: 20000355 Result: Up-regulated in Transcription
  misc_feature: MA Experiment 20000355 PARAMETER Experiment Name: At_Siliques_Sub_P Parameter: Age (day) Value: 21
  misc_feature: MA Experiment 20000355 PARAMETER Experiment Name: At_Siliques_Sub_P Parameter: Organism Value: A. thaliana
  misc_feature: MA Experiment 20000355 PARAMETER Experiment Name: At_Siliques_Sub_P Parameter: Plant Line Value: WS
  misc_feature: MA Experiment 20000355 PARAMETER Experiment Name: At_Siliques_Sub_P Parameter: Tissue Value: Less Than 5mm Siliques vs. Whole Plant
  misc_feature: MA Experiment ID: 20000440 Result: Up-regulated in Transcription
  misc_feature: MA Experiment 20000440 PARAMETER Experiment Name: At_Closed-Flower__Sub_P Parameter: Tissue Value: Closed Flower vs. Whole Plant

SEQ ID NO: 94221 - protein, 312 aa, Arabidopsis thaliana; identical to SEQ ID NO: 90465
  peptide (1)..(312): Ceres Seq. ID no. 12724053
  misc_feature (1)..(312): Homolog of NCBI NO: 15229112 NR Description: putative protein; protein id: At3g49290.1
  misc_feature (1)..(312): Homolog of NCBI NO: 30689382 NR Description: expressed protein [Arabidopsis thaliana]
  misc_feature (1)..(312): Homolog of NCBI NO: 10177091 NR Description: emb|CAB66408.1~gene_id:MOP9.13~strong similarity
  misc_feature (136)..(312): Homolog of NCBI NO: 26451274 NR Description: unknown protein [Arabidopsis thaliana]
  misc_feature (3)..(140): Homolog of NCBI NO: 34913914 NR Description: OSJNBa0066C06.8 [Oryza sativa (japonica
  misc_feature (256)..(312): Homolog of NCBI NO: 34913914 NR Description: OSJNBa0066C06.8 [Oryza sativa (japonica
  misc_feature (5)..(265): Homolog of NCBI NO: 21618229 NR Description: unknown [Arabidopsis thaliana]
  misc_feature (5)..(265): Homolog of NCBI NO: 15238265 NR Description: putative protein; protein id: At5g42030.1, by cDNA: 106836. [Arabidopsis thaliana] emb|CAB66408.1~gene_id:MJC20.13~similar to unknown protein
  misc_feature (7)..(276): Homolog of NCBI NO: 34904432 NR Description: unnamed protein product [Oryza sativa (japonica group)] >gi|7339712|dbj|BAA92917.1| unnamed protein product
  misc_feature (7)..(301): Homolog of NCBI NO: 18407012 NR Description: expressed protein; protein id: At2g46225.1, by cDNA: 13319. [Arabidopsis thaliana] expressed protein [Arabidopsis thaliana]

SEQ ID NO: 94222 - protein, 298 aa, Arabidopsis thaliana; identical to SEQ ID NO: 90466
  peptide (1)..(298): Ceres Seq. ID no. 12724054
  misc_feature (1)..(298): Homolog of NCBI NO: 15229112 NR Description: putative protein; protein id: At3g49290.1
  misc_feature (1)..(298): Homolog of NCBI NO: 30689382 NR Description: expressed protein [Arabidopsis thaliana]
  misc_feature (1)..(298): Homolog of NCBI NO: 10177091 NR Description: emb|CAB66408.1~gene_id:MOP9.13~strong similarity
  misc_feature (122)..(298): Homolog of NCBI NO: 26451274 NR Description: unknown protein [Arabidopsis thaliana]
  misc_feature (1)..(126): Homolog of NCBI NO: 34913914 NR Description: OSJNBa0066C06.8 [Oryza sativa (japonica
  misc_feature (242)..(298): Homolog of NCBI NO: 34913914 NR Description: OSJNBa0066C06.8 [Oryza sativa (japonica
  misc_feature (1)..(251): Homolog of NCBI NO: 21618229 NR Description: unknown [Arabidopsis thaliana]
  misc_feature (1)..(251): Homolog of NCBI NO: 15238265 NR Description: putative protein; protein id: At5g42030.1, by cDNA: 106836. [Arabidopsis thaliana] emb|CAB66408.1~gene_id:MJC20.13~similar to unknown protein
  misc_feature (1)..(262): Homolog of NCBI NO: 34904432 NR Description: unnamed protein product [Oryza sativa (japonica group)] >gi|7339712|dbj|BAA92917.1| unnamed protein product
  misc_feature (1)..(287): Homolog of NCBI NO: 18407012 NR Description: expressed protein; protein id: At2g46225.1, by cDNA: 13319. [Arabidopsis thaliana] expressed protein [Arabidopsis thaliana]

SEQ ID NO: 94223 - protein, 294 aa, Arabidopsis thaliana; identical to SEQ ID NO: 90467
  peptide (1)..(294): Ceres Seq. ID no. 12724055
  misc_feature (1)..(294): Homolog of NCBI NO: 15229112 NR Description: putative protein; protein id: At3g49290.1
  misc_feature (1)..(294): Homolog of NCBI NO: 30689382 NR Description: expressed protein [Arabidopsis thaliana]
  misc_feature (1)..(294): Homolog of NCBI NO: 10177091 NR Description: emb|CAB66408.1~gene_id:MOP9.13~strong similarity
  misc_feature (118)..(294): Homolog of NCBI NO: 26451274 NR Description: unknown protein [Arabidopsis thaliana]
  misc_feature (1)..(122): Homolog of NCBI NO: 34913914 NR Description: OSJNBa0066C06.8 [Oryza sativa (japonica
  misc_feature (238)..(294): Homolog of NCBI NO: 34913914 NR Description: OSJNBa0066C06.8 [Oryza sativa (japonica
  misc_feature (1)..(247): Homolog of NCBI NO: 21618229 NR Description: unknown [Arabidopsis thaliana]
  misc_feature (1)..(247): Homolog of NCBI NO: 15238265 NR Description: putative protein; protein id: At5g42030.1, by cDNA: 106836. [Arabidopsis thaliana] emb|CAB66408.1~gene_id:MJC20.13~similar to unknown protein
  misc_feature (1)..(258): Homolog of NCBI NO: 34904432 NR Description: unnamed protein product [Oryza sativa (japonica group)] >gi|7339712|dbj|BAA92917.1| unnamed protein product
  misc_feature (1)..(283): Homolog of NCBI NO: 18407012 NR Description: expressed protein; protein id: At2g46225.1, by cDNA: 13319. [Arabidopsis thaliana] expressed protein [Arabidopsis thaliana]

SEQ ID NO: 94224 - DNA, 1026 bp, Arabidopsis thaliana; identical to SEQ ID NO: 90468
  misc_feature (1)..(1026): Ceres Seq. ID no. 12724060
  misc_feature: MA Experiment ID: 20000315 Result: Down-regulated in Transcription
  misc_feature: MA Experiment 20000315 PARAMETER Experiment Name: At_14day_Shoots-Roots_Sub_P Parameter: Age (day) Value: 14
  misc_feature: MA Experiment 20000315 PARAMETER Experiment Name: At_14day_Shoots-Roots_Sub_P Parameter: Organism Value: A. thaliana
  misc_feature: MA Experiment 20000315 PARAMETER Experiment Name: At_14day_Shoots-Roots_Sub_P Parameter: Plant Line Value: WS
  misc_feature: MA Experiment 20000315 PARAMETER Experiment Name: At_14day_Shoots-Roots_Sub_P Parameter: Tissue Value: Shoots vs. Whole Plant
  misc_feature: MA Experiment ID: 20000328 Result: Up-regulated in Transcription
  misc_feature: MA Experiment 20000328 PARAMETER Experiment Name: At_42deg_Heat_Sub_P Parameter: Age (day) Value: 14
  misc_feature: MA Experiment 20000328 PARAMETER Experiment Name: At_42deg_Heat_Sub_P Parameter: Organism Value: A. thaliana
  misc_feature: MA Experiment 20000328 PARAMETER Experiment Name: At_42deg_Heat_Sub_P Parameter: Plant Line Value: WS
  misc_feature: MA Experiment 20000328 PARAMETER Experiment Name: At_42deg_Heat_Sub_P Parameter: Temperature (deg C) Value: 42 vs. 22
  misc_feature: MA Experiment 20000328 PARAMETER Experiment Name: At_42deg_Heat_Sub_P Parameter: Timepoint (hr) Value: 6
  misc_feature: MA Experiment 20000328 PARAMETER Experiment Name: At_42deg_Heat_Sub_P Parameter: Tissue Value: Aerial
  misc_feature: MA Experiment ID: 20000355 Result: Down-regulated in Transcription
  misc_feature: MA Experiment 20000355 PARAMETER Experiment Name: At_Siliques_Sub_P Parameter: Age (day) Value: 21
  misc_feature: MA Experiment 20000355 PARAMETER Experiment Name: At_Siliques_Sub_P Parameter: Organism Value: A. thaliana
  misc_feature: MA Experiment 20000355 PARAMETER Experiment Name: At_Siliques_Sub_P Parameter: Plant Line Value: WS
  misc_feature: MA Experiment 20000355 PARAMETER Experiment Name: At_Siliques_Sub_P Parameter: Tissue Value: Less Than 5mm Siliques vs. Whole Plant
  misc_feature: MA Experiment ID: 20000440 Result: Down-regulated in Transcription
  misc_feature: MA Experiment 20000440 PARAMETER Experiment Name: At_Closed-Flower__Sub_P Parameter: Tissue Value: Closed Flower vs. Whole Plant

SEQ ID NO: 94225 - protein, 341 aa, Arabidopsis thaliana; identical to SEQ ID NO: 90469
  peptide (1)..(341): Ceres Seq. ID no. 12724061
  misc_feature (127)..(340): Pfam Name: Papain family cysteine protease Pfam Description: Papain family cysteine protease
  misc_feature (1)..(341): Homolog of NCBI NO: 18408828 NR Description: cysteine protease; protein id: At3g49340.1
  misc_feature (1)..(341): Homolog of NCBI NO: 18401420 NR Description: cysteine proteinase; protein id: At2g27420.1, by cDNA: gi_17381153, supported by cDNA: gi_20465848 [Arabidopsis >gi|25289995|pir||F84672 probable cysteine proteinase cysteine
  misc_feature (4)..(341): Homolog of NCBI NO: 18403438 NR Description: cysteine proteinase; protein id: At2g34080.1
  misc_feature (1)..(341): Homolog of NCBI NO: 30690594 NR Description: cysteine proteinase [Arabidopsis thaliana]
  misc_feature (13)..(341): Homolog of NCBI NO: 25289991 NR Description: cysteine proteinase (EC 3.4.22.-) [similarity] - thaliana >gi|9502421|gb|AAF88120.1|AC021043_13 Putative cysteine
  misc_feature (8)..(341): Homolog of NCBI NO: 18396939 NR Description: cysteine protease; protein id: At1g29080.1
  misc_feature (8)..(341): Homolog of NCBI NO: 13491750 NR Description: cysteine protease [Ipomoea batatas]
  misc_feature (8)..(341): Homolog of NCBI NO: 24285904 NR Description: cysteine proteinase precursor [Ipomoea batatas]
  misc_feature (8)..(341): Homolog of NCBI NO: 535454 NR Description: cysteine proteinase
  misc_feature (20)..(341): Homolog of NCBI NO: 34329348 NR Description: putative cysteine proteinase [Medicago truncatula]

SEQ ID NO: 94226 - protein, 303 aa, Arabidopsis thaliana; identical to SEQ ID NO: 90470
  peptide (1)..(303): Ceres Seq. ID no. 12724062
  misc_feature (89)..(302): Pfam Name: Papain family cysteine protease Pfam Description: Papain family cysteine protease
  misc_feature (1)..(303): Homolog of NCBI NO: 18408828 NR Description: cysteine protease; protein id: At3g49340.1
  misc_feature (1)..(303): Homolog of NCBI NO: 18401420 NR Description: cysteine proteinase; protein id: At2g27420.1, by cDNA: gi_17381153, supported by cDNA: gi_20465848 [Arabidopsis >gi|25289995|pir||F84672 probable cysteine proteinase cysteine
  misc_feature (1)..(303): Homolog of NCBI NO: 18403438 NR Description: cysteine proteinase; protein id: At2g34080.1
  misc_feature (1)..(303): Homolog of NCBI NO: 30690594 NR Description: cysteine proteinase [Arabidopsis thaliana]
  misc_feature (1)..(303): Homolog of NCBI NO: 25289991 NR Description: cysteine proteinase (EC 3.4.22.-) [similarity] - thaliana >gi|9502421|gb|AAF88120.1|AC021043_13 Putative cysteine
  misc_feature (1)..(303): Homolog of NCBI NO: 18396939 NR Description: cysteine protease; protein id: At1g29080.1
  misc_feature (1)..(303): Homolog of NCBI NO: 13491750 NR Description: cysteine protease [Ipomoea batatas]
  misc_feature (1)..(303): Homolog of NCBI NO: 24285904 NR Description: cysteine proteinase precursor [Ipomoea batatas]
  misc_feature (1)..(303): Homolog of NCBI NO: 535454 NR Description: cysteine proteinase
  misc_feature (1)..(303): Homolog of NCBI NO: 34329348 NR Description: putative cysteine proteinase [Medicago truncatula]

SEQ ID NO: 94227 - protein, 271 aa, Arabidopsis thaliana; identical to SEQ ID NO: 90471
  peptide (1)..(271): Ceres Seq. ID no. 12724063
  misc_feature (57)..(270): Pfam Name: Papain family cysteine protease Pfam Description: Papain family cysteine protease
  misc_feature (1)..(271): Homolog of NCBI NO: 18408828 NR Description: cysteine protease; protein id: At3g49340.1
  misc_feature (1)..(271): Homolog of NCBI NO: 18401420 NR Description: cysteine proteinase; protein id: At2g27420.1, by cDNA: gi_17381153, supported by cDNA: gi_20465848 [Arabidopsis >gi|25289995|pir||F84672 probable cysteine proteinase cysteine
  misc_feature (1)..(271): Homolog of NCBI NO: 18403438 NR Description: cysteine proteinase; protein id: At2g34080.1
  misc_feature (1)..(271): Homolog of NCBI NO: 30690594 NR Description: cysteine proteinase [Arabidopsis thaliana]
  misc_feature (1)..(271): Homolog of NCBI NO: 25289991 NR Description: cysteine proteinase (EC 3.4.22.-) [similarity] - thaliana >gi|9502421|gb|AAF88120.1|AC021043_13 Putative cysteine
  misc_feature (1)..(271): Homolog of NCBI NO: 18396939 NR Description: cysteine protease; protein id: At1g29080.1
  misc_feature (1)..(271): Homolog of NCBI NO: 13491750 NR Description: cysteine protease [Ipomoea batatas]
  misc_feature (1)..(271): Homolog of NCBI NO: 24285904 NR Description: cysteine proteinase precursor [Ipomoea batatas]
  misc_feature (1)..(271): Homolog of NCBI NO: 535454 NR Description: cysteine proteinase
  misc_feature (1)..(271): Homolog of NCBI NO: 34329348 NR Description: putative cysteine proteinase [Medicago truncatula]

SEQ ID NO: 94228 - DNA, 1785 bp, Arabidopsis thaliana; identical to SEQ ID NO: 90472
  misc_feature (1)..(1785): Ceres Seq. ID no. 12724064
  misc_feature: MA Experiment ID: 20000307 Result: Up-regulated in Transcription
  misc_feature: MA Experiment 20000307 PARAMETER Experiment Name: At_Germinating_Seeds_Sub_P Parameter: Age (hr) Value: 24 vs. 0
  misc_feature: MA Experiment 20000307 PARAMETER Experiment Name: At_Germinating_Seeds_Sub_P Parameter: Organism Value: A. thaliana
  misc_feature: MA Experiment 20000307 PARAMETER Experiment Name: At_Germinating_Seeds_Sub_P Parameter: Plant Line Value: WS
  misc_feature: MA Experiment 20000307 PARAMETER Experiment Name: At_Germinating_Seeds_Sub_P Parameter: Tissue Value: Germinating Seeds
  misc_feature: MA Experiment ID: 20000314 Result: Up-regulated in Transcription
  misc_feature: MA Experiment 20000314 PARAMETER Experiment Name: At_14day_Shoots-Roots_Sub_P Parameter: Age (day) Value: 14
  misc_feature: MA Experiment 20000314 PARAMETER Experiment Name: At_14day_Shoots-Roots_Sub_P Parameter: Organism Value: A. thaliana
  misc_feature: MA Experiment 20000314 PARAMETER Experiment Name: At_14day_Shoots-Roots_Sub_P Parameter: Plant Line Value: WS
  misc_feature: MA Experiment 20000314 PARAMETER Experiment Name: At_14day_Shoots-Roots_Sub_P Parameter: Tissue Value: Roots vs. Whole Plant
  misc_feature: MA Experiment ID: 20000315 Result: Down-regulated in Transcription
  misc_feature: MA Experiment 20000315 PARAMETER Experiment Name: At_14day_Shoots-Roots_Sub_P Parameter: Age (day) Value: 14
  misc_feature: MA Experiment 20000315 PARAMETER Experiment Name: At_14day_Shoots-Roots_Sub_P Parameter: Organism Value: A. thaliana
  misc_feature: MA Experiment 20000315 PARAMETER Experiment Name: At_14day_Shoots-Roots_Sub_P Parameter: Plant Line Value: WS
  misc_feature: MA Experiment 20000315 PARAMETER Experiment Name: At_14day_Shoots-Roots_Sub_P Parameter: Tissue Value: Shoots vs. Whole Plant
  misc_feature: MA Experiment ID: 20000328 Result: Down-regulated in Transcription
  misc_feature: MA Experiment 20000328 PARAMETER Experiment Name: At_42deg_Heat_Sub_P Parameter: Age (day) Value: 14
  misc_feature: MA Experiment 20000328 PARAMETER Experiment Name: At_42deg_Heat_Sub_P Parameter: Organism Value: A. thaliana
  misc_feature: MA Experiment 20000328 PARAMETER Experiment Name: At_42deg_Heat_Sub_P Parameter: Plant Line Value: WS
  misc_feature: MA Experiment 20000328 PARAMETER Experiment Name: At_42deg_Heat_Sub_P Parameter: Temperature (deg C) Value: 42 vs. 22
  misc_feature: MA Experiment 20000328 PARAMETER Experiment Name: At_42deg_Heat_Sub_P Parameter: Timepoint (hr) Value: 6
  misc_feature: MA Experiment 20000328 PARAMETER Experiment Name: At_42deg_Heat_Sub_P Parameter: Tissue Value: Aerial

SEQ ID NO: 94229 - protein, 594 aa, Arabidopsis thaliana; identical to SEQ ID NO: 90473
  peptide (1)..(594): Ceres Seq. ID no. 12724065
  misc_feature (142)..(404): Pfam Name: Protein kinase domain Pfam Description: Protein kinase domain
  misc_feature (1)..(594): Homolog of NCBI NO: 16904222 NR Description: calcium/calmodulin-dependent protein kinase CaMK1
  misc_feature (48)..(594): Homolog of NCBI NO: 19547871 NR Description: serine/threonine protein kinase pk23
  misc_feature (166)..(592): Homolog of NCBI NO: 30689449 NR Description: calcium-dependent protein kinase, putative (CDPK)
  misc_feature (166)..(592): Homolog of NCBI NO: 22136058 NR Description: calcium dependent protein kinase-like protein
  misc_feature (141)..(592): Homolog of NCBI NO: 4741927 NR Description: calcium dependent protein kinase CP4 [Arabidopsis
  misc_feature (1)..(591): Homolog of NCBI NO: 7446431 NR Description: calcium-dependent protein kinase-related protein
  misc_feature (32)..(591): Homolog of NCBI NO: 7446432 NR Description: calcium/calmodulin-dependent protein kinase
  misc_feature (1)..(591): Homolog of NCBI NO: 9858873 NR Description: calcium/calmodulin dependent protein kinase MCK2
  misc_feature (1)..(592): Homolog of NCBI NO: 18087555 NR Description: At2g46700/T3A4.8 [Arabidopsis thaliana]
  misc_feature (45)..(591): Homolog of NCBI NO: 37535966 NR Description: putative kinase [Oryza sativa (japonica

SEQ ID NO: 94230 - protein, 502 aa, Arabidopsis thaliana; identical to SEQ ID NO: 90474
  peptide (1)..(502): Ceres Seq. ID no. 12724066
  misc_feature (50)..(312): Pfam Name: Protein kinase domain Pfam Description: Protein kinase domain
  misc_feature (1)..(502): Homolog of NCBI NO: 16904222 NR Description: calcium/calmodulin-dependent protein kinase CaMK1
  misc_feature (1)..(502): Homolog of NCBI NO: 19547871 NR Description: serine/threonine protein kinase pk23
  misc_feature (74)..(500): Homolog of NCBI NO: 30689449 NR Description: calcium-dependent protein kinase, putative (CDPK)
  misc_feature (74)..(500): Homolog of NCBI NO: 22136058 NR Description: calcium dependent protein kinase-like protein
  misc_feature (49)..(500): Homolog of NCBI NO: 4741927 NR Description: calcium dependent protein kinase CP4 [Arabidopsis
  misc_feature (1)..(499): Homolog of NCBI NO: 7446431 NR Description: calcium-dependent protein kinase-related protein
  misc_feature (1)..(499): Homolog of NCBI NO: 7446432 NR Description: calcium/calmodulin-dependent protein kinase
  misc_feature (1)..(499): Homolog of NCBI NO: 9858873 NR Description: calcium/calmodulin dependent protein kinase MCK2
  misc_feature (1)..(500): Homolog of NCBI NO: 18087555 NR Description: At2g46700/T3A4.8 [Arabidopsis thaliana]
  misc_feature (1)..(499): Homolog of NCBI NO: 37535966 NR Description: putative kinase [Oryza sativa (japonica

SEQ ID NO: 94231 - protein, 414 aa, Arabidopsis thaliana; identical to SEQ ID NO: 90475
  peptide (1)..(414): Ceres Seq. ID no. 12724067
  misc_feature (1)..(224): Pfam Name: Protein kinase domain Pfam Description: Protein kinase domain
  misc_feature (1)..(414): Homolog of NCBI NO: 16904222 NR Description: calcium/calmodulin-dependent protein kinase CaMK1
  misc_feature (1)..(414): Homolog of NCBI NO: 19547871 NR Description: serine/threonine protein kinase pk23
  misc_feature (1)..(412): Homolog of NCBI NO: 30689449 NR Description: calcium-dependent protein kinase, putative (CDPK)
  misc_feature (1)..(412): Homolog of NCBI NO: 22136058 NR Description: calcium dependent protein kinase-like protein
  misc_feature (1)..(412): Homolog of NCBI NO: 4741927 NR Description: calcium dependent protein kinase CP4 [Arabidopsis
  misc_feature (1)..(411): Homolog of NCBI NO: 7446431 NR Description: calcium-dependent protein kinase-related protein
  misc_feature (1)..(411): Homolog of NCBI NO: 7446432 NR Description: calcium/calmodulin-dependent protein kinase
  misc_feature (1)..(411): Homolog of NCBI NO: 9858873 NR Description: calcium/calmodulin dependent protein kinase MCK2
  misc_feature (1)..(412): Homolog of NCBI NO: 18087555 NR Description: At2g46700/T3A4.8 [Arabidopsis thaliana]
  misc_feature (1)..(411): Homolog of NCBI NO: 37535966 NR Description: putative kinase [Oryza sativa (japonica

SEQ ID NO: 94232 - DNA, 1026 bp, Arabidopsis thaliana; identical to SEQ ID NO: 90476
  misc_feature (1)..(1026): Ceres Seq. ID no. 12724068
  misc_feature: MA Experiment ID: 20001557 Result: Up-regulated in Transcription
  misc_feature: MA Experiment 20001557 PARAMETER Experiment Name: At_Drought_Soil_Dry_P Parameter: Age (day) Value: 27
  misc_feature: MA Experiment 20001557 PARAMETER Experiment Name: At_Drought_Soil_Dry_P Parameter: Organism Value: A. thaliana
  misc_feature: MA Experiment 20001557 PARAMETER Experiment Name: At_Drought_Soil_Dry_P Parameter: Plant Line Value: WS
  misc_feature: MA Experiment 20001557 PARAMETER Experiment Name: At_Drought_Soil_Dry_P Parameter: Post Timepoint (hr) Value: 3
  misc_feature: MA Experiment 20001557 PARAMETER Experiment Name: At_Drought_Soil_Dry_P Parameter: Post-Treatment Value: Re-Water vs. No Drought
  misc_feature: MA Experiment 20001557 PARAMETER Experiment Name: At_Drought_Soil_Dry_P Parameter: Timepoint (day) Value: 13
  misc_feature: MA Experiment 20001557 PARAMETER Experiment Name: At_Drought_Soil_Dry_P Parameter: Treatment Value: Drought vs. No Drought
  misc_feature: MA Experiment ID: 20001757 Result: Up-regulated in Transcription
  misc_feature: MA Experiment 20001757 PARAMETER Experiment Name: At_50mM_NH4NO3_L-to-H_P Parameter: Timepoint (hr) Value: 6
  misc_feature: MA Experiment 20001757 PARAMETER Experiment Name: At_50mM_NH4NO3_L-to-H_P Parameter: Tissue Value: Leaf
  misc_feature: MA Experiment 20001757 PARAMETER Experiment Name: At_50mM_NH4NO3_L-to-H_P Parameter: Treatment Value: 50mM NH4NO3 vs 100mM Mannitol

SEQ ID NO: 94233 - protein, 341 aa, Arabidopsis thaliana; identical to SEQ ID NO: 90477
  peptide (1)..(341): Ceres Seq. ID no. 12724069
  misc_feature (9)..(77): Pfam Name: RNA recognition motif. (a.k.a. RRM, RBD, or RNP domain) Pfam Description: RNA recognition motif. (a.k.a. RRM, RBD, or RNP
  misc_feature (1)..(341): Homolog of NCBI NO: 22331714 NR Description: arginine/serine-rich splicing factor (atSRp34),
  misc_feature (1)..(272): Homolog of NCBI NO: 12324445 NR Description: putative splicing factor; 53460-55514
  misc_feature (1)..(179): Homolog of NCBI NO: 11346384 NR Description: PRE-MRNA SPLICING FACTOR SF2-like protein -
  misc_feature (1)..(272): Homolog of NCBI NO: 30678391 NR Description: pre-mRNA splicing factor SF2 (SR1 protein)
  misc_feature (1)..(272): Homolog of NCBI NO: 5815235 NR Description: splicing factor SR1 [Arabidopsis thaliana]
  misc_feature (1)..(264): Homolog of NCBI NO: 2443473 NR Description: ASF/SF2 homolog [Arabidopsis thaliana]
  misc_feature (1)..(264): Homolog of NCBI NO: 30678395 NR Description: pre-mRNA splicing factor SF2 (SR1 protein)
  misc_feature (1)..(264): Homolog of NCBI NO: 5815236 NR Description: splicing factor SR1B [Arabidopsis thaliana]
  misc_feature (1)..(264): Homolog of NCBI NO: 5815237 NR Description: splicing factor SR1C [Arabidopsis thaliana]
  misc_feature (1)..(270): Homolog of NCBI NO: 30679143 NR Description: arginine/serine-rich splicing factor (atSRp34),

SEQ ID NO: 94234 - protein, 200 aa, Arabidopsis thaliana; identical to SEQ ID NO: 90478
  peptide (1)..(200): Ceres Seq. ID no. 12724070
  misc_feature (1)..(200): Homolog of NCBI NO: 22331714 NR Description: arginine/serine-rich splicing factor (atSRp34),
  misc_feature (1)..(131): Homolog of NCBI NO: 12324445 NR Description: putative splicing factor; 53460-55514
  misc_feature (1)..(38): Homolog of NCBI NO: 11346384 NR Description: PRE-MRNA SPLICING FACTOR SF2-like protein -
  misc_feature (1)..(131): Homolog of NCBI NO: 30678391 NR Description: pre-mRNA splicing factor SF2 (SR1 protein)
  misc_feature (1)..(131): Homolog of NCBI NO: 5815235 NR Description: splicing factor SR1 [Arabidopsis thaliana]
  misc_feature (1)..(123): Homolog of NCBI NO: 2443473 NR Description: ASF/SF2 homolog [Arabidopsis thaliana]
  misc_feature (1)..(123): Homolog of NCBI NO: 30678395 NR Description: pre-mRNA splicing factor SF2 (SR1 protein)
  misc_feature (1)..(123): Homolog of NCBI NO: 5815236 NR Description: splicing factor SR1B [Arabidopsis thaliana]
  misc_feature (1)..(123): Homolog of NCBI NO: 5815237 NR Description: splicing factor SR1C [Arabidopsis thaliana]
  misc_feature (1)..(129): Homolog of NCBI NO: 30679143 NR Description: arginine/serine-rich splicing factor (atSRp34),

SEQ ID NO: 94235 - protein, 170 aa, Arabidopsis thaliana; identical to SEQ ID NO: 90479
  peptide (1)..(170): Ceres Seq. ID no. 12724071
  misc_feature (1)..(170): Homolog of NCBI NO: 22331714 NR Description: arginine/serine-rich splicing factor (atSRp34),
  misc_feature (1)..(101): Homolog of NCBI NO: 12324445 NR Description: putative splicing factor; 53460-55514
  misc_feature (1)..(101): Homolog of NCBI NO: 30678391 NR Description: pre-mRNA splicing factor SF2 (SR1 protein)
  misc_feature (1)..(101): Homolog of NCBI NO: 5815235 NR Description: splicing factor SR1 [Arabidopsis thaliana]
  misc_feature (1)..(93): Homolog of NCBI NO: 2443473 NR Description: ASF/SF2 homolog [Arabidopsis thaliana]
  misc_feature (1)..(93): Homolog of NCBI NO: 30678395 NR Description: pre-mRNA splicing factor SF2 (SR1 protein)
  misc_feature (1)..(93): Homolog of NCBI NO: 5815236 NR Description: splicing factor SR1B [Arabidopsis thaliana]
  misc_feature (1)..(93): Homolog of NCBI NO: 5815237 NR Description: splicing factor SR1C [Arabidopsis thaliana]
  misc_feature (1)..(99): Homolog of NCBI NO: 30679143 NR Description: arginine/serine-rich splicing factor (atSRp34),
  misc_feature (1)..(101): Homolog of NCBI NO: 33146854 NR Description: putative pre-mRNA splicing factor SF2 [Oryza

SEQ ID NO: 94236 - DNA, 1799 bp, Arabidopsis thaliana; identical to SEQ ID NO: 90480
  misc_feature (1)..(1799): Ceres Seq. ID no. 12724084
  misc_feature: MA Experiment ID: 20000314 Result: Down-regulated in Transcription
  misc_feature: MA Experiment 20000314 PARAMETER Experiment Name: At_14day_Shoots-Roots_Sub_P Parameter: Age (day) Value: 14
  misc_feature: MA Experiment 20000314 PARAMETER Experiment Name: At_14day_Shoots-Roots_Sub_P Parameter: Organism Value: A. thaliana
  misc_feature: MA Experiment 20000314 PARAMETER Experiment Name: At_14day_Shoots-Roots_Sub_P Parameter: Plant Line Value: WS
  misc_feature: MA Experiment 20000314 PARAMETER Experiment Name: At_14day_Shoots-Roots_Sub_P Parameter: Tissue Value: Roots vs. Whole Plant
  misc_feature: MA Experiment ID: 20000315 Result: Down-regulated in Transcription
  misc_feature: MA Experiment 20000315 PARAMETER Experiment Name: At_14day_Shoots-Roots_Sub_P Parameter: Age (day) Value: 14
  misc_feature: MA Experiment 20000315 PARAMETER Experiment Name: At_14day_Shoots-Roots_Sub_P Parameter: Organism Value: A. thaliana
  misc_feature: MA Experiment 20000315 PARAMETER Experiment Name: At_14day_Shoots-Roots_Sub_P Parameter: Plant Line Value: WS
  misc_feature: MA Experiment 20000315 PARAMETER Experiment Name: At_14day_Shoots-Roots_Sub_P Parameter: Tissue Value: Shoots vs. Whole Plant
  misc_feature: MA Experiment ID: 20000346 Result: Up-regulated in Transcription
  misc_feature: MA Experiment 20000346 PARAMETER Experiment Name: At_2mM_SA_Sub_P Parameter: Age (day) Value: 14
  misc_feature: MA Experiment 20000346 PARAMETER Experiment Name: At_2mM_SA_Sub_P Parameter: Organism Value: A. thaliana
  misc_feature: MA Experiment 20000346 PARAMETER Experiment Name: At_2mM_SA_Sub_P Parameter: Plant Line Value: WS
  misc_feature: MA Experiment 20000346 PARAMETER Experiment Name: At_2mM_SA_Sub_P Parameter: Timepoint (hr) Value: 1
  misc_feature: MA Experiment 20000346 PARAMETER Experiment Name: At_2mM_SA_Sub_P Parameter: Tissue Value: Aerial
  misc_feature: MA Experiment 20000346 PARAMETER Experiment Name: At_2mM_SA_Sub_P Parameter: Treatment Value: 2mM SA vs. No Treatment
  misc_feature: MA Experiment ID: 20000347 Result: Up-regulated in Transcription
  misc_feature: MA Experiment 20000347 PARAMETER Experiment Name: At_2mM_SA_Sub_P Parameter: Age (day) Value: 14
  misc_feature: MA Experiment 20000347 PARAMETER Experiment Name: At_2mM_SA_Sub_P Parameter: Organism Value: A. thaliana
  misc_feature: MA Experiment 20000347 PARAMETER Experiment Name: At_2mM_SA_Sub_P Parameter: Plant Line Value: WS
  misc_feature: MA Experiment 20000347 PARAMETER Experiment Name: At_2mM_SA_Sub_P Parameter: Timepoint (hr) Value: 6
  misc_feature: MA Experiment 20000347 PARAMETER Experiment Name: At_2mM_SA_Sub_P Parameter: Tissue Value: Aerial
  misc_feature: MA Experiment 20000347 PARAMETER Experiment Name: At_2mM_SA_Sub_P Parameter: Treatment Value: 2mM SA vs. No Treatment
  misc_feature: MA Experiment ID: 20000355 Result: Down-regulated in Transcription
  misc_feature: MA Experiment 20000355 PARAMETER Experiment Name: At_Siliques_Sub_P Parameter: Age (day) Value: 21
  misc_feature: MA Experiment 20000355 PARAMETER Experiment Name: At_Siliques_Sub_P Parameter: Organism Value: A. thaliana
  misc_feature: MA Experiment 20000355 PARAMETER Experiment Name: At_Siliques_Sub_P Parameter: Plant Line Value: WS
  misc_feature: MA Experiment 20000355 PARAMETER Experiment Name: At_Siliques_Sub_P Parameter: Tissue Value: Less Than 5mm Siliques vs. Whole Plant
  misc_feature: MA Experiment ID: 20000440 Result: Down-regulated in Transcription
  misc_feature: MA Experiment 20000440 PARAMETER Experiment Name: At_Closed-Flower__Sub_P Parameter: Tissue Value: Closed Flower vs. Whole Plant
  misc_feature: MA Experiment ID: 20000634 Result: Up-regulated in Transcription
  misc_feature: MA Experiment 20000634 PARAMETER Experiment Name: At_10percent_PEG_Sub_P Parameter: Age (day) Value: 12
  misc_feature: MA Experiment 20000634 PARAMETER Experiment Name: At_10percent_PEG_Sub_P Parameter: Organism Value: A. thaliana
  misc_feature: MA Experiment 20000634 PARAMETER Experiment Name: At_10percent_PEG_Sub_P Parameter: Plant Line Value: WS
  misc_feature: MA Experiment 20000634 PARAMETER Experiment Name: At_10percent_PEG_Sub_P Parameter: Timepoint (day) Value: 12
  misc_feature: MA Experiment 20000634 PARAMETER Experiment Name: At_10percent_PEG_Sub_P Parameter: Tissue Value: Whole Plant
  misc_feature: MA Experiment 20000634 PARAMETER Experiment Name: At_10percent_PEG_Sub_P Parameter: Treatment Value: 10% PEG vs. No Treatment

SEQ ID NO: 94237 - protein, 469 aa, Arabidopsis thaliana; identical to SEQ ID NO: 90481
  peptide (1)..(469): Ceres Seq. ID no. 12724085
  misc_feature (13)..(142): Pfam Name: No apical meristem (NAM) protein Pfam Description: No apical meristem (NAM) protein
  misc_feature (1)..(469): Homolog of NCBI NO: 15229161 NR Description: NAC2-like protein; protein id: At3g49530.1,
  misc_feature (1)..(459): Homolog of NCBI NO: 30689531 NR Description: No apical meristem (NAM) protein family thaliana] >gi|9408601|gb|AAF87300.1|AF281062_1 TIP [Arabidopsis
  misc_feature (10)..(244): Homolog of NCBI NO: 21358787 NR Description: nam-like protein 1 [Petunia x hybrida]
  misc_feature (220)..(391): Homolog of NCBI NO: 21358787 NR Description: nam-like protein 1 [Petunia x hybrida]
  misc_feature (8)..(233): Homolog of NCBI NO: 7486659 NR Description: hypothetical protein F8D20.90 - Arabidopsis
  misc_feature (7)..(164): Homolog of NCBI NO: 6910587 NR Description: CDS [Arabidopsis thaliana]
  misc_feature (7)..(164): Homolog of NCBI NO: 30692812 NR Description: No apical meristem (NAM) protein family
  misc_feature (12)..(222): Homolog of NCBI NO: 21105751 NR Description: nam-like protein 11 [Petunia x hybrida]
  misc_feature (13)..(302): Homolog of NCBI NO: 15237469 NR Description: NAM-like; protein id: At5g46590.1 [Arabidopsis
  misc_feature (12)..(257): Homolog of NCBI NO: 15218843 NR Description: jasmonic acid, putative; protein id: At1g65910.1

SEQ ID NO: 94238 - protein, 460 aa, Arabidopsis thaliana; identical to SEQ ID NO: 90482
  peptide (1)..(460): Ceres Seq. ID no. 12724086
  misc_feature (4)..(133): Pfam Name: No apical meristem (NAM) protein Pfam Description: No apical meristem (NAM) protein
  misc_feature (1)..(460): Homolog of NCBI NO: 15229161 NR Description: NAC2-like protein; protein id: At3g49530.1,
  misc_feature (1)..(450): Homolog of NCBI NO: 30689531 NR Description: No apical meristem (NAM) protein family thaliana] >gi|9408601|gb|AAF87300.1|AF281062_1 TIP [Arabidopsis
  misc_feature (1)..(235): Homolog of NCBI NO: 21358787 NR Description: nam-like protein 1 [Petunia x hybrida]
  misc_feature (211)..(382): Homolog of NCBI NO: 21358787 NR Description: nam-like protein 1 [Petunia x hybrida]
  misc_feature (1)..(224): Homolog of NCBI NO: 7486659 NR Description: hypothetical protein F8D20.90 - Arabidopsis
  misc_feature (1)..(155): Homolog of NCBI NO: 6910587 NR Description: CDS [Arabidopsis thaliana]
  misc_feature (1)..(155): Homolog of NCBI NO: 30692812 NR Description: No apical meristem (NAM) protein family
  misc_feature (3)..(213): Homolog of NCBI NO: 21105751 NR Description: nam-like protein 11 [Petunia x hybrida]
  misc_feature (4)..(293): Homolog of NCBI NO: 15237469 NR Description: NAM-like; protein id: At5g46590.1 [Arabidopsis
  misc_feature (3)..(248): Homolog of NCBI NO: 15218843 NR Description: jasmonic acid, putative; protein id: At1g65910.1

SEQ ID NO: 94239 - DNA, 2442 bp, Arabidopsis thaliana; identical to SEQ ID NO: 90483
  misc_feature (1)..(2442): Ceres Seq. ID no. 12724098
  misc_feature: MA Experiment ID: 20000171 Result: Up-regulated in Transcription
  misc_feature: MA Experiment 20000171 PARAMETER Experiment Name: At_42deg_Heat_P Parameter: Age (day) Value: 14
  misc_feature: MA Experiment 20000171 PARAMETER Experiment Name: At_42deg_Heat_P Parameter: Organism Value: A. thaliana
  misc_feature: MA Experiment 20000171 PARAMETER Experiment Name: At_42deg_Heat_P Parameter: Plant Line Value: WS
  misc_feature: MA Experiment 20000171 PARAMETER Experiment Name: At_42deg_Heat_P Parameter: Temperature (deg C) Value: 42 vs. 22
  misc_feature: MA Experiment 20000171 PARAMETER Experiment Name: At_42deg_Heat_P Parameter: Timepoint (hr) Value: 1
  misc_feature: MA Experiment 20000171 PARAMETER Experiment Name: At_42deg_Heat_P Parameter: Tissue Value: Aerial
  misc_feature: MA Experiment ID: 20000286 Result: Down-regulated in Transcription
  misc_feature: MA Experiment 20000286 PARAMETER Experiment Name: At_Open_Flower_P Parameter: Age (day) Value: 21
  misc_feature: MA Experiment 20000286 PARAMETER Experiment Name: At_Open_Flower_P Parameter: Plant Line Value: WS
  misc_feature: MA Experiment 20000286 PARAMETER Experiment Name: At_Open_Flower_P Parameter: Tissue Value: Half Open vs. Whole Plant
  misc_feature: MA Experiment ID: 20000437 Result: Up-regulated in Transcription
  misc_feature: MA Experiment 20000437 PARAMETER Experiment Name: At_Drought_P Parameter: Age (day) Value: 8
  misc_feature: MA Experiment 20000437 PARAMETER Experiment Name: At_Drought_P Parameter: Organism Value: A. thaliana
  misc_feature: MA Experiment 20000437 PARAMETER Experiment Name: At_Drought_P Parameter: Plant Line Value: WS
  misc_feature: MA Experiment 20000437 PARAMETER Experiment Name: At_Drought_P Parameter: Timepoint (hr) Value: 24
  misc_feature: MA Experiment 20000437 PARAMETER Experiment Name: At_Drought_P Parameter: Tissue Value: Whole Plant
  misc_feature: MA Experiment 20000437 PARAMETER Experiment Name: At_Drought_P Parameter: Treatment Value: Drought vs. No Drought
  misc_feature: MA Experiment ID: 20000439 Result: Up-regulated in Transcription
  misc_feature: MA Experiment 20000439 PARAMETER Experiment Name: At_Roots__P Parameter: Age (day) Value: 14 vs. 21
  misc_feature: MA Experiment 20000439 PARAMETER Experiment Name: At_Roots__P Parameter: Organism Value: A. thaliana
  misc_feature: MA Experiment 20000439 PARAMETER Experiment Name: At_Roots__P Parameter: Tissue Value: Roots vs. Whole Plant
  misc_feature: MA Experiment ID: 20000496 Result: Down-regulated in Transcription
  misc_feature: MA Experiment 20000496 PARAMETER Experiment Name: At_Guard_Cells_P Parameter: Harvest Date Value: 7/19/2002
  misc_feature: MA Experiment 20000496 PARAMETER Experiment Name: At_Guard_Cells_P Parameter: Organism Value: Canola
  misc_feature: MA Experiment 20000496 PARAMETER Experiment Name: At_Guard_Cells_P Parameter: Tissue Value: Guard Cells vs. Leaves

SEQ ID NO: 94240 - protein, 813 aa, Arabidopsis thaliana; identical to SEQ ID NO: 90484
  peptide (1)..(813): Ceres Seq. ID no. 12724099
  misc_feature (1)..(700): Homolog of NCBI NO: 34896882 NR Description: putative kinesin-like protein [Oryza sativa
  misc_feature (1)..(371): Homolog of NCBI NO: 21539527 NR Description: kinesin-like protein [Arabidopsis thaliana]
  misc_feature (12)..(498): Homolog of NCBI NO: 23489919 NR Description: kinesin-like protein-related [Plasmodium yoelii
  misc_feature (11)..(438): Homolog of NCBI NO: 28277259 NR Description: Similar to hypothetical protein FLJ37300 [Xenopus
  misc_feature (12)..(385): Homolog of NCBI NO: 23613466 NR Description: kinesin, putative [Plasmodium falciparum 3D7]
  misc_feature (11)..(442): Homolog of NCBI NO: 23397458 NR Description: hypothetical protein FLJ37300 [Homo sapiens]
  misc_feature (17)..(561): Homolog of NCBI NO: 28838703 NR Description: Similar to hypothetical protein DKFZp434G2226
  misc_feature (2)..(307): Homolog of NCBI NO: 34871266 NR Description: similar to D5Wsu45e protein [Rattus norvegicus]
  misc_feature (307)..(442): Homolog of NCBI NO: 34871266 NR Description: similar to D5Wsu45e protein [Rattus norvegicus]
  misc_feature (55)..(381): Homolog of NCBI NO: 37544008 NR Description: similar to kinesin family member 18A; kinesin

SEQ ID NO: 94241 - protein, 789 aa, Arabidopsis thaliana; identical to SEQ ID NO: 90485
  peptide (1)..(789): Ceres Seq. ID no. 12724100
  misc_feature (1)..(676): Homolog of NCBI NO: 34896882 NR Description: putative kinesin-like protein [Oryza sativa
  misc_feature (1)..(347): Homolog of NCBI NO: 21539527 NR Description: kinesin-like protein [Arabidopsis thaliana]
  misc_feature (1)..(474): Homolog of NCBI NO: 23489919 NR Description: kinesin-like protein-related [Plasmodium yoelii
  misc_feature (1)..(414): Homolog of NCBI NO: 28277259 NR Description: Similar to hypothetical protein FLJ37300 [Xenopus
  misc_feature (1)..(361): Homolog of NCBI NO: 23613466 NR Description: kinesin, putative [Plasmodium falciparum 3D7]
  misc_feature (1)..(418): Homolog of NCBI NO: 23397458 NR Description: hypothetical protein FLJ37300 [Homo sapiens]
  misc_feature (1)..(537): Homolog of NCBI NO: 28838703 NR Description: Similar to hypothetical protein DKFZp434G2226
  misc_feature (1)..(283): Homolog of NCBI NO: 34871266 NR Description: similar to D5Wsu45e protein [Rattus norvegicus]
  misc_feature (283)..(418): Homolog of NCBI NO: 34871266 NR Description: similar to D5Wsu45e protein [Rattus norvegicus]
  misc_feature (31)..(357): Homolog of NCBI NO: 37544008 NR Description: similar to kinesin family member 18A; kinesin

SEQ ID NO: 94242 - protein, 729 aa, Arabidopsis thaliana; identical to SEQ ID NO: 90486
  peptide (1)..(729): Ceres Seq. ID no. 12724101
  misc_feature (1)..(616): Homolog of NCBI NO: 34896882 NR Description: putative kinesin-like protein [Oryza sativa
  misc_feature (1)..(287): Homolog of NCBI NO: 21539527 NR Description: kinesin-like protein [Arabidopsis thaliana]
  misc_feature (1)..(414): Homolog of NCBI NO: 23489919 NR Description: kinesin-like protein-related [Plasmodium yoelii
  misc_feature (1)..(354): Homolog of NCBI NO: 28277259 NR Description: Similar to hypothetical protein FLJ37300 [Xenopus
  misc_feature (1)..(301): Homolog of NCBI NO: 23613466 NR Description: kinesin, putative [Plasmodium falciparum 3D7]
  misc_feature (1)..(358): Homolog of NCBI NO: 23397458 NR Description: hypothetical protein FLJ37300 [Homo sapiens]
  misc_feature (1)..(477): Homolog of NCBI NO: 28838703 NR Description: Similar to hypothetical protein DKFZp434G2226
  misc_feature (1)..(223): Homolog of NCBI NO: 34871266 NR Description: similar to D5Wsu45e protein [Rattus norvegicus]
  misc_feature (223)..(358): Homolog of NCBI NO: 34871266 NR Description: similar to D5Wsu45e protein [Rattus norvegicus]
  misc_feature (1)..(297): Homolog of NCBI NO: 37544008 NR Description: similar to kinesin family member 18A; kinesin

SEQ ID NO: 94243 - DNA, 954 bp, Arabidopsis thaliana; identical to SEQ ID NO: 90487
  misc_feature (1)..(954): Ceres Seq. ID no. 12724102
  misc_feature: MA Experiment ID: 20000179 Result: Down-regulated in Transcription
  misc_feature: MA Experiment 20000179 PARAMETER Experiment Name: At_Germinating_Seeds_P Parameter: Age (hr) Value: 6 vs. 0
  misc_feature: MA Experiment 20000179 PARAMETER Experiment Name: At_Germinating_Seeds_P Parameter: Tissue Value: Germinating Seeds
  misc_feature: MA Experiment ID: 20000180 Result: Down-regulated in Transcription
  misc_feature: MA Experiment 20000180 PARAMETER Experiment Name: At_Germinating_Seeds_P Parameter: Age (hr) Value: 24 vs. 0
  misc_feature: MA Experiment 20000180 PARAMETER Experiment Name: At_Germinating_Seeds_P Parameter: Tissue Value: Germinating Seeds
  misc_feature: MA Experiment ID: 20000264 Result: Up-regulated in Transcription
  misc_feature: MA Experiment 20000264 PARAMETER Experiment Name: At_Open_Flower_P Parameter: Age (day) Value: 21
  misc_feature: MA Experiment 20000264 PARAMETER Experiment Name: At_Open_Flower_P Parameter: Plant Line Value: WS
  misc_feature: MA Experiment 20000264 PARAMETER Experiment Name: At_Open_Flower_P Parameter: Tissue Value: Open Flower vs. Whole Plant
  misc_feature: MA Experiment ID: 20001451 Result: Down-regulated in Transcription
  misc_feature: MA Experiment 20001451 PARAMETER Experiment Name: At_Far-red-induction_P Parameter: Age (day) Value: 7
  misc_feature: MA Experiment 20001451 PARAMETER Experiment Name: At_Far-red-induction_P Parameter: Light Value: Far-red vs. White
  misc_feature: MA Experiment 20001451 PARAMETER Experiment Name: At_Far-red-induction_P Parameter: Organism Value: A. thaliana
  misc_feature: MA Experiment 20001451 PARAMETER Experiment Name: At_Far-red-induction_P Parameter: Plant Line Value: Columbia
  misc_feature: MA Experiment 20001451 PARAMETER Experiment Name: At_Far-red-induction_P Parameter: Timepoint (hr) Value: 24
  misc_feature: MA Experiment 20001451 PARAMETER Experiment Name: At_Far-red-induction_P Parameter: Tissue Value: Whole Plant

SEQ ID NO: 94244 - protein, 317 aa, Arabidopsis thaliana; identical to SEQ ID NO: 90488
  peptide (1)..(317): Ceres Seq. ID no. 12724103
  misc_feature (1)..(317): Homolog of NCBI NO: 15229187 NR Description: G-protein beta-subunit (transducin) family;
  misc_feature (14)..(312): Homolog of NCBI NO: 6714707 NR Description: hypothetical protein [Homo sapiens]
  misc_feature (14)..(312): Homolog of NCBI NO: 16554627 NR Description: WD repeat domain 5 protein; WD-repeat protein 5
  misc_feature (14)..(312): Homolog of NCBI NO: 34853150 NR Description: similar to hypothetical protein [Rattus
  misc_feature (14)..(312): Homolog of NCBI NO: 30353827 NR Description: Unknown (protein for MGC:56591) [Danio rerio]
  misc_feature (7)..(312): Homolog of NCBI NO: 17864654 NR Description: will die slowly CG17437-PA Will die slowly protein >gi|6946677|emb|CAB72292.1| version:''084'',
  misc_feature (14)..(312): Homolog of NCBI NO: 20302740 NR Description: unknown [Branchiostoma floridae]
  misc_feature (2)..(312): Homolog of NCBI NO: 23199987 NR Description: WD repeat domain 5B [Homo sapiens]
  misc_feature (2)..(312): Homolog of NCBI NO: 7023854 NR Description: unnamed protein product [Homo sapiens]
  misc_feature (11)..(314): Homolog of NCBI NO: 15235470 NR Description: G-protein beta family; protein id: At4g02730.1, by cDNA: 41490., supported by cDNA: gi_16612251 [Arabidopsis

SEQ ID NO: 94245 - protein, 191 aa, Arabidopsis thaliana; identical to SEQ ID NO: 90489
  peptide (1)..(191): Ceres Seq. ID no. 12724104
  misc_feature (1)..(191): Homolog of NCBI NO: 15229187 NR Description: G-protein beta-subunit (transducin) family;
  misc_feature (1)..(186): Homolog of NCBI NO: 6714707 NR Description: hypothetical protein [Homo sapiens]
  misc_feature (1)..(186): Homolog of NCBI NO: 16554627 NR Description: WD repeat domain 5 protein; WD-repeat protein 5
  misc_feature (1)..(186): Homolog of NCBI NO: 34853150 NR Description: similar to hypothetical protein [Rattus
  misc_feature (1)..(186): Homolog of NCBI NO: 30353827 NR Description: Unknown (protein for MGC:56591) [Danio rerio]
  misc_feature (1)..(186): Homolog of NCBI NO: 17864654 NR Description: will die slowly CG17437-PA Will die slowly protein >gi|6946677|emb|CAB72292.1| version:''084'',
  misc_feature (1)..(186): Homolog of NCBI NO: 20302740 NR Description: unknown [Branchiostoma floridae]
  misc_feature (1)..(186): Homolog of NCBI NO: 23199987 NR Description: WD repeat domain 5B [Homo sapiens]
  misc_feature (1)..(186): Homolog of NCBI NO: 7023854 NR Description: unnamed protein product [Homo sapiens]
  misc_feature (1)..(188): Homolog of NCBI NO: 15235470 NR Description: G-protein beta family; protein id: At4g02730.1, by cDNA: 41490., supported by cDNA: gi_16612251 [Arabidopsis

SEQ ID NO: 94246 - DNA, 2214 bp, Arabidopsis thaliana; identical to SEQ ID NO: 90490
  misc_feature (1)..(2214): Ceres Seq. ID no. 12724109
  misc_feature: MA Experiment ID: 20000307 Result: Down-regulated in Transcription
  misc_feature: MA Experiment 20000307 PARAMETER Experiment Name: At_Germinating_Seeds_Sub_P Parameter: Age (hr) Value: 24 vs. 0
  misc_feature: MA Experiment 20000307 PARAMETER Experiment Name: At_Germinating_Seeds_Sub_P Parameter: Organism Value: A. thaliana
  misc_feature: MA Experiment 20000307 PARAMETER Experiment Name: At_Germinating_Seeds_Sub_P Parameter: Plant Line Value: WS
  misc_feature: MA Experiment 20000307 PARAMETER Experiment Name: At_Germinating_Seeds_Sub_P Parameter: Tissue Value: Germinating Seeds
  misc_feature: MA Experiment ID: 20000328 Result: Down-regulated in Transcription
  misc_feature: MA Experiment 20000328 PARAMETER Experiment Name: At_42deg_Heat_Sub_P Parameter: Age (day) Value: 14
  misc_feature: MA Experiment 20000328 PARAMETER Experiment Name: At_42deg_Heat_Sub_P Parameter: Organism Value: A. thaliana
  misc_feature: MA Experiment 20000328 PARAMETER Experiment Name: At_42deg_Heat_Sub_P Parameter: Plant Line Value: WS
  misc_feature: MA Experiment 20000328 PARAMETER Experiment Name: At_42deg_Heat_Sub_P Parameter: Temperature (deg C) Value: 42 vs. 22
  misc_feature: MA Experiment 20000328 PARAMETER Experiment Name: At_42deg_Heat_Sub_P Parameter: Timepoint (hr) Value: 6
  misc_feature: MA Experiment 20000328 PARAMETER Experiment Name: At_42deg_Heat_Sub_P Parameter: Tissue Value: Aerial
  misc_feature: MA Experiment ID: 20000355 Result: Up-regulated in Transcription
  misc_feature: MA Experiment 20000355 PARAMETER Experiment Name: At_Siliques_Sub_P Parameter: Age (day) Value: 21
  misc_feature: MA Experiment 20000355 PARAMETER Experiment Name: At_Siliques_Sub_P Parameter: Organism Value: A. thaliana
  misc_feature: MA Experiment 20000355 PARAMETER Experiment Name: At_Siliques_Sub_P Parameter: Plant Line Value: WS
  misc_feature: MA Experiment 20000355 PARAMETER Experiment Name: At_Siliques_Sub_P Parameter: Tissue Value: Less Than 5mm Siliques vs. Whole Plant
  misc_feature: MA Experiment ID: 20000440 Result: Up-regulated in Transcription
  misc_feature: MA Experiment 20000440 PARAMETER Experiment Name: At_Closed-Flower__Sub_P Parameter: Tissue Value: Closed Flower vs. Whole Plant

SEQ ID NO: 94247 - protein, 737 aa, Arabidopsis thaliana; identical to SEQ ID NO: 90491
  peptide (1)..(737): Ceres Seq. ID no. 12724110
  misc_feature (156)..(190): Pfam Name: PPR repeat Pfam Description: PPR repeat
  misc_feature (130)..(737): Homolog of NCBI NO: 15218216 NR Description: hypothetical protein; protein id: At1g15510.1
  misc_feature (8)..(149): Homolog of NCBI NO: 15218216 NR Description: hypothetical protein; protein id: At1g15510.1
  misc_feature (120)..(737): Homolog of NCBI NO: 15228590 NR Description: hypothetical protein; protein id: At3g03580.1 thaliana] >gi|6091764|gb|AAF03474.1|AC009327_13 hypothetical [Arabidopsis thaliana] >gi|28393735|gb|AAO42278.1| unknown
  misc_feature (25)..(149): Homolog of NCBI NO: 15228590 NR Description: hypothetical protein; protein id: At3g03580.1 thaliana] >gi|6091764|gb|AAF03474.1|AC009327_13 hypothetical [Arabidopsis thaliana] >gi|28393735|gb|AAO42278.1| unknown
  misc_feature (120)..(735): Homolog of NCBI NO: 32482936 NR Description: OSJNBb0072M01.1 [Oryza sativa (japonica
  misc_feature (33)..(181): Homolog of NCBI NO: 32482936 NR Description: OSJNBb0072M01.1 [Oryza sativa (japonica
  misc_feature (135)..(735): Homolog of NCBI NO: 30689384 NR Description: pentatricopeptide (PPR) repeat-containing protein thaliana] >gi|30102674|gb|AAP21255.1| At4g32430 [Arabidopsis
  misc_feature (17)..(131): Homolog of NCBI NO: 30689384 NR Description: pentatricopeptide (PPR) repeat-containing protein thaliana] >gi|30102674|gb|AAP21255.1| At4g32430 [Arabidopsis
  misc_feature (122)..(733): Homolog of NCBI NO: 15221304 NR Description: hypothetical protein; protein id: At1g74600.1
  misc_feature (21)..(165): Homolog of NCBI NO: 15221304 NR Description: hypothetical protein; protein id: At1g74600.1

SEQ ID NO: 94248 - protein, 589 aa, Arabidopsis thaliana; identical to SEQ ID NO: 90492
  peptide (1)..(589): Ceres Seq. ID no. 12724111
  misc_feature (8)..(42): Pfam Name: PPR repeat Pfam Description: PPR repeat
  misc_feature (1)..(589): Homolog of NCBI NO: 15218216 NR Description: hypothetical protein; protein id: At1g15510.1
  misc_feature (1)..(589): Homolog of NCBI NO: 15228590 NR Description: hypothetical protein; protein id: At3g03580.1 thaliana] >gi|6091764|gb|AAF03474.1|AC009327_13 hypothetical [Arabidopsis thaliana] >gi|28393735|gb|AAO42278.1| unknown
  misc_feature (1)..(587): Homolog of NCBI NO: 32482936 NR Description: OSJNBb0072M01.1 [Oryza sativa (japonica
  misc_feature (1)..(33): Homolog of NCBI NO: 32482936 NR Description: OSJNBb0072M01.1 [Oryza sativa (japonica
  misc_feature (1)..(587): Homolog of NCBI NO: 30689384 NR Description: pentatricopeptide (PPR) repeat-containing protein thaliana] >gi|30102674|gb|AAP21255.1| At4g32430 [Arabidopsis
  misc_feature (1)..(585): Homolog of NCBI NO: 15221304 NR Description: hypothetical protein; protein id: At1g74600.1
  misc_feature (1)..(17): Homolog of NCBI NO: 15221304 NR Description: hypothetical protein; protein id: At1g74600.1
  misc_feature (1)..(587): Homolog of NCBI NO: 7486629 NR Description: hypothetical protein F8B4.130 - Arabidopsis >gi|4049345|emb|CAA22570.1| putative protein [Arabidopsis >gi|7270147|emb|CAB79960.1| putative protein [Arabidopsis
  misc_feature (1)..(589): Homolog of NCBI NO: 15226200 NR Description: putative selenium-binding protein; protein id:
  misc_feature (1)..(589): Homolog of NCBI NO: 15236324 NR Description: putative protein; protein id: At4g13650.1

SEQ ID NO: 94249 - protein, 577 aa, Arabidopsis thaliana; identical to SEQ ID NO: 90493
  peptide (1)..(577): Ceres Seq. ID no. 12724112
  misc_feature (1)..(30): Pfam Name: PPR repeat Pfam Description: PPR repeat
  misc_feature (1)..(577): Homolog of NCBI NO: 15218216 NR Description: hypothetical protein; protein id: At1g15510.1
  misc_feature (1)..(577): Homolog of NCBI NO: 15228590 NR Description: hypothetical protein; protein id: At3g03580.1 thaliana] >gi|6091764|gb|AAF03474.1|AC009327_13 hypothetical [Arabidopsis thaliana] >gi|28393735|gb|AAO42278.1| unknown
  misc_feature (1)..(575): Homolog of NCBI NO: 32482936 NR Description: OSJNBb0072M01.1 [Oryza sativa (japonica
  misc_feature (1)..(21): Homolog of NCBI NO: 32482936 NR Description: OSJNBb0072M01.1 [Oryza sativa (japonica
  misc_feature (1)..(575): Homolog of NCBI NO: 30689384 NR Description: pentatricopeptide (PPR) repeat-containing protein thaliana] >gi|30102674|gb|AAP21255.1| At4g32430 [Arabidopsis
  misc_feature (1)..(573): Homolog of NCBI NO: 15221304 NR Description: hypothetical protein; protein id: At1g74600.1
  misc_feature (1)..(575): Homolog of NCBI NO: 7486629 NR Description: hypothetical protein F8B4.130 - Arabidopsis >gi|4049345|emb|CAA22570.1| putative protein [Arabidopsis >gi|7270147|emb|CAB79960.1| putative protein [Arabidopsis
  misc_feature (1)..(577): Homolog of NCBI NO: 15226200 NR Description: putative selenium-binding protein; protein id:
  misc_feature (1)..(577): Homolog of NCBI NO: 15236324 NR Description: putative protein; protein id: At4g13650.1
  misc_feature (182)..(575): Homolog of NCBI NO: 15242684 NR Description: putative protein; protein id: At5g40410.1

SEQ ID NO: 94250 - DNA, 825 bp, Arabidopsis thaliana; identical to SEQ ID NO: 90494
  misc_feature (1)..(825): Ceres Seq. ID no. 12724113
  misc_feature: MA Experiment ID: 20000307 Result: Up-regulated in Transcription
  misc_feature: MA Experiment 20000307 PARAMETER Experiment Name: At_Germinating_Seeds_Sub_P Parameter: Age (hr) Value: 24 vs. 0
  misc_feature: MA Experiment 20000307 PARAMETER Experiment Name: At_Germinating_Seeds_Sub_P Parameter: Organism Value: A. thaliana
  misc_feature: MA Experiment 20000307 PARAMETER Experiment Name: At_Germinating_Seeds_Sub_P Parameter: Plant Line Value: WS
  misc_feature: MA Experiment 20000307 PARAMETER Experiment Name: At_Germinating_Seeds_Sub_P Parameter: Tissue Value: Germinating Seeds
  misc_feature: MA Experiment ID: 20000314 Result: Up-regulated in Transcription
  misc_feature: MA Experiment 20000314 PARAMETER Experiment Name: At_14day_Shoots-Roots_Sub_P Parameter: Age (day) Value: 14
  misc_feature: MA Experiment 20000314 PARAMETER Experiment Name: At_14day_Shoots-Roots_Sub_P Parameter: Organism Value: A. thaliana
  misc_feature: MA Experiment 20000314 PARAMETER Experiment Name: At_14day_Shoots-Roots_Sub_P Parameter: Plant Line Value: WS
  misc_feature: MA Experiment 20000314 PARAMETER Experiment Name: At_14day_Shoots-Roots_Sub_P Parameter: Tissue Value: Roots vs. Whole Plant
  misc_feature: MA Experiment ID: 20000328 Result: Down-regulated in Transcription
  misc_feature: MA Experiment 20000328 PARAMETER Experiment Name: At_42deg_Heat_Sub_P Parameter: Age (day) Value: 14
  misc_feature: MA Experiment 20000328 PARAMETER Experiment Name: At_42deg_Heat_Sub_P Parameter: Organism Value: A. thaliana
  misc_feature: MA Experiment 20000328 PARAMETER Experiment Name: At_42deg_Heat_Sub_P Parameter: Plant Line Value: WS
  misc_feature: MA Experiment 20000328 PARAMETER Experiment Name: At_42deg_Heat_Sub_P Parameter: Temperature (deg C) Value: 42 vs. 22
  misc_feature: MA Experiment 20000328 PARAMETER Experiment Name: At_42deg_Heat_Sub_P Parameter: Timepoint (hr) Value: 6
  misc_feature: MA Experiment 20000328 PARAMETER Experiment Name: At_42deg_Heat_Sub_P Parameter: Tissue Value: Aerial

SEQ ID NO: 94251 - protein, 274 aa, Arabidopsis thaliana; identical to SEQ ID NO: 90495
  peptide (1)..(274): Ceres Seq. ID no. 12724114
  misc_feature (146)..(169): Pfam Name: Leucine Rich Repeat Pfam Description: Leucine Rich Repeat
  misc_feature (1)..(274): Homolog of NCBI NO: 15229606 NR Description: leucine rich repeat protein family; protein id:
  misc_feature (2)..(274): Homolog of NCBI NO: 15239162 NR Description: leucine rich repeat protein family; protein id: supported by cDNA: 17160. [Arabidopsis thaliana]
  misc_feature (2)..(274): Homolog of NCBI NO: 21553823 NR Description: unknown [Arabidopsis thaliana]
  misc_feature (20)..(274): Homolog of NCBI NO: 7486525 NR Description: hypothetical protein F6H11.60 - Arabidopsis
  misc_feature (2)..(246): Homolog of NCBI NO: 15233004 NR Description: leucine-rich repeat transmembrane protein kinase, protein id: At3g28450.1 [Arabidopsis thaliana]
  misc_feature (8)..(257): Homolog of NCBI NO: 15223445 NR Description: leucine-rich repeat transmembrane protein kinase, protein id: At1g27190.1 [Arabidopsis thaliana]
  misc_feature (7)..(246): Homolog of NCBI NO: 38344230 NR Description: OJ991113_30.7 [Oryza sativa (japonica
  misc_feature (27)..(265): Homolog of NCBI NO: 15222519 NR Description: leucine-rich repeat transmembrane protein kinase,
  misc_feature (5)..(252): Homolog of NCBI NO: 8777368 NR Description: receptor-like protein kinase [Arabidopsis
  misc_feature (5)..(252): Homolog of NCBI NO: 17064966 NR Description: receptor-like protein kinase [Arabidopsis

SEQ ID NO: 94252 - DNA, 1101 bp, Arabidopsis thaliana; identical to SEQ ID NO: 90496
  misc_feature (1)..(1101): Ceres Seq. ID no. 12724115
  misc_feature: MA Experiment ID: 20000179 Result: Up-regulated in Transcription
  misc_feature: MA Experiment 20000179 PARAMETER Experiment Name: At_Germinating_Seeds_P Parameter: Age (hr) Value: 6 vs. 0
  misc_feature: MA Experiment 20000179 PARAMETER Experiment Name: At_Germinating_Seeds_P Parameter: Tissue Value: Germinating Seeds
  misc_feature: MA Experiment ID: 20000227 Result: Down-regulated in Transcription
  misc_feature: MA Experiment 20000227 PARAMETER Experiment Name: At_Root-Tips-vs-Tops_P Parameter: Tissue Value: Root Tips vs. Root Tops
  misc_feature: MA Experiment ID: 20000234 Result: Down-regulated in Transcription
  misc_feature: MA Experiment 20000234 PARAMETER Experiment Name: At_Siliques_P Parameter: Age (day) Value: 21
  misc_feature: MA Experiment 20000234 PARAMETER Experiment Name: At_Siliques_P Parameter: Organism Value: A. thaliana
  misc_feature: MA Experiment 20000234 PARAMETER Experiment Name: At_Siliques_P Parameter: Plant Line Value: WS
  misc_feature: MA Experiment 20000234 PARAMETER Experiment Name: At_Siliques_P Parameter: Tissue Value: Less Than 5mm Siliques vs. Whole Plant
  misc_feature: MA Experiment ID: 20000235 Result: Down-regulated in Transcription
  misc_feature: MA Experiment 20000235 PARAMETER Experiment Name: At_Siliques_P Parameter: Age (day) Value: 21
  misc_feature: MA Experiment 20000235 PARAMETER Experiment Name: At_Siliques_P Parameter: Organism Value: A. thaliana
  misc_feature: MA Experiment 20000235 PARAMETER Experiment Name: At_Siliques_P Parameter: Plant Line Value: WS
  misc_feature: MA Experiment 20000235 PARAMETER Experiment Name: At_Siliques_P Parameter: Tissue Value: 5-10mm Siliques vs. Whole Plant
  misc_feature: MA Experiment ID: 20000264 Result: Down-regulated in Transcription
  misc_feature: MA Experiment 20000264 PARAMETER Experiment Name: At_Open_Flower_P Parameter: Age (day) Value: 21
  misc_feature: MA Experiment 20000264 PARAMETER Experiment Name: At_Open_Flower_P Parameter: Plant Line Value: WS
  misc_feature: MA Experiment 20000264 PARAMETER Experiment Name: At_Open_Flower_P Parameter: Tissue Value: Open Flower vs. Whole Plant
  misc_feature: MA Experiment ID: 20000265 Result: Down-regulated in Transcription
  misc_feature: MA Experiment 20000265 PARAMETER Experiment Name: At_Open_Flower_P Parameter: Age (day) Value: 21
  misc_feature: MA Experiment 20000265 PARAMETER Experiment Name: At_Open_Flower_P Parameter: Plant Line Value: WS
  misc_feature: MA Experiment 20000265 PARAMETER Experiment Name: At_Open_Flower_P Parameter: Tissue Value: Closed Flower vs. Whole Plant
  misc_feature: MA Experiment ID: 20000268 Result: Down-regulated in Transcription
  misc_feature: MA Experiment 20000268 PARAMETER Experiment Name: At_100mM_NaCl__P Parameter: Age (day) Value: 14
  misc_feature: MA Experiment 20000268 PARAMETER Experiment Name: At_100mM_NaCl__P Parameter: Organism Value: A. thaliana
  misc_feature: MA Experiment 20000268 PARAMETER Experiment Name: At_100mM_NaCl__P Parameter: Plant Line Value: WS
  misc_feature: MA Experiment 20000268 PARAMETER Experiment Name: At_100mM_NaCl__P Parameter: Timepoint (hr) Value: 6
  misc_feature: MA Experiment 20000268 PARAMETER Experiment Name: At_100mM_NaCl__P Parameter: Tissue Value: Whole Plant
  misc_feature: MA Experiment 20000268 PARAMETER Experiment Name: At_100mM_NaCl__P Parameter: Treatment Value: 100mM NaCl vs. No Treatment
  misc_feature: MA Experiment ID: 20000286 Result: Down-regulated in Transcription
  misc_feature: MA Experiment 20000286 PARAMETER Experiment Name: At_Open_Flower_P Parameter: Age (day) Value: 21
  misc_feature: MA Experiment 20000286 PARAMETER Experiment Name: At_Open_Flower_P Parameter: Plant Line Value: WS
  misc_feature: MA Experiment 20000286 PARAMETER Experiment Name: At_Open_Flower_P Parameter: Tissue Value: Half Open vs. Whole Plant
  misc_feature: MA Experiment ID: 20000308 Result: Down-regulated in Transcription
  misc_feature: MA Experiment 20000308 PARAMETER Experiment Name: At_100mM_NaCl__P Parameter: Age (day) Value: 17
  misc_feature: MA Experiment 20000308 PARAMETER Experiment Name: At_100mM_NaCl__P Parameter: Organism Value: A. thaliana
  misc_feature: MA Experiment 20000308 PARAMETER Experiment Name: At_100mM_NaCl__P Parameter: Plant Line Value: WS
  misc_feature: MA Experiment 20000308 PARAMETER Experiment Name: At_100mM_NaCl__P Parameter: Timepoint (hr) Value: 72
  misc_feature: MA Experiment 20000308 PARAMETER Experiment Name: At_100mM_NaCl__P Parameter: Tissue Value: Whole Plant
  misc_feature: MA Experiment 20000308 PARAMETER Experiment Name: At_100mM_NaCl__P Parameter: Treatment Value: 100mM NaCl vs. No Treatment
  misc_feature: MA Experiment ID: 20000437 Result: Up-regulated in Transcription
  misc_feature: MA Experiment 20000437 PARAMETER Experiment Name: At_Drought_P Parameter: Age (day) Value: 8
  misc_feature: MA Experiment 20000437 PARAMETER Experiment Name: At_Drought_P Parameter: Organism Value: A. thaliana
  misc_feature: MA Experiment 20000437 PARAMETER Experiment Name: At_Drought_P Parameter: Plant Line Value: WS
  misc_feature: MA Experiment 20000437 PARAMETER Experiment Name: At_Drought_P Parameter: Timepoint (hr) Value: 24
  misc_feature: MA Experiment 20000437 PARAMETER Experiment Name: At_Drought_P Parameter: Tissue Value: Whole Plant
  misc_feature: MA Experiment 20000437 PARAMETER Experiment Name: At_Drought_P Parameter: Treatment Value: Drought vs. No Drought
  misc_feature: MA Experiment ID: 20000439 Result: Down-regulated in Transcription
  misc_feature: MA Experiment 20000439 PARAMETER Experiment Name: At_Roots__P Parameter: Age (day) Value: 14 vs. 21
  misc_feature: MA Experiment 20000439 PARAMETER Experiment Name: At_Roots__P Parameter: Organism Value: A. thaliana
  misc_feature: MA Experiment 20000439 PARAMETER Experiment Name: At_Roots__P Parameter: Tissue Value: Roots vs. Whole Plant
  misc_feature: MA Experiment ID: 20000441 Result: Up-regulated in Transcription
  misc_feature: MA Experiment 20000441 PARAMETER Experiment Name: At_1uM_BR-BRZ__P Parameter: Tissue Value: Shoot Apices
  misc_feature: MA Experiment 20000441 PARAMETER Experiment Name: At_1uM_BR-BRZ__P Parameter: Treatment Value: 1uM BR vs. No Treatment
  misc_feature: MA Experiment ID: 20000451 Result: Down-regulated in Transcription
  misc_feature: MA Experiment 20000451 PARAMETER Experiment Name: At_CS6879_Shoots-Roots_P Parameter: Age (day) Value: 14
  misc_feature: MA Experiment 20000451 PARAMETER Experiment Name: At_CS6879_Shoots-Roots_P Parameter: Organism Value: A. thaliana
  misc_feature: MA Experiment 20000451 PARAMETER Experiment Name: At_CS6879_Shoots-Roots_P Parameter: Plant Line Value: CS6879 vs. WS
  misc_feature: MA Experiment 20000451 PARAMETER Experiment Name: At_CS6879_Shoots-Roots_P Parameter: Tissue Value: Roots
  misc_feature: MA Experiment ID: 20000527 Result: Up-regulated in Transcription
  misc_feature: MA Experiment 20000527 PARAMETER Experiment Name: At_10percent_PEG_P Parameter: Age (day) Value: 20
  misc_feature: MA Experiment 20000527 PARAMETER Experiment Name: At_10percent_PEG_P Parameter: Organism Value: A. thaliana
  misc_feature: MA Experiment 20000527 PARAMETER Experiment Name: At_10percent_PEG_P Parameter: Plant Line Value: WS
  misc_feature: MA Experiment 20000527 PARAMETER Experiment Name: At_10percent_PEG_P Parameter: Timepoint (day) Value: 20
  misc_feature: MA Experiment 20000527 PARAMETER Experiment Name: At_10percent_PEG_P Parameter: Tissue Value: Whole Plant
  misc_feature: MA Experiment 20000527 PARAMETER Experiment Name: At_10percent_PEG_P Parameter: Treatment Value: 10percent PEG vs. No Treatment
  misc_feature: MA Experiment ID: 20000794 Result: Down-regulated in Transcription
  misc_feature: MA Experiment 20000794 PARAMETER Experiment Name: At_Petals_P Parameter: Age (day) Value: 23-25 days
  misc_feature: MA Experiment 20000794 PARAMETER Experiment Name: At_Petals_P Parameter: Plant Line Value: WS
  misc_feature: MA Experiment 20000794 PARAMETER Experiment Name: At_Petals_P Parameter: Tissue Value: Petals vs. Whole plant
  misc_feature: MA Experiment ID: 20001247 Result: Up-regulated in Transcription
  misc_feature: MA Experiment 20001247 PARAMETER Experiment Name: At_Far-red-induction_P Parameter: Age (day) Value: 7
  misc_feature: MA Experiment 20001247 PARAMETER Experiment Name: At_Far-red-induction_P Parameter: Light Value: Far-red vs. White
  misc_feature: MA Experiment 20001247 PARAMETER Experiment Name: At_Far-red-induction_P Parameter: Organism Value: A. thaliana
  misc_feature: MA Experiment 20001247 PARAMETER Experiment Name: At_Far-red-induction_P Parameter: Plant Line Value: Columbia
  misc_feature: MA Experiment 20001247 PARAMETER Experiment Name: At_Far-red-induction_P Parameter: Timepoint (hr) Value: 1
  misc_feature: MA Experiment 20001247 PARAMETER Experiment Name: At_Far-red-induction_P Parameter: Tissue Value: Whole Plant
  misc_feature: MA Experiment ID: 20001248 Result: Up-regulated in Transcription
  misc_feature: MA Experiment 20001248 PARAMETER Experiment Name: At_Far-red-induction_P Parameter: Age (day) Value: 7
  misc_feature: MA Experiment 20001248 PARAMETER Experiment Name: At_Far-red-induction_P Parameter: Light Value: Far-red vs. White
  misc_feature: MA Experiment 20001248 PARAMETER Experiment Name: At_Far-red-induction_P Parameter: Organism Value: A. thaliana
  misc_feature: MA Experiment 20001248 PARAMETER Experiment Name: At_Far-red-induction_P Parameter: Plant Line Value: Columbia
  misc_feature: MA Experiment 20001248 PARAMETER Experiment Name: At_Far-red-induction_P Parameter: Timepoint (hr) Value: 4
  misc_feature: MA Experiment 20001248 PARAMETER Experiment Name: At_Far-red-induction_P Parameter: Tissue Value: Whole Plant
  misc_feature: MA Experiment ID: 20001450 Result: Up-regulated in Transcription
  misc_feature: MA Experiment 20001450 PARAMETER Experiment Name: At_Far-red-induction_P Parameter: Age (day) Value: 7
  misc_feature: MA Experiment 20001450 PARAMETER Experiment Name: At_Far-red-induction_P Parameter: Light Value: Far-red vs. White
  misc_feature: MA Experiment 20001450 PARAMETER Experiment Name: At_Far-red-induction_P Parameter: Organism Value: A. thaliana
  misc_feature: MA Experiment 20001450 PARAMETER Experiment Name: At_Far-red-induction_P Parameter: Plant Line Value: Columbia
  misc_feature: MA Experiment 20001450 PARAMETER Experiment Name: At_Far-red-induction_P Parameter: Timepoint (hr) Value: 8
  misc_feature: MA Experiment 20001450 PARAMETER Experiment Name: At_Far-red-induction_P Parameter: Tissue Value: Whole Plant
  misc_feature: MA Experiment ID: 20001451 Result: Up-regulated in Transcription
  misc_feature: MA Experiment 20001451 PARAMETER Experiment Name: At_Far-red-induction_P Parameter: Age (day) Value: 7
  misc_feature: MA Experiment 20001451 PARAMETER Experiment Name: At_Far-red-induction_P Parameter: Light Value: Far-red vs. White
  misc_feature: MA Experiment 20001451 PARAMETER Experiment Name: At_Far-red-induction_P Parameter: Organism Value: A. thaliana
  misc_feature: MA Experiment 20001451 PARAMETER Experiment Name: At_Far-red-induction_P Parameter: Plant Line Value: Columbia
  misc_feature: MA Experiment 20001451 PARAMETER Experiment Name: At_Far-red-induction_P Parameter: Timepoint (hr) Value: 24
  misc_feature: MA Experiment 20001451 PARAMETER Experiment Name: At_Far-red-induction_P Parameter: Tissue Value: Whole Plant
  misc_feature: MA Experiment ID: 20001559 Result: Down-regulated in Transcription
  misc_feature: MA Experiment 20001559 PARAMETER Experiment Name: At_Drought_Soil_Dry_P Parameter: Age (day) Value: 28
  misc_feature: MA Experiment 20001559 PARAMETER Experiment Name: At_Drought_Soil_Dry_P Parameter: Organism Value: A. thaliana
  misc_feature: MA Experiment 20001559 PARAMETER Experiment Name: At_Drought_Soil_Dry_P Parameter: Plant Line Value: WS
  misc_feature: MA Experiment 20001559 PARAMETER Experiment Name: At_Drought_Soil_Dry_P Parameter: Post Timepoint (hr) Value: 29
  misc_feature: MA Experiment 20001559 PARAMETER Experiment Name: At_Drought_Soil_Dry_P Parameter: Post-Treatment Value: Re-Water vs. No Drought
  misc_feature: MA Experiment 20001559 PARAMETER Experiment Name: At_Drought_Soil_Dry_P Parameter: Timepoint (day) Value: 14
  misc_feature: MA Experiment 20001559 PARAMETER Experiment Name: At_Drought_Soil_Dry_P Parameter: Treatment Value: Drought vs. No Drought
  misc_feature: MA Experiment ID: 20001757 Result: Up-regulated in Transcription
  misc_feature: MA Experiment 20001757 PARAMETER Experiment Name: At_50mM_NH4NO3_L-to-H_P Parameter: Timepoint (hr) Value: 6
  misc_feature: MA Experiment 20001757 PARAMETER Experiment Name: At_50mM_NH4NO3_L-to-H_P Parameter: Tissue Value: Leaf
  misc_feature: MA Experiment 20001757 PARAMETER Experiment Name: At_50mM_NH4NO3_L-to-H_P Parameter: Treatment Value: 50mM NH4NO3 vs 100mM Mannitol

SEQ ID NO: 94253 - protein, 366 aa, Arabidopsis thaliana; identical to SEQ ID NO: 90497
  peptide (1)..(366): Ceres Seq. ID no. 12724116
  misc_feature (1)..(366): Homolog of NCBI NO: 15229610 NR Description: putative protein; protein id: At3g49790.1
  misc_feature (17)..(355): Homolog of NCBI NO: 21553547 NR Description: unknown [Arabidopsis thaliana]
  misc_feature (17)..(355): Homolog of NCBI NO: 14475940 NR Description: unknown protein [Arabidopsis thaliana]
  misc_feature (17)..(355): Homolog of NCBI NO: 18406365 NR Description: expressed protein; protein id: At1g59510.1, by cDNA: 150507., supported by cDNA: gi_6520209 [Arabidopsis
  misc_feature (14)..(362): Homolog of NCBI NO: 40539064 NR Description: expressed protein [Oryza sativa (japonica
  misc_feature (14)..(363): Homolog of NCBI NO: 22093613 NR Description: hypothetical protein~similar to Arabidopsis
  misc_feature (25)..(364): Homolog of NCBI NO: 37530342 NR Description: hypothetical protein [Oryza sativa (japonica group)] >gi|19551091|gb|AAL91596.1| Hypothetical protein [Oryza
  misc_feature (62)..(355): Homolog of NCBI NO: 21554418 NR Description: unknown [Arabidopsis thaliana]
  misc_feature (62)..(355): Homolog of NCBI NO: 18391117 NR Description: expressed protein; protein id: At1g10150.1, by cDNA: 2558. [Arabidopsis thaliana] >gi|25339472|pir||C86236
  misc_feature (1)..(188): Homolog of NCBI NO: 18391117 NR Description: expressed protein; protein id: At1g10150.1, by cDNA: 2558. [Arabidopsis thaliana] >gi|25339472|pir||C86236

SEQ ID NO: 94254 - protein, 254 aa, Arabidopsis thaliana; identical to SEQ ID NO: 90498
  peptide (1)..(254): Ceres Seq. ID no. 12724117
  misc_feature (1)..(254): Homolog of NCBI NO: 15229610 NR Description: putative protein; protein id: At3g49790.1
  misc_feature (1)..(243): Homolog of NCBI NO: 21553547 NR Description: unknown [Arabidopsis thaliana]
  misc_feature (1)..(243): Homolog of NCBI NO: 14475940 NR Description: unknown protein [Arabidopsis thaliana]
  misc_feature (1)..(243): Homolog of NCBI NO: 18406365 NR Description: expressed protein; protein id: At1g59510.1, by cDNA: 150507., supported by cDNA: gi_6520209 [Arabidopsis
  misc_feature (1)..(250): Homolog of NCBI NO: 40539064 NR Description: expressed protein [Oryza sativa (japonica
  misc_feature (1)..(251): Homolog of NCBI NO: 22093613 NR Description: hypothetical protein~similar to Arabidopsis
  misc_feature (1)..(252): Homolog of NCBI NO: 37530342 NR Description: hypothetical protein [Oryza sativa (japonica group)] >gi|19551091|gb|AAL91596.1| Hypothetical protein [Oryza
  misc_feature (1)..(243): Homolog of NCBI NO: 21554418 NR Description: unknown [Arabidopsis thaliana]
  misc_feature (1)..(243): Homolog of NCBI NO: 18391117 NR Description: expressed protein; protein id: At1g10150.1, by cDNA: 2558. [Arabidopsis thaliana] >gi|25339472|pir||C86236
  misc_feature (1)..(76): Homolog of NCBI NO: 18391117 NR Description: expressed protein; protein id: At1g10150.1, by cDNA: 2558. [Arabidopsis thaliana] >gi|25339472|pir||C86236

SEQ ID NO: 94255 - protein, 233 aa, Arabidopsis thaliana; identical to SEQ ID NO: 90499
  peptide (1)..(233): Ceres Seq. ID no. 12724118
  misc_feature (1)..(233): Homolog of NCBI NO: 15229610 NR Description: putative protein; protein id: At3g49790.1
  misc_feature (1)..(222): Homolog of NCBI NO: 21553547 NR Description: unknown [Arabidopsis thaliana]
  misc_feature (1)..(222): Homolog of NCBI NO: 14475940 NR Description: unknown protein [Arabidopsis thaliana]
  misc_feature (1)..(222): Homolog of NCBI NO: 18406365 NR Description: expressed protein; protein id: At1g59510.1, by cDNA: 150507., supported by cDNA: gi_6520209 [Arabidopsis
  misc_feature (1)..(229): Homolog of NCBI NO: 40539064 NR Description: expressed protein [Oryza sativa (japonica
  misc_feature (1)..(230): Homolog of NCBI NO: 22093613 NR Description: hypothetical protein~similar to Arabidopsis
  misc_feature (1)..(231): Homolog of NCBI NO: 37530342 NR Description: hypothetical protein [Oryza sativa (japonica group)] >gi|19551091|gb|AAL91596.1| Hypothetical protein [Oryza
  misc_feature (1)..(222): Homolog of NCBI NO: 21554418 NR Description: unknown [Arabidopsis thaliana]
  misc_feature (1)..(222): Homolog of NCBI NO: 18391117 NR Description: expressed protein; protein id: At1g10150.1, by cDNA: 2558. [Arabidopsis thaliana] >gi|25339472|pir||C86236
  misc_feature (1)..(55): Homolog of NCBI NO: 18391117 NR Description: expressed protein; protein id: At1g10150.1, by cDNA: 2558. [Arabidopsis thaliana] >gi|25339472|pir||C86236

SEQ ID NO: 94256 - DNA, 681 bp, Arabidopsis thaliana; identical to SEQ ID NO: 90500
  misc_feature (1)..(681): Ceres Seq. ID no. 12724127
  misc_feature: MA Experiment ID: 20000265 Result: Up-regulated in Transcription
  misc_feature: MA Experiment 20000265 PARAMETER Experiment Name: At_Open_Flower_P Parameter: Age (day) Value: 21
  misc_feature: MA Experiment 20000265 PARAMETER Experiment Name: At_Open_Flower_P Parameter: Plant Line Value: WS
  misc_feature: MA Experiment 20000265 PARAMETER Experiment Name: At_Open_Flower_P Parameter: Tissue Value: Closed Flower vs. Whole Plant
  misc_feature: MA Experiment ID: 20000495 Result: Up-regulated in Transcription
  misc_feature: MA Experiment 20000495 PARAMETER Experiment Name: At_Guard_Cells_P Parameter: Harvest Date Value: 8/2/2002
  misc_feature: MA Experiment 20000495 PARAMETER Experiment Name: At_Guard_Cells_P Parameter: Organism Value: A. thaliana
  misc_feature: MA Experiment 20000495 PARAMETER Experiment Name: At_Guard_Cells_P Parameter: Tissue Value: Guard Cells vs. Leaves

SEQ ID NO: 94257 - protein, 226 aa, Arabidopsis thaliana; identical to SEQ ID NO: 90501
  peptide (1)..(226): Ceres Seq. ID no. 12724128
  misc_feature (4)..(219): Pfam Name: Eukaryotic porin Pfam Description: Eukaryotic porin
  misc_feature (1)..(226): Homolog of NCBI NO: 15229642 NR Description: porin - like protein; protein id: At3g49920.1
  misc_feature (97)..(226): Homolog of NCBI NO: 36957216 NR Description: VDAC2.1 [Lotus corniculatus var. japonicus]
  misc_feature (1)..(73): Homolog of NCBI NO: 36957216 NR Description: VDAC2.1 [Lotus corniculatus var. japonicus]
  misc_feature (94)..(226): Homolog of NCBI NO: 7442953 NR Description: porin - common ice plant
  misc_feature (1)..(81): Homolog of NCBI NO: 7442953 NR Description: porin - common ice plant
  misc_feature (98)..(226): Homolog of NCBI NO: 36957183 NR Description: VDAC1.2 [Lotus corniculatus var. japonicus]
  misc_feature (1)..(81): Homolog of NCBI NO: 36957183 NR Description: VDAC1.2 [Lotus corniculatus var. japonicus]
  misc_feature (12)..(226): Homolog of NCBI NO: 15240765 NR Description: porin-like protein; protein id: At5g67500.1,
  misc_feature (94)..(226): Homolog of NCBI NO: 1172555 NR Description: 34 kDa outer mitochondrial membrane protein porin
  misc_feature (1)..(77): Homolog of NCBI NO: 1172555 NR Description: 34 kDa outer mitochondrial membrane protein porin

SEQ ID NO: 94258 - protein, 143 aa, Arabidopsis thaliana; identical to SEQ ID NO: 90502
  peptide (1)..(143): Ceres Seq. ID no. 12724129
  misc_feature (1)..(136): Pfam Name: Eukaryotic porin Pfam Description: Eukaryotic porin
  misc_feature (1)..(143): Homolog of NCBI NO: 15229642 NR Description: porin - like protein; protein id: At3g49920.1
  misc_feature (14)..(143): Homolog of NCBI NO: 36957216 NR Description: VDAC2.1 [Lotus corniculatus var. japonicus]
  misc_feature (11)..(143): Homolog of NCBI NO: 7442953 NR Description: porin - common ice plant
  misc_feature (15)..(143): Homolog of NCBI NO: 36957183 NR Description: VDAC1.2 [Lotus corniculatus var. japonicus]
  misc_feature (1)..(143): Homolog of NCBI NO: 15240765 NR Description: porin-like protein; protein id: At5g67500.1,
  misc_feature (11)..(143): Homolog of NCBI NO: 1172555 NR Description: 34 kDa outer mitochondrial membrane protein porin
  misc_feature (11)..(143): Homolog of NCBI NO: 21593558 NR Description: putative porin [Arabidopsis thaliana]
  misc_feature (11)..(143): Homolog of NCBI NO: 15232074 NR Description: putative porin; protein id: At3g01280.1, by cDNA: 40102., supported by cDNA: gi_14335075 [Arabidopsis >gi|20455197|sp|Q9SRH5|POR1_ARATH Outer mitochondrial membrane
  misc_feature (11)..(143): Homolog of NCBI NO: 15242210 NR Description: voltage-dependent anion-selective channel protein protein id: At5g15090.1, supported by cDNA: 1417., supported by gi_17380869 [Arabidopsis thaliana]
  misc_feature (11)..(143): Homolog of NCBI NO: 18076158 NR Description: voltage-dependent anion channel [Oryza sativa

SEQ ID NO: 94259 - DNA, 648 bp, Arabidopsis thaliana; identical to SEQ ID NO: 90503
  misc_feature (1)..(648): Ceres Seq. ID no. 12724130
  misc_feature: MA Experiment ID: 20000439 Result: Up-regulated in Transcription
  misc_feature: MA Experiment 20000439 PARAMETER Experiment Name: At_Roots__P Parameter: Age (day) Value: 14 vs. 21
  misc_feature: MA Experiment 20000439 PARAMETER Experiment Name: At_Roots__P Parameter: Organism Value: A. thaliana
  misc_feature: MA Experiment 20000439 PARAMETER Experiment Name: At_Roots__P Parameter: Tissue Value: Roots vs. Whole Plant

SEQ ID NO: 94260 - protein, 215 aa, Arabidopsis thaliana; identical to SEQ ID NO: 90504
  peptide (1)..(215): Ceres Seq. ID no. 12724131
  misc_feature (94)..(116): Pfam Name: Zinc finger, C2H2 type Pfam Description: Zinc finger, C2H2 type
  misc_feature (1)..(215): Homolog of NCBI NO: 15229643 NR Description: zinc-finger-like protein; protein id: At3g49930.1
  misc_feature (1)..(209): Homolog of NCBI NO: 7488532 NR Description: probable zinc-finger protein ZFP1 - turnip
  misc_feature (1)..(209): Homolog of NCBI NO: 7488533 NR Description: probable zinc-finger protein-1 - turnip
  misc_feature (1)..(198): Homolog of NCBI NO: 15240742 NR Description: Cys2/His2-type zinc finger protein 1 protein id: At5g67450.1 [Arabidopsis thaliana]
  misc_feature (1)..(198): Homolog of NCBI NO: 27464331 NR Description: zinc finger protein [Arabidopsis thaliana]
  misc_feature (1)..(184): Homolog of NCBI NO: 439493 NR Description: zinc-finger protein [Petunia x hybrida]

SEQ ID NO: 94261 - protein, 150 aa, Arabidopsis thaliana; identical to SEQ ID NO: 90505
  peptide (1)..(150): Ceres Seq. ID no. 12724132
  misc_feature (29)..(51): Pfam Name: Zinc finger, C2H2 type Pfam Description: Zinc finger, C2H2 type
  misc_feature (1)..(150): Homolog of NCBI NO: 15229643 NR Description: zinc-finger-like protein; protein id: At3g49930.1
  misc_feature (1)..(144): Homolog of NCBI NO: 7488532 NR Description: probable zinc-finger protein ZFP1 - turnip
  misc_feature (1)..(144): Homolog of NCBI NO: 7488533 NR Description: probable zinc-finger protein-1 - turnip
  misc_feature (1)..(133): Homolog of NCBI NO: 15240742 NR Description: Cys2/His2-type zinc finger protein 1 protein id: At5g67450.1 [Arabidopsis thaliana]
  misc_feature (1)..(133): Homolog of NCBI NO: 27464331 NR Description: zinc finger protein [Arabidopsis thaliana]
  misc_feature (1)..(119): Homolog of NCBI NO: 439493 NR Description: zinc-finger protein [Petunia x hybrida]

SEQ ID NO: 94262 - DNA, 1596 bp, Arabidopsis thaliana; identical to SEQ ID NO: 90506
  misc_feature (1)..(1596): Ceres Seq. ID no. 12724155
  misc_feature: MA Experiment ID: 20000347 Result: Down-regulated in Transcription
  misc_feature: MA Experiment 20000347 PARAMETER Experiment Name: At_2mM_SA_Sub_P Parameter: Age (day) Value: 14
  misc_feature: MA Experiment 20000347 PARAMETER Experiment Name: At_2mM_SA_Sub_P Parameter: Organism Value: A. thaliana
  misc_feature: MA Experiment 20000347 PARAMETER Experiment Name: At_2mM_SA_Sub_P Parameter: Plant Line Value: WS
  misc_feature: MA Experiment 20000347 PARAMETER Experiment Name: At_2mM_SA_Sub_P Parameter: Timepoint (hr) Value: 6
  misc_feature: MA Experiment 20000347 PARAMETER Experiment Name: At_2mM_SA_Sub_P Parameter: Tissue Value: Aerial
  misc_feature: MA Experiment 20000347 PARAMETER Experiment Name: At_2mM_SA_Sub_P Parameter: Treatment Value: 2mM SA vs. No Treatment

SEQ ID NO: 94263 - protein, 531 aa, Arabidopsis thaliana; identical to SEQ ID NO: 90507
  peptide (1)..(531): Ceres Seq. ID no. 12724156
  misc_feature (98)..(516): Pfam Name: Plant protein of unknown function Pfam Description: Plant protein of unknown function
  misc_feature (1)..(531): Homolog of NCBI NO: 15229680 NR Description: putative protein; protein id: At3g50120.1
  misc_feature (4)..(531): Homolog of NCBI NO: 15229687 NR Description: putative protein; protein id: At3g50170.1
  misc_feature (71)..(531): Homolog of NCBI NO: 15229681 NR Description: putative protein; protein id: At3g50130.1
  misc_feature (7)..(29): Homolog of NCBI NO: 15229681 NR Description: putative protein; protein id: At3g50130.1
  misc_feature (44)..(531): Homolog of NCBI NO: 15229684 NR Description: putative protein; protein id: At3g50150.1
  misc_feature (45)..(286): Homolog of NCBI NO: 15229686 NR Description: putative protein; protein id: At3g50160.1
  misc_feature (307)..(519): Homolog of NCBI NO: 15229686 NR Description: putative protein; protein id: At3g50160.1
  misc_feature (71)..(362): Homolog of NCBI NO: 15229682 NR Description: putative protein; protein id: At3g50140.1
  misc_feature (7)..(29): Homolog of NCBI NO: 15229682 NR Description: putative protein; protein id: At3g50140.1
  misc_feature (18)..(337): Homolog of NCBI NO: 15229689 NR Description: putative protein; protein id: At3g50180.1

SEQ ID NO: 94264 - protein, 523 aa, Arabidopsis thaliana; identical to SEQ ID NO: 90508
  peptide (1)..(523): Ceres Seq. ID no. 12724157
  misc_feature (90)..(508): Pfam Name: Plant protein of unknown function Pfam Description: Plant protein of unknown function
  misc_feature (1)..(523): Homolog of NCBI NO: 15229680 NR Description: putative protein; protein id: At3g50120.1
  misc_feature (1)..(523): Homolog of NCBI NO: 15229687 NR Description: putative protein; protein id: At3g50170.1
  misc_feature (63)..(523): Homolog of NCBI NO: 15229681 NR Description: putative protein; protein id: At3g50130.1
  misc_feature (1)..(21): Homolog of NCBI NO: 15229681 NR Description: putative protein; protein id: At3g50130.1
  misc_feature (36)..(523): Homolog of NCBI NO: 15229684 NR Description: putative protein; protein id: At3g50150.1
  misc_feature (37)..(278): Homolog of NCBI NO: 15229686 NR Description: putative protein; protein id: At3g50160.1
  misc_feature (299)..(511): Homolog of NCBI NO: 15229686 NR Description: putative protein; protein id: At3g50160.1
  misc_feature (63)..(354): Homolog of NCBI NO: 15229682 NR Description: putative protein; protein id: At3g50140.1
  misc_feature (1)..(21): Homolog of NCBI NO: 15229682 NR Description: putative protein; protein id: At3g50140.1
  misc_feature (10)..(329): Homolog of NCBI NO: 15229689 NR Description: putative protein; protein id: At3g50180.1

SEQ ID NO: 94265 - protein, 392 aa, Arabidopsis thaliana; identical to SEQ ID NO: 90509
  peptide (1)..(392): Ceres Seq. ID no. 12724158
  misc_feature (1)..(377): Pfam Name: Plant protein of unknown function Pfam Description: Plant protein of unknown function
  misc_feature (1)..(392): Homolog of NCBI NO: 15229680 NR Description: putative protein; protein id: At3g50120.1
  misc_feature (1)..(392): Homolog of NCBI NO: 15229687 NR Description: putative protein; protein id: At3g50170.1
  misc_feature (1)..(392): Homolog of NCBI NO: 15229681 NR Description: putative protein; protein id: At3g50130.1
  misc_feature (1)..(392): Homolog of NCBI NO: 15229684 NR Description: putative protein; protein id: At3g50150.1
  misc_feature (1)..(147): Homolog of NCBI NO: 15229686 NR Description: putative protein; protein id: At3g50160.1
  misc_feature (168)..(380): Homolog of NCBI NO: 15229686 NR Description: putative protein; protein id: At3g50160.1
  misc_feature (1)..(223): Homolog of NCBI NO: 15229682 NR Description: putative protein; protein id: At3g50140.1
  misc_feature (1)..(198): Homolog of NCBI NO: 15229689 NR Description: putative protein; protein id: At3g50180.1
  misc_feature (135)..(341): Homolog of NCBI NO: 15229691 NR Description: putative protein; protein id: At3g50190.1
  misc_feature (369)..(390): Homolog of NCBI NO: 15229691 NR Description: putative protein; protein id: At3g50190.1

SEQ ID NO: 94266 - DNA, 1695 bp, Arabidopsis thaliana; identical to SEQ ID NO: 90510
  misc_feature (1)..(1695): Ceres Seq. ID no. 12724159
  misc_feature: MA Experiment ID: 20000307 Result: Up-regulated in Transcription
  misc_feature: MA Experiment 20000307 PARAMETER Experiment Name: At_Germinating_Seeds_Sub_P Parameter: Age (hr) Value: 24 vs. 0
  misc_feature: MA Experiment 20000307 PARAMETER Experiment Name: At_Germinating_Seeds_Sub_P Parameter: Organism Value: A. thaliana
  misc_feature: MA Experiment 20000307 PARAMETER Experiment Name: At_Germinating_Seeds_Sub_P Parameter: Plant Line Value: WS
  misc_feature: MA Experiment 20000307 PARAMETER Experiment Name: At_Germinating_Seeds_Sub_P Parameter: Tissue Value: Germinating Seeds
  misc_feature: MA Experiment ID: 20000314 Result: Up-regulated in Transcription
  misc_feature: MA Experiment 20000314 PARAMETER Experiment Name: At_14day_Shoots-Roots_Sub_P Parameter: Age (day) Value: 14
  misc_feature: MA Experiment 20000314 PARAMETER Experiment Name: At_14day_Shoots-Roots_Sub_P Parameter: Organism Value: A. thaliana
  misc_feature: MA Experiment 20000314 PARAMETER Experiment Name: At_14day_Shoots-Roots_Sub_P Parameter: Plant Line Value: WS
  misc_feature: MA Experiment 20000314 PARAMETER Experiment Name: At_14day_Shoots-Roots_Sub_P Parameter: Tissue Value: Roots vs. Whole Plant
  misc_feature: MA Experiment ID: 20000328 Result: Down-regulated in Transcription
  misc_feature: MA Experiment 20000328 PARAMETER Experiment Name: At_42deg_Heat_Sub_P Parameter: Age (day) Value: 14
  misc_feature: MA Experiment 20000328 PARAMETER Experiment Name: At_42deg_Heat_Sub_P Parameter: Organism Value: A. thaliana
  misc_feature: MA Experiment 20000328 PARAMETER Experiment Name: At_42deg_Heat_Sub_P Parameter: Plant Line Value: WS
  misc_feature: MA Experiment 20000328 PARAMETER Experiment Name: At_42deg_Heat_Sub_P Parameter: Temperature (deg C) Value: 42 vs. 22
  misc_feature: MA Experiment 20000328 PARAMETER Experiment Name: At_42deg_Heat_Sub_P Parameter: Timepoint (hr) Value: 6
  misc_feature: MA Experiment 20000328 PARAMETER Experiment Name: At_42deg_Heat_Sub_P Parameter: Tissue Value: Aerial
  misc_feature: MA Experiment ID: 20000347 Result: Up-regulated in Transcription
  misc_feature: MA Experiment 20000347 PARAMETER Experiment Name: At_2mM_SA_Sub_P Parameter: Age (day) Value: 14
  misc_feature: MA Experiment 20000347 PARAMETER Experiment Name: At_2mM_SA_Sub_P Parameter: Organism Value: A. thaliana
  misc_feature: MA Experiment 20000347 PARAMETER Experiment Name: At_2mM_SA_Sub_P Parameter: Plant Line Value: WS
  misc_feature: MA Experiment 20000347 PARAMETER Experiment Name: At_2mM_SA_Sub_P Parameter: Timepoint (hr) Value: 6
  misc_feature: MA Experiment 20000347 PARAMETER Experiment Name: At_2mM_SA_Sub_P Parameter: Tissue Value: Aerial
  misc_feature: MA Experiment 20000347 PARAMETER Experiment Name: At_2mM_SA_Sub_P Parameter: Treatment Value: 2mM SA vs. No Treatment

SEQ ID NO: 94267 - protein, 564 aa, Arabidopsis thaliana; identical to SEQ ID NO: 90511
  peptide (1)..(564): Ceres Seq. ID no. 12724160
  misc_feature (134)..(549): Pfam Name: Plant protein of unknown function Pfam Description: Plant protein of unknown function
  misc_feature (1)..(564): Homolog of NCBI NO: 15229681 NR Description: putative protein; protein id: At3g50130.1
  misc_feature (107)..(564): Homolog of NCBI NO: 15229680 NR Description: putative protein; protein id: At3g50120.1
  misc_feature (86)..(108): Homolog of NCBI NO: 15229680 NR Description: putative protein; protein id: At3g50120.1
  misc_feature (107)..(564): Homolog of NCBI NO: 15229687 NR Description: putative protein; protein id: At3g50170.1
  misc_feature (80)..(114): Homolog of NCBI NO: 15229687 NR Description: putative protein; protein id: At3g50170.1
  misc_feature (95)..(564): Homolog of NCBI NO: 15229684 NR Description: putative protein; protein id: At3g50150.1
  misc_feature (9)..(366): Homolog of NCBI NO: 15229689 NR Description: putative protein; protein id: At3g50180.1
  misc_feature (317)..(564): Homolog of NCBI NO: 15229689 NR Description: putative protein; protein id: At3g50180.1
  misc_feature (16)..(489): Homolog of NCBI NO: 15229682 NR Description: putative protein; protein id: At3g50140.1
  misc_feature (45)..(349): Homolog of NCBI NO: 15229691 NR Description: putative protein; protein id: At3g50190.1

SEQ ID NO: 94268 - protein, 477 aa, Arabidopsis thaliana; identical to SEQ ID NO: 90512
  peptide (1)..(477): Ceres Seq. ID no. 12724161
  misc_feature (47)..(462): Pfam Name: Plant protein of unknown function Pfam Description: Plant protein of unknown function
  misc_feature (1)..(477): Homolog of NCBI NO: 15229681 NR Description: putative protein; protein id: At3g50130.1
  misc_feature (20)..(477): Homolog of NCBI NO: 15229680 NR Description: putative protein; protein id: At3g50120.1
  misc_feature (1)..(21): Homolog of NCBI NO: 15229680 NR Description: putative protein; protein id: At3g50120.1
  misc_feature (20)..(477): Homolog of NCBI NO: 15229687 NR Description: putative protein; protein id: At3g50170.1
  misc_feature (1)..(27): Homolog of NCBI NO: 15229687 NR Description: putative protein; protein id: At3g50170.1
  misc_feature (8)..(477): Homolog of NCBI NO: 15229684 NR Description: putative protein; protein id: At3g50150.1
  misc_feature (1)..(279): Homolog of NCBI NO: 15229689 NR Description: putative protein; protein id: At3g50180.1
  misc_feature (230)..(477): Homolog of NCBI NO: 15229689 NR Description: putative protein; protein id: At3g50180.1
  misc_feature (1)..(402): Homolog of NCBI NO: 15229682 NR Description: putative protein; protein id: At3g50140.1
  misc_feature (1)..(262): Homolog of NCBI NO: 15229691 NR Description: putative protein; protein id: At3g50190.1

SEQ ID NO: 94269 - protein, 468 aa, Arabidopsis thaliana; identical to SEQ ID NO: 90513
  peptide (1)..(468): Ceres Seq. ID no. 12724162
  misc_feature (38)..(453): Pfam Name: Plant protein of unknown function Pfam Description: Plant protein of unknown function
  misc_feature (1)..(468): Homolog of NCBI NO: 15229681 NR Description: putative protein; protein id: At3g50130.1
  misc_feature (11)..(468): Homolog of NCBI NO: 15229680 NR Description: putative protein; protein id: At3g50120.1
  misc_feature (1)..(12): Homolog of NCBI NO: 15229680 NR Description: putative protein; protein id: At3g50120.1
  misc_feature (11)..(468): Homolog of NCBI NO: 15229687 NR Description: putative protein; protein id: At3g50170.1
  misc_feature (1)..(18): Homolog of NCBI NO: 15229687 NR Description: putative protein; protein id: At3g50170.1
  misc_feature (1)..(468): Homolog of NCBI NO: 15229684 NR Description: putative protein; protein id: At3g50150.1
  misc_feature (1)..(270): Homolog of NCBI NO: 15229689 NR Description: putative protein; protein id: At3g50180.1
  misc_feature (221)..(468): Homolog of NCBI NO: 15229689 NR Description: putative protein; protein id: At3g50180.1
  misc_feature (1)..(393): Homolog of NCBI NO: 15229682 NR Description: putative protein; protein id: At3g50140.1
  misc_feature (1)..(253): Homolog of NCBI NO: 15229691 NR Description: putative protein; protein id: At3g50190.1

SEQ ID NO: 94270 - DNA, 1530 bp, Arabidopsis thaliana; identical to SEQ ID NO: 90514
  misc_feature (1)..(1530): Ceres Seq. ID no. 12724163
  misc_feature: MA Experiment ID: 20000307 Result: Up-regulated in Transcription
  misc_feature: MA Experiment 20000307 PARAMETER Experiment Name: At_Germinating_Seeds_Sub_P Parameter: Age (hr) Value: 24 vs. 0
  misc_feature: MA Experiment 20000307 PARAMETER Experiment Name: At_Germinating_Seeds_Sub_P Parameter: Organism Value: A. thaliana
  misc_feature: MA Experiment 20000307 PARAMETER Experiment Name: At_Germinating_Seeds_Sub_P Parameter: Plant Line Value: WS
  misc_feature: MA Experiment 20000307 PARAMETER Experiment Name: At_Germinating_Seeds_Sub_P Parameter: Tissue Value: Germinating Seeds

SEQ ID NO: 94271 - protein, 509 aa, Arabidopsis thaliana; identical to SEQ ID NO: 90515
  peptide (1)..(509): Ceres Seq. ID no. 12724164
  misc_feature (85)..(494): Pfam Name: Plant protein of unknown function Pfam Description: Plant protein of unknown function
  misc_feature (1)..(509): Homolog of NCBI NO: 15229684 NR Description: putative protein; protein id: At3g50150.1
  misc_feature (25)..(509): Homolog of NCBI NO: 15229687 NR Description: putative protein; protein id: At3g50170.1
  misc_feature (30)..(509): Homolog of NCBI NO: 15229680 NR Description: putative protein; protein id: At3g50120.1
  misc_feature (46)..(509): Homolog of NCBI NO: 15229681 NR Description: putative protein; protein id: At3g50130.1
  misc_feature (1)..(272): Homolog of NCBI NO: 15229686 NR Description: putative protein; protein id: At3g50160.1
  misc_feature (286)..(486): Homolog of NCBI NO: 15229686 NR Description: putative protein; protein id: At3g50160.1
  misc_feature (46)..(338): Homolog of NCBI NO: 15229682 NR Description: putative protein; protein id: At3g50140.1
  misc_feature (369)..(509): Homolog of NCBI NO: 15229682 NR Description: putative protein; protein id: At3g50140.1
  misc_feature (38)..(509): Homolog of NCBI NO: 15229689 NR Description: putative protein; protein id: At3g50180.1
  misc_feature (263)..(481): Homolog of NCBI NO: 15229691 NR Description: putative protein; protein id: At3g50190.1

SEQ ID NO: 94272 - protein, 435 aa, Arabidopsis thaliana; identical to SEQ ID NO: 90516
  peptide (1)..(435): Ceres Seq. ID no. 12724165
  misc_feature (11)..(420): Pfam Name: Plant protein of unknown function Pfam Description: Plant protein of unknown function
  misc_feature (1)..(435): Homolog of NCBI NO: 15229684 NR Description: putative protein; protein id: At3g50150.1
  misc_feature (1)..(435): Homolog of NCBI NO: 15229687 NR Description: putative protein; protein id: At3g50170.1
  misc_feature (1)..(435): Homolog of NCBI NO: 15229680 NR Description: putative protein; protein id: At3g50120.1
  misc_feature (1)..(435): Homolog of NCBI NO: 15229681 NR Description: putative protein; protein id: At3g50130.1
  misc_feature (1)..(198): Homolog of NCBI NO: 15229686 NR Description: putative protein; protein id: At3g50160.1
  misc_feature (212)..(412): Homolog of NCBI NO: 15229686 NR Description: putative protein; protein id: At3g50160.1
  misc_feature (1)..(264): Homolog of NCBI NO: 15229682 NR Description: putative protein; protein id: At3g50140.1
  misc_feature (295)..(435): Homolog of NCBI NO: 15229682 NR Description: putative protein; protein id: At3g50140.1
  misc_feature (1)..(435): Homolog of NCBI NO: 15229689 NR Description: putative protein; protein id: At3g50180.1
  misc_feature (189)..(407): Homolog of NCBI NO: 15229691 NR Description: putative protein; protein id: At3g50190.1

SEQ ID NO: 94273 - protein, 383 aa, Arabidopsis thaliana; identical to SEQ ID NO: 90517
  peptide (1)..(383): Ceres Seq. ID no. 12724166
  misc_feature (1)..(368): Pfam Name: Plant protein of unknown function Pfam Description: Plant protein of unknown function
  misc_feature (1)..(383): Homolog of NCBI NO: 15229684 NR Description: putative protein; protein id: At3g50150.1
  misc_feature (1)..(383): Homolog of NCBI NO: 15229687 NR Description: putative protein; protein id: At3g50170.1
  misc_feature (1)..(383): Homolog of NCBI NO: 15229680 NR Description: putative protein; protein id: At3g50120.1
  misc_feature (1)..(383): Homolog of NCBI NO: 15229681 NR Description: putative protein; protein id: At3g50130.1
  misc_feature (1)..(146): Homolog of NCBI NO: 15229686 NR Description: putative protein; protein id: At3g50160.1
  misc_feature (160)..(360): Homolog of NCBI NO: 15229686 NR Description: putative protein; protein id: At3g50160.1
  misc_feature (1)..(212): Homolog of NCBI NO: 15229682 NR Description: putative protein; protein id: At3g50140.1
  misc_feature (243)..(383): Homolog of NCBI NO: 15229682 NR Description: putative protein; protein id: At3g50140.1
  misc_feature (1)..(383): Homolog of NCBI NO: 15229689 NR Description: putative protein; protein id: At3g50180.1
  misc_feature (137)..(355): Homolog of NCBI NO: 15229691 NR Description: putative protein; protein id: At3g50190.1

SEQ ID NO: 94274 - DNA, 1332 bp, Arabidopsis thaliana; identical to SEQ ID NO: 90518
  misc_feature (1)..(1332): Ceres Seq. ID no. 12724179
  misc_feature: MA Experiment ID: 20000307 Result: Up-regulated in Transcription
  misc_feature: MA Experiment 20000307 PARAMETER Experiment Name: At_Germinating_Seeds_Sub_P Parameter: Age (hr) Value: 24 vs. 0
  misc_feature: MA Experiment 20000307 PARAMETER Experiment Name: At_Germinating_Seeds_Sub_P Parameter: Organism Value: A. thaliana
  misc_feature: MA Experiment 20000307 PARAMETER Experiment Name: At_Germinating_Seeds_Sub_P Parameter: Plant Line Value: WS
  misc_feature: MA Experiment 20000307 PARAMETER Experiment Name: At_Germinating_Seeds_Sub_P Parameter: Tissue Value: Germinating Seeds
  misc_feature: MA Experiment ID: 20000314 Result: Up-regulated in Transcription
  misc_feature: MA Experiment 20000314 PARAMETER Experiment Name: At_14day_Shoots-Roots_Sub_P Parameter: Age (day) Value: 14
  misc_feature: MA Experiment 20000314 PARAMETER Experiment Name: At_14day_Shoots-Roots_Sub_P Parameter: Organism Value: A. thaliana
  misc_feature: MA Experiment 20000314 PARAMETER Experiment Name: At_14day_Shoots-Roots_Sub_P Parameter: Plant Line Value: WS
  misc_feature: MA Experiment 20000314 PARAMETER Experiment Name: At_14day_Shoots-Roots_Sub_P Parameter: Tissue Value: Roots vs. Whole Plant
  misc_feature: MA Experiment ID: 20000347 Result: Up-regulated in Transcription
  misc_feature: MA Experiment 20000347 PARAMETER Experiment Name: At_2mM_SA_Sub_P Parameter: Age (day) Value: 14
  misc_feature: MA Experiment 20000347 PARAMETER Experiment Name: At_2mM_SA_Sub_P Parameter: Organism Value: A. thaliana
  misc_feature: MA Experiment 20000347 PARAMETER Experiment Name: At_2mM_SA_Sub_P Parameter: Plant Line Value: WS
  misc_feature: MA Experiment 20000347 PARAMETER Experiment Name: At_2mM_SA_Sub_P Parameter: Timepoint (hr) Value: 6
  misc_feature: MA Experiment 20000347 PARAMETER Experiment Name: At_2mM_SA_Sub_P Parameter: Tissue Value: Aerial
  misc_feature: MA Experiment 20000347 PARAMETER Experiment Name: At_2mM_SA_Sub_P Parameter: Treatment Value: 2mM SA vs. No Treatment
  misc_feature: MA Experiment ID: 20000355 Result: Up-regulated in Transcription
  misc_feature: MA Experiment 20000355 PARAMETER Experiment Name: At_Siliques_Sub_P Parameter: Age (day) Value: 21
  misc_feature: MA Experiment 20000355 PARAMETER Experiment Name: At_Siliques_Sub_P Parameter: Organism Value: A. thaliana
  misc_feature: MA Experiment 20000355 PARAMETER Experiment Name: At_Siliques_Sub_P Parameter: Plant Line Value: WS
  misc_feature: MA Experiment 20000355 PARAMETER Experiment Name: At_Siliques_Sub_P Parameter: Tissue Value: Less Than 5mm Siliques vs. Whole Plant
  misc_feature: MA Experiment ID: 20000440 Result: Up-regulated in Transcription
  misc_feature: MA Experiment 20000440 PARAMETER Experiment Name: At_Closed-Flower__Sub_P Parameter: Tissue Value: Closed Flower vs. Whole Plant

SEQ ID NO: 94275 - protein, 443 aa, Arabidopsis thaliana; identical to SEQ ID NO: 90519
  peptide (1)..(443): Ceres Seq. ID no. 12724180
  misc_feature (2)..(439): Pfam Name: Transferase family Pfam Description: Transferase family
  misc_feature (1)..(443): Homolog of NCBI NO: 15229709 NR Description: anthranilate - like protein; protein id: At3g50280.1 [Arabidopsis thaliana]
  misc_feature (1)..(440): Homolog of NCBI NO: 15229713 NR Description: anthranilate - like protein; protein id: At3g50300.1 [Arabidopsis thaliana]
  misc_feature (4)..(440): Homolog of NCBI NO: 15229707 NR Description: anthranilate - like protein; protein id: At3g50270.1 [Arabidopsis thaliana]
  misc_feature (1)..(435): Homolog of NCBI NO: 15240844 NR Description: anthranilate N-benzoyltransferase -like protein;
  misc_feature (1)..(364): Homolog of NCBI NO: 11357342 NR Description: hypothetical protein F11C1.130 - Arabidopsis >gi|6523040|emb|CAB62308.1| putative protein [Arabidopsis
  misc_feature (1)..(364): Homolog of NCBI NO: 30693289 NR Description: hydroxycinnamoyl benzoyltransferase-related
  misc_feature (365)..(440): Homolog of NCBI NO: 11357342 NR Description: hypothetical protein F11C1.130 - Arabidopsis >gi|6523040|emb|CAB62308.1| putative protein [Arabidopsis
  misc_feature (365)..(440): Homolog of NCBI NO: 30693289 NR Description: hydroxycinnamoyl benzoyltransferase-related
  misc_feature (1)..(440): Homolog of NCBI NO: 15240227 NR Description: anthranilate protein; protein id: At5g67150.1, supported by cDNA: 114226., by cDNA: gi_17381221 [Arabidopsis thaliana]
  misc_feature (3)..(440): Homolog of NCBI NO: 15240229 NR Description: anthranilate protein; protein id: At5g67160.1, supported by cDNA: 32856.,

SEQ ID NO: 94276 - protein, 313 aa, Arabidopsis thaliana; identical to SEQ ID NO: 90520
  peptide (1)..(313): Ceres Seq. ID no. 12724181
  misc_feature (1)..(309): Pfam Name: Transferase family Pfam Description: Transferase family
  misc_feature (1)..(313): Homolog of NCBI NO: 15229709 NR Description: anthranilate - like protein; protein id: At3g50280.1 [Arabidopsis thaliana]
  misc_feature (1)..(310): Homolog of NCBI NO: 15229713 NR Description: anthranilate - like protein; protein id: At3g50300.1 [Arabidopsis thaliana]
  misc_feature (1)..(310): Homolog of NCBI NO: 15229707 NR Description: anthranilate - like protein; protein id: At3g50270.1 [Arabidopsis thaliana]
  misc_feature (1)..(305): Homolog of NCBI NO: 15240844 NR Description: anthranilate N-benzoyltransferase -like protein;
  misc_feature (1)..(234): Homolog of NCBI NO: 11357342 NR Description: hypothetical protein F11C1.130 - Arabidopsis >gi|6523040|emb|CAB62308.1| putative protein [Arabidopsis
  misc_feature (1)..(234): Homolog of NCBI NO: 30693289 NR Description: hydroxycinnamoyl benzoyltransferase-related
  misc_feature (235)..(310): Homolog of NCBI NO: 11357342 NR Description: hypothetical protein F11C1.130 - Arabidopsis >gi|6523040|emb|CAB62308.1| putative protein [Arabidopsis
  misc_feature (235)..(310): Homolog of NCBI NO: 30693289 NR Description: hydroxycinnamoyl benzoyltransferase-related
  misc_feature (1)..(310): Homolog of NCBI NO: 15240227 NR Description: anthranilate protein; protein id: At5g67150.1, supported by cDNA: 114226., by cDNA: gi_17381221 [Arabidopsis thaliana]
  misc_feature (1)..(310): Homolog of NCBI NO: 15240229 NR Description: anthranilate protein; protein id: At5g67160.1, supported by cDNA: 32856.,

SEQ ID NO: 94277 - protein, 292 aa, Arabidopsis thaliana; identical to SEQ ID NO: 90521
  peptide (1)..(292): Ceres Seq. ID no. 12724182
  misc_feature (1)..(288): Pfam Name: Transferase family Pfam Description: Transferase family
  misc_feature (1)..(292): Homolog of NCBI NO: 15229709 NR Description: anthranilate - like protein; protein id: At3g50280.1 [Arabidopsis thaliana]
  misc_feature (1)..(289): Homolog of NCBI NO: 15229713 NR Description: anthranilate - like protein; protein id: At3g50300.1 [Arabidopsis thaliana]
  misc_feature (1)..(289): Homolog of NCBI NO: 15229707 NR Description: anthranilate - like protein; protein id: At3g50270.1 [Arabidopsis thaliana]
  misc_feature (1)..(284): Homolog of NCBI NO: 15240844 NR Description: anthranilate N-benzoyltransferase -like protein;
  misc_feature (1)..(213): Homolog of NCBI NO: 11357342 NR Description: hypothetical protein F11C1.130 - Arabidopsis >gi|6523040|emb|CAB62308.1| putative protein [Arabidopsis
  misc_feature (1)..(213): Homolog of NCBI NO: 30693289 NR Description: hydroxycinnamoyl benzoyltransferase-related
  misc_feature (214)..(289): Homolog of NCBI NO: 11357342 NR Description: hypothetical protein F11C1.130 - Arabidopsis >gi|6523040|emb|CAB62308.1| putative protein [Arabidopsis
  misc_feature (214)..(289): Homolog of NCBI NO: 30693289 NR Description: hydroxycinnamoyl benzoyltransferase-related
  misc_feature (1)..(289): Homolog of NCBI NO: 15240227 NR Description: anthranilate protein; protein id: At5g67150.1, supported by cDNA: 114226., by cDNA: gi_17381221 [Arabidopsis thaliana]
  misc_feature (1)..(289): Homolog of NCBI NO: 15240229 NR Description: anthranilate protein; protein id: At5g67160.1, supported by cDNA: 32856.,

SEQ ID NO: 94278 - DNA, 696 bp, Arabidopsis thaliana; identical to SEQ ID NO: 90522
  misc_feature (1)..(696): Ceres Seq. ID no. 12724191
  misc_feature: MA Experiment ID: 20000307 Result: Up-regulated in Transcription
  misc_feature: MA Experiment 20000307 PARAMETER Experiment Name: At_Germinating_Seeds_Sub_P Parameter: Age (hr) Value: 24 vs. 0
  misc_feature: MA Experiment 20000307 PARAMETER Experiment Name: At_Germinating_Seeds_Sub_P Parameter: Organism Value: A. thaliana
  misc_feature: MA Experiment 20000307 PARAMETER Experiment Name: At_Germinating_Seeds_Sub_P Parameter: Plant Line Value: WS
  misc_feature: MA Experiment 20000307 PARAMETER Experiment Name: At_Germinating_Seeds_Sub_P Parameter: Tissue Value: Germinating Seeds
  misc_feature: MA Experiment ID: 20000355 Result: Down-regulated in Transcription
  misc_feature: MA Experiment 20000355 PARAMETER Experiment Name: At_Siliques_Sub_P Parameter: Age (day) Value: 21
  misc_feature: MA Experiment 20000355 PARAMETER Experiment Name: At_Siliques_Sub_P Parameter: Organism Value: A. thaliana
  misc_feature: MA Experiment 20000355 PARAMETER Experiment Name: At_Siliques_Sub_P Parameter: Plant Line Value: WS
  misc_feature: MA Experiment 20000355 PARAMETER Experiment Name: At_Siliques_Sub_P Parameter: Tissue Value: Less Than 5mm Siliques vs. Whole Plant
  misc_feature: MA Experiment ID: 20000440 Result: Up-regulated in Transcription
  misc_feature: MA Experiment 20000440 PARAMETER Experiment Name: At_Closed-Flower__Sub_P Parameter: Tissue Value: Closed Flower vs. Whole Plant

SEQ ID NO: 94279 - protein, 231 aa, Arabidopsis thaliana; identical to SEQ ID NO: 90523
  peptide (1)..(231): Ceres Seq. ID no. 12724192
  misc_feature (128)..(175): Pfam Name: Helix-loop-helix DNA-binding domain Pfam Description: Helix-loop-helix DNA-binding domain
  misc_feature (1)..(231): Homolog of NCBI NO: 15229725 NR Description: putative protein; protein id: At3g50330.1
  misc_feature (1)..(231): Homolog of NCBI NO: 15240189 NR Description: putative protein; protein id: At5g67060.1, by cDNA: gi_20127096 [Arabidopsis thaliana] emb|CAB62312.1~gene_id:K21H1.2~similar to unknown protein
  misc_feature (92)..(184): Homolog of NCBI NO: 15242494 NR Description: putative protein; protein id: At5g09750.1
  misc_feature (29)..(187): Homolog of NCBI NO: 15236714 NR Description: hypothetical protein; protein id: At4g00120.1
  misc_feature (76)..(182): Homolog of NCBI NO: 9294680 NR Description: emb|CAB62312.1~gene_id:MHC9.1~similar to unknown
  misc_feature (76)..(182): Homolog of NCBI NO: 15232534 NR Description: hypothetical protein; protein id: At3g21330.1, by cDNA: gi_20127094 [Arabidopsis thaliana]
  misc_feature (76)..(182): Homolog of NCBI NO: 28393737 NR Description: unknown protein [Arabidopsis thaliana]
  misc_feature (88)..(182): Homolog of NCBI NO: 34910410 NR Description: P0692C11.28 [Oryza sativa (japonica
  misc_feature (88)..(182): Homolog of NCBI NO: 15289790 NR Description: P0002B05.9 [Oryza sativa (japonica
  misc_feature (88)..(182): Homolog of NCBI NO: 34914234 NR Description: P0697C12.24 [Oryza sativa (japonica

SEQ ID NO: 94280 - protein, 224 aa, Arabidopsis thaliana; identical to SEQ ID NO: 90524
  peptide (1)..(224): Ceres Seq. ID no. 12724193
  misc_feature (121)..(168): Pfam Name: Helix-loop-helix DNA-binding domain Pfam Description: Helix-loop-helix DNA-binding domain
  misc_feature (1)..(224): Homolog of NCBI NO: 15229725 NR Description: putative protein; protein id: At3g50330.1
  misc_feature (1)..(224): Homolog of NCBI NO: 15240189 NR Description: putative protein; protein id: At5g67060.1, by cDNA: gi_20127096 [Arabidopsis thaliana] emb|CAB62312.1~gene_id:K21H1.2~similar to unknown protein
  misc_feature (85)..(177): Homolog of NCBI NO: 15242494 NR Description: putative protein; protein id: At5g09750.1
  misc_feature (22)..(180): Homolog of NCBI NO: 15236714 NR Description: hypothetical protein; protein id: At4g00120.1
  misc_feature (69)..(175): Homolog of NCBI NO: 9294680 NR Description: emb|CAB62312.1~gene_id:MHC9.1~similar to unknown
  misc_feature (69)..(175): Homolog of NCBI NO: 15232534 NR Description: hypothetical protein; protein id: At3g21330.1, by cDNA: gi_20127094 [Arabidopsis thaliana]
  misc_feature (69)..(175): Homolog of NCBI NO: 28393737 NR Description: unknown protein [Arabidopsis thaliana]
  misc_feature (81)..(175): Homolog of NCBI NO: 34910410 NR Description: P0692C11.28 [Oryza sativa (japonica
  misc_feature (81)..(175): Homolog of NCBI NO: 15289790 NR Description: P0002B05.9 [Oryza sativa (japonica
  misc_feature (81)..(175): Homolog of NCBI NO: 34914234 NR Description: P0697C12.24 [Oryza sativa (japonica

SEQ ID NO: 94281 - protein, 222 aa, Arabidopsis thaliana; identical to SEQ ID NO: 90525
  peptide (1)..(222): Ceres Seq. ID no. 12724194
  misc_feature (119)..(166): Pfam Name: Helix-loop-helix DNA-binding domain Pfam Description: Helix-loop-helix DNA-binding domain
  misc_feature (1)..(222): Homolog of NCBI NO: 15229725 NR Description: putative protein; protein id: At3g50330.1
  misc_feature (1)..(222): Homolog of NCBI NO: 15240189 NR Description: putative protein; protein id: At5g67060.1, by cDNA: gi_20127096 [Arabidopsis thaliana] emb|CAB62312.1~gene_id:K21H1.2~similar to unknown protein
  misc_feature (83)..(175): Homolog of NCBI NO: 15242494 NR Description: putative protein; protein id: At5g09750.1
  misc_feature (20)..(178): Homolog of NCBI NO: 15236714 NR Description: hypothetical protein; protein id: At4g00120.1
  misc_feature (67)..(173): Homolog of NCBI NO: 9294680 NR Description: emb|CAB62312.1~gene_id:MHC9.1~similar to unknown
  misc_feature (67)..(173): Homolog of NCBI NO: 15232534 NR Description: hypothetical protein; protein id: At3g21330.1, by cDNA: gi_20127094 [Arabidopsis thaliana]
  misc_feature (67)..(173): Homolog of NCBI NO: 28393737 NR Description: unknown protein [Arabidopsis thaliana]
  misc_feature (79)..(173): Homolog of NCBI NO: 34910410 NR Description: P0692C11.28 [Oryza sativa (japonica
  misc_feature (79)..(173): Homolog of NCBI NO: 15289790 NR Description: P0002B05.9 [Oryza sativa (japonica
  misc_feature (79)..(173): Homolog of NCBI NO: 34914234 NR Description: P0697C12.24 [Oryza sativa (japonica

SEQ ID NO: 94282 - DNA, 1401 bp, Arabidopsis thaliana; identical to SEQ ID NO: 90526
  misc_feature (1)..(1401): Ceres Seq. ID no. 12724197
  misc_feature: MA Experiment ID: 20000348 Result: Up-regulated in Transcription
  misc_feature: MA Experiment 20000348 PARAMETER Experiment Name: At_100uM_ABA_Sub_P Parameter: Age (day) Value: 14
  misc_feature: MA Experiment 20000348 PARAMETER Experiment Name: At_100uM_ABA_Sub_P Parameter: Organism Value: A. thaliana
  misc_feature: MA Experiment 20000348 PARAMETER Experiment Name: At_100uM_ABA_Sub_P Parameter: Plant Line Value: WS
  misc_feature: MA Experiment 20000348 PARAMETER Experiment Name: At_100uM_ABA_Sub_P Parameter: Timepoint (hr) Value: 1
  misc_feature: MA Experiment 20000348 PARAMETER Experiment Name: At_100uM_ABA_Sub_P Parameter: Tissue Value: Aerial
  misc_feature: MA Experiment 20000348 PARAMETER Experiment Name: At_100uM_ABA_Sub_P Parameter: Treatment Value: 100uM ABA vs. No Treatment
  misc_feature: MA Experiment ID: 20000352 Result: Up-regulated in Transcription
  misc_feature: MA Experiment 20000352 PARAMETER Experiment Name: At_Drought_Sub_P Parameter: Age (day) Value: 7
  misc_feature: MA Experiment 20000352 PARAMETER Experiment Name: At_Drought_Sub_P Parameter: Organism Value: A. thaliana
  misc_feature: MA Experiment 20000352 PARAMETER Experiment Name: At_Drought_Sub_P Parameter: Plant Line Value: WS
  misc_feature: MA Experiment 20000352 PARAMETER Experiment Name: At_Drought_Sub_P Parameter: Timepoint (hr) Value: 6
  misc_feature: MA Experiment 20000352 PARAMETER Experiment Name: At_Drought_Sub_P Parameter: Tissue Value: Whole Plant
  misc_feature: MA Experiment 20000352 PARAMETER Experiment Name: At_Drought_Sub_P Parameter: Treatment Value: Drought vs. No Drought

SEQ ID NO: 94283 - protein, 466 aa, Arabidopsis thaliana; identical to SEQ ID NO: 90527
  peptide (1)..(466): Ceres Seq. ID no. 12724198
  misc_feature (1)..(466): Homolog of NCBI NO: 15229740 NR Description: G-protein beta family; protein id: At3g50390.1
  misc_feature (63)..(438): Homolog of NCBI NO: 15225317 NR Description: G-protein beta family; protein id: At2g26490.1
  misc_feature (26)..(423): Homolog of NCBI NO: 15235354 NR Description: G-protein beta family; protein id: At4g34380.1
  misc_feature (4)..(429): Homolog of NCBI NO: 15230244 NR Description: hypothetical protein; protein id: At3g18950.1
  misc_feature (2)..(423): Homolog of NCBI NO: 15222143 NR Description: En/Spm-like transposon protein, putative; protein At1g49450.1, supported by cDNA: gi_17979258 [Arabidopsis >gi|25405310|pir||B96531 hypothetical protein F13F21.11
  misc_feature (2)..(423): Homolog of NCBI NO: 17979259 NR Description: At1g49450/F13F21_11 [Arabidopsis thaliana]
  misc_feature (87)..(447): Homolog of NCBI NO: 31126785 NR Description: putative WD repeat-protein [Oryza sativa
  misc_feature (72)..(421): Homolog of NCBI NO: 15220271 NR Description: G-protein beta family; protein id: At1g47610.1
  misc_feature (88)..(425): Homolog of NCBI NO: 15221675 NR Description: G-protein beta family; protein id: At1g24130.1
  misc_feature (45)..(421): Homolog of NCBI NO: 15231088 NR Description: G-protein beta family; protein id: At3g51930.1

SEQ ID NO: 94284 - protein, 293 aa, Arabidopsis thaliana; identical to SEQ ID NO: 90528
  peptide (1)..(293): Ceres Seq. ID no. 12724199
  misc_feature (1)..(293): Homolog of NCBI NO: 15229740 NR Description: G-protein beta family; protein id: At3g50390.1
  misc_feature (1)..(265): Homolog of NCBI NO: 15225317 NR Description: G-protein beta family; protein id: At2g26490.1
  misc_feature (1)..(250): Homolog of NCBI NO: 15235354 NR Description: G-protein beta family; protein id: At4g34380.1
  misc_feature (1)..(256): Homolog of NCBI NO: 15230244 NR Description: hypothetical protein; protein id: At3g18950.1
  misc_feature (1)..(250): Homolog of NCBI NO: 15222143 NR Description: En/Spm-like transposon protein, putative; protein At1g49450.1, supported by cDNA: gi_17979258 [Arabidopsis >gi|25405310|pir||B96531 hypothetical protein F13F21.11
  misc_feature (1)..(250): Homolog of NCBI NO: 17979259 NR Description: At1g49450/F13F21_11 [Arabidopsis thaliana]
  misc_feature (1)..(274): Homolog of NCBI NO: 31126785 NR Description: putative WD repeat-protein [Oryza sativa
  misc_feature (1)..(248): Homolog of NCBI NO: 15220271 NR Description: G-protein beta family; protein id: At1g47610.1
  misc_feature (1)..(252): Homolog of NCBI NO: 15221675 NR Description: G-protein beta family; protein id: At1g24130.1
  misc_feature (1)..(248): Homolog of NCBI NO: 15231088 NR Description: G-protein beta family; protein id: At3g51930.1

SEQ ID NO: 94285 - DNA, 1691 bp, Arabidopsis thaliana; identical to SEQ ID NO: 90529
  misc_feature (1)..(1691): Ceres Seq. ID no. 12724226
  misc_feature: MA Experiment ID: 20000185 Result: Up-regulated in Transcription
  misc_feature: MA Experiment 20000185 PARAMETER Experiment Name: At_Roots__P Parameter: Age (day) Value: 7 vs. 21
  misc_feature: MA Experiment 20000185 PARAMETER Experiment Name: At_Roots__P Parameter: Organism Value: A. thaliana
  misc_feature: MA Experiment 20000185 PARAMETER Experiment Name: At_Roots__P Parameter: Tissue Value: Roots vs. Whole Plant
  misc_feature: MA Experiment ID: 20000234 Result: Up-regulated in Transcription
  misc_feature: MA Experiment 20000234 PARAMETER Experiment Name: At_Siliques_P Parameter: Age (day) Value: 21
  misc_feature: MA Experiment 20000234 PARAMETER Experiment Name: At_Siliques_P Parameter: Organism Value: A. thaliana
  misc_feature: MA Experiment 20000234 PARAMETER Experiment Name: At_Siliques_P Parameter: Plant Line Value: WS
  misc_feature: MA Experiment 20000234 PARAMETER Experiment Name: At_Siliques_P Parameter: Tissue Value: Less Than 5mm Siliques vs. Whole Plant
  misc_feature: MA Experiment ID: 20000495 Result: Up-regulated in Transcription
  misc_feature: MA Experiment 20000495 PARAMETER Experiment Name: At_Guard_Cells_P Parameter: Harvest Date Value: 8/2/2002
  misc_feature: MA Experiment 20000495 PARAMETER Experiment Name: At_Guard_Cells_P Parameter: Organism Value: A. thaliana
  misc_feature: MA Experiment 20000495 PARAMETER Experiment Name: At_Guard_Cells_P Parameter: Tissue Value: Guard Cells vs. Leaves
  misc_feature: MA Experiment ID: 20000496 Result: Up-regulated in Transcription
  misc_feature: MA Experiment 20000496 PARAMETER Experiment Name: At_Guard_Cells_P Parameter: Harvest Date Value: 7/19/2002
  misc_feature: MA Experiment 20000496 PARAMETER Experiment Name: At_Guard_Cells_P Parameter: Organism Value: Canola
  misc_feature: MA Experiment 20000496 PARAMETER Experiment Name: At_Guard_Cells_P Parameter: Tissue Value: Guard Cells vs. Leaves

SEQ ID NO: 94286 - protein, 522 aa, Arabidopsis thaliana; identical to SEQ ID NO: 90530
  peptide (1)..(522): Ceres Seq. ID no. 12724227
  misc_feature (10)..(522): Homolog of NCBI NO: 15229822 NR Description: steroid 22-alpha-hydroxylase (DWF4); protein id:
  misc_feature (10)..(522): Homolog of NCBI NO: 2935342 NR Description: steroid 22-alpha-hydroxylase; DWF4; CYP90B1
  misc_feature (21)..(318): Homolog of NCBI NO: 15239203 NR Description: cytochrome p450, putative; protein id: supported by cDNA: 36334., supported by cDNA: gi_14596098, by cDNA: gi_15450716, supported by cDNA: gi_17380617, supported
  misc_feature (289)..(520): Homolog of NCBI NO: 15239203 NR Description: cytochrome p450, putative; protein id: supported by cDNA: 36334., supported by cDNA: gi_14596098, by cDNA: gi_15450716, supported by cDNA: gi_17380617, supported
  misc_feature (272)..(518): Homolog of NCBI NO: 22326806 NR Description: cytochrome p450 family; protein id: At5g14400.1
  misc_feature (54)..(276): Homolog of NCBI NO: 22326806 NR Description: cytochrome p450 family; protein id: At5g14400.1
  misc_feature (271)..(521): Homolog of NCBI NO: 34902330 NR Description: Putative steroid 22-alpha-hydroxylase [Oryza
  misc_feature (294)..(517): Homolog of NCBI NO: 32487441 NR Description: OSJNBa0016O02.25 [Oryza sativa (japonica
  misc_feature (19)..(181): Homolog of NCBI NO: 32487441 NR Description: OSJNBa0016O02.25 [Oryza sativa (japonica
  misc_feature (42)..(319): Homolog of NCBI NO: 34902330 NR Description: Putative steroid 22-alpha-hydroxylase [Oryza

SEQ ID NO: 94287 - protein, 513 aa, Arabidopsis thaliana; identical to SEQ ID NO: 90531
  peptide (1)..(513): Ceres Seq. ID no. 12724228
  misc_feature (1)..(513): Homolog of NCBI NO: 15229822 NR Description: steroid 22-alpha-hydroxylase (DWF4); protein id:
  misc_feature (1)..(513): Homolog of NCBI NO: 2935342 NR Description: steroid 22-alpha-hydroxylase; DWF4; CYP90B1
  misc_feature (12)..(309): Homolog of NCBI NO: 15239203 NR Description: cytochrome p450, putative; protein id: supported by cDNA: 36334., supported by cDNA: gi_14596098, by cDNA: gi_15450716, supported by cDNA: gi_17380617, supported
  misc_feature (280)..(511): Homolog of NCBI NO: 15239203 NR Description: cytochrome p450, putative; protein id: supported by cDNA: 36334., supported by cDNA: gi_14596098, by cDNA: gi_15450716, supported by cDNA: gi_17380617, supported
  misc_feature (263)..(509): Homolog of NCBI NO: 22326806 NR Description: cytochrome p450 family; protein id: At5g14400.1
  misc_feature (45)..(267): Homolog of NCBI NO: 22326806 NR Description: cytochrome p450 family; protein id: At5g14400.1
  misc_feature (262)..(512): Homolog of NCBI NO: 34902330 NR Description: Putative steroid 22-alpha-hydroxylase [Oryza
  misc_feature (285)..(508): Homolog of NCBI NO: 32487441 NR Description: OSJNBa0016O02.25 [Oryza sativa (japonica
  misc_feature (10)..(172): Homolog of NCBI NO: 32487441 NR Description: OSJNBa0016O02.25 [Oryza sativa (japonica
  misc_feature (33)..(310): Homolog of NCBI NO: 34902330 NR Description: Putative steroid 22-alpha-hydroxylase [Oryza

SEQ ID NO: 94288 - protein, 446 aa, Arabidopsis thaliana; identical to SEQ ID NO: 90532
  peptide (1)..(446): Ceres Seq. ID no. 12724229
  misc_feature (1)..(446): Homolog of NCBI NO: 15229822 NR Description: steroid 22-alpha-hydroxylase (DWF4); protein id:
  misc_feature (1)..(446): Homolog of NCBI NO: 2935342 NR Description: steroid 22-alpha-hydroxylase; DWF4; CYP90B1
  misc_feature (1)..(242): Homolog of NCBI NO: 15239203 NR Description: cytochrome p450, putative; protein id: supported by cDNA: 36334., supported by cDNA: gi_14596098, by cDNA: gi_15450716, supported by cDNA: gi_17380617, supported
  misc_feature (213)..(444): Homolog of NCBI NO: 15239203 NR Description: cytochrome p450, putative; protein id: supported by cDNA: 36334., supported by cDNA: gi_14596098, by cDNA: gi_15450716, supported by cDNA: gi_17380617, supported
  misc_feature (196)..(442): Homolog of NCBI NO: 22326806 NR Description: cytochrome p450 family; protein id: At5g14400.1
  misc_feature (1)..(200): Homolog of NCBI NO: 22326806 NR Description: cytochrome p450 family; protein id: At5g14400.1
  misc_feature (195)..(445): Homolog of NCBI NO: 34902330 NR Description: Putative steroid 22-alpha-hydroxylase [Oryza
  misc_feature (218)..(441): Homolog of NCBI NO: 32487441 NR Description: OSJNBa0016O02.25 [Oryza sativa (japonica
  misc_feature (1)..(105): Homolog of NCBI NO: 32487441 NR Description: OSJNBa0016O02.25 [Oryza sativa (japonica
  misc_feature (1)..(243): Homolog of NCBI NO: 34902330 NR Description: Putative steroid 22-alpha-hydroxylase [Oryza

SEQ ID NO: 94289 - DNA, 2424 bp, Arabidopsis thaliana; identical to SEQ ID NO: 90533
  misc_feature (1)..(2424): Ceres Seq. ID no. 12724230
  misc_feature: MA Experiment ID: 20000265 Result: Up-regulated in Transcription
  misc_feature: MA Experiment 20000265 PARAMETER Experiment Name: At_Open_Flower_P Parameter: Age (day) Value: 21
  misc_feature: MA Experiment 20000265 PARAMETER Experiment Name: At_Open_Flower_P Parameter: Plant Line Value: WS
  misc_feature: MA Experiment 20000265 PARAMETER Experiment Name: At_Open_Flower_P Parameter: Tissue Value: Closed Flower vs. Whole Plant
  misc_feature: MA Experiment ID: 20000495 Result: Up-regulated in Transcription
  misc_feature: MA Experiment 20000495 PARAMETER Experiment Name: At_Guard_Cells_P Parameter: Harvest Date Value: 8/2/2002
  misc_feature: MA Experiment 20000495 PARAMETER Experiment Name: At_Guard_Cells_P Parameter: Organism Value: A. thaliana
  misc_feature: MA Experiment 20000495 PARAMETER Experiment Name: At_Guard_Cells_P Parameter: Tissue Value: Guard Cells vs. Leaves
  misc_feature: MA Experiment ID: 20000794 Result: Up-regulated in Transcription
  misc_feature: MA Experiment 20000794 PARAMETER Experiment Name: At_Petals_P Parameter: Age (day) Value: 23-25 days
  misc_feature: MA Experiment 20000794 PARAMETER Experiment Name: At_Petals_P Parameter: Plant Line Value: WS
  misc_feature: MA Experiment 20000794 PARAMETER Experiment Name: At_Petals_P Parameter: Tissue Value: Petals vs. Whole plant

SEQ ID NO: 94290 - protein, 241 aa, Arabidopsis thaliana; identical to SEQ ID NO: 90534
  peptide (1)..(241): Ceres Seq. ID no. 12724231
  misc_feature (52)..(237): Pfam Name: Caldesmon Pfam Description: Caldesmon
  misc_feature (1)..(241): Homolog of NCBI NO: 15229825 NR Description: U1 small nuclear ribonucleoprotein 70 (U1-70k); id: At3g50670.1, supported by cDNA: gi_14532499, supported by gi_20334805 [Arabidopsis thaliana]
  misc_feature (1)..(222): Homolog of NCBI NO: 322618 NR Description: U1 snRNP 70K protein - Arabidopsis thaliana
  misc_feature (1)..(239): Homolog of NCBI NO: 37530562 NR Description: putative U1 small nuclear ribonucleoprotein
  misc_feature (65)..(221): Homolog of NCBI NO: 37530562 NR Description: putative U1 small nuclear ribonucleoprotein
  misc_feature (63)..(240): Homolog of NCBI NO: 37530562 NR Description: putative U1 small nuclear ribonucleoprotein
  misc_feature (1)..(238): Homolog of NCBI NO: 134091 NR Description: U1 small nuclear ribonucleoprotein 70 kDa (U1
  misc_feature (1)..(219): Homolog of NCBI NO: 337445 NR Description: ribonucleoprotein antigen
  misc_feature (1)..(237): Homolog of NCBI NO: 88959 NR Description: U1 snRNP 70K protein - human
  misc_feature (1)..(237): Homolog of NCBI NO: 29568103 NR Description: U1 small nuclear ribonucleoprotein 70 kDa; small ribonucleoprotein 70kD polypeptide (RNP antigen) [Homo sapiens]
  misc_feature (1)..(191): Homolog of NCBI NO: 34856077 NR Description: similar to U1 small nuclear ribonucleoprotein 70

SEQ ID NO: 94291 - protein, 237 aa, Arabidopsis thaliana; identical to SEQ ID NO: 90535
  peptide (1)..(237): Ceres Seq. ID no. 12724232

SEQ ID NO: 94292 - protein, 236 aa, Arabidopsis thaliana; identical to SEQ ID NO: 90536
  peptide (1)..(236): Ceres Seq. ID no. 12724233
  misc_feature (47)..(232): Pfam Name: Caldesmon Pfam Description: Caldesmon
  misc_feature (1)..(236): Homolog of NCBI NO: 15229825 NR Description: U1 small nuclear ribonucleoprotein 70 (U1-70k); id: At3g50670.1, supported by cDNA: gi_14532499, supported by gi_20334805 [Arabidopsis thaliana]
  misc_feature (1)..(217): Homolog of NCBI NO: 322618 NR Description: U1 snRNP 70K protein - Arabidopsis thaliana
  misc_feature (1)..(234): Homolog of NCBI NO: 37530562 NR Description: putative U1 small nuclear ribonucleoprotein
  misc_feature (60)..(216): Homolog of NCBI NO: 37530562 NR Description: putative U1 small nuclear ribonucleoprotein
  misc_feature (58)..(235): Homolog of NCBI NO: 37530562 NR Description: putative U1 small nuclear ribonucleoprotein
  misc_feature (1)..(233): Homolog of NCBI NO: 134091 NR Description: U1 small nuclear ribonucleoprotein 70 kDa (U1
  misc_feature (1)..(214): Homolog of NCBI NO: 337445 NR Description: ribonucleoprotein antigen
  misc_feature (1)..(232): Homolog of NCBI NO: 88959 NR Description: U1 snRNP 70K protein - human
  misc_feature (1)..(232): Homolog of NCBI NO: 29568103 NR Description: U1 small nuclear ribonucleoprotein 70 kDa; small ribonucleoprotein 70kD polypeptide (RNP antigen) [Homo sapiens]
  misc_feature (1)..(186): Homolog of NCBI NO: 34856077 NR Description: similar to U1 small nuclear ribonucleoprotein 70

SEQ ID NO: 94293 - DNA, 1113 bp, Arabidopsis thaliana; identical to SEQ ID NO: 90537
  misc_feature (1)..(1113): Ceres Seq. ID no. 12724242
  misc_feature: MA Experiment ID: 20000184 Result: Up-regulated in Transcription
  misc_feature: MA Experiment 20000184 PARAMETER Experiment Name: At_Shoots__P Parameter: Age (day) Value: 7
  misc_feature: MA Experiment 20000184 PARAMETER Experiment Name: At_Shoots__P Parameter: Tissue Value: Shoots vs. Whole Plant

SEQ ID NO: 94294 - protein, 370 aa, Arabidopsis thaliana; identical to SEQ ID NO: 90538
  peptide (1)..(370): Ceres Seq. ID no. 12724243
  misc_feature (36)..(295): Pfam Name: Protein kinase domain Pfam Description: Protein kinase domain
  misc_feature (1)..(370): Homolog of NCBI NO: 15230296 NR Description: protein kinase ATN1 - like protein; protein id:
  misc_feature (13)..(361): Homolog of NCBI NO: 15230295 NR Description: protein kinase ATN1 -like protein; protein id:
  misc_feature (8)..(362): Homolog of NCBI NO: 15240070 NR Description: protein kinase ATN1-like protein; protein id:
  misc_feature (23)..(308): Homolog of NCBI NO: 32815816 NR Description: protein kinase [Cucumis sativus]
  misc_feature (23)..(329): Homolog of NCBI NO: 15232197 NR Description: putative protein kinase, ATN1; protein id: supported by cDNA: gi_16604327, supported by cDNA: gi_19699189 thaliana] >gi|11994183|dbj|BAB01286.1| nearly identical to
  misc_feature (23)..(308): Homolog of NCBI NO: 2129698 NR Description: protein kinase ATN1 (EC 2.7.1.-) - Arabidopsis
  misc_feature (23)..(307): Homolog of NCBI NO: 15240630 NR Description: protein kinase ATN1-like protein; protein id:
  misc_feature (23)..(304): Homolog of NCBI NO: 15237443 NR Description: protein kinase - like protein; protein id: [Arabidopsis thaliana] >gi|9758080|dbj|BAB08524.1| protein kinase
  misc_feature (25)..(299): Homolog of NCBI NO: 28876011 NR Description: putative protein kinase [Oryza sativa (japonica
  misc_feature (24)..(299): Homolog of NCBI NO: 30679428 NR Description: protein kinase, putative [Arabidopsis thaliana]

SEQ ID NO: 94295 - protein, 366 aa, Arabidopsis thaliana; identical to SEQ ID NO: 90539
  peptide (1)..(366): Ceres Seq. ID no. 12724244
  misc_feature (32)..(291): Pfam Name: Protein kinase domain Pfam Description: Protein kinase domain
  misc_feature (1)..(366): Homolog of NCBI NO: 15230296 NR Description: protein kinase ATN1 - like protein; protein id:
  misc_feature (9)..(357): Homolog of NCBI NO: 15230295 NR Description: protein kinase ATN1 -like protein; protein id:
  misc_feature (4)..(358): Homolog of NCBI NO: 15240070 NR Description: protein kinase ATN1-like protein; protein id:
  misc_feature (19)..(304): Homolog of NCBI NO: 32815816 NR Description: protein kinase [Cucumis sativus]
  misc_feature (19)..(325): Homolog of NCBI NO: 15232197 NR Description: putative protein kinase, ATN1; protein id: supported by cDNA: gi_16604327, supported by cDNA: gi_19699189 thaliana] >gi|11994183|dbj|BAB01286.1| nearly identical to
  misc_feature (19)..(304): Homolog of NCBI NO: 2129698 NR Description: protein kinase ATN1 (EC 2.7.1.-) - Arabidopsis
  misc_feature (19)..(303): Homolog of NCBI NO: 15240630 NR Description: protein kinase ATN1-like protein; protein id:
  misc_feature (19)..(300): Homolog of NCBI NO: 15237443 NR Description: protein kinase - like protein; protein id: [Arabidopsis thaliana] >gi|9758080|dbj|BAB08524.1| protein kinase
  misc_feature (21)..(295): Homolog of NCBI NO: 28876011 NR Description: putative protein kinase [Oryza sativa (japonica
  misc_feature (20)..(295): Homolog of NCBI NO: 30679428 NR Description: protein kinase, putative [Arabidopsis thaliana]

SEQ ID NO: 94296 - protein, 330 aa, Arabidopsis thaliana; identical to SEQ ID NO: 90540
  peptide (1)..(330): Ceres Seq. ID no. 12724245
  misc_feature (1)..(255): Pfam Name: Protein kinase domain Pfam Description: Protein kinase domain
  misc_feature (1)..(330): Homolog of NCBI NO: 15230296 NR Description: protein kinase ATN1 - like protein; protein id:
  misc_feature (1)..(321): Homolog of NCBI NO: 15230295 NR Description: protein kinase ATN1 -like protein; protein id:
  misc_feature (1)..(322): Homolog of NCBI NO: 15240070 NR Description: protein kinase ATN1-like protein; protein id:
  misc_feature (1)..(268): Homolog of NCBI NO: 32815816 NR Description: protein kinase [Cucumis sativus]
  misc_feature (1)..(289): Homolog of NCBI NO: 15232197 NR Description: putative protein kinase, ATN1; protein id: supported by cDNA: gi_16604327, supported by cDNA: gi_19699189 thaliana] >gi|11994183|dbj|BAB01286.1| nearly identical to
  misc_feature (1)..(268): Homolog of NCBI NO: 2129698 NR Description: protein kinase ATN1 (EC 2.7.1.-) - Arabidopsis
  misc_feature (1)..(267): Homolog of NCBI NO: 15240630 NR Description: protein kinase ATN1-like protein; protein id:
  misc_feature (1)..(264): Homolog of NCBI NO: 15237443 NR Description: protein kinase - like protein; protein id: [Arabidopsis thaliana] >gi|9758080|dbj|BAB08524.1| protein kinase
  misc_feature (1)..(259): Homolog of NCBI NO: 28876011 NR Description: putative protein kinase [Oryza sativa (japonica
  misc_feature (1)..(259): Homolog of NCBI NO: 30679428 NR Description: protein kinase, putative [Arabidopsis thaliana]

SEQ ID NO: 94297 - DNA, 2820 bp, Arabidopsis thaliana; identical to SEQ ID NO: 90541
  misc_feature (1)..(2820): Ceres Seq. ID no. 12724263
  misc_feature: MA Experiment ID: 20000794 Result: Up-regulated in Transcription
  misc_feature: MA Experiment 20000794 PARAMETER Experiment Name: At_Petals_P Parameter: Age (day) Value: 23-25 days
  misc_feature: MA Experiment 20000794 PARAMETER Experiment Name: At_Petals_P Parameter: Plant Line Value: WS
  misc_feature: MA Experiment 20000794 PARAMETER Experiment Name: At_Petals_P Parameter: Tissue Value: Petals vs. Whole plant
  misc_feature: MA Experiment ID: 20001451 Result: Up-regulated in Transcription
  misc_feature: MA Experiment 20001451 PARAMETER Experiment Name: At_Far-red-induction_P Parameter: Age (day) Value: 7
  misc_feature: MA Experiment 20001451 PARAMETER Experiment Name: At_Far-red-induction_P Parameter: Light Value: Far-red vs. White
  misc_feature: MA Experiment 20001451 PARAMETER Experiment Name: At_Far-red-induction_P Parameter: Organism Value: A. thaliana
  misc_feature: MA Experiment 20001451 PARAMETER Experiment Name: At_Far-red-induction_P Parameter: Plant Line Value: Columbia
  misc_feature: MA Experiment 20001451 PARAMETER Experiment Name: At_Far-red-induction_P Parameter: Timepoint (hr) Value: 24
  misc_feature: MA Experiment 20001451 PARAMETER Experiment Name: At_Far-red-induction_P Parameter: Tissue Value: Whole Plant
  misc_feature: MA Experiment ID: 20001905 Result: Up-regulated in Transcription
  misc_feature: MA Experiment 20001905 PARAMETER Experiment Name: At_Drought_Reproduction_P Parameter: Age (day) Value: 40
  misc_feature: MA Experiment 20001905 PARAMETER Experiment Name: At_Drought_Reproduction_P Parameter: Organism Value: A. thaliana
  misc_feature: MA Experiment 20001905 PARAMETER Experiment Name: At_Drought_Reproduction_P Parameter: Plant Line Value: WS
  misc_feature: MA Experiment 20001905 PARAMETER Experiment Name: At_Drought_Reproduction_P Parameter: Timepoint (day) Value: 10
  misc_feature: MA Experiment 20001905 PARAMETER Experiment Name: At_Drought_Reproduction_P Parameter: Tissue Value: Rosettes
  misc_feature: MA Experiment 20001905 PARAMETER Experiment Name: At_Drought_Reproduction_P Parameter: Treatment Value: Drought vs. No Drought
  misc_feature: MA Experiment ID: 20001911 Result: Up-regulated in Transcription
  misc_feature: MA Experiment 20001911 PARAMETER Experiment Name: At_Drought_Reproduction_P Parameter: Age (day) Value: 40
  misc_feature: MA Experiment 20001911 PARAMETER Experiment Name: At_Drought_Reproduction_P Parameter: Organism Value: A. thaliana
  misc_feature: MA Experiment 20001911 PARAMETER Experiment Name: At_Drought_Reproduction_P Parameter: Plant Line Value: WS
  misc_feature: MA Experiment 20001911 PARAMETER Experiment Name: At_Drought_Reproduction_P Parameter: Timepoint (day) Value: 10
  misc_feature: MA Experiment 20001911 PARAMETER Experiment Name: At_Drought_Reproduction_P Parameter: Tissue Value: Flowers
  misc_feature: MA Experiment 20001911 PARAMETER Experiment Name: At_Drought_Reproduction_P Parameter: Treatment Value: Drought vs. No Drought

SEQ ID NO: 94298 - protein, 820 aa, Arabidopsis thaliana; identical to SEQ ID NO: 90542
  peptide (1)..(820): Ceres Seq. ID no. 12724264
  misc_feature (156)..(219): Pfam Name: PAS domain Pfam Description: PAS domain
  misc_feature (60)..(819): Homolog of NCBI NO: 15230753 NR Description: protein kinase, putative; protein id:
  misc_feature (128)..(820): Homolog of NCBI NO: 12321912 NR Description: protein kinase, putative; 42705-46677
  misc_feature (128)..(820): Homolog of NCBI NO: 15230755 NR Description: protein kinase, putative; protein id: At3g06640.1
  misc_feature (56)..(106): Homolog of NCBI NO: 12321912 NR Description: protein kinase, putative; 42705-46677
  misc_feature (56)..(106): Homolog of NCBI NO: 15230755 NR Description: protein kinase, putative; protein id: At3g06640.1
  misc_feature (148)..(777): Homolog of NCBI NO: 15230754 NR Description: protein kinase, putative; protein id: At3g06630.1
  misc_feature (64)..(111): Homolog of NCBI NO: 15230754 NR Description: protein kinase, putative; protein id: At3g06630.1
  misc_feature (343)..(820): Homolog of NCBI NO: 22327668 NR Description: protein kinase; protein id: At5g49470.1,
  misc_feature (151)..(620): Homolog of NCBI NO: 29367363 NR Description: protein kinase-like protein [Oryza sativa
  misc_feature (524)..(799): Homolog of NCBI NO: 30686028 NR Description: serine/threonine kinase -related [Arabidopsis

SEQ ID NO: 94299 - protein, 765 aa, Arabidopsis thaliana; identical to SEQ ID NO: 90543
  peptide (1)..(765): Ceres Seq. ID no. 12724265
  misc_feature (101)..(164): Pfam Name: PAS domain Pfam Description: PAS domain
  misc_feature (5)..(764): Homolog of NCBI NO: 15230753 NR Description: protein kinase, putative; protein id:
  misc_feature (73)..(765): Homolog of NCBI NO: 12321912 NR Description: protein kinase, putative; 42705-46677
  misc_feature (73)..(765): Homolog of NCBI NO: 15230755 NR Description: protein kinase, putative; protein id: At3g06640.1
  misc_feature (1)..(51): Homolog of NCBI NO: 12321912 NR Description: protein kinase, putative; 42705-46677
  misc_feature (1)..(51): Homolog of NCBI NO: 15230755 NR Description: protein kinase, putative; protein id: At3g06640.1
  misc_feature (93)..(722): Homolog of NCBI NO: 15230754 NR Description: protein kinase, putative; protein id: At3g06630.1
  misc_feature (9)..(56): Homolog of NCBI NO: 15230754 NR Description: protein kinase, putative; protein id: At3g06630.1
  misc_feature (288)..(765): Homolog of NCBI NO: 22327668 NR Description: protein kinase; protein id: At5g49470.1,
  misc_feature (96)..(565): Homolog of NCBI NO: 29367363 NR Description: protein kinase-like protein [Oryza sativa
  misc_feature (469)..(744): Homolog of NCBI NO: 30686028 NR Description: serine/threonine kinase -related [Arabidopsis

SEQ ID NO: 94300 - protein, 737 aa, Arabidopsis thaliana; identical to SEQ ID NO: 90544
  peptide (1)..(737): Ceres Seq. ID no. 12724266
  misc_feature (73)..(136): Pfam Name: PAS domain Pfam Description: PAS domain
  misc_feature (1)..(736): Homolog of NCBI NO: 15230753 NR Description: protein kinase, putative; protein id:
  misc_feature (45)..(737): Homolog of NCBI NO: 12321912 NR Description: protein kinase, putative; 42705-46677
  misc_feature (45)..(737): Homolog of NCBI NO: 15230755 NR Description: protein kinase, putative; protein id: At3g06640.1
  misc_feature (1)..(23): Homolog of NCBI NO: 12321912 NR Description: protein kinase, putative; 42705-46677
  misc_feature (1)..(23): Homolog of NCBI NO: 15230755 NR Description: protein kinase, putative; protein id: At3g06640.1
  misc_feature (65)..(694): Homolog of NCBI NO: 15230754 NR Description: protein kinase, putative; protein id: At3g06630.1
  misc_feature (1)..(28): Homolog of NCBI NO: 15230754 NR Description: protein kinase, putative; protein id: At3g06630.1
  misc_feature (260)..(737): Homolog of NCBI NO: 22327668 NR Description: protein kinase; protein id: At5g49470.1,
  misc_feature (68)..(537): Homolog of NCBI NO: 29367363 NR Description: protein kinase-like protein [Oryza sativa
  misc_feature (441)..(716): Homolog of NCBI NO: 30686028 NR Description: serine/threonine kinase -related [Arabidopsis

SEQ ID NO: 94301 - DNA, 964 bp, Arabidopsis thaliana; identical to SEQ ID NO: 90545
  misc_feature (1)..(964): Ceres Seq. ID no. 12724275
  misc_feature: MA Experiment ID: 20000185 Result: Down-regulated in Transcription
  misc_feature: MA Experiment 20000185 PARAMETER Experiment Name: At_Roots__P Parameter: Age (day) Value: 7 vs. 21
  misc_feature: MA Experiment 20000185 PARAMETER Experiment Name: At_Roots__P Parameter: Organism Value: A. thaliana
  misc_feature: MA Experiment 20000185 PARAMETER Experiment Name: At_Roots__P Parameter: Tissue Value: Roots vs. Whole Plant
  misc_feature: MA Experiment ID: 20000234 Result: Down-regulated in Transcription
  misc_feature: MA Experiment 20000234 PARAMETER Experiment Name: At_Siliques_P Parameter: Age (day) Value: 21
  misc_feature: MA Experiment 20000234 PARAMETER Experiment Name: At_Siliques_P Parameter: Organism Value: A. thaliana
  misc_feature: MA Experiment 20000234 PARAMETER Experiment Name: At_Siliques_P Parameter: Plant Line Value: WS
  misc_feature: MA Experiment 20000234 PARAMETER Experiment Name: At_Siliques_P Parameter: Tissue Value: Less Than 5mm Siliques vs. Whole Plant
  misc_feature: MA Experiment ID: 20000264 Result: Down-regulated in Transcription
  misc_feature: MA Experiment 20000264 PARAMETER Experiment Name: At_Open_Flower_P Parameter: Age (day) Value: 21
  misc_feature: MA Experiment 20000264 PARAMETER Experiment Name: At_Open_Flower_P Parameter: Plant Line Value: WS
  misc_feature: MA Experiment 20000264 PARAMETER Experiment Name: At_Open_Flower_P Parameter: Tissue Value: Open Flower vs. Whole Plant
  misc_feature: MA Experiment ID: 20000265 Result: Down-regulated in Transcription
  misc_feature: MA Experiment 20000265 PARAMETER Experiment Name: At_Open_Flower_P Parameter: Age (day) Value: 21
  misc_feature: MA Experiment 20000265 PARAMETER Experiment Name: At_Open_Flower_P Parameter: Plant Line Value: WS
  misc_feature: MA Experiment 20000265 PARAMETER Experiment Name: At_Open_Flower_P Parameter: Tissue Value: Closed Flower vs. Whole Plant
  misc_feature: MA Experiment ID: 20000286 Result: Down-regulated in Transcription
  misc_feature: MA Experiment 20000286 PARAMETER Experiment Name: At_Open_Flower_P Parameter: Age (day) Value: 21
  misc_feature: MA Experiment 20000286 PARAMETER Experiment Name: At_Open_Flower_P Parameter: Plant Line Value: WS
  misc_feature: MA Experiment 20000286 PARAMETER Experiment Name: At_Open_Flower_P Parameter: Tissue Value: Half Open vs. Whole Plant
  misc_feature: MA Experiment ID: 20000439 Result: Down-regulated in Transcription
  misc_feature: MA Experiment 20000439 PARAMETER Experiment Name: At_Roots__P Parameter: Age (day) Value: 14 vs. 21
  misc_feature: MA Experiment 20000439 PARAMETER Experiment Name: At_Roots__P Parameter: Organism Value: A. thaliana
  misc_feature: MA Experiment 20000439 PARAMETER Experiment Name: At_Roots__P Parameter: Tissue Value: Roots vs. Whole Plant
  misc_feature: MA Experiment ID: 20000527 Result: Down-regulated in Transcription
  misc_feature: MA Experiment 20000527 PARAMETER Experiment Name: At_10percent_PEG_P Parameter: Age (day) Value: 20
  misc_feature: MA Experiment 20000527 PARAMETER Experiment Name: At_10percent_PEG_P Parameter: Organism Value: A. thaliana
  misc_feature: MA Experiment 20000527 PARAMETER Experiment Name: At_10percent_PEG_P Parameter: Plant Line Value: WS
  misc_feature: MA Experiment 20000527 PARAMETER Experiment Name: At_10percent_PEG_P Parameter: Timepoint (day) Value: 20
  misc_feature: MA Experiment 20000527 PARAMETER Experiment Name: At_10percent_PEG_P Parameter: Tissue Value: Whole Plant
  misc_feature: MA Experiment 20000527 PARAMETER Experiment Name: At_10percent_PEG_P Parameter: Treatment Value: 10percent PEG vs. No Treatment
  misc_feature: MA Experiment ID: 20001556 Result: Down-regulated in Transcription
  misc_feature: MA Experiment 20001556 PARAMETER Experiment Name: At_Drought_Soil_Dry_P Parameter: Age (day) Value: 26
  misc_feature: MA Experiment 20001556 PARAMETER Experiment Name: At_Drought_Soil_Dry_P Parameter: Organism Value: A. thaliana
  misc_feature: MA Experiment 20001556 PARAMETER Experiment Name: At_Drought_Soil_Dry_P Parameter: Plant Line Value: WS
  misc_feature: MA Experiment 20001556 PARAMETER Experiment Name: At_Drought_Soil_Dry_P Parameter: Post Timepoint (hr) Value: None
  misc_feature: MA Experiment 20001556 PARAMETER Experiment Name: At_Drought_Soil_Dry_P Parameter: Post-Treatment Value: None
  misc_feature: MA Experiment 20001556 PARAMETER Experiment Name: At_Drought_Soil_Dry_P Parameter: Timepoint (day) Value: 12
  misc_feature: MA Experiment 20001556 PARAMETER Experiment Name: At_Drought_Soil_Dry_P Parameter: Treatment Value: Drought vs. No Drought
  misc_feature: MA Experiment ID: 20001558 Result: Down-regulated in Transcription
  misc_feature: MA Experiment 20001558 PARAMETER Experiment Name: At_Drought_Soil_Dry_P Parameter: Age (day) Value: 27
  misc_feature: MA Experiment 20001558 PARAMETER Experiment Name: At_Drought_Soil_Dry_P Parameter: Organism Value: A. thaliana
  misc_feature: MA Experiment 20001558 PARAMETER Experiment Name: At_Drought_Soil_Dry_P Parameter: Plant Line Value: WS
  misc_feature: MA Experiment 20001558 PARAMETER Experiment Name: At_Drought_Soil_Dry_P Parameter: Post Timepoint (hr) Value: 6
  misc_feature: MA Experiment 20001558 PARAMETER Experiment Name: At_Drought_Soil_Dry_P Parameter: Post-Treatment Value: Re-Water vs. No Drought
  misc_feature: MA Experiment 20001558 PARAMETER Experiment Name: At_Drought_Soil_Dry_P Parameter: Timepoint (day) Value: 13
  misc_feature: MA Experiment 20001558 PARAMETER Experiment Name: At_Drought_Soil_Dry_P Parameter: Treatment Value: Drought vs. No Drought
  misc_feature: MA Experiment ID: 20001904 Result: Down-regulated in Transcription
  misc_feature: MA Experiment 20001904 PARAMETER Experiment Name: At_Drought_Reproduction_P Parameter: Age (day) Value: 37
  misc_feature: MA Experiment 20001904 PARAMETER Experiment Name: At_Drought_Reproduction_P Parameter: Organism Value: A. thaliana
  misc_feature: MA Experiment 20001904 PARAMETER Experiment Name: At_Drought_Reproduction_P Parameter: Plant Line Value: WS
  misc_feature: MA Experiment 20001904 PARAMETER Experiment Name: At_Drought_Reproduction_P Parameter: Timepoint (day) Value: 7
  misc_feature: MA Experiment 20001904 PARAMETER Experiment Name: At_Drought_Reproduction_P Parameter: Tissue Value: Rosettes
  misc_feature: MA Experiment 20001904 PARAMETER Experiment Name: At_Drought_Reproduction_P Parameter: Treatment Value: Drought vs. No Drought

SEQ ID NO: 94302 - protein, 221 aa, Arabidopsis thaliana; identical to SEQ ID NO: 90546
  peptide (1)..(221): Ceres Seq. ID no. 12724276
  misc_feature (10)..(220): Pfam Name: O-methyltransferase Pfam Description: O-methyltransferase
  misc_feature (1)..(221): Homolog of NCBI NO: 30580369 NR Description: Putative caffeoyl-CoA O-methyltransferase
  misc_feature (10)..(221): Homolog of NCBI NO: 18408911 NR Description: caffeoyl-CoA 3-O-methyltransferase, putative; id: At1g67980.1, supported by cDNA: gi_682727 [Arabidopsis
  misc_feature (10)..(221): Homolog of NCBI NO: 682728 NR Description: S-adenosyl-L-methionine:trans-caffeoyl-Coenzyme A
  misc_feature (1)..(221): Homolog of NCBI NO: 30580370 NR Description: Putative caffeoyl-CoA O-methyltransferase
  misc_feature (1)..(221): Homolog of NCBI NO: 18408913 NR Description: caffeoyl-CoA 3-O-methyltransferase, putative;
  misc_feature (1)..(220): Homolog of NCBI NO: 3023432 NR Description: Caffeoyl-CoA O-methyltransferase
  misc_feature (37)..(221): Homolog of NCBI NO: 15221807 NR Description: caffeoyl-CoA 3-O-methyltransferase, putative; id: At1g24735.1 [Arabidopsis thaliana] >gi|25317647|pir||A86380
  misc_feature (1)..(220): Homolog of NCBI NO: 37720881 NR Description: O-methyltransferase [Mesembryanthemum
  misc_feature (1)..(220): Homolog of NCBI NO: 30580341 NR Description: Caffeoyl-CoA O-methyltransferase
  misc_feature (1)..(220): Homolog of NCBI NO: 30580333 NR Description: Caffeoyl-CoA O-methyltransferase 1

SEQ ID NO: 94303 - protein, 212 aa, Arabidopsis thaliana; identical to SEQ ID NO: 90547
  peptide (1)..(212): Ceres Seq. ID no. 12724277
  misc_feature (1)..(211): Pfam Name: O-methyltransferase Pfam Description: O-methyltransferase
  misc_feature (1)..(212): Homolog of NCBI NO: 30580369 NR Description: Putative caffeoyl-CoA O-methyltransferase
  misc_feature (1)..(212): Homolog of NCBI NO: 18408911 NR Description: caffeoyl-CoA 3-O-methyltransferase, putative; id: At1g67980.1, supported by cDNA: gi_682727 [Arabidopsis
  misc_feature (1)..(212): Homolog of NCBI NO: 682728 NR Description: S-adenosyl-L-methionine:trans-caffeoyl-Coenzyme A
  misc_feature (1)..(212): Homolog of NCBI NO: 30580370 NR Description: Putative caffeoyl-CoA O-methyltransferase
  misc_feature (1)..(212): Homolog of NCBI NO: 18408913 NR Description: caffeoyl-CoA 3-O-methyltransferase, putative;
  misc_feature (1)..(211): Homolog of NCBI NO: 3023432 NR Description: Caffeoyl-CoA O-methyltransferase
  misc_feature (28)..(212): Homolog of NCBI NO: 15221807 NR Description: caffeoyl-CoA 3-O-methyltransferase, putative; id: At1g24735.1 [Arabidopsis thaliana] >gi|25317647|pir||A86380
  misc_feature (1)..(211): Homolog of NCBI NO: 37720881 NR Description: O-methyltransferase [Mesembryanthemum
  misc_feature (1)..(211): Homolog of NCBI NO: 30580341 NR Description: Caffeoyl-CoA O-methyltransferase
  misc_feature (1)..(211): Homolog of NCBI NO: 30580333 NR Description: Caffeoyl-CoA O-methyltransferase 1

SEQ ID NO: 94304 - protein, 183 aa, Arabidopsis thaliana; identical to SEQ ID NO: 90548
  peptide (1)..(183): Ceres Seq. ID no. 12724278
  misc_feature (1)..(182): Pfam Name: O-methyltransferase Pfam Description: O-methyltransferase
  misc_feature (1)..(183): Homolog of NCBI NO: 30580369 NR Description: Putative caffeoyl-CoA O-methyltransferase
  misc_feature (1)..(183): Homolog of NCBI NO: 18408911 NR Description: caffeoyl-CoA 3-O-methyltransferase, putative; id: At1g67980.1, supported by cDNA: gi_682727 [Arabidopsis
  misc_feature (1)..(183): Homolog of NCBI NO: 682728 NR Description: S-adenosyl-L-methionine:trans-caffeoyl-Coenzyme A
  misc_feature (1)..(183): Homolog of NCBI NO: 30580370 NR Description: Putative caffeoyl-CoA O-methyltransferase
  misc_feature (1)..(183): Homolog of NCBI NO: 18408913 NR Description: caffeoyl-CoA 3-O-methyltransferase, putative;
  misc_feature (1)..(182): Homolog of NCBI NO: 3023432 NR Description: Caffeoyl-CoA O-methyltransferase
  misc_feature (1)..(183): Homolog of NCBI NO: 15221807 NR Description: caffeoyl-CoA 3-O-methyltransferase, putative; id: At1g24735.1 [Arabidopsis thaliana] >gi|25317647|pir||A86380
  misc_feature (1)..(182): Homolog of NCBI NO: 37720881 NR Description: O-methyltransferase [Mesembryanthemum
  misc_feature (1)..(182): Homolog of NCBI NO: 30580341 NR Description: Caffeoyl-CoA O-methyltransferase
  misc_feature (1)..(182): Homolog of NCBI NO: 30580333 NR Description: Caffeoyl-CoA O-methyltransferase 1

SEQ ID NO: 94305 - DNA, 1092 bp, Arabidopsis thaliana; identical to SEQ ID NO: 90549
  misc_feature (1)..(1092): Ceres Seq. ID no. 12724283
  misc_feature: MA Experiment ID: 20001451 Result: Up-regulated in Transcription
  misc_feature: MA Experiment 20001451 PARAMETER Experiment Name: At_Far-red-induction_P Parameter: Age (day) Value: 7
  misc_feature: MA Experiment 20001451 PARAMETER Experiment Name: At_Far-red-induction_P Parameter: Light Value: Far-red vs. White
  misc_feature: MA Experiment 20001451 PARAMETER Experiment Name: At_Far-red-induction_P Parameter: Organism Value: A. thaliana
  misc_feature: MA Experiment 20001451 PARAMETER Experiment Name: At_Far-red-induction_P Parameter: Plant Line Value: Columbia
  misc_feature: MA Experiment 20001451 PARAMETER Experiment Name: At_Far-red-induction_P Parameter: Timepoint (hr) Value: 24
  misc_feature: MA Experiment 20001451 PARAMETER Experiment Name: At_Far-red-induction_P Parameter: Tissue Value: Whole Plant

SEQ ID NO: 94306 - protein, 363 aa, Arabidopsis thaliana; identical to SEQ ID NO: 90550
  peptide (1)..(363): Ceres Seq. ID no. 12724284
  misc_feature (40)..(363): Pfam Name: SAM dependent carboxyl methyltransferase Pfam Description: SAM dependent carboxyl methyltransferase
  misc_feature (1)..(363): Homolog of NCBI NO: 15220632 NR Description: methyltransferase-related; protein id: [Arabidopsis thaliana] >gi|25404692|pir||E96703 hypothetical
  misc_feature (12)..(363): Homolog of NCBI NO: 8885614 NR Description: S-adenosyl-L-methionine:salicylic acid carboxyl
  misc_feature (10)..(363): Homolog of NCBI NO: 9758498 NR Description: S-adenosyl-L-methionine:salicylic acid carboxyl
  misc_feature (10)..(363): Homolog of NCBI NO: 15240811 NR Description: methyltransferase-related; protein id:
  misc_feature (10)..(363): Homolog of NCBI NO: 15241002 NR Description: methyltransferase-related; protein id: supported by cDNA: gi_17380699, supported by cDNA: gi_20259006
  misc_feature (13)..(356): Homolog of NCBI NO: 14009292 NR Description: defense-related protein [Brassica carinata]
  misc_feature (10)..(338): Homolog of NCBI NO: 15230523 NR Description: methyltransferase-related; protein id: At3g44840.1
  misc_feature (10)..(363): Homolog of NCBI NO: 9758496 NR Description: S-adenosyl-L-methionine:salicylic acid carboxyl
  misc_feature (10)..(363): Homolog of NCBI NO: 15240809 NR Description: methyltransferase-related; protein id:
  misc_feature (13)..(362): Homolog of NCBI NO: 25402793 NR Description: protein F9L1.6 [imported] - Arabidopsis thaliana

SEQ ID NO: 94307 - protein, 351 aa, Arabidopsis thaliana; identical to SEQ ID NO: 90551
  peptide (1)..(351): Ceres Seq. ID no. 12724285
  misc_feature (28)..(351): Pfam Name: SAM dependent carboxyl methyltransferase Pfam Description: SAM dependent carboxyl methyltransferase
  misc_feature (1)..(351): Homolog of NCBI NO: 15220632 NR Description: methyltransferase-related; protein id: [Arabidopsis thaliana] >gi|25404692|pir||E96703 hypothetical
  misc_feature (1)..(351): Homolog of NCBI NO: 8885614 NR Description: S-adenosyl-L-methionine:salicylic acid carboxyl
  misc_feature (1)..(351): Homolog of NCBI NO: 9758498 NR Description: S-adenosyl-L-methionine:salicylic acid carboxyl
  misc_feature (1)..(351): Homolog of NCBI NO: 15240811 NR Description: methyltransferase-related; protein id:
  misc_feature (1)..(351): Homolog of NCBI NO: 15241002 NR Description: methyltransferase-related; protein id: supported by cDNA: gi_17380699, supported by cDNA: gi_20259006
  misc_feature (1)..(344): Homolog of NCBI NO: 14009292 NR Description: defense-related protein [Brassica carinata]
  misc_feature (1)..(326): Homolog of NCBI NO: 15230523 NR Description: methyltransferase-related; protein id: At3g44840.1
  misc_feature (1)..(351): Homolog of NCBI NO: 9758496 NR Description: S-adenosyl-L-methionine:salicylic acid carboxyl
  misc_feature (1)..(351): Homolog of NCBI NO: 15240809 NR Description: methyltransferase-related; protein id:
  misc_feature (1)..(350): Homolog of NCBI NO: 25402793 NR Description: protein F9L1.6 [imported] - Arabidopsis thaliana

SEQ ID NO: 94308 - protein, 215 aa, Arabidopsis thaliana; identical to SEQ ID NO: 90552
  peptide (1)..(215): Ceres Seq. ID no. 12724286
  misc_feature (1)..(215): Pfam Name: SAM dependent carboxyl methyltransferase Pfam Description: SAM dependent carboxyl methyltransferase
  misc_feature (1)..(215): Homolog of NCBI NO: 15220632 NR Description: methyltransferase-related; protein id: [Arabidopsis thaliana] >gi|25404692|pir||E96703 hypothetical
  misc_feature (1)..(215): Homolog of NCBI NO: 8885614 NR Description: S-adenosyl-L-methionine:salicylic acid carboxyl
  misc_feature (1)..(215): Homolog of NCBI NO: 9758498 NR Description: S-adenosyl-L-methionine:salicylic acid carboxyl
  misc_feature (1)..(215): Homolog of NCBI NO: 15240811 NR Description: methyltransferase-related; protein id:
  misc_feature (1)..(215): Homolog of NCBI NO: 15241002 NR Description: methyltransferase-related; protein id: supported by cDNA: gi_17380699, supported by cDNA: gi_20259006
  misc_feature (1)..(208): Homolog of NCBI NO: 14009292 NR Description: defense-related protein [Brassica carinata]
  misc_feature (1)..(190): Homolog of NCBI NO: 15230523 NR Description: methyltransferase-related; protein id: At3g44840.1
  misc_feature (1)..(215): Homolog of NCBI NO: 9758496 NR Description: S-adenosyl-L-methionine:salicylic acid carboxyl
  misc_feature (1)..(215): Homolog of NCBI NO: 15240809 NR Description: methyltransferase-related; protein id:
  misc_feature (1)..(214): Homolog of NCBI NO: 25402793 NR Description: protein F9L1.6 [imported] - Arabidopsis thaliana

SEQ ID NO: 94309 - DNA, 951 bp, Arabidopsis thaliana; identical to SEQ ID NO: 90553
  misc_feature (1)..(951): Ceres Seq. ID no. 12724287
  misc_feature: MA Experiment ID: 20001910 Result: Up-regulated in Transcription
  misc_feature: MA Experiment 20001910 PARAMETER Experiment Name: At_Drought_Reproduction_P Parameter: Age (day) Value: 37
  misc_feature: MA Experiment 20001910 PARAMETER Experiment Name: At_Drought_Reproduction_P Parameter: Organism Value: A. thaliana
  misc_feature: MA Experiment 20001910 PARAMETER Experiment Name: At_Drought_Reproduction_P Parameter: Plant Line Value: WS
  misc_feature: MA Experiment 20001910 PARAMETER Experiment Name: At_Drought_Reproduction_P Parameter: Timepoint (day) Value: 7
  misc_feature: MA Experiment 20001910 PARAMETER Experiment Name: At_Drought_Reproduction_P Parameter: Tissue Value: Flowers
  misc_feature: MA Experiment 20001910 PARAMETER Experiment Name: At_Drought_Reproduction_P Parameter: Treatment Value: Drought vs. No Drought

SEQ ID NO: 94310 - protein, 316 aa, Arabidopsis thaliana; identical to SEQ ID NO: 90554
  peptide (1)..(316): Ceres Seq. ID no. 12724288
  misc_feature (13)..(80): Pfam Name: Annexin Pfam Description: Annexin
  misc_feature (1)..(316): Homolog of NCBI NO: 18408941 NR Description: putative annexin; protein id: At1g68090.1,
  misc_feature (1)..(316): Homolog of NCBI NO: 12667520 NR Description: calcium-binding protein annexin 5 [Arabidopsis
  misc_feature (1)..(316): Homolog of NCBI NO: 25295766 NR Description: probable annexin T23K23.6 [imported] -
  misc_feature (1)..(307): Homolog of NCBI NO: 3881978 NR Description: annexin-like protein [Medicago sativa]
  misc_feature (1)..(313): Homolog of NCBI NO: 34905010 NR Description: P0456B03.13 [Oryza sativa (japonica
  misc_feature (1)..(313): Homolog of NCBI NO: 38606205 NR Description: annexin [Triticum aestivum]
  misc_feature (1)..(313): Homolog of NCBI NO: 11177826 NR Description: annexin [Ceratopteris richardii]
  misc_feature (1)..(313): Homolog of NCBI NO: 11177824 NR Description: annexin [Ceratopteris richardii]
  misc_feature (1)..(313): Homolog of NCBI NO: 15238105 NR Description: annexin -like protein; protein id: At5g10230.1,
  misc_feature (1)..(313): Homolog of NCBI NO: 6272285 NR Description: annexin p33 [Zea mays]

SEQ ID NO: 94311 - protein, 313 aa, Arabidopsis thaliana; identical to SEQ ID NO: 90555
  peptide (1)..(313): Ceres Seq. ID no. 12724289
  misc_feature (10)..(77): Pfam Name: Annexin Pfam Description: Annexin
  misc_feature (1)..(313): Homolog of NCBI NO: 18408941 NR Description: putative annexin; protein id: At1g68090.1,
  misc_feature (1)..(313): Homolog of NCBI NO: 12667520 NR Description: calcium-binding protein annexin 5 [Arabidopsis
  misc_feature (1)..(313): Homolog of NCBI NO: 25295766 NR Description: probable annexin T23K23.6 [imported] -
  misc_feature (1)..(304): Homolog of NCBI NO: 3881978 NR Description: annexin-like protein [Medicago sativa]
  misc_feature (1)..(310): Homolog of NCBI NO: 34905010 NR Description: P0456B03.13 [Oryza sativa (japonica
  misc_feature (1)..(310): Homolog of NCBI NO: 38606205 NR Description: annexin [Triticum aestivum]
  misc_feature (1)..(310): Homolog of NCBI NO: 11177826 NR Description: annexin [Ceratopteris richardii]
  misc_feature (1)..(310): Homolog of NCBI NO: 11177824 NR Description: annexin [Ceratopteris richardii]
  misc_feature (1)..(310): Homolog of NCBI NO: 15238105 NR Description: annexin -like protein; protein id: At5g10230.1,
  misc_feature (1)..(310): Homolog of NCBI NO: 6272285 NR Description: annexin p33 [Zea mays]

SEQ ID NO: 94312 - protein, 309 aa, Arabidopsis thaliana; identical to SEQ ID NO: 90556
  peptide (1)..(309): Ceres Seq. ID no. 12724290
  misc_feature (6)..(73): Pfam Name: Annexin Pfam Description: Annexin
  misc_feature (1)..(309): Homolog of NCBI NO: 18408941 NR Description: putative annexin; protein id: At1g68090.1,
  misc_feature (1)..(309): Homolog of NCBI NO: 12667520 NR Description: calcium-binding protein annexin 5 [Arabidopsis
  misc_feature (1)..(309): Homolog of NCBI NO: 25295766 NR Description: probable annexin T23K23.6 [imported] -
  misc_feature (1)..(300): Homolog of NCBI NO: 3881978 NR Description: annexin-like protein [Medicago sativa]
  misc_feature (1)..(306): Homolog of NCBI NO: 34905010 NR Description: P0456B03.13 [Oryza sativa (japonica
  misc_feature (1)..(306): Homolog of NCBI NO: 38606205 NR Description: annexin [Triticum aestivum]
  misc_feature (1)..(306): Homolog of NCBI NO: 11177826 NR Description: annexin [Ceratopteris richardii]
  misc_feature (1)..(306): Homolog of NCBI NO: 11177824 NR Description: annexin [Ceratopteris richardii]
  misc_feature (1)..(306): Homolog of NCBI NO: 15238105 NR Description: annexin -like protein; protein id: At5g10230.1,
  misc_feature (1)..(306): Homolog of NCBI NO: 6272285 NR Description: annexin p33 [Zea mays]

SEQ ID NO: 94313 - DNA, 1521 bp, Arabidopsis thaliana; identical to SEQ ID NO: 90557
  misc_feature (1)..(1521): Ceres Seq. ID no. 12724298
  misc_feature: MA Experiment ID: 20000171 Result: Up-regulated in Transcription
  misc_feature: MA Experiment 20000171 PARAMETER Experiment Name: At_42deg_Heat_P Parameter: Age (day) Value: 14
  misc_feature: MA Experiment 20000171 PARAMETER Experiment Name: At_42deg_Heat_P Parameter: Organism Value: A. thaliana
  misc_feature: MA Experiment 20000171 PARAMETER Experiment Name: At_42deg_Heat_P Parameter: Plant Line Value: WS
  misc_feature: MA Experiment 20000171 PARAMETER Experiment Name: At_42deg_Heat_P Parameter: Temperature (deg C) Value: 42 vs. 22
  misc_feature: MA Experiment 20000171 PARAMETER Experiment Name: At_42deg_Heat_P Parameter: Timepoint (hr) Value: 1
  misc_feature: MA Experiment 20000171 PARAMETER Experiment Name: At_42deg_Heat_P Parameter: Tissue Value: Aerial
  misc_feature: MA Experiment ID: 20000173 Result: Up-regulated in Transcription
  misc_feature: MA Experiment 20000173 PARAMETER Experiment Name: At_42deg_Heat_P Parameter: Age (day) Value: 14
  misc_feature: MA Experiment 20000173 PARAMETER Experiment Name: At_42deg_Heat_P Parameter: Organism Value: A. thaliana
  misc_feature: MA Experiment 20000173 PARAMETER Experiment Name: At_42deg_Heat_P Parameter: Plant Line Value: WS
  misc_feature: MA Experiment 20000173 PARAMETER Experiment Name: At_42deg_Heat_P Parameter: Temperature (deg C) Value: 42 vs. 22
  misc_feature: MA Experiment 20000173 PARAMETER Experiment Name: At_42deg_Heat_P Parameter: Timepoint (hr) Value: 6
  misc_feature: MA Experiment 20000173 PARAMETER Experiment Name: At_42deg_Heat_P Parameter: Tissue Value: Aerial
  misc_feature: MA Experiment ID: 20000234 Result: Down-regulated in Transcription
  misc_feature: MA Experiment 20000234 PARAMETER Experiment Name: At_Siliques_P Parameter: Age (day) Value: 21
  misc_feature: MA Experiment 20000234 PARAMETER Experiment Name: At_Siliques_P Parameter: Organism Value: A. thaliana
  misc_feature: MA Experiment 20000234 PARAMETER Experiment Name: At_Siliques_P Parameter: Plant Line Value: WS
  misc_feature: MA Experiment 20000234 PARAMETER Experiment Name: At_Siliques_P Parameter: Tissue Value: Less Than 5mm Siliques vs. Whole Plant
  misc_feature: MA Experiment ID: 20000437 Result: Up-regulated in Transcription
  misc_feature: MA Experiment 20000437 PARAMETER Experiment Name: At_Drought_P Parameter: Age (day) Value: 8
  misc_feature: MA Experiment 20000437 PARAMETER Experiment Name: At_Drought_P Parameter: Organism Value: A. thaliana
  misc_feature: MA Experiment 20000437 PARAMETER Experiment Name: At_Drought_P Parameter: Plant Line Value: WS
  misc_feature: MA Experiment 20000437 PARAMETER Experiment Name: At_Drought_P Parameter: Timepoint (hr) Value: 24
  misc_feature: MA Experiment 20000437 PARAMETER Experiment Name: At_Drought_P Parameter: Tissue Value: Whole Plant
  misc_feature: MA Experiment 20000437 PARAMETER Experiment Name: At_Drought_P Parameter: Treatment Value: Drought vs. No Drought
  misc_feature: MA Experiment ID: 20000495 Result: Down-regulated in Transcription
  misc_feature: MA Experiment 20000495 PARAMETER Experiment Name: At_Guard_Cells_P Parameter: Harvest Date Value: 8/2/2002
  misc_feature: MA Experiment 20000495 PARAMETER Experiment Name: At_Guard_Cells_P Parameter: Organism Value: A. thaliana
  misc_feature: MA Experiment 20000495 PARAMETER Experiment Name: At_Guard_Cells_P Parameter: Tissue Value: Guard Cells vs. Leaves
  misc_feature: MA Experiment ID: 20001557 Result: Down-regulated in Transcription
  misc_feature: MA Experiment 20001557 PARAMETER Experiment Name: At_Drought_Soil_Dry_P Parameter: Age (day) Value: 27
  misc_feature: MA Experiment 20001557 PARAMETER Experiment Name: At_Drought_Soil_Dry_P Parameter: Organism Value: A. thaliana
  misc_feature: MA Experiment 20001557 PARAMETER Experiment Name: At_Drought_Soil_Dry_P Parameter: Plant Line Value: WS
  misc_feature: MA Experiment 20001557 PARAMETER Experiment Name: At_Drought_Soil_Dry_P Parameter: Post Timepoint (hr) Value: 3
  misc_feature: MA Experiment 20001557 PARAMETER Experiment Name: At_Drought_Soil_Dry_P Parameter: Post-Treatment Value: Re-Water vs. No Drought
  misc_feature: MA Experiment 20001557 PARAMETER Experiment Name: At_Drought_Soil_Dry_P Parameter: Timepoint (day) Value: 13
  misc_feature: MA Experiment 20001557 PARAMETER Experiment Name: At_Drought_Soil_Dry_P Parameter: Treatment Value: Drought vs. No Drought

SEQ ID NO: 94314 - protein, 334 aa, Arabidopsis thaliana; identical to SEQ ID NO: 90558
  peptide (1)..(334): Ceres Seq. ID no. 12724299
  misc_feature (1)..(334): Homolog of NCBI NO: 15221290 NR Description: unknown protein; protein id: At1g68140.1, by cDNA: gi_17064999 [Arabidopsis thaliana]
  misc_feature (88)..(308): Homolog of NCBI NO: 38346521 NR Description: OSJNBa0027H09.16 [Oryza sativa (japonica
  misc_feature (48)..(109): Homolog of NCBI NO: 38346521 NR Description: OSJNBa0027H09.16 [Oryza sativa (japonica
  misc_feature (42)..(269): Homolog of NCBI NO: 25365932 NR Description: unknown protein T32E8.10 [imported] - Arabidopsis
  misc_feature (42)..(269): Homolog of NCBI NO: 30699285 NR Description: expressed protein [Arabidopsis thaliana] unknown protein [Arabidopsis thaliana]
  misc_feature (43)..(232): Homolog of NCBI NO: 15236507 NR Description: hypothetical protein; protein id: At4g08460.1, by cDNA: gi_18389229 [Arabidopsis thaliana]
  misc_feature (1)..(231): Homolog of NCBI NO: 38344827 NR Description: OSJNBa0064H22.8 [Oryza sativa (japonica
  misc_feature (108)..(232): Homolog of NCBI NO: 15230170 NR Description: unknown protein; protein id: At3g24740.1, by cDNA: gi_19715578 [Arabidopsis thaliana] gb|AAF16548.1~gene_id:K7P8.3~similar to unknown protein
  misc_feature (32)..(97): Homolog of NCBI NO: 15230170 NR Description: unknown protein; protein id: At3g24740.1, by cDNA: gi_19715578 [Arabidopsis thaliana] gb|AAF16548.1~gene_id:K7P8.3~similar to unknown protein
  misc_feature (1)..(203): Homolog of NCBI NO: 34912600 NR Description: P0046B10.17 [Oryza sativa (japonica

SEQ ID NO: 94315 - protein, 299 aa, Arabidopsis thaliana; identical to SEQ ID NO: 90559
  peptide (1)..(299): Ceres Seq. ID no. 12724300
  misc_feature (1)..(299): Homolog of NCBI NO: 15221290 NR Description: unknown protein; protein id: At1g68140.1, by cDNA: gi_17064999 [Arabidopsis thaliana]
  misc_feature (53)..(273): Homolog of NCBI NO: 38346521 NR Description: OSJNBa0027H09.16 [Oryza sativa (japonica
  misc_feature (13)..(74): Homolog of NCBI NO: 38346521 NR Description: OSJNBa0027H09.16 [Oryza sativa (japonica
  misc_feature (7)..(234): Homolog of NCBI NO: 25365932 NR Description: unknown protein T32E8.10 [imported] - Arabidopsis
  misc_feature (7)..(234): Homolog of NCBI NO: 30699285 NR Description: expressed protein [Arabidopsis thaliana] unknown protein [Arabidopsis thaliana]
  misc_feature (8)..(197): Homolog of NCBI NO: 15236507 NR Description: hypothetical protein; protein id: At4g08460.1, by cDNA: gi_18389229 [Arabidopsis thaliana]
  misc_feature (1)..(196): Homolog of NCBI NO: 38344827 NR Description: OSJNBa0064H22.8 [Oryza sativa (japonica
  misc_feature (73)..(197): Homolog of NCBI NO: 15230170 NR Description: unknown protein; protein id: At3g24740.1, by cDNA: gi_19715578 [Arabidopsis thaliana] gb|AAF16548.1~gene_id:K7P8.3~similar to unknown protein
  misc_feature (1)..(62): Homolog of NCBI NO: 15230170 NR Description: unknown protein; protein id: At3g24740.1, by cDNA: gi_19715578 [Arabidopsis thaliana] gb|AAF16548.1~gene_id:K7P8.3~similar to unknown protein
  misc_feature (1)..(168): Homolog of NCBI NO: 34912600 NR Description: P0046B10.17 [Oryza sativa (japonica

SEQ ID NO: 94316 - protein, 276 aa, Arabidopsis thaliana; identical to SEQ ID NO: 90560
  peptide (1)..(276): Ceres Seq. ID no. 12724301
  misc_feature (1)..(276): Homolog of NCBI NO: 15221290 NR Description: unknown protein; protein id: At1g68140.1, by cDNA: gi_17064999 [Arabidopsis thaliana]
  misc_feature (30)..(250): Homolog of NCBI NO: 38346521 NR Description: OSJNBa0027H09.16 [Oryza sativa (japonica
  misc_feature (1)..(51): Homolog of NCBI NO: 38346521 NR Description: OSJNBa0027H09.16 [Oryza sativa (japonica
  misc_feature (1)..(211): Homolog of NCBI NO: 25365932 NR Description: unknown protein T32E8.10 [imported] - Arabidopsis
  misc_feature (1)..(211): Homolog of NCBI NO: 30699285 NR Description: expressed protein [Arabidopsis thaliana] unknown protein [Arabidopsis thaliana]
  misc_feature (1)..(174): Homolog of NCBI NO: 15236507 NR Description: hypothetical protein; protein id: At4g08460.1, by cDNA: gi_18389229 [Arabidopsis thaliana]
  misc_feature (1)..(173): Homolog of NCBI NO: 38344827 NR Description: OSJNBa0064H22.8 [Oryza sativa (japonica
  misc_feature (50)..(174): Homolog of NCBI NO: 15230170 NR Description: unknown protein; protein id: At3g24740.1, by cDNA: gi_19715578 [Arabidopsis thaliana] gb|AAF16548.1~gene_id:K7P8.3~similar to unknown protein
  misc_feature (1)..(39): Homolog of NCBI NO: 15230170 NR Description: unknown protein; protein id: At3g24740.1, by cDNA: gi_19715578 [Arabidopsis thaliana] gb|AAF16548.1~gene_id:K7P8.3~similar to unknown protein
  misc_feature (1)..(145): Homolog of NCBI NO: 34912600 NR Description: P0046B10.17 [Oryza sativa (japonica

SEQ ID NO: 94317 - DNA, 1125 bp, Arabidopsis thaliana; identical to SEQ ID NO: 90561
  misc_feature (1)..(1125): Ceres Seq. ID no. 12724302
  misc_feature: MA Experiment ID: 20000436 Result: Down-regulated in Transcription
  misc_feature: MA Experiment 20000436 PARAMETER Experiment Name: At_Drought_P Parameter: Age (day) Value: 7
  misc_feature: MA Experiment 20000436 PARAMETER Experiment Name: At_Drought_P Parameter: Organism Value: A. thaliana
  misc_feature: MA Experiment 20000436 PARAMETER Experiment Name: At_Drought_P Parameter: Plant Line Value: WS
  misc_feature: MA Experiment 20000436 PARAMETER Experiment Name: At_Drought_P Parameter: Timepoint (hr) Value: 12
  misc_feature: MA Experiment 20000436 PARAMETER Experiment Name: At_Drought_P Parameter: Tissue Value: Whole Plant
  misc_feature: MA Experiment 20000436 PARAMETER Experiment Name: At_Drought_P Parameter: Treatment Value: Drought vs. No Drought
  misc_feature: MA Experiment ID: 20000439 Result: Up-regulated in Transcription
  misc_feature: MA Experiment 20000439 PARAMETER Experiment Name: At_Roots__P Parameter: Age (day) Value: 14 vs. 21
  misc_feature: MA Experiment 20000439 PARAMETER Experiment Name: At_Roots__P Parameter: Organism Value: A. thaliana
  misc_feature: MA Experiment 20000439 PARAMETER Experiment Name: At_Roots__P Parameter: Tissue Value: Roots vs. Whole Plant

SEQ ID NO: 94318 - protein, 374 aa, Arabidopsis thaliana; identical to SEQ ID NO: 90562
  peptide (1)..(374): Ceres Seq. ID no. 12724303
  misc_feature (234)..(294): Pfam Name: WRKY DNA -binding domain Pfam Description: WRKY DNA -binding domain
  misc_feature (1)..(374): Homolog of NCBI NO: 15221291 NR Description: WRKY family transcription factor; protein id: supported by cDNA: gi_15990587 [Arabidopsis thaliana]
  misc_feature (87)..(357): Homolog of NCBI NO: 15234284 NR Description: WRKY family transcription factor; protein id: supported by cDNA: gi_19172391 [Arabidopsis thaliana]
  misc_feature (66)..(366): Homolog of NCBI NO: 18407554 NR Description: WRKY family transcription factor; protein id: supported by cDNA: gi_12658409, supported by cDNA: gi_15810266 thaliana] >gi|20978780|sp|Q9C519|WRK6_ARATH WRKY transcription
  misc_feature (42)..(372): Homolog of NCBI NO: 15242221 NR Description: WRKY family transcription factor; protein id:
  misc_feature (27)..(323): Homolog of NCBI NO: 18415833 NR Description: WRKY family transcription factor; protein id: supported by cDNA: gi_15990589 [Arabidopsis thaliana]
  misc_feature (50)..(323): Homolog of NCBI NO: 11357339 NR Description: hypothetical protein AT4g22070 - Arabidopsis >gi|2961352|emb|CAA18110.1| putative protein [Arabidopsis >gi|7269052|emb|CAB79162.1| putative protein [Arabidopsis
  misc_feature (85)..(320): Homolog of NCBI NO: 30686070 NR Description: WRKY family transcription factor [Arabidopsis >gi|20978774|sp|Q8VWV6|WR61_ARATH Probable WRKY transcription
  misc_feature (212)..(318): Homolog of NCBI NO: 30013667 NR Description: Avr9/Cf-9 rapidly elicited protein 126 [Nicotiana
  misc_feature (29)..(367): Homolog of NCBI NO: 15233516 NR Description: WRKY family transcription factor; protein id: supported by cDNA: gi_15990593 [Arabidopsis thaliana]
  misc_feature (219)..(316): Homolog of NCBI NO: 5042446 NR Description: putative WRKY DNA binding protein [Oryza sativa

SEQ ID NO: 94319 - protein, 348 aa, Arabidopsis thaliana; identical to SEQ ID NO: 88886
  peptide (1)..(348): Ceres Seq. ID no. 12724304
  misc_feature (208)..(268): Pfam Name: WRKY DNA -binding domain Pfam Description: WRKY DNA -binding domain
  misc_feature (1)..(348): Homolog of NCBI NO: 15221291 NR Description: WRKY family transcription factor; protein id: supported by cDNA: gi_15990587 [Arabidopsis thaliana]
  misc_feature (61)..(331): Homolog of NCBI NO: 15234284 NR Description: WRKY family transcription factor; protein id: supported by cDNA: gi_19172391 [Arabidopsis thaliana]
  misc_feature (40)..(340): Homolog of NCBI NO: 18407554 NR Description: WRKY family transcription factor; protein id: supported by cDNA: gi_12658409, supported by cDNA: gi_15810266 thaliana] >gi|20978780|sp|Q9C519|WRK6_ARATH WRKY transcription
  misc_feature (16)..(346): Homolog of NCBI NO: 15242221 NR Description: WRKY family transcription factor; protein id:
  misc_feature (1)..(297): Homolog of NCBI NO: 18415833 NR Description: WRKY family transcription factor; protein id: supported by cDNA: gi_15990589 [Arabidopsis thaliana]
  misc_feature (24)..(297): Homolog of NCBI NO: 11357339 NR Description: hypothetical protein AT4g22070 - Arabidopsis >gi|2961352|emb|CAA18110.1| putative protein [Arabidopsis >gi|7269052|emb|CAB79162.1| putative protein [Arabidopsis
  misc_feature (59)..(294): Homolog of NCBI NO: 30686070 NR Description: WRKY family transcription factor [Arabidopsis >gi|20978774|sp|Q8VWV6|WR61_ARATH Probable WRKY transcription
  misc_feature (186)..(292): Homolog of NCBI NO: 30013667 NR Description: Avr9/Cf-9 rapidly elicited protein 126 [Nicotiana
  misc_feature (3)..(341): Homolog of NCBI NO: 15233516 NR Description: WRKY family transcription factor; protein id: supported by cDNA: gi_15990593 [Arabidopsis thaliana]
  misc_feature (193)..(290): Homolog of NCBI NO: 5042446 NR Description: putative WRKY DNA binding protein [Oryza sativa

SEQ ID NO: 94320 - protein, 306 aa, Arabidopsis thaliana; identical to SEQ ID NO: 88887
  peptide (1)..(306): Ceres Seq. ID no. 12724305
  misc_feature (166)..(226): Pfam Name: WRKY DNA -binding domain Pfam Description: WRKY DNA -binding domain
  misc_feature (1)..(306): Homolog of NCBI NO: 15221291 NR Description: WRKY family transcription factor; protein id: supported by cDNA: gi_15990587 [Arabidopsis thaliana]
  misc_feature (19)..(289): Homolog of NCBI NO: 15234284 NR Description: WRKY family transcription factor; protein id: supported by cDNA: gi_19172391 [Arabidopsis thaliana]
  misc_feature (1)..(298): Homolog of NCBI NO: 18407554 NR Description: WRKY family transcription factor; protein id: supported by cDNA: gi_12658409, supported by cDNA: gi_15810266 thaliana] >gi|20978780|sp|Q9C519|WRK6_ARATH WRKY transcription
  misc_feature (1)..(304): Homolog of NCBI NO: 15242221 NR Description: WRKY family transcription factor; protein id:
  misc_feature (1)..(255): Homolog of NCBI NO: 18415833 NR Description: WRKY family transcription factor; protein id: supported by cDNA: gi_15990589 [Arabidopsis thaliana]
  misc_feature (1)..(255): Homolog of NCBI NO: 11357339 NR Description: hypothetical protein AT4g22070 - Arabidopsis >gi|2961352|emb|CAA18110.1| putative protein [Arabidopsis >gi|7269052|emb|CAB79162.1| putative protein [Arabidopsis
  misc_feature (17)..(252): Homolog of NCBI NO: 30686070 NR Description: WRKY family transcription factor [Arabidopsis >gi|20978774|sp|Q8VWV6|WR61_ARATH Probable WRKY transcription
  misc_feature (144)..(250): Homolog of NCBI NO: 30013667 NR Description: Avr9/Cf-9 rapidly elicited protein 126 [Nicotiana
  misc_feature (1)..(299): Homolog of NCBI NO: 15233516 NR Description: WRKY family transcription factor; protein id: supported by cDNA: gi_15990593 [Arabidopsis thaliana]
  misc_feature (151)..(248): Homolog of NCBI NO: 5042446 NR Description: putative WRKY DNA binding protein [Oryza sativa

SEQ ID NO: 94321 - DNA, 1071 bp, Arabidopsis thaliana; identical to SEQ ID NO: 90565
  misc_feature (1)..(1071): Ceres Seq. ID no. 12724330
  misc_feature: MA Experiment ID: 20000349 Result: Up-regulated in Transcription
  misc_feature: MA Experiment 20000349 PARAMETER Experiment Name: At_100uM_ABA_Sub_P Parameter: Age (day) Value: 14
  misc_feature: MA Experiment 20000349 PARAMETER Experiment Name: At_100uM_ABA_Sub_P Parameter: Organism Value: A. thaliana
  misc_feature: MA Experiment 20000349 PARAMETER Experiment Name: At_100uM_ABA_Sub_P Parameter: Plant Line Value: WS
  misc_feature: MA Experiment 20000349 PARAMETER Experiment Name: At_100uM_ABA_Sub_P Parameter: Timepoint (hr) Value: 6
  misc_feature: MA Experiment 20000349 PARAMETER Experiment Name: At_100uM_ABA_Sub_P Parameter: Tissue Value: Aerial
  misc_feature: MA Experiment 20000349 PARAMETER Experiment Name: At_100uM_ABA_Sub_P Parameter: Treatment Value: 100uM ABA vs. No Treatment

SEQ ID NO: 94322 - protein, 286 aa, Arabidopsis thaliana; identical to SEQ ID NO: 90566
  peptide (1)..(286): Ceres Seq. ID no. 12724331
  misc_feature (21)..(68): Pfam Name: Myb-like DNA-binding domain Pfam Description: Myb-like DNA-binding domain
  misc_feature (1)..(286): Homolog of NCBI NO: 15221373 NR Description: myb family transcription factor; protein id: [Arabidopsis thaliana] >gi|25294102|pir||H96706 probable
  misc_feature (83)..(286): Homolog of NCBI NO: 11358550 NR Description: myb-related transcription factor MYB62 [imported] Arabidopsis thaliana (fragment) >gi|3941486|gb|AAC83619.1|
  misc_feature (1)..(286): Homolog of NCBI NO: 18395645 NR Description: myb-related transcription factor (cpm7), protein id: At1g25340.1, supported by cDNA: gi_15375294 thaliana] >gi|15375295|gb|AAK25748.2|AF334815_1 putative
  misc_feature (1)..(286): Homolog of NCBI NO: 25294097 NR Description: probable Myb-like protein (Myb26) [imported] -
  misc_feature (6)..(227): Homolog of NCBI NO: 34895506 NR Description: putative myb-related transcription factor [Oryza
  misc_feature (14)..(282): Homolog of NCBI NO: 14249015 NR Description: myb-like transcription factor Myb 5 [Gossypium
  misc_feature (14)..(282): Homolog of NCBI NO: 23476301 NR Description: myb-like transcription factor 5 [Gossypium
  misc_feature (14)..(282): Homolog of NCBI NO: 23476307 NR Description: myb-like transcription factor 5 [Gossypioides
  misc_feature (12)..(282): Homolog of NCBI NO: 23476305 NR Description: myb-like transcription factor 5 [Gossypium
  misc_feature (12)..(282): Homolog of NCBI NO: 14249019 NR Description: recombinant myb-like transcription factor Myb 5

SEQ ID NO: 94323 - protein, 282 aa, Arabidopsis thaliana; identical to SEQ ID NO: 90567
  peptide (1)..(282): Ceres Seq. ID no. 12724332
  misc_feature (17)..(64): Pfam Name: Myb-like DNA-binding domain Pfam Description: Myb-like DNA-binding domain
  misc_feature (1)..(282): Homolog of NCBI NO: 15221373 NR Description: myb family transcription factor; protein id: [Arabidopsis thaliana] >gi|25294102|pir||H96706 probable
  misc_feature (79)..(282): Homolog of NCBI NO: 11358550 NR Description: myb-related transcription factor MYB62 [imported] Arabidopsis thaliana (fragment) >gi|3941486|gb|AAC83619.1|
  misc_feature (1)..(282): Homolog of NCBI NO: 18395645 NR Description: myb-related transcription factor (cpm7), protein id: At1g25340.1, supported by cDNA: gi_15375294 thaliana] >gi|15375295|gb|AAK25748.2|AF334815_1 putative
  misc_feature (1)..(282): Homolog of NCBI NO: 25294097 NR Description: probable Myb-like protein (Myb26) [imported] -
  misc_feature (2)..(223): Homolog of NCBI NO: 34895506 NR Description: putative myb-related transcription factor [Oryza
  misc_feature (10)..(278): Homolog of NCBI NO: 14249015 NR Description: myb-like transcription factor Myb 5 [Gossypium
  misc_feature (10)..(278): Homolog of NCBI NO: 23476301 NR Description: myb-like transcription factor 5 [Gossypium
  misc_feature (10)..(278): Homolog of NCBI NO: 23476307 NR Description: myb-like transcription factor 5 [Gossypioides
  misc_feature (8)..(278): Homolog of NCBI NO: 23476305 NR Description: myb-like transcription factor 5 [Gossypium
  misc_feature (8)..(278): Homolog of NCBI NO: 14249019 NR Description: recombinant myb-like transcription factor Myb 5

SEQ ID NO: 94324 - DNA, 1730 bp, Arabidopsis thaliana; identical to SEQ ID NO: 90568
  misc_feature (1)..(1730): Ceres Seq. ID no. 12724350
  misc_feature: MA Experiment ID: 20000182 Result: Up-regulated in Transcription
  misc_feature: MA Experiment 20000182 PARAMETER Experiment Name: At_2mM_SA_P Parameter: Age (day) Value: 14
  misc_feature: MA Experiment 20000182 PARAMETER Experiment Name: At_2mM_SA_P Parameter: Organism Value: A. thaliana
  misc_feature: MA Experiment 20000182 PARAMETER Experiment Name: At_2mM_SA_P Parameter: Plant Line Value: WS
  misc_feature: MA Experiment 20000182 PARAMETER Experiment Name: At_2mM_SA_P Parameter: Timepoint (hr) Value: 6
  misc_feature: MA Experiment 20000182 PARAMETER Experiment Name: At_2mM_SA_P Parameter: Tissue Value: Aerial
  misc_feature: MA Experiment 20000182 PARAMETER Experiment Name: At_2mM_SA_P Parameter: Treatment Value: 2mM SA vs. No Treatment
  misc_feature: MA Experiment ID: 20000227 Result: Up-regulated in Transcription
  misc_feature: MA Experiment 20000227 PARAMETER Experiment Name: At_Root-Tips-vs-Tops_P Parameter: Tissue Value: Root Tips vs. Root Tops
  misc_feature: MA Experiment ID: 20000709 Result: Up-regulated in Transcription
  misc_feature: MA Experiment 20000709 PARAMETER Experiment Name: At_15mM_NH4NO3_L-to-H_P Parameter: Age (hr) Value: 14
  misc_feature: MA Experiment 20000709 PARAMETER Experiment Name: At_15mM_NH4NO3_L-to-H_P Parameter: Organism Value: A. thaliana
  misc_feature: MA Experiment 20000709 PARAMETER Experiment Name: At_15mM_NH4NO3_L-to-H_P Parameter: Plant Line Value: WS
  misc_feature: MA Experiment 20000709 PARAMETER Experiment Name: At_15mM_NH4NO3_L-to-H_P Parameter: Timepoint (hr) Value: 4
  misc_feature: MA Experiment 20000709 PARAMETER Experiment Name: At_15mM_NH4NO3_L-to-H_P Parameter: Tissue Value: Aerial
  misc_feature: MA Experiment 20000709 PARAMETER Experiment Name: At_15mM_NH4NO3_L-to-H_P Parameter: Treatment Value: 15mM NH4NO3 vs. 30mM Mannitol
  misc_feature: MA Experiment ID: 20000794 Result: Up-regulated in Transcription
  misc_feature: MA Experiment 20000794 PARAMETER Experiment Name: At_Petals_P Parameter: Age (day) Value: 23-25 days
  misc_feature: MA Experiment 20000794 PARAMETER Experiment Name: At_Petals_P Parameter: Plant Line Value: WS
  misc_feature: MA Experiment 20000794 PARAMETER Experiment Name: At_Petals_P Parameter: Tissue Value: Petals vs. Whole plant
  misc_feature: MA Experiment ID: 20001247 Result: Up-regulated in Transcription
  misc_feature: MA Experiment 20001247 PARAMETER Experiment Name: At_Far-red-induction_P Parameter: Age (day) Value: 7
  misc_feature: MA Experiment 20001247 PARAMETER Experiment Name: At_Far-red-induction_P Parameter: Light Value: Far-red vs. White
  misc_feature: MA Experiment 20001247 PARAMETER Experiment Name: At_Far-red-induction_P Parameter: Organism Value: A. thaliana
  misc_feature: MA Experiment 20001247 PARAMETER Experiment Name: At_Far-red-induction_P Parameter: Plant Line Value: Columbia
  misc_feature: MA Experiment 20001247 PARAMETER Experiment Name: At_Far-red-induction_P Parameter: Timepoint (hr) Value: 1
  misc_feature: MA Experiment 20001247 PARAMETER Experiment Name: At_Far-red-induction_P Parameter: Tissue Value: Whole Plant
  misc_feature: MA Experiment ID: 20001557 Result: Up-regulated in Transcription
  misc_feature: MA Experiment 20001557 PARAMETER Experiment Name: At_Drought_Soil_Dry_P Parameter: Age (day) Value: 27
  misc_feature: MA Experiment 20001557 PARAMETER Experiment Name: At_Drought_Soil_Dry_P Parameter: Organism Value: A. thaliana
  misc_feature: MA Experiment 20001557 PARAMETER Experiment Name: At_Drought_Soil_Dry_P Parameter: Plant Line Value: WS
  misc_feature: MA Experiment 20001557 PARAMETER Experiment Name: At_Drought_Soil_Dry_P Parameter: Post Timepoint (hr) Value: 3
  misc_feature: MA Experiment 20001557 PARAMETER Experiment Name: At_Drought_Soil_Dry_P Parameter: Post-Treatment Value: Re-Water vs. No Drought
  misc_feature: MA Experiment 20001557 PARAMETER Experiment Name: At_Drought_Soil_Dry_P Parameter: Timepoint (day) Value: 13
  misc_feature: MA Experiment 20001557 PARAMETER Experiment Name: At_Drought_Soil_Dry_P Parameter: Treatment Value: Drought vs. No Drought
  misc_feature: MA Experiment ID: 20001558 Result: Up-regulated in Transcription
  misc_feature: MA Experiment 20001558 PARAMETER Experiment Name: At_Drought_Soil_Dry_P Parameter: Age (day) Value: 27
  misc_feature: MA Experiment 20001558 PARAMETER Experiment Name: At_Drought_Soil_Dry_P Parameter: Organism Value: A. thaliana
  misc_feature: MA Experiment 20001558 PARAMETER Experiment Name: At_Drought_Soil_Dry_P Parameter: Plant Line Value: WS
  misc_feature: MA Experiment 20001558 PARAMETER Experiment Name: At_Drought_Soil_Dry_P Parameter: Post Timepoint (hr) Value: 6
  misc_feature: MA Experiment 20001558 PARAMETER Experiment Name: At_Drought_Soil_Dry_P Parameter: Post-Treatment Value: Re-Water vs. No Drought
  misc_feature: MA Experiment 20001558 PARAMETER Experiment Name: At_Drought_Soil_Dry_P Parameter: Timepoint (day) Value: 13
  misc_feature: MA Experiment 20001558 PARAMETER Experiment Name: At_Drought_Soil_Dry_P Parameter: Treatment Value: Drought vs. No Drought

SEQ ID NO: 94325 - protein, 436 aa, Arabidopsis thaliana; identical to SEQ ID NO: 90569
  peptide (1)..(436): Ceres Seq. ID no. 12724351
  misc_feature (51)..(294): Pfam Name: Protein phosphatase 2C Pfam Description: Protein phosphatase 2C
  misc_feature (1)..(436): Homolog of NCBI NO: 15221404 NR Description: putative protein phosphatase; protein id: supported by cDNA: gi_15292894, supported by cDNA: gi_20259036
  misc_feature (33)..(436): Homolog of NCBI NO: 34914644 NR Description: OSJNBa0054L14.21 [Oryza sativa (japonica
  misc_feature (18)..(431): Homolog of NCBI NO: 15217454 NR Description: putative protein phosphatase 2C; protein id: supported by cDNA: gi_16930414 [Arabidopsis thaliana]
  misc_feature (19)..(431): Homolog of NCBI NO: 34394411 NR Description: protein phosphatase 2C-like [Oryza sativa
  misc_feature (19)..(432): Homolog of NCBI NO: 18401703 NR Description: expressed protein; protein id: At1g47380.1
  misc_feature (19)..(432): Homolog of NCBI NO: 15292869 NR Description: unknown protein [Arabidopsis thaliana]
  misc_feature (18)..(360): Homolog of NCBI NO: 16930415 NR Description: At1g09160/T12M4_13 [Arabidopsis thaliana]
  misc_feature (19)..(362): Homolog of NCBI NO: 34898168 NR Description: protein phosphatase 2C-like [Oryza sativa
  misc_feature (19)..(429): Homolog of NCBI NO: 14029015 NR Description: Unknown protein [Oryza sativa]
  misc_feature (36)..(431): Homolog of NCBI NO: 38344839 NR Description: OSJNBa0064H22.20 [Oryza sativa (japonica

SEQ ID NO: 94326 - protein, 403 aa, Arabidopsis thaliana; identical to SEQ ID NO: 90570
  peptide (1)..(403): Ceres Seq. ID no. 12724352
  misc_feature (18)..(261): Pfam Name: Protein phosphatase 2C Pfam Description: Protein phosphatase 2C
  misc_feature (1)..(403): Homolog of NCBI NO: 15221404 NR Description: putative protein phosphatase; protein id: supported by cDNA: gi_15292894, supported by cDNA: gi_20259036
  misc_feature (1)..(403): Homolog of NCBI NO: 34914644 NR Description: OSJNBa0054L14.21 [Oryza sativa (japonica
  misc_feature (1)..(398): Homolog of NCBI NO: 15217454 NR Description: putative protein phosphatase 2C; protein id: supported by cDNA: gi_16930414 [Arabidopsis thaliana]
  misc_feature (1)..(398): Homolog of NCBI NO: 34394411 NR Description: protein phosphatase 2C-like [Oryza sativa
  misc_feature (1)..(399): Homolog of NCBI NO: 18401703 NR Description: expressed protein; protein id: At1g47380.1
  misc_feature (1)..(399): Homolog of NCBI NO: 15292869 NR Description: unknown protein [Arabidopsis thaliana]
  misc_feature (1)..(327): Homolog of NCBI NO: 16930415 NR Description: At1g09160/T12M4_13 [Arabidopsis thaliana]
  misc_feature (1)..(329): Homolog of NCBI NO: 34898168 NR Description: protein phosphatase 2C-like [Oryza sativa
  misc_feature (1)..(396): Homolog of NCBI NO: 14029015 NR Description: Unknown protein [Oryza sativa]
  misc_feature (3)..(398): Homolog of NCBI NO: 38344839 NR Description: OSJNBa0064H22.20 [Oryza sativa (japonica

SEQ ID NO: 94327 - DNA, 983 bp, Arabidopsis thaliana; identical to SEQ ID NO: 90571
  misc_feature (1)..(983): Ceres Seq. ID no. 12724364
  misc_feature: MA Experiment ID: 20000179 Result: Up-regulated in Transcription
  misc_feature: MA Experiment 20000179 PARAMETER Experiment Name: At_Germinating_Seeds_P Parameter: Age (hr) Value: 6 vs. 0
  misc_feature: MA Experiment 20000179 PARAMETER Experiment Name: At_Germinating_Seeds_P Parameter: Tissue Value: Germinating Seeds
  misc_feature: MA Experiment ID: 20000180 Result: Down-regulated in Transcription
  misc_feature: MA Experiment 20000180 PARAMETER Experiment Name: At_Germinating_Seeds_P Parameter: Age (hr) Value: 24 vs. 0
  misc_feature: MA Experiment 20000180 PARAMETER Experiment Name: At_Germinating_Seeds_P Parameter: Tissue Value: Germinating Seeds
  misc_feature: MA Experiment ID: 20001906 Result: Up-regulated in Transcription
  misc_feature: MA Experiment 20001906 PARAMETER Experiment Name: At_Drought_Reproduction_P Parameter: Age (day) Value: 35
  misc_feature: MA Experiment 20001906 PARAMETER Experiment Name: At_Drought_Reproduction_P Parameter: Organism Value: A. thaliana
  misc_feature: MA Experiment 20001906 PARAMETER Experiment Name: At_Drought_Reproduction_P Parameter: Plant Line Value: WS
  misc_feature: MA Experiment 20001906 PARAMETER Experiment Name: At_Drought_Reproduction_P Parameter: Timepoint (day) Value: 5
  misc_feature: MA Experiment 20001906 PARAMETER Experiment Name: At_Drought_Reproduction_P Parameter: Tissue Value: Siliques
  misc_feature: MA Experiment 20001906 PARAMETER Experiment Name: At_Drought_Reproduction_P Parameter: Treatment Value: Drought vs. No Drought
  misc_feature: MA Experiment ID: 20001908 Result: Up-regulated in Transcription
  misc_feature: MA Experiment 20001908 PARAMETER Experiment Name: At_Drought_Reproduction_P Parameter: Age (day) Value: 40
  misc_feature: MA Experiment 20001908 PARAMETER Experiment Name: At_Drought_Reproduction_P Parameter: Organism Value: A. thaliana
  misc_feature: MA Experiment 20001908 PARAMETER Experiment Name: At_Drought_Reproduction_P Parameter: Plant Line Value: WS
  misc_feature: MA Experiment 20001908 PARAMETER Experiment Name: At_Drought_Reproduction_P Parameter: Timepoint (day) Value: 10
  misc_feature: MA Experiment 20001908 PARAMETER Experiment Name: At_Drought_Reproduction_P Parameter: Tissue Value: Siliques
  misc_feature: MA Experiment 20001908 PARAMETER Experiment Name: At_Drought_Reproduction_P Parameter: Treatment Value: Drought vs. No Drought

SEQ ID NO: 94328 - protein, 233 aa, Arabidopsis thaliana; identical to SEQ ID NO: 90572
  peptide (1)..(233): Ceres Seq. ID no. 12724365
  misc_feature (4)..(109): Pfam Name: Protein of unknown function DUF260 Pfam Description: Protein of unknown function DUF260
  misc_feature (1)..(233): Homolog of NCBI NO: 15221429 NR Description: expressed protein; protein id: At1g68510.1, by cDNA: gi_17227173 [Arabidopsis thaliana] LOB domain protein 42 >gi|25404746|pir||C96709 hypothetical
  misc_feature (1)..(169): Homolog of NCBI NO: 34914608 NR Description: P0520B06.17 [Oryza sativa (japonica
  misc_feature (1)..(179): Homolog of NCBI NO: 21554191 NR Description: unknown [Arabidopsis thaliana]
  misc_feature (1)..(179): Homolog of NCBI NO: 18396229 NR Description: expressed protein; protein id: At3g02550.1, by cDNA: 20907., supported by cDNA: gi_17227171, supported by gi_19699325 [Arabidopsis thaliana]
  misc_feature (1)..(136): Homolog of NCBI NO: 15219829 NR Description: hypothetical protein; protein id: At1g67100.1
  misc_feature (1)..(135): Homolog of NCBI NO: 34895540 NR Description: unnamed protein product [Oryza sativa (japonica group)] >gi|9558469|dbj|BAB03390.1| unnamed protein product
  misc_feature (3)..(115): Homolog of NCBI NO: 15240739 NR Description: putative protein; protein id: At5g67420.1, by cDNA: 40250., supported by cDNA: gi_17227169 [Arabidopsis >gi|27805497|sp|Q9FN11|LB37_ARATH LOB domain protein 37 to
  misc_feature (3)..(115): Homolog of NCBI NO: 21593577 NR Description: unknown [Arabidopsis thaliana]
  misc_feature (3)..(152): Homolog of NCBI NO: 21592894 NR Description: unknown [Arabidopsis thaliana]
  misc_feature (3)..(106): Homolog of NCBI NO: 15235604 NR Description: putative protein; protein id: At4g37540.1, by cDNA: 33704., supported by cDNA: gi_18176002 [Arabidopsis >gi|29428053|sp|Q9SZE8|LB39_ARATH LOB domain protein 39

SEQ ID NO: 94329 - protein, 146 aa, Arabidopsis thaliana; identical to SEQ ID NO: 90573
  peptide (1)..(146): Ceres Seq. ID no. 12724366
  misc_feature (1)..(146): Homolog of NCBI NO: 15221429 NR Description: expressed protein; protein id: At1g68510.1, by cDNA: gi_17227173 [Arabidopsis thaliana] LOB domain protein 42 >gi|25404746|pir||C96709 hypothetical
  misc_feature (1)..(82): Homolog of NCBI NO: 34914608 NR Description: P0520B06.17 [Oryza sativa (japonica
  misc_feature (1)..(92): Homolog of NCBI NO: 21554191 NR Description: unknown [Arabidopsis thaliana]
  misc_feature (1)..(92): Homolog of NCBI NO: 18396229 NR Description: expressed protein; protein id: At3g02550.1, by cDNA: 20907., supported by cDNA: gi_17227171, supported by gi_19699325 [Arabidopsis thaliana]
  misc_feature (1)..(49): Homolog of NCBI NO: 15219829 NR Description: hypothetical protein; protein id: At1g67100.1
  misc_feature (1)..(48): Homolog of NCBI NO: 34895540 NR Description: unnamed protein product [Oryza sativa (japonica group)] >gi|9558469|dbj|BAB03390.1| unnamed protein product
  misc_feature (1)..(28): Homolog of NCBI NO: 15240739 NR Description: putative protein; protein id: At5g67420.1, by cDNA: 40250., supported by cDNA: gi_17227169 [Arabidopsis >gi|27805497|sp|Q9FN11|LB37_ARATH LOB domain protein 37 to
  misc_feature (1)..(28): Homolog of NCBI NO: 21593577 NR Description: unknown [Arabidopsis thaliana]
  misc_feature (1)..(65): Homolog of NCBI NO: 21592894 NR Description: unknown [Arabidopsis thaliana]
  misc_feature (1)..(19): Homolog of NCBI NO: 15235604 NR Description: putative protein; protein id: At4g37540.1, by cDNA: 33704., supported by cDNA: gi_18176002 [Arabidopsis >gi|29428053|sp|Q9SZE8|LB39_ARATH LOB domain protein 39

SEQ ID NO: 94330 - DNA, 1860 bp, Arabidopsis thaliana; identical to SEQ ID NO: 90574
  misc_feature (1)..(1860): Ceres Seq. ID no. 12724367
  misc_feature: MA Experiment ID: 108561 Result: Up-regulated in Transcription
  misc_feature: MA Experiment 108561 PARAMETER Experiment Name: At_100uM_ABA_cDNA_P Parameter: Timepoint (hr) Value: 6
  misc_feature: MA Experiment 108561 PARAMETER Experiment Name: At_100uM_ABA_cDNA_P Parameter: Tissue Value: Aerial
  misc_feature: MA Experiment 108561 PARAMETER Experiment Name: At_100uM_ABA_cDNA_P Parameter: Treatment Value: 100uM ABA vs. No Treatment
  misc_feature: MA Experiment ID: 108572 Result: Up-regulated in Transcription
  misc_feature: MA Experiment 108572 PARAMETER Experiment Name: At_Drought_cDNA_P Parameter: Timepoint (hr) Value: 1
  misc_feature: MA Experiment 108572 PARAMETER Experiment Name: At_Drought_cDNA_P Parameter: Tissue Value: Aerial
  misc_feature: MA Experiment 108572 PARAMETER Experiment Name: At_Drought_cDNA_P Parameter: Treatment Value: Drought vs. No Drought
  misc_feature: MA Experiment ID: 20000169 Result: Up-regulated in Transcription
  misc_feature: MA Experiment 20000169 PARAMETER Experiment Name: At_100uM_ABA_P Parameter: Age (day) Value: 14
  misc_feature: MA Experiment 20000169 PARAMETER Experiment Name: At_100uM_ABA_P Parameter: Organism Value: A. thaliana
  misc_feature: MA Experiment 20000169 PARAMETER Experiment Name: At_100uM_ABA_P Parameter: Plant Line Value: WS
  misc_feature: MA Experiment 20000169 PARAMETER Experiment Name: At_100uM_ABA_P Parameter: Timepoint (hr) Value: 6
  misc_feature: MA Experiment 20000169 PARAMETER Experiment Name: At_100uM_ABA_P Parameter: Tissue Value: Aerial
  misc_feature: MA Experiment 20000169 PARAMETER Experiment Name: At_100uM_ABA_P Parameter: Treatment Value: 100uM ABA vs. No Treatment
  misc_feature: MA Experiment ID: 20000180 Result: Up-regulated in Transcription
  misc_feature: MA Experiment 20000180 PARAMETER Experiment Name: At_Germinating_Seeds_P Parameter: Age (hr) Value: 24 vs. 0
  misc_feature: MA Experiment 20000180 PARAMETER Experiment Name: At_Germinating_Seeds_P Parameter: Tissue Value: Germinating Seeds
  misc_feature: MA Experiment ID: 20000185 Result: Down-regulated in Transcription
  misc_feature: MA Experiment 20000185 PARAMETER Experiment Name: At_Roots__P Parameter: Age (day) Value: 7 vs. 21
  misc_feature: MA Experiment 20000185 PARAMETER Experiment Name: At_Roots__P Parameter: Organism Value: A. thaliana
  misc_feature: MA Experiment 20000185 PARAMETER Experiment Name: At_Roots__P Parameter: Tissue Value: Roots vs. Whole Plant
  misc_feature: MA Experiment ID: 20000439 Result: Down-regulated in Transcription
  misc_feature: MA Experiment 20000439 PARAMETER Experiment Name: At_Roots__P Parameter: Age (day) Value: 14 vs. 21
  misc_feature: MA Experiment 20000439 PARAMETER Experiment Name: At_Roots__P Parameter: Organism Value: A. thaliana
  misc_feature: MA Experiment 20000439 PARAMETER Experiment Name: At_Roots__P Parameter: Tissue Value: Roots vs. Whole Plant
  misc_feature: MA Experiment ID: 20000794 Result: Up-regulated in Transcription
  misc_feature: MA Experiment 20000794 PARAMETER Experiment Name: At_Petals_P Parameter: Age (day) Value: 23-25 days
  misc_feature: MA Experiment 20000794 PARAMETER Experiment Name: At_Petals_P Parameter: Plant Line Value: WS
  misc_feature: MA Experiment 20000794 PARAMETER Experiment Name: At_Petals_P Parameter: Tissue Value: Petals vs. Whole plant
  misc_feature: MA Experiment ID: 20001554 Result: Up-regulated in Transcription
  misc_feature: MA Experiment 20001554 PARAMETER Experiment Name: At_Drought_Soil_Dry_P Parameter: Age (day) Value: 21
  misc_feature: MA Experiment 20001554 PARAMETER Experiment Name: At_Drought_Soil_Dry_P Parameter: Organism Value: A. thaliana
  misc_feature: MA Experiment 20001554 PARAMETER Experiment Name: At_Drought_Soil_Dry_P Parameter: Plant Line Value: WS
  misc_feature: MA Experiment 20001554 PARAMETER Experiment Name: At_Drought_Soil_Dry_P Parameter: Post Timepoint (hr) Value: None
  misc_feature: MA Experiment 20001554 PARAMETER Experiment Name: At_Drought_Soil_Dry_P Parameter: Post-Treatment Value: None
  misc_feature: MA Experiment 20001554 PARAMETER Experiment Name: At_Drought_Soil_Dry_P Parameter: Timepoint (day) Value: 7
  misc_feature: MA Experiment 20001554 PARAMETER Experiment Name: At_Drought_Soil_Dry_P Parameter: Treatment Value: Drought vs. No Drought

SEQ ID NO: 94331 - protein, 497 aa, Arabidopsis thaliana; identical to SEQ ID NO: 23374
  peptide (1)..(497): Ceres Seq. ID no. 12724368
  misc_feature (330)..(470): Pfam Name: Chalcone and stilbene synthases, C-terminal domain Pfam Description: Chalcone and stilbene synthases, C-terminal
  misc_feature (1)..(497): Homolog of NCBI NO: 15221431 NR Description: very-long-chain fatty acid condensing enzyme protein id: At1g68530.1, supported by cDNA: 36276. [Arabidopsis
  misc_feature (1)..(497): Homolog of NCBI NO: 17979464 NR Description: At1g68530/T26J14_10 [Arabidopsis thaliana]
  misc_feature (6)..(497): Homolog of NCBI NO: 21593111 NR Description: very-long-chain fatty acid condensing enzyme CUT1
  misc_feature (6)..(497): Homolog of NCBI NO: 15222592 NR Description: fatty acid condensing enzyme CUT1, putative; id: At1g25450.1, supported by cDNA: 99793. [Arabidopsis thaliana]
  misc_feature (6)..(497): Homolog of NCBI NO: 21618184 NR Description: fatty acid condensing enzyme CUT1, putative
  misc_feature (6)..(497): Homolog of NCBI NO: 28393607 NR Description: putative fatty acid condensing enzyme CUT1
  misc_feature (6)..(489): Homolog of NCBI NO: 15226724 NR Description: putative beta-ketoacyl-CoA synthase; protein id:
  misc_feature (6)..(489): Homolog of NCBI NO: 15223556 NR Description: very-long-chain fatty acid condensing enzyme putative; protein id: At1g19440.1, supported by cDNA: 158882.
  misc_feature (6)..(492): Homolog of NCBI NO: 29417540 NR Description: beta-ketoacyl-CoA-synthase [Marchantia polymorpha]
  misc_feature (8)..(497): Homolog of NCBI NO: 9714501 NR Description: putative fatty acid elongase [Zea mays]

SEQ ID NO: 94332 - protein, 492 aa, Arabidopsis thaliana; identical to SEQ ID NO: 23375
  peptide (1)..(492): Ceres Seq. ID no. 12724369
  misc_feature (325)..(465): Pfam Name: Chalcone and stilbene synthases, C-terminal domain Pfam Description: Chalcone and stilbene synthases, C-terminal
  misc_feature (1)..(492): Homolog of NCBI NO: 15221431 NR Description: very-long-chain fatty acid condensing enzyme protein id: At1g68530.1, supported by cDNA: 36276. [Arabidopsis
  misc_feature (1)..(492): Homolog of NCBI NO: 17979464 NR Description: At1g68530/T26J14_10 [Arabidopsis thaliana]
  misc_feature (1)..(492): Homolog of NCBI NO: 21593111 NR Description: very-long-chain fatty acid condensing enzyme CUT1
  misc_feature (1)..(492): Homolog of NCBI NO: 15222592 NR Description: fatty acid condensing enzyme CUT1, putative; id: At1g25450.1, supported by cDNA: 99793. [Arabidopsis thaliana]
  misc_feature (1)..(492): Homolog of NCBI NO: 21618184 NR Description: fatty acid condensing enzyme CUT1, putative
  misc_feature (1)..(492): Homolog of NCBI NO: 28393607 NR Description: putative fatty acid condensing enzyme CUT1
  misc_feature (1)..(484): Homolog of NCBI NO: 15226724 NR Description: putative beta-ketoacyl-CoA synthase; protein id:
  misc_feature (1)..(484): Homolog of NCBI NO: 15223556 NR Description: very-long-chain fatty acid condensing enzyme putative; protein id: At1g19440.1, supported by cDNA: 158882.
  misc_feature (1)..(487): Homolog of NCBI NO: 29417540 NR Description: beta-ketoacyl-CoA-synthase [Marchantia polymorpha]
  misc_feature (3)..(492): Homolog of NCBI NO: 9714501 NR Description: putative fatty acid elongase [Zea mays]

SEQ ID NO: 94333 - protein, 460 aa, Arabidopsis thaliana; identical to SEQ ID NO: 23376
  peptide (1)..(460): Ceres Seq. ID no. 12724370
  misc_feature (293)..(433): Pfam Name: Chalcone and stilbene synthases, C-terminal domain Pfam Description: Chalcone and stilbene synthases, C-terminal
  misc_feature (1)..(460): Homolog of NCBI NO: 15221431 NR Description: very-long-chain fatty acid condensing enzyme protein id: At1g68530.1, supported by cDNA: 36276. [Arabidopsis
  misc_feature (1)..(460): Homolog of NCBI NO: 17979464 NR Description: At1g68530/T26J14_10 [Arabidopsis thaliana]
  misc_feature (1)..(460): Homolog of NCBI NO: 21593111 NR Description: very-long-chain fatty acid condensing enzyme CUT1
  misc_feature (1)..(460): Homolog of NCBI NO: 15222592 NR Description: fatty acid condensing enzyme CUT1, putative; id: At1g25450.1, supported by cDNA: 99793. [Arabidopsis thaliana]
  misc_feature (1)..(460): Homolog of NCBI NO: 21618184 NR Description: fatty acid condensing enzyme CUT1, putative
  misc_feature (1)..(460): Homolog of NCBI NO: 28393607 NR Description: putative fatty acid condensing enzyme CUT1
  misc_feature (1)..(452): Homolog of NCBI NO: 15226724 NR Description: putative beta-ketoacyl-CoA synthase; protein id:
  misc_feature (1)..(452): Homolog of NCBI NO: 15223556 NR Description: very-long-chain fatty acid condensing enzyme putative; protein id: At1g19440.1, supported by cDNA: 158882.
  misc_feature (1)..(455): Homolog of NCBI NO: 29417540 NR Description: beta-ketoacyl-CoA-synthase [Marchantia polymorpha]
  misc_feature (1)..(460): Homolog of NCBI NO: 9714501 NR Description: putative fatty acid elongase [Zea mays]

SEQ ID NO: 94334 - DNA, 3048 bp, Arabidopsis thaliana; identical to SEQ ID NO: 90578
  misc_feature (1)..(3048): Ceres Seq. ID no. 12724375
  misc_feature: MA Experiment ID: 20000437 Result: Up-regulated in Transcription
  misc_feature: MA Experiment 20000437 PARAMETER Experiment Name: At_Drought_P Parameter: Age (day) Value: 8
  misc_feature: MA Experiment 20000437 PARAMETER Experiment Name: At_Drought_P Parameter: Organism Value: A. thaliana
  misc_feature: MA Experiment 20000437 PARAMETER Experiment Name: At_Drought_P Parameter: Plant Line Value: WS
  misc_feature: MA Experiment 20000437 PARAMETER Experiment Name: At_Drought_P Parameter: Timepoint (hr) Value: 24
  misc_feature: MA Experiment 20000437 PARAMETER Experiment Name: At_Drought_P Parameter: Tissue Value: Whole Plant
  misc_feature: MA Experiment 20000437 PARAMETER Experiment Name: At_Drought_P Parameter: Treatment Value: Drought vs. No Drought
  misc_feature: MA Experiment ID: 20000438 Result: Down-regulated in Transcription
  misc_feature: MA Experiment 20000438 PARAMETER Experiment Name: At_Shoots__P Parameter: Age (day) Value: 14
  misc_feature: MA Experiment 20000438 PARAMETER Experiment Name: At_Shoots__P Parameter: Tissue Value: Shoots vs. Whole Plant
  misc_feature: MA Experiment ID: 20000709 Result: Up-regulated in Transcription
  misc_feature: MA Experiment 20000709 PARAMETER Experiment Name: At_15mM_NH4NO3_L-to-H_P Parameter: Age (hr) Value: 14
  misc_feature: MA Experiment 20000709 PARAMETER Experiment Name: At_15mM_NH4NO3_L-to-H_P Parameter: Organism Value: A. thaliana
  misc_feature: MA Experiment 20000709 PARAMETER Experiment Name: At_15mM_NH4NO3_L-to-H_P Parameter: Plant Line Value: WS
  misc_feature: MA Experiment 20000709 PARAMETER Experiment Name: At_15mM_NH4NO3_L-to-H_P Parameter: Timepoint (hr) Value: 4
  misc_feature: MA Experiment 20000709 PARAMETER Experiment Name: At_15mM_NH4NO3_L-to-H_P Parameter: Tissue Value: Aerial
  misc_feature: MA Experiment 20000709 PARAMETER Experiment Name: At_15mM_NH4NO3_L-to-H_P Parameter: Treatment Value: 15mM NH4NO3 vs. 30mM Mannitol
  misc_feature: MA Experiment ID: 20000794 Result: Up-regulated in Transcription
  misc_feature: MA Experiment 20000794 PARAMETER Experiment Name: At_Petals_P Parameter: Age (day) Value: 23-25 days
  misc_feature: MA Experiment 20000794 PARAMETER Experiment Name: At_Petals_P Parameter: Plant Line Value: WS
  misc_feature: MA Experiment 20000794 PARAMETER Experiment Name: At_Petals_P Parameter: Tissue Value: Petals vs. Whole plant
  misc_feature: MA Experiment ID: 20001905 Result: Up-regulated in Transcription
  misc_feature: MA Experiment 20001905 PARAMETER Experiment Name: At_Drought_Reproduction_P Parameter: Age (day) Value: 40
  misc_feature: MA Experiment 20001905 PARAMETER Experiment Name: At_Drought_Reproduction_P Parameter: Organism Value: A. thaliana
  misc_feature: MA Experiment 20001905 PARAMETER Experiment Name: At_Drought_Reproduction_P Parameter: Plant Line Value: WS
  misc_feature: MA Experiment 20001905 PARAMETER Experiment Name: At_Drought_Reproduction_P Parameter: Timepoint (day) Value: 10
  misc_feature: MA Experiment 20001905 PARAMETER Experiment Name: At_Drought_Reproduction_P Parameter: Tissue Value: Rosettes
  misc_feature: MA Experiment 20001905 PARAMETER Experiment Name: At_Drought_Reproduction_P Parameter: Treatment Value: Drought vs. No Drought

SEQ ID NO: 94335 - protein, 708 aa, Arabidopsis thaliana; identical to SEQ ID NO: 90579
  peptide (1)..(708): Ceres Seq. ID no. 12724376
  misc_feature (377)..(575): Pfam Name: Protein kinase domain Pfam Description: Protein kinase domain
  misc_feature (2)..(708): Homolog of NCBI NO: 15222649 NR Description: Pto kinase interactor, putative; protein id: [Arabidopsis thaliana] >gi|25403034|pir||F86387 probable Pto
  misc_feature (33)..(705): Homolog of NCBI NO: 15240947 NR Description: putative protein; protein id: At5g38560.1, by cDNA: gi_15983496, supported by cDNA: gi_18700152 [Arabidopsis >gi|10176824|dbj|BAB10146.1| contains similarity to protein
  misc_feature (320)..(706): Homolog of NCBI NO: 15223161 NR Description: putative protein kinase; protein id: At1g70460.1
  misc_feature (10)..(240): Homolog of NCBI NO: 15223161 NR Description: putative protein kinase; protein id: At1g70460.1
  misc_feature (1)..(228): Homolog of NCBI NO: 15223161 NR Description: putative protein kinase; protein id: At1g70460.1
  misc_feature (30)..(703): Homolog of NCBI NO: 15230108 NR Description: protein kinase, putative; protein id: At3g24400.1
  misc_feature (358)..(692): Homolog of NCBI NO: 13447449 NR Description: receptor protein kinase PERK1 [Brassica napus]
  misc_feature (13)..(139): Homolog of NCBI NO: 13447449 NR Description: receptor protein kinase PERK1 [Brassica napus]
  misc_feature (124)..(216): Homolog of NCBI NO: 13447449 NR Description: receptor protein kinase PERK1 [Brassica napus]
  misc_feature (13)..(694): Homolog of NCBI NO: 15218591 NR Description: protein kinase, putative; protein id: At1g10620.1

SEQ ID NO: 94336 - protein, 386 aa, Arabidopsis thaliana; identical to SEQ ID NO: 90580
  peptide (1)..(386): Ceres Seq. ID no. 12724377
  misc_feature (55)..(253): Pfam Name: Protein kinase domain Pfam Description: Protein kinase domain
  misc_feature (1)..(386): Homolog of NCBI NO: 15222649 NR Description: Pto kinase interactor, putative; protein id: [Arabidopsis thaliana] >gi|25403034|pir||F86387 probable Pto
  misc_feature (1)..(383): Homolog of NCBI NO: 15240947 NR Description: putative protein; protein id: At5g38560.1, by cDNA: gi_15983496, supported by cDNA: gi_18700152 [Arabidopsis >gi|10176824|dbj|BAB10146.1| contains similarity to protein
  misc_feature (1)..(384): Homolog of NCBI NO: 15223161 NR Description: putative protein kinase; protein id: At1g70460.1
  misc_feature (1)..(381): Homolog of NCBI NO: 15230108 NR Description: protein kinase, putative; protein id: At3g24400.1
  misc_feature (36)..(370): Homolog of NCBI NO: 13447449 NR Description: receptor protein kinase PERK1 [Brassica napus]
  misc_feature (1)..(372): Homolog of NCBI NO: 15218591 NR Description: protein kinase, putative; protein id: At1g10620.1
  misc_feature (36)..(371): Homolog of NCBI NO: 13877617 NR Description: protein kinase-like protein [Arabidopsis thaliana]
  misc_feature (36)..(371): Homolog of NCBI NO: 15230130 NR Description: protein kinase, putative; protein id: supported by cDNA: 17909., supported by cDNA: gi_13877616,
  misc_feature (1)..(193): Homolog of NCBI NO: 15220786 NR Description: Pto kinase interactor, putative; protein id:
  misc_feature (220)..(385): Homolog of NCBI NO: 15220786 NR Description: Pto kinase interactor, putative; protein id:

SEQ ID NO: 94337 - protein, 373 aa, Arabidopsis thaliana; identical to SEQ ID NO: 90581
  peptide (1)..(373): Ceres Seq. ID no. 12724378
  misc_feature (42)..(240): Pfam Name: Protein kinase domain Pfam Description: Protein kinase domain
  misc_feature (1)..(373): Homolog of NCBI NO: 15222649 NR Description: Pto kinase interactor, putative; protein id: [Arabidopsis thaliana] >gi|25403034|pir||F86387 probable Pto
  misc_feature (1)..(370): Homolog of NCBI NO: 15240947 NR Description: putative protein; protein id: At5g38560.1, by cDNA: gi_15983496, supported by cDNA: gi_18700152 [Arabidopsis >gi|10176824|dbj|BAB10146.1| contains similarity to protein
  misc_feature (1)..(371): Homolog of NCBI NO: 15223161 NR Description: putative protein kinase; protein id: At1g70460.1
  misc_feature (1)..(368): Homolog of NCBI NO: 15230108 NR Description: protein kinase, putative; protein id: At3g24400.1
  misc_feature (23)..(357): Homolog of NCBI NO: 13447449 NR Description: receptor protein kinase PERK1 [Brassica napus]
  misc_feature (1)..(359): Homolog of NCBI NO: 15218591 NR Description: protein kinase, putative; protein id: At1g10620.1
  misc_feature (23)..(358): Homolog of NCBI NO: 13877617 NR Description: protein kinase-like protein [Arabidopsis thaliana]
  misc_feature (23)..(358): Homolog of NCBI NO: 15230130 NR Description: protein kinase, putative; protein id: supported by cDNA: 17909., supported by cDNA: gi_13877616,
  misc_feature (1)..(180): Homolog of NCBI NO: 15220786 NR Description: Pto kinase interactor, putative; protein id:
  misc_feature (207)..(372): Homolog of NCBI NO: 15220786 NR Description: Pto kinase interactor, putative; protein id:

SEQ ID NO: 94338 - DNA, 1709 bp, Arabidopsis thaliana; identical to SEQ ID NO: 90582
  misc_feature (1)..(1709): Ceres Seq. ID no. 12724407
  misc_feature: MA Experiment ID: 20000184 Result: Down-regulated in Transcription
  misc_feature: MA Experiment 20000184 PARAMETER Experiment Name: At_Shoots__P Parameter: Age (day) Value: 7
  misc_feature: MA Experiment 20000184 PARAMETER Experiment Name: At_Shoots__P Parameter: Tissue Value: Shoots vs. Whole Plant
  misc_feature: MA Experiment ID: 20000227 Result: Down-regulated in Transcription
  misc_feature: MA Experiment 20000227 PARAMETER Experiment Name: At_Root-Tips-vs-Tops_P Parameter: Tissue Value: Root Tips vs. Root Tops
  misc_feature: MA Experiment ID: 20000437 Result: Up-regulated in Transcription
  misc_feature: MA Experiment 20000437 PARAMETER Experiment Name: At_Drought_P Parameter: Age (day) Value: 8
  misc_feature: MA Experiment 20000437 PARAMETER Experiment Name: At_Drought_P Parameter: Organism Value: A. thaliana
  misc_feature: MA Experiment 20000437 PARAMETER Experiment Name: At_Drought_P Parameter: Plant Line Value: WS
  misc_feature: MA Experiment 20000437 PARAMETER Experiment Name: At_Drought_P Parameter: Timepoint (hr) Value: 24
  misc_feature: MA Experiment 20000437 PARAMETER Experiment Name: At_Drought_P Parameter: Tissue Value: Whole Plant
  misc_feature: MA Experiment 20000437 PARAMETER Experiment Name: At_Drought_P Parameter: Treatment Value: Drought vs. No Drought
  misc_feature: MA Experiment ID: 20001904 Result: Up-regulated in Transcription
  misc_feature: MA Experiment 20001904 PARAMETER Experiment Name: At_Drought_Reproduction_P Parameter: Age (day) Value: 37
  misc_feature: MA Experiment 20001904 PARAMETER Experiment Name: At_Drought_Reproduction_P Parameter: Organism Value: A. thaliana
  misc_feature: MA Experiment 20001904 PARAMETER Experiment Name: At_Drought_Reproduction_P Parameter: Plant Line Value: WS
  misc_feature: MA Experiment 20001904 PARAMETER Experiment Name: At_Drought_Reproduction_P Parameter: Timepoint (day) Value: 7
  misc_feature: MA Experiment 20001904 PARAMETER Experiment Name: At_Drought_Reproduction_P Parameter: Tissue Value: Rosettes
  misc_feature: MA Experiment 20001904 PARAMETER Experiment Name: At_Drought_Reproduction_P Parameter: Treatment Value: Drought vs. No Drought

SEQ ID NO: 94339 - protein, 468 aa, Arabidopsis thaliana; identical to SEQ ID NO: 90583
  peptide (1)..(468): Ceres Seq. ID no. 12724408
  misc_feature (421)..(455): Pfam Name: Zinc finger, C3HC4 type (RING finger) Pfam Description: Zinc finger, C3HC4 type (RING finger)
  misc_feature (1)..(468): Homolog of NCBI NO: 18409134 NR Description: expressed protein; protein id: At1g68820.1, by cDNA: gi_13878072, supported by cDNA: gi_17104740 [Arabidopsis >gi|13878073|gb|AAK44114.1|AF370299_1 unknown protein
  misc_feature (10)..(468): Homolog of NCBI NO: 22330616 NR Description: unknown protein; protein id: At1g73950.1,
  misc_feature (8)..(468): Homolog of NCBI NO: 18394611 NR Description: expressed protein; protein id: At1g18470.1, by cDNA: 33310. [Arabidopsis thaliana]
  misc_feature (4)..(468): Homolog of NCBI NO: 13937305 NR Description: unknown protein [Oryza sativa]
  misc_feature (222)..(468): Homolog of NCBI NO: 12324138 NR Description: hypothetical protein; 29936-28688 [Arabidopsis
  misc_feature (10)..(233): Homolog of NCBI NO: 25373333 NR Description: unknown protein F2P9.18 [imported] - Arabidopsis
  misc_feature (273)..(344): Homolog of NCBI NO: 25373333 NR Description: unknown protein F2P9.18 [imported] - Arabidopsis
  misc_feature (370)..(416): Homolog of NCBI NO: 25373333 NR Description: unknown protein F2P9.18 [imported] - Arabidopsis
  misc_feature (152)..(468): Homolog of NCBI NO: 6714286 NR Description: F15H18.5 [Arabidopsis thaliana]
  misc_feature (48)..(151): Homolog of NCBI NO: 6714286 NR Description: F15H18.5 [Arabidopsis thaliana]

SEQ ID NO: 94340 - protein, 461 aa, Arabidopsis thaliana; identical to SEQ ID NO: 90584
  peptide (1)..(461): Ceres Seq. ID no. 12724409
  misc_feature (414)..(448): Pfam Name: Zinc finger, C3HC4 type (RING finger) Pfam Description: Zinc finger, C3HC4 type (RING finger)
  misc_feature (1)..(461): Homolog of NCBI NO: 18409134 NR Description: expressed protein; protein id: At1g68820.1, by cDNA: gi_13878072, supported by cDNA: gi_17104740 [Arabidopsis >gi|13878073|gb|AAK44114.1|AF370299_1 unknown protein
  misc_feature (3)..(461): Homolog of NCBI NO: 22330616 NR Description: unknown protein; protein id: At1g73950.1,
  misc_feature (1)..(461): Homolog of NCBI NO: 18394611 NR Description: expressed protein; protein id: At1g18470.1, by cDNA: 33310. [Arabidopsis thaliana]
  misc_feature (1)..(461): Homolog of NCBI NO: 13937305 NR Description: unknown protein [Oryza sativa]
  misc_feature (215)..(461): Homolog of NCBI NO: 12324138 NR Description: hypothetical protein; 29936-28688 [Arabidopsis
  misc_feature (3)..(226): Homolog of NCBI NO: 25373333 NR Description: unknown protein F2P9.18 [imported] - Arabidopsis
  misc_feature (266)..(337): Homolog of NCBI NO: 25373333 NR Description: unknown protein F2P9.18 [imported] - Arabidopsis
  misc_feature (363)..(409): Homolog of NCBI NO: 25373333 NR Description: unknown protein F2P9.18 [imported] - Arabidopsis
  misc_feature (145)..(461): Homolog of NCBI NO: 6714286 NR Description: F15H18.5 [Arabidopsis thaliana]
  misc_feature (41)..(144): Homolog of NCBI NO: 6714286 NR Description: F15H18.5 [Arabidopsis thaliana]

SEQ ID NO: 94341 - protein, 398 aa, Arabidopsis thaliana; identical to SEQ ID NO: 90585
  peptide (1)..(398): Ceres Seq. ID no. 12724410
  misc_feature (351)..(385): Pfam Name: Zinc finger, C3HC4 type (RING finger) Pfam Description: Zinc finger, C3HC4 type (RING finger)
  misc_feature (1)..(398): Homolog of NCBI NO: 18409134 NR Description: expressed protein; protein id: At1g68820.1, by cDNA: gi_13878072, supported by cDNA: gi_17104740 [Arabidopsis >gi|13878073|gb|AAK44114.1|AF370299_1 unknown protein
  misc_feature (1)..(398): Homolog of NCBI NO: 22330616 NR Description: unknown protein; protein id: At1g73950.1,
  misc_feature (1)..(398): Homolog of NCBI NO: 18394611 NR Description: expressed protein; protein id: At1g18470.1, by cDNA: 33310. [Arabidopsis thaliana]
  misc_feature (1)..(398): Homolog of NCBI NO: 13937305 NR Description: unknown protein [Oryza sativa]
  misc_feature (152)..(398): Homolog of NCBI NO: 12324138 NR Description: hypothetical protein; 29936-28688 [Arabidopsis
  misc_feature (1)..(163): Homolog of NCBI NO: 25373333 NR Description: unknown protein F2P9.18 [imported] - Arabidopsis
  misc_feature (203)..(274): Homolog of NCBI NO: 25373333 NR Description: unknown protein F2P9.18 [imported] - Arabidopsis
  misc_feature (300)..(346): Homolog of NCBI NO: 25373333 NR Description: unknown protein F2P9.18 [imported] - Arabidopsis
  misc_feature (82)..(398): Homolog of NCBI NO: 6714286 NR Description: F15H18.5 [Arabidopsis thaliana]
  misc_feature (1)..(81): Homolog of NCBI NO: 6714286 NR Description: F15H18.5 [Arabidopsis thaliana]

SEQ ID NO: 94342 - DNA, 1241 bp, Arabidopsis thaliana; identical to SEQ ID NO: 90586
  misc_feature (1)..(1241): Ceres Seq. ID no. 12724415
  misc_feature: MA Experiment ID: 20000185 Result: Up-regulated in Transcription
  misc_feature: MA Experiment 20000185 PARAMETER Experiment Name: At_Roots__P Parameter: Age (day) Value: 7 vs. 21
  misc_feature: MA Experiment 20000185 PARAMETER Experiment Name: At_Roots__P Parameter: Organism Value: A. thaliana
  misc_feature: MA Experiment 20000185 PARAMETER Experiment Name: At_Roots__P Parameter: Tissue Value: Roots vs. Whole Plant
  misc_feature: MA Experiment ID: 20000227 Result: Down-regulated in Transcription
  misc_feature: MA Experiment 20000227 PARAMETER Experiment Name: At_Root-Tips-vs-Tops_P Parameter: Tissue Value: Root Tips vs. Root Tops
  misc_feature: MA Experiment ID: 20000234 Result: Up-regulated in Transcription
  misc_feature: MA Experiment 20000234 PARAMETER Experiment Name: At_Siliques_P Parameter: Age (day) Value: 21
  misc_feature: MA Experiment 20000234 PARAMETER Experiment Name: At_Siliques_P Parameter: Organism Value: A. thaliana
  misc_feature: MA Experiment 20000234 PARAMETER Experiment Name: At_Siliques_P Parameter: Plant Line Value: WS
  misc_feature: MA Experiment 20000234 PARAMETER Experiment Name: At_Siliques_P Parameter: Tissue Value: Less Than 5mm Siliques vs. Whole Plant
  misc_feature: MA Experiment ID: 20000265 Result: Down-regulated in Transcription
  misc_feature: MA Experiment 20000265 PARAMETER Experiment Name: At_Open_Flower_P Parameter: Age (day) Value: 21
  misc_feature: MA Experiment 20000265 PARAMETER Experiment Name: At_Open_Flower_P Parameter: Plant Line Value: WS
  misc_feature: MA Experiment 20000265 PARAMETER Experiment Name: At_Open_Flower_P Parameter: Tissue Value: Closed Flower vs. Whole Plant
  misc_feature: MA Experiment ID: 20000267 Result: Up-regulated in Transcription
  misc_feature: MA Experiment 20000267 PARAMETER Experiment Name: At_Drought_P Parameter: Age (day) Value: 7
  misc_feature: MA Experiment 20000267 PARAMETER Experiment Name: At_Drought_P Parameter: Organism Value: A. thaliana
  misc_feature: MA Experiment 20000267 PARAMETER Experiment Name: At_Drought_P Parameter: Plant Line Value: WS
  misc_feature: MA Experiment 20000267 PARAMETER Experiment Name: At_Drought_P Parameter: Timepoint (hr) Value: 6
  misc_feature: MA Experiment 20000267 PARAMETER Experiment Name: At_Drought_P Parameter: Tissue Value: Whole Plant
  misc_feature: MA Experiment 20000267 PARAMETER Experiment Name: At_Drought_P Parameter: Treatment Value: Drought vs. No Drought
  misc_feature: MA Experiment ID: 20000436 Result: Up-regulated in Transcription
  misc_feature: MA Experiment 20000436 PARAMETER Experiment Name: At_Drought_P Parameter: Age (day) Value: 7
  misc_feature: MA Experiment 20000436 PARAMETER Experiment Name: At_Drought_P Parameter: Organism Value: A. thaliana
  misc_feature: MA Experiment 20000436 PARAMETER Experiment Name: At_Drought_P Parameter: Plant Line Value: WS
  misc_feature: MA Experiment 20000436 PARAMETER Experiment Name: At_Drought_P Parameter: Timepoint (hr) Value: 12
  misc_feature: MA Experiment 20000436 PARAMETER Experiment Name: At_Drought_P Parameter: Tissue Value: Whole Plant
  misc_feature: MA Experiment 20000436 PARAMETER Experiment Name: At_Drought_P Parameter: Treatment Value: Drought vs. No Drought
  misc_feature: MA Experiment ID: 20000439 Result: Up-regulated in Transcription
  misc_feature: MA Experiment 20000439 PARAMETER Experiment Name: At_Roots__P Parameter: Age (day) Value: 14 vs. 21
  misc_feature: MA Experiment 20000439 PARAMETER Experiment Name: At_Roots__P Parameter: Organism Value: A. thaliana
  misc_feature: MA Experiment 20000439 PARAMETER Experiment Name: At_Roots__P Parameter: Tissue Value: Roots vs. Whole Plant
  misc_feature: MA Experiment ID: 20000453 Result: Up-regulated in Transcription
  misc_feature: MA Experiment 20000453 PARAMETER Experiment Name: At_100uM_ABA_P Parameter: Age (day) Value: 15
  misc_feature: MA Experiment 20000453 PARAMETER Experiment Name: At_100uM_ABA_P Parameter: Organism Value: A. thaliana
  misc_feature: MA Experiment 20000453 PARAMETER Experiment Name: At_100uM_ABA_P Parameter: Plant Line Value: WS
  misc_feature: MA Experiment 20000453 PARAMETER Experiment Name: At_100uM_ABA_P Parameter: Timepoint (hr) Value: 24
  misc_feature: MA Experiment 20000453 PARAMETER Experiment Name: At_100uM_ABA_P Parameter: Tissue Value: Aerial
  misc_feature: MA Experiment 20000453 PARAMETER Experiment Name: At_100uM_ABA_P Parameter: Treatment Value: 100uM ABA vs. No Treatment
  misc_feature: MA Experiment ID: 20000460 Result: Down-regulated in Transcription
  misc_feature: MA Experiment 20000460 PARAMETER Experiment Name: At_10percent_PEG_P Parameter: Age (day) Value: 12
  misc_feature: MA Experiment 20000460 PARAMETER Experiment Name: At_10percent_PEG_P Parameter: Organism Value: A. thaliana
  misc_feature: MA Experiment 20000460 PARAMETER Experiment Name: At_10percent_PEG_P Parameter: Plant Line Value: WS
  misc_feature: MA Experiment 20000460 PARAMETER Experiment Name: At_10percent_PEG_P Parameter: Timepoint (day) Value: 12
  misc_feature: MA Experiment 20000460 PARAMETER Experiment Name: At_10percent_PEG_P Parameter: Tissue Value: Whole Plant
  misc_feature: MA Experiment 20000460 PARAMETER Experiment Name: At_10percent_PEG_P Parameter: Treatment Value: 10percent PEG vs. No Treatment
  misc_feature: MA Experiment ID: 20000527 Result: Down-regulated in Transcription
  misc_feature: MA Experiment 20000527 PARAMETER Experiment Name: At_10percent_PEG_P Parameter: Age (day) Value: 20
  misc_feature: MA Experiment 20000527 PARAMETER Experiment Name: At_10percent_PEG_P Parameter: Organism Value: A. thaliana
  misc_feature: MA Experiment 20000527 PARAMETER Experiment Name: At_10percent_PEG_P Parameter: Plant Line Value: WS
  misc_feature: MA Experiment 20000527 PARAMETER Experiment Name: At_10percent_PEG_P Parameter: Timepoint (day) Value: 20
  misc_feature: MA Experiment 20000527 PARAMETER Experiment Name: At_10percent_PEG_P Parameter: Tissue Value: Whole Plant
  misc_feature: MA Experiment 20000527 PARAMETER Experiment Name: At_10percent_PEG_P Parameter: Treatment Value: 10percent PEG vs. No Treatment
  misc_feature: MA Experiment ID: 20000573 Result: Down-regulated in Transcription
  misc_feature: MA Experiment 20000573 PARAMETER Experiment Name: At_100uM_ABA_Mutants__P Parameter: Organism Value: A. thaliana
  misc_feature: MA Experiment 20000573 PARAMETER Experiment Name: At_100uM_ABA_Mutants__P Parameter: Plant Line Value: CS22 vs. Ler wt
  misc_feature: MA Experiment 20000573 PARAMETER Experiment Name: At_100uM_ABA_Mutants__P Parameter: Timepoint (hr) Value: N/A
  misc_feature: MA Experiment 20000573 PARAMETER Experiment Name: At_100uM_ABA_Mutants__P Parameter: Tissue Value: Whole Plant
  misc_feature: MA Experiment 20000573 PARAMETER Experiment Name: At_100uM_ABA_Mutants__P Parameter: Treatment Value: None
  misc_feature: MA Experiment ID: 20001248 Result: Down-regulated in Transcription
  misc_feature: MA Experiment 20001248 PARAMETER Experiment Name: At_Far-red-induction_P Parameter: Age (day) Value: 7
  misc_feature: MA Experiment 20001248 PARAMETER Experiment Name: At_Far-red-induction_P Parameter: Light Value: Far-red vs. White
  misc_feature: MA Experiment 20001248 PARAMETER Experiment Name: At_Far-red-induction_P Parameter: Organism Value: A. thaliana
  misc_feature: MA Experiment 20001248 PARAMETER Experiment Name: At_Far-red-induction_P Parameter: Plant Line Value: Columbia
  misc_feature: MA Experiment 20001248 PARAMETER Experiment Name: At_Far-red-induction_P Parameter: Timepoint (hr) Value: 4
  misc_feature: MA Experiment 20001248 PARAMETER Experiment Name: At_Far-red-induction_P Parameter: Tissue Value: Whole Plant
  misc_feature: MA Experiment ID: 20001556 Result: Up-regulated in Transcription
  misc_feature: MA Experiment 20001556 PARAMETER Experiment Name: At_Drought_Soil_Dry_P Parameter: Age (day) Value: 26
  misc_feature: MA Experiment 20001556 PARAMETER Experiment Name: At_Drought_Soil_Dry_P Parameter: Organism Value: A. thaliana
  misc_feature: MA Experiment 20001556 PARAMETER Experiment Name: At_Drought_Soil_Dry_P Parameter: Plant Line Value: WS
  misc_feature: MA Experiment 20001556 PARAMETER Experiment Name: At_Drought_Soil_Dry_P Parameter: Post Timepoint (hr) Value: None
  misc_feature: MA Experiment 20001556 PARAMETER Experiment Name: At_Drought_Soil_Dry_P Parameter: Post-Treatment Value: None
  misc_feature: MA Experiment 20001556 PARAMETER Experiment Name: At_Drought_Soil_Dry_P Parameter: Timepoint (day) Value: 12
  misc_feature: MA Experiment 20001556 PARAMETER Experiment Name: At_Drought_Soil_Dry_P Parameter: Treatment Value: Drought vs. No Drought
  misc_feature: MA Experiment ID: 20001761 Result: Down-regulated in Transcription
  misc_feature: MA Experiment 20001761 PARAMETER Experiment Name: At_50mM_NH4NO3_L-to-H_P Parameter: Timepoint (hr) Value: 4
  misc_feature: MA Experiment 20001761 PARAMETER Experiment Name: At_50mM_NH4NO3_L-to-H_P Parameter: Tissue Value: Siliques
  misc_feature: MA Experiment 20001761 PARAMETER Experiment Name: At_50mM_NH4NO3_L-to-H_P Parameter: Treatment Value: 50mM NH4NO3 vs 100mM Mannitol
  misc_feature: MA Experiment ID: 20001904 Result: Up-regulated in Transcription
  misc_feature: MA Experiment 20001904 PARAMETER Experiment Name: At_Drought_Reproduction_P Parameter: Age (day) Value: 37
  misc_feature: MA Experiment 20001904 PARAMETER Experiment Name: At_Drought_Reproduction_P Parameter: Organism Value: A. thaliana
  misc_feature: MA Experiment 20001904 PARAMETER Experiment Name: At_Drought_Reproduction_P Parameter: Plant Line Value: WS
  misc_feature: MA Experiment 20001904 PARAMETER Experiment Name: At_Drought_Reproduction_P Parameter: Timepoint (day) Value: 7
  misc_feature: MA Experiment 20001904 PARAMETER Experiment Name: At_Drought_Reproduction_P Parameter: Tissue Value: Rosettes
  misc_feature: MA Experiment 20001904 PARAMETER Experiment Name: At_Drought_Reproduction_P Parameter: Treatment Value: Drought vs. No Drought
  misc_feature: MA Experiment ID: 20001905 Result: Up-regulated in Transcription
  misc_feature: MA Experiment 20001905 PARAMETER Experiment Name: At_Drought_Reproduction_P Parameter: Age (day) Value: 40
  misc_feature: MA Experiment 20001905 PARAMETER Experiment Name: At_Drought_Reproduction_P Parameter: Organism Value: A. thaliana
  misc_feature: MA Experiment 20001905 PARAMETER Experiment Name: At_Drought_Reproduction_P Parameter: Plant Line Value: WS
  misc_feature: MA Experiment 20001905 PARAMETER Experiment Name: At_Drought_Reproduction_P Parameter: Timepoint (day) Value: 10
  misc_feature: MA Experiment 20001905 PARAMETER Experiment Name: At_Drought_Reproduction_P Parameter: Tissue Value: Rosettes
  misc_feature: MA Experiment 20001905 PARAMETER Experiment Name: At_Drought_Reproduction_P Parameter: Treatment Value: Drought vs. No Drought
  misc_feature: MA Experiment ID: 20001906 Result: Up-regulated in Transcription
  misc_feature: MA Experiment 20001906 PARAMETER Experiment Name: At_Drought_Reproduction_P Parameter: Age (day) Value: 35
  misc_feature: MA Experiment 20001906 PARAMETER Experiment Name: At_Drought_Reproduction_P Parameter: Organism Value: A. thaliana
  misc_feature: MA Experiment 20001906 PARAMETER Experiment Name: At_Drought_Reproduction_P Parameter: Plant Line Value: WS
  misc_feature: MA Experiment 20001906 PARAMETER Experiment Name: At_Drought_Reproduction_P Parameter: Timepoint (day) Value: 5
  misc_feature: MA Experiment 20001906 PARAMETER Experiment Name: At_Drought_Reproduction_P Parameter: Tissue Value: Siliques
  misc_feature: MA Experiment 20001906 PARAMETER Experiment Name: At_Drought_Reproduction_P Parameter: Treatment Value: Drought vs. No Drought
  misc_feature: MA Experiment ID: 20001908 Result: Up-regulated in Transcription
  misc_feature: MA Experiment 20001908 PARAMETER Experiment Name: At_Drought_Reproduction_P Parameter: Age (day) Value: 40
  misc_feature: MA Experiment 20001908 PARAMETER Experiment Name: At_Drought_Reproduction_P Parameter: Organism Value: A. thaliana
  misc_feature: MA Experiment 20001908 PARAMETER Experiment Name: At_Drought_Reproduction_P Parameter: Plant Line Value: WS
  misc_feature: MA Experiment 20001908 PARAMETER Experiment Name: At_Drought_Reproduction_P Parameter: Timepoint (day) Value: 10
  misc_feature: MA Experiment 20001908 PARAMETER Experiment Name: At_Drought_Reproduction_P Parameter: Tissue Value: Siliques
  misc_feature: MA Experiment 20001908 PARAMETER Experiment Name: At_Drought_Reproduction_P Parameter: Treatment Value: Drought vs. No Drought

SEQ ID NO: 94343 - protein, 336 aa, Arabidopsis thaliana; identical to SEQ ID NO: 90587
  peptide (1)..(336): Ceres Seq. ID no. 12724416
  misc_feature (46)..(298): Pfam Name: Peroxidase Pfam Description: Peroxidase
  misc_feature (1)..(336): Homolog of NCBI NO: 18409140 NR Description: peroxidase, putative; protein id: At1g68850.1 thaliana] >gi|25453204|sp|Q96519|PE11_ARATH Peroxidase 11
  misc_feature (30)..(336): Homolog of NCBI NO: 11862958 NR Description: putative peroxidase [Oryza sativa (japonica
  misc_feature (76)..(336): Homolog of NCBI NO: 34898676 NR Description: putative peroxidase [Oryza sativa (japonica >gi|23589947|dbj|BAC20629.1| putative peroxidase [Oryza sativa
  misc_feature (27)..(335): Homolog of NCBI NO: 5002342 NR Description: peroxidase 1 precursor [Phaseolus vulgaris]
  misc_feature (33)..(335): Homolog of NCBI NO: 14031051 NR Description: peroxidase [Nicotiana tabacum]
  misc_feature (1)..(336): Homolog of NCBI NO: 15234394 NR Description: peroxidase, putative; protein id: At4g36430.1, by cDNA: gi_17530561, supported by cDNA: gi_18377685 [Arabidopsis
  misc_feature (16)..(335): Homolog of NCBI NO: 28400798 NR Description: peroxidase [Asparagus officinalis]
  misc_feature (15)..(335): Homolog of NCBI NO: 1279654 NR Description: peroxidase [Populus balsamifera subsp.
  misc_feature (25)..(335): Homolog of NCBI NO: 26397553 NR Description: Peroxidase 40 precursor (Atperox P40)
  misc_feature (193)..(336): Homolog of NCBI NO: 1890311 NR Description: peroxidase ATP23b [Arabidopsis thaliana]

SEQ ID NO: 94344 - protein, 335 aa, Arabidopsis thaliana; identical to SEQ ID NO: 90588
  peptide (1)..(335): Ceres Seq. ID no. 12724417
  misc_feature (45)..(297): Pfam Name: Peroxidase Pfam Description: Peroxidase
  misc_feature (1)..(335): Homolog of NCBI NO: 18409140 NR Description: peroxidase, putative; protein id: At1g68850.1 thaliana] >gi|25453204|sp|Q96519|PE11_ARATH Peroxidase 11
  misc_feature (29)..(335): Homolog of NCBI NO: 11862958 NR Description: putative peroxidase [Oryza sativa (japonica
  misc_feature (75)..(335): Homolog of NCBI NO: 34898676 NR Description: putative peroxidase [Oryza sativa (japonica >gi|23589947|dbj|BAC20629.1| putative peroxidase [Oryza sativa
  misc_feature (26)..(334): Homolog of NCBI NO: 5002342 NR Description: peroxidase 1 precursor [Phaseolus vulgaris]
  misc_feature (32)..(334): Homolog of NCBI NO: 14031051 NR Description: peroxidase [Nicotiana tabacum]
  misc_feature (1)..(335): Homolog of NCBI NO: 15234394 NR Description: peroxidase, putative; protein id: At4g36430.1, by cDNA: gi_17530561, supported by cDNA: gi_18377685 [Arabidopsis
  misc_feature (15)..(334): Homolog of NCBI NO: 28400798 NR Description: peroxidase [Asparagus officinalis]
  misc_feature (14)..(334): Homolog of NCBI NO: 1279654 NR Description: peroxidase [Populus balsamifera subsp.
  misc_feature (24)..(334): Homolog of NCBI NO: 26397553 NR Description: Peroxidase 40 precursor (Atperox P40)
  misc_feature (192)..(335): Homolog of NCBI NO: 1890311 NR Description: peroxidase ATP23b [Arabidopsis thaliana]

SEQ ID NO: 94345 - protein, 327 aa, Arabidopsis thaliana; identical to SEQ ID NO: 90589
  peptide (1)..(327): Ceres Seq. ID no. 12724418
  misc_feature (37)..(289): Pfam Name: Peroxidase Pfam Description: Peroxidase
  misc_feature (1)..(327): Homolog of NCBI NO: 18409140 NR Description: peroxidase, putative; protein id: At1g68850.1 thaliana] >gi|25453204|sp|Q96519|PE11_ARATH Peroxidase 11
  misc_feature (21)..(327): Homolog of NCBI NO: 11862958 NR Description: putative peroxidase [Oryza sativa (japonica
  misc_feature (67)..(327): Homolog of NCBI NO: 34898676 NR Description: putative peroxidase [Oryza sativa (japonica >gi|23589947|dbj|BAC20629.1| putative peroxidase [Oryza sativa
  misc_feature (18)..(326): Homolog of NCBI NO: 5002342 NR Description: peroxidase 1 precursor [Phaseolus vulgaris]
  misc_feature (24)..(326): Homolog of NCBI NO: 14031051 NR Description: peroxidase [Nicotiana tabacum]
  misc_feature (1)..(327): Homolog of NCBI NO: 15234394 NR Description: peroxidase, putative; protein id: At4g36430.1, by cDNA: gi_17530561, supported by cDNA: gi_18377685 [Arabidopsis
  misc_feature (7)..(326): Homolog of NCBI NO: 28400798 NR Description: peroxidase [Asparagus officinalis]
  misc_feature (6)..(326): Homolog of NCBI NO: 1279654 NR Description: peroxidase [Populus balsamifera subsp.
  misc_feature (16)..(326): Homolog of NCBI NO: 26397553 NR Description: Peroxidase 40 precursor (Atperox P40)
  misc_feature (184)..(327): Homolog of NCBI NO: 1890311 NR Description: peroxidase ATP23b [Arabidopsis thaliana]

SEQ ID NO: 94346 - DNA, 2232 bp, Arabidopsis thaliana; identical to SEQ ID NO: 90590
  misc_feature (1)..(2232): Ceres Seq. ID no. 12724430
  misc_feature: MA Experiment ID: 20000307 Result: Down-regulated in Transcription
  misc_feature: MA Experiment 20000307 PARAMETER Experiment Name: At_Germinating_Seeds_Sub_P Parameter: Age (hr) Value: 24 vs. 0
  misc_feature: MA Experiment 20000307 PARAMETER Experiment Name: At_Germinating_Seeds_Sub_P Parameter: Organism Value: A. thaliana
  misc_feature: MA Experiment 20000307 PARAMETER Experiment Name: At_Germinating_Seeds_Sub_P Parameter: Plant Line Value: WS
  misc_feature: MA Experiment 20000307 PARAMETER Experiment Name: At_Germinating_Seeds_Sub_P Parameter: Tissue Value: Germinating Seeds
  misc_feature: MA Experiment ID: 20000327 Result: Up-regulated in Transcription
  misc_feature: MA Experiment 20000327 PARAMETER Experiment Name: At_42deg_Heat_Sub_P Parameter: Age (day) Value: 14
  misc_feature: MA Experiment 20000327 PARAMETER Experiment Name: At_42deg_Heat_Sub_P Parameter: Organism Value: A. thaliana
  misc_feature: MA Experiment 20000327 PARAMETER Experiment Name: At_42deg_Heat_Sub_P Parameter: Plant Line Value: WS
  misc_feature: MA Experiment 20000327 PARAMETER Experiment Name: At_42deg_Heat_Sub_P Parameter: Temperature (deg C) Value: 42 vs. 22
  misc_feature: MA Experiment 20000327 PARAMETER Experiment Name: At_42deg_Heat_Sub_P Parameter: Timepoint (hr) Value: 1
  misc_feature: MA Experiment 20000327 PARAMETER Experiment Name: At_42deg_Heat_Sub_P Parameter: Tissue Value: Aerial

SEQ ID NO: 94347 - protein, 743 aa, Arabidopsis thaliana; identical to SEQ ID NO: 90591
  peptide (1)..(743): Ceres Seq. ID no. 12724431
  misc_feature (509)..(543): Pfam Name: PPR repeat Pfam Description: PPR repeat
  misc_feature (221)..(743): Homolog of NCBI NO: 15234095 NR Description: putative protein; protein id: At4g33170.1
  misc_feature (42)..(227): Homolog of NCBI NO: 15234095 NR Description: putative protein; protein id: At4g33170.1
  misc_feature (184)..(743): Homolog of NCBI NO: 15242550 NR Description: selenium-binding protein-like; protein id:
  misc_feature (76)..(253): Homolog of NCBI NO: 15242550 NR Description: selenium-binding protein-like; protein id:
  misc_feature (10)..(86): Homolog of NCBI NO: 15242550 NR Description: selenium-binding protein-like; protein id:
  misc_feature (227)..(743): Homolog of NCBI NO: 15232837 NR Description: hypothetical protein; protein id: At3g02010.1 thaliana] >gi|6091739|gb|AAF03451.1|AC010797_27 hypothetical [Arabidopsis thaliana] >gi|6513930|gb|AAF14834.1|AC011664_16
  misc_feature (26)..(233): Homolog of NCBI NO: 15232837 NR Description: hypothetical protein; protein id: At3g02010.1 thaliana] >gi|6091739|gb|AAF03451.1|AC010797_27 hypothetical [Arabidopsis thaliana] >gi|6513930|gb|AAF14834.1|AC011664_16
  misc_feature (32)..(743): Homolog of NCBI NO: 15235498 NR Description: hypothetical protein; protein id: At4g02750.1
  misc_feature (90)..(743): Homolog of NCBI NO: 33146689 NR Description: putative pentatricopeptide (PPR)
  misc_feature (218)..(743): Homolog of NCBI NO: 15220337 NR Description: hypothetical protein; protein id: At1g11290.1

SEQ ID NO: 94348 - protein, 717 aa, Arabidopsis thaliana; identical to SEQ ID NO: 90592
  peptide (1)..(717): Ceres Seq. ID no. 12724432
  misc_feature (483)..(517): Pfam Name: PPR repeat Pfam Description: PPR repeat
  misc_feature (195)..(717): Homolog of NCBI NO: 15234095 NR Description: putative protein; protein id: At4g33170.1
  misc_feature (16)..(201): Homolog of NCBI NO: 15234095 NR Description: putative protein; protein id: At4g33170.1
  misc_feature (158)..(717): Homolog of NCBI NO: 15242550 NR Description: selenium-binding protein-like; protein id:
  misc_feature (50)..(227): Homolog of NCBI NO: 15242550 NR Description: selenium-binding protein-like; protein id:
  misc_feature (1)..(60): Homolog of NCBI NO: 15242550 NR Description: selenium-binding protein-like; protein id:
  misc_feature (201)..(717): Homolog of NCBI NO: 15232837 NR Description: hypothetical protein; protein id: At3g02010.1 thaliana] >gi|6091739|gb|AAF03451.1|AC010797_27 hypothetical [Arabidopsis thaliana] >gi|6513930|gb|AAF14834.1|AC011664_16
  misc_feature (1)..(207): Homolog of NCBI NO: 15232837 NR Description: hypothetical protein; protein id: At3g02010.1 thaliana] >gi|6091739|gb|AAF03451.1|AC010797_27 hypothetical [Arabidopsis thaliana] >gi|6513930|gb|AAF14834.1|AC011664_16
  misc_feature (6)..(717): Homolog of NCBI NO: 15235498 NR Description: hypothetical protein; protein id: At4g02750.1
  misc_feature (64)..(717): Homolog of NCBI NO: 33146689 NR Description: putative pentatricopeptide (PPR)
  misc_feature (192)..(717): Homolog of NCBI NO: 15220337 NR Description: hypothetical protein; protein id: At1g11290.1

SEQ ID NO: 94349 - protein, 690 aa, Arabidopsis thaliana; identical to SEQ ID NO: 90593
  peptide (1)..(690): Ceres Seq. ID no. 12724433
  misc_feature (456)..(490): Pfam Name: PPR repeat Pfam Description: PPR repeat
  misc_feature (168)..(690): Homolog of NCBI NO: 15234095 NR Description: putative protein; protein id: At4g33170.1
  misc_feature (1)..(174): Homolog of NCBI NO: 15234095 NR Description: putative protein; protein id: At4g33170.1
  misc_feature (131)..(690): Homolog of NCBI NO: 15242550 NR Description: selenium-binding protein-like; protein id:
  misc_feature (23)..(200): Homolog of NCBI NO: 15242550 NR Description: selenium-binding protein-like; protein id:
  misc_feature (1)..(33): Homolog of NCBI NO: 15242550 NR Description: selenium-binding protein-like; protein id:
  misc_feature (174)..(690): Homolog of NCBI NO: 15232837 NR Description: hypothetical protein; protein id: At3g02010.1 thaliana] >gi|6091739|gb|AAF03451.1|AC010797_27 hypothetical [Arabidopsis thaliana] >gi|6513930|gb|AAF14834.1|AC011664_16
  misc_feature (1)..(180): Homolog of NCBI NO: 15232837 NR Description: hypothetical protein; protein id: At3g02010.1 thaliana] >gi|6091739|gb|AAF03451.1|AC010797_27 hypothetical [Arabidopsis thaliana] >gi|6513930|gb|AAF14834.1|AC011664_16
  misc_feature (1)..(690): Homolog of NCBI NO: 15235498 NR Description: hypothetical protein; protein id: At4g02750.1
  misc_feature (37)..(690): Homolog of NCBI NO: 33146689 NR Description: putative pentatricopeptide (PPR)
  misc_feature (165)..(690): Homolog of NCBI NO: 15220337 NR Description: hypothetical protein; protein id: At1g11290.1

SEQ ID NO: 94350 - DNA, 1845 bp, Arabidopsis thaliana; identical to SEQ ID NO: 90594
  misc_feature (1)..(1845): Ceres Seq. ID no. 12724478
  misc_feature: MA Experiment ID: 20000169 Result: Down-regulated in Transcription
  misc_feature: MA Experiment 20000169 PARAMETER Experiment Name: At_100uM_ABA_P Parameter: Age (day) Value: 14
  misc_feature: MA Experiment 20000169 PARAMETER Experiment Name: At_100uM_ABA_P Parameter: Organism Value: A. thaliana
  misc_feature: MA Experiment 20000169 PARAMETER Experiment Name: At_100uM_ABA_P Parameter: Plant Line Value: WS
  misc_feature: MA Experiment 20000169 PARAMETER Experiment Name: At_100uM_ABA_P Parameter: Timepoint (hr) Value: 6
  misc_feature: MA Experiment 20000169 PARAMETER Experiment Name: At_100uM_ABA_P Parameter: Tissue Value: Aerial
  misc_feature: MA Experiment 20000169 PARAMETER Experiment Name: At_100uM_ABA_P Parameter: Treatment Value: 100uM ABA vs. No Treatment
  misc_feature: MA Experiment ID: 20000171 Result: Down-regulated in Transcription
  misc_feature: MA Experiment 20000171 PARAMETER Experiment Name: At_42deg_Heat_P Parameter: Age (day) Value: 14
  misc_feature: MA Experiment 20000171 PARAMETER Experiment Name: At_42deg_Heat_P Parameter: Organism Value: A. thaliana
  misc_feature: MA Experiment 20000171 PARAMETER Experiment Name: At_42deg_Heat_P Parameter: Plant Line Value: WS
  misc_feature: MA Experiment 20000171 PARAMETER Experiment Name: At_42deg_Heat_P Parameter: Temperature (deg C) Value: 42 vs. 22
  misc_feature: MA Experiment 20000171 PARAMETER Experiment Name: At_42deg_Heat_P Parameter: Timepoint (hr) Value: 1
  misc_feature: MA Experiment 20000171 PARAMETER Experiment Name: At_42deg_Heat_P Parameter: Tissue Value: Aerial
  misc_feature: MA Experiment ID: 20000182 Result: Down-regulated in Transcription
  misc_feature: MA Experiment 20000182 PARAMETER Experiment Name: At_2mM_SA_P Parameter: Age (day) Value: 14
  misc_feature: MA Experiment 20000182 PARAMETER Experiment Name: At_2mM_SA_P Parameter: Organism Value: A. thaliana
  misc_feature: MA Experiment 20000182 PARAMETER Experiment Name: At_2mM_SA_P Parameter: Plant Line Value: WS
  misc_feature: MA Experiment 20000182 PARAMETER Experiment Name: At_2mM_SA_P Parameter: Timepoint (hr) Value: 6
  misc_feature: MA Experiment 20000182 PARAMETER Experiment Name: At_2mM_SA_P Parameter: Tissue Value: Aerial
  misc_feature: MA Experiment 20000182 PARAMETER Experiment Name: At_2mM_SA_P Parameter: Treatment Value: 2mM SA vs. No Treatment
  misc_feature: MA Experiment ID: 20000185 Result: Down-regulated in Transcription
  misc_feature: MA Experiment 20000185 PARAMETER Experiment Name: At_Roots__P Parameter: Age (day) Value: 7 vs. 21
  misc_feature: MA Experiment 20000185 PARAMETER Experiment Name: At_Roots__P Parameter: Organism Value: A. thaliana
  misc_feature: MA Experiment 20000185 PARAMETER Experiment Name: At_Roots__P Parameter: Tissue Value: Roots vs. Whole Plant
  misc_feature: MA Experiment ID: 20000227 Result: Up-regulated in Transcription
  misc_feature: MA Experiment 20000227 PARAMETER Experiment Name: At_Root-Tips-vs-Tops_P Parameter: Tissue Value: Root Tips vs. Root Tops
  misc_feature: MA Experiment ID: 20000234 Result: Up-regulated in Transcription
  misc_feature: MA Experiment 20000234 PARAMETER Experiment Name: At_Siliques_P Parameter: Age (day) Value: 21
  misc_feature: MA Experiment 20000234 PARAMETER Experiment Name: At_Siliques_P Parameter: Organism Value: A. thaliana
  misc_feature: MA Experiment 20000234 PARAMETER Experiment Name: At_Siliques_P Parameter: Plant Line Value: WS
  misc_feature: MA Experiment 20000234 PARAMETER Experiment Name: At_Siliques_P Parameter: Tissue Value: Less Than 5mm Siliques vs. Whole Plant
  misc_feature: MA Experiment ID: 20000264 Result: Up-regulated in Transcription
  misc_feature: MA Experiment 20000264 PARAMETER Experiment Name: At_Open_Flower_P Parameter: Age (day) Value: 21
  misc_feature: MA Experiment 20000264 PARAMETER Experiment Name: At_Open_Flower_P Parameter: Plant Line Value: WS
  misc_feature: MA Experiment 20000264 PARAMETER Experiment Name: At_Open_Flower_P Parameter: Tissue Value: Open Flower vs. Whole Plant
  misc_feature: MA Experiment ID: 20000437 Result: Down-regulated in Transcription
  misc_feature: MA Experiment 20000437 PARAMETER Experiment Name: At_Drought_P Parameter: Age (day) Value: 8
  misc_feature: MA Experiment 20000437 PARAMETER Experiment Name: At_Drought_P Parameter: Organism Value: A. thaliana
  misc_feature: MA Experiment 20000437 PARAMETER Experiment Name: At_Drought_P Parameter: Plant Line Value: WS
  misc_feature: MA Experiment 20000437 PARAMETER Experiment Name: At_Drought_P Parameter: Timepoint (hr) Value: 24
  misc_feature: MA Experiment 20000437 PARAMETER Experiment Name: At_Drought_P Parameter: Tissue Value: Whole Plant
  misc_feature: MA Experiment 20000437 PARAMETER Experiment Name: At_Drought_P Parameter: Treatment Value: Drought vs. No Drought
  misc_feature: MA Experiment ID: 20000439 Result: Down-regulated in Transcription
  misc_feature: MA Experiment 20000439 PARAMETER Experiment Name: At_Roots__P Parameter: Age (day) Value: 14 vs. 21
  misc_feature: MA Experiment 20000439 PARAMETER Experiment Name: At_Roots__P Parameter: Organism Value: A. thaliana
  misc_feature: MA Experiment 20000439 PARAMETER Experiment Name: At_Roots__P Parameter: Tissue Value: Roots vs. Whole Plant
  misc_feature: MA Experiment ID: 20000453 Result: Down-regulated in Transcription
  misc_feature: MA Experiment 20000453 PARAMETER Experiment Name: At_100uM_ABA_P Parameter: Age (day) Value: 15
  misc_feature: MA Experiment 20000453 PARAMETER Experiment Name: At_100uM_ABA_P Parameter: Organism Value: A. thaliana
  misc_feature: MA Experiment 20000453 PARAMETER Experiment Name: At_100uM_ABA_P Parameter: Plant Line Value: WS
  misc_feature: MA Experiment 20000453 PARAMETER Experiment Name: At_100uM_ABA_P Parameter: Timepoint (hr) Value: 24
  misc_feature: MA Experiment 20000453 PARAMETER Experiment Name: At_100uM_ABA_P Parameter: Tissue Value: Aerial
  misc_feature: MA Experiment 20000453 PARAMETER Experiment Name: At_100uM_ABA_P Parameter: Treatment Value: 100uM ABA vs. No Treatment
  misc_feature: MA Experiment ID: 20000527 Result: Up-regulated in Transcription
  misc_feature: MA Experiment 20000527 PARAMETER Experiment Name: At_10percent_PEG_P Parameter: Age (day) Value: 20
  misc_feature: MA Experiment 20000527 PARAMETER Experiment Name: At_10percent_PEG_P Parameter: Organism Value: A. thaliana
  misc_feature: MA Experiment 20000527 PARAMETER Experiment Name: At_10percent_PEG_P Parameter: Plant Line Value: WS
  misc_feature: MA Experiment 20000527 PARAMETER Experiment Name: At_10percent_PEG_P Parameter: Timepoint (day) Value: 20
  misc_feature: MA Experiment 20000527 PARAMETER Experiment Name: At_10percent_PEG_P Parameter: Tissue Value: Whole Plant
  misc_feature: MA Experiment 20000527 PARAMETER Experiment Name: At_10percent_PEG_P Parameter: Treatment Value: 10percent PEG vs. No Treatment
  misc_feature: MA Experiment ID: 20000794 Result: Down-regulated in Transcription
  misc_feature: MA Experiment 20000794 PARAMETER Experiment Name: At_Petals_P Parameter: Age (day) Value: 23-25 days
  misc_feature: MA Experiment 20000794 PARAMETER Experiment Name: At_Petals_P Parameter: Plant Line Value: WS
  misc_feature: MA Experiment 20000794 PARAMETER Experiment Name: At_Petals_P Parameter: Tissue Value: Petals vs. Whole plant
  misc_feature: MA Experiment ID: 20001247 Result: Down-regulated in Transcription
  misc_feature: MA Experiment 20001247 PARAMETER Experiment Name: At_Far-red-induction_P Parameter: Age (day) Value: 7
  misc_feature: MA Experiment 20001247 PARAMETER Experiment Name: At_Far-red-induction_P Parameter: Light Value: Far-red vs. White
  misc_feature: MA Experiment 20001247 PARAMETER Experiment Name: At_Far-red-induction_P Parameter: Organism Value: A. thaliana
  misc_feature: MA Experiment 20001247 PARAMETER Experiment Name: At_Far-red-induction_P Parameter: Plant Line Value: Columbia
  misc_feature: MA Experiment 20001247 PARAMETER Experiment Name: At_Far-red-induction_P Parameter: Timepoint (hr) Value: 1
  misc_feature: MA Experiment 20001247 PARAMETER Experiment Name: At_Far-red-induction_P Parameter: Tissue Value: Whole Plant
  misc_feature: MA Experiment ID: 20001450 Result: Down-regulated in Transcription
  misc_feature: MA Experiment 20001450 PARAMETER Experiment Name: At_Far-red-induction_P Parameter: Age (day) Value: 7
  misc_feature: MA Experiment 20001450 PARAMETER Experiment Name: At_Far-red-induction_P Parameter: Light Value: Far-red vs. White
  misc_feature: MA Experiment 20001450 PARAMETER Experiment Name: At_Far-red-induction_P Parameter: Organism Value: A. thaliana
  misc_feature: MA Experiment 20001450 PARAMETER Experiment Name: At_Far-red-induction_P Parameter: Plant Line Value: Columbia
  misc_feature: MA Experiment 20001450 PARAMETER Experiment Name: At_Far-red-induction_P Parameter: Timepoint (hr) Value: 8
  misc_feature: MA Experiment 20001450 PARAMETER Experiment Name: At_Far-red-induction_P Parameter: Tissue Value: Whole Plant
  misc_feature: MA Experiment ID: 20001556 Result: Up-regulated in Transcription
  misc_feature: MA Experiment 20001556 PARAMETER Experiment Name: At_Drought_Soil_Dry_P Parameter: Age (day) Value: 26
  misc_feature: MA Experiment 20001556 PARAMETER Experiment Name: At_Drought_Soil_Dry_P Parameter: Organism Value: A. thaliana
  misc_feature: MA Experiment 20001556 PARAMETER Experiment Name: At_Drought_Soil_Dry_P Parameter: Plant Line Value: WS
  misc_feature: MA Experiment 20001556 PARAMETER Experiment Name: At_Drought_Soil_Dry_P Parameter: Post Timepoint (hr) Value: None
  misc_feature: MA Experiment 20001556 PARAMETER Experiment Name: At_Drought_Soil_Dry_P Parameter: Post-Treatment Value: None
  misc_feature: MA Experiment 20001556 PARAMETER Experiment Name: At_Drought_Soil_Dry_P Parameter: Timepoint (day) Value: 12
  misc_feature: MA Experiment 20001556 PARAMETER Experiment Name: At_Drought_Soil_Dry_P Parameter: Treatment Value: Drought vs. No Drought
  misc_feature: MA Experiment ID: 20001558 Result: Up-regulated in Transcription
  misc_feature: MA Experiment 20001558 PARAMETER Experiment Name: At_Drought_Soil_Dry_P Parameter: Age (day) Value: 27
  misc_feature: MA Experiment 20001558 PARAMETER Experiment Name: At_Drought_Soil_Dry_P Parameter: Organism Value: A. thaliana
  misc_feature: MA Experiment 20001558 PARAMETER Experiment Name: At_Drought_Soil_Dry_P Parameter: Plant Line Value: WS
  misc_feature: MA Experiment 20001558 PARAMETER Experiment Name: At_Drought_Soil_Dry_P Parameter: Post Timepoint (hr) Value: 6
  misc_feature: MA Experiment 20001558 PARAMETER Experiment Name: At_Drought_Soil_Dry_P Parameter: Post-Treatment Value: Re-Water vs. No Drought
  misc_feature: MA Experiment 20001558 PARAMETER Experiment Name: At_Drought_Soil_Dry_P Parameter: Timepoint (day) Value: 13
  misc_feature: MA Experiment 20001558 PARAMETER Experiment Name: At_Drought_Soil_Dry_P Parameter: Treatment Value: Drought vs. No Drought
  misc_feature: MA Experiment ID: 20001560 Result: Up-regulated in Transcription
  misc_feature: MA Experiment 20001560 PARAMETER Experiment Name: At_Drought_Soil_Dry_P Parameter: Age (day) Value: 28
  misc_feature: MA Experiment 20001560 PARAMETER Experiment Name: At_Drought_Soil_Dry_P Parameter: Organism Value: A. thaliana
  misc_feature: MA Experiment 20001560 PARAMETER Experiment Name: At_Drought_Soil_Dry_P Parameter: Plant Line Value: WS
  misc_feature: MA Experiment 20001560 PARAMETER Experiment Name: At_Drought_Soil_Dry_P Parameter: Post Timepoint (hr) Value: None
  misc_feature: MA Experiment 20001560 PARAMETER Experiment Name: At_Drought_Soil_Dry_P Parameter: Post-Treatment Value: None
  misc_feature: MA Experiment 20001560 PARAMETER Experiment Name: At_Drought_Soil_Dry_P Parameter: Timepoint (day) Value: 14
  misc_feature: MA Experiment 20001560 PARAMETER Experiment Name: At_Drought_Soil_Dry_P Parameter: Treatment Value: Drought vs. No Drought
  misc_feature: MA Experiment ID: 20001757 Result: Up-regulated in Transcription
  misc_feature: MA Experiment 20001757 PARAMETER Experiment Name: At_50mM_NH4NO3_L-to-H_P Parameter: Timepoint (hr) Value: 6
  misc_feature: MA Experiment 20001757 PARAMETER Experiment Name: At_50mM_NH4NO3_L-to-H_P Parameter: Tissue Value: Leaf
  misc_feature: MA Experiment 20001757 PARAMETER Experiment Name: At_50mM_NH4NO3_L-to-H_P Parameter: Treatment Value: 50mM NH4NO3 vs 100mM Mannitol

SEQ ID NO: 94351 - protein, 614 aa, Arabidopsis thaliana; identical to SEQ ID NO: 90595
  peptide (1)..(614): Ceres Seq. ID no. 12724479
  misc_feature (204)..(546): Pfam Name: pfkB family carbohydrate kinase Pfam Description: pfkB family carbohydrate kinase
  misc_feature (44)..(614): Homolog of NCBI NO: 6730638 NR Description: F4N2.16 [Arabidopsis thaliana]
  misc_feature (116)..(544): Homolog of NCBI NO: 34908334 NR Description: putative fructokinase [Oryza sativa (japonica group)] >gi|20805178|dbj|BAB92847.1| putative fructokinase [Oryza
  misc_feature (170)..(544): Homolog of NCBI NO: 15232415 NR Description: fructokinase - like protein; protein id: supported by cDNA: gi_20260523 [Arabidopsis thaliana]
  misc_feature (206)..(480): Homolog of NCBI NO: 7434220 NR Description: fructokinase (EC 2.7.1.4) 1 - tomato
  misc_feature (246)..(478): Homolog of NCBI NO: 1915974 NR Description: fructokinase [Lycopersicon esculentum]
  misc_feature (246)..(478): Homolog of NCBI NO: 32765547 NR Description: fructokinase 2 [Lycopersicon hirsutum]
  misc_feature (242)..(511): Homolog of NCBI NO: 15242193 NR Description: fructokinase 1; protein id: At5g51830.1, by cDNA: gi_13878052, supported by cDNA: gi_17104644 [Arabidopsis >gi|10177882|dbj|BAB11252.1| fructokinase 1 [Arabidopsis
  misc_feature (246)..(478): Homolog of NCBI NO: 33329198 NR Description: putative fructokinase; S1 self-incompatibility
  misc_feature (246)..(478): Homolog of NCBI NO: 33329200 NR Description: putative fructokinase 2; S2 self-incompatibility
  misc_feature (246)..(426): Homolog of NCBI NO: 585973 NR Description: FRUCTOKINASE >gi|626018|pir||S39997 fructokinase

SEQ ID NO: 94352 - protein, 571 aa, Arabidopsis thaliana; identical to SEQ ID NO: 90596
  peptide (1)..(571): Ceres Seq. ID no. 12724480
  misc_feature (161)..(503): Pfam Name: pfkB family carbohydrate kinase Pfam Description: pfkB family carbohydrate kinase
  misc_feature (1)..(571): Homolog of NCBI NO: 6730638 NR Description: F4N2.16 [Arabidopsis thaliana]
  misc_feature (73)..(501): Homolog of NCBI NO: 34908334 NR Description: putative fructokinase [Oryza sativa (japonica group)] >gi|20805178|dbj|BAB92847.1| putative fructokinase [Oryza
  misc_feature (127)..(501): Homolog of NCBI NO: 15232415 NR Description: fructokinase - like protein; protein id: supported by cDNA: gi_20260523 [Arabidopsis thaliana]
  misc_feature (163)..(437): Homolog of NCBI NO: 7434220 NR Description: fructokinase (EC 2.7.1.4) 1 - tomato
  misc_feature (203)..(435): Homolog of NCBI NO: 1915974 NR Description: fructokinase [Lycopersicon esculentum]
  misc_feature (203)..(435): Homolog of NCBI NO: 32765547 NR Description: fructokinase 2 [Lycopersicon hirsutum]
  misc_feature (199)..(468): Homolog of NCBI NO: 15242193 NR Description: fructokinase 1; protein id: At5g51830.1, by cDNA: gi_13878052, supported by cDNA: gi_17104644 [Arabidopsis >gi|10177882|dbj|BAB11252.1| fructokinase 1 [Arabidopsis
  misc_feature (203)..(435): Homolog of NCBI NO: 33329198 NR Description: putative fructokinase; S1 self-incompatibility
  misc_feature (203)..(435): Homolog of NCBI NO: 33329200 NR Description: putative fructokinase 2; S2 self-incompatibility
  misc_feature (203)..(383): Homolog of NCBI NO: 585973 NR Description: FRUCTOKINASE >gi|626018|pir||S39997 fructokinase

SEQ ID NO: 94353 - protein, 453 aa, Arabidopsis thaliana; identical to SEQ ID NO: 90597
  peptide (1)..(453): Ceres Seq. ID no. 12724481
  misc_feature (43)..(385): Pfam Name: pfkB family carbohydrate kinase Pfam Description: pfkB family carbohydrate kinase
  misc_feature (1)..(453): Homolog of NCBI NO: 6730638 NR Description: F4N2.16 [Arabidopsis thaliana]
  misc_feature (1)..(383): Homolog of NCBI NO: 34908334 NR Description: putative fructokinase [Oryza sativa (japonica group)] >gi|20805178|dbj|BAB92847.1| putative fructokinase [Oryza
  misc_feature (9)..(383): Homolog of NCBI NO: 15232415 NR Description: fructokinase - like protein; protein id: supported by cDNA: gi_20260523 [Arabidopsis thaliana]
  misc_feature (45)..(319): Homolog of NCBI NO: 7434220 NR Description: fructokinase (EC 2.7.1.4) 1 - tomato
  misc_feature (85)..(317): Homolog of NCBI NO: 1915974 NR Description: fructokinase [Lycopersicon esculentum]
  misc_feature (85)..(317): Homolog of NCBI NO: 32765547 NR Description: fructokinase 2 [Lycopersicon hirsutum]
  misc_feature (81)..(350): Homolog of NCBI NO: 15242193 NR Description: fructokinase 1; protein id: At5g51830.1, by cDNA: gi_13878052, supported by cDNA: gi_17104644 [Arabidopsis >gi|10177882|dbj|BAB11252.1| fructokinase 1 [Arabidopsis
  misc_feature (85)..(317): Homolog of NCBI NO: 33329198 NR Description: putative fructokinase; S1 self-incompatibility
  misc_feature (85)..(317): Homolog of NCBI NO: 33329200 NR Description: putative fructokinase 2; S2 self-incompatibility
  misc_feature (85)..(265): Homolog of NCBI NO: 585973 NR Description: FRUCTOKINASE >gi|626018|pir||S39997 fructokinase

SEQ ID NO: 94354 - DNA, 1371 bp, Arabidopsis thaliana; identical to SEQ ID NO: 90598
  misc_feature (1)..(1371): Ceres Seq. ID no. 12724488
  misc_feature: MA Experiment ID: 20000180 Result: Up-regulated in Transcription
  misc_feature: MA Experiment 20000180 PARAMETER Experiment Name: At_Germinating_Seeds_P Parameter: Age (hr) Value: 24 vs. 0
  misc_feature: MA Experiment 20000180 PARAMETER Experiment Name: At_Germinating_Seeds_P Parameter: Tissue Value: Germinating Seeds
  misc_feature: MA Experiment ID: 20000184 Result: Up-regulated in Transcription
  misc_feature: MA Experiment 20000184 PARAMETER Experiment Name: At_Shoots__P Parameter: Age (day) Value: 7
  misc_feature: MA Experiment 20000184 PARAMETER Experiment Name: At_Shoots__P Parameter: Tissue Value: Shoots vs. Whole Plant
  misc_feature: MA Experiment ID: 20000185 Result: Up-regulated in Transcription
  misc_feature: MA Experiment 20000185 PARAMETER Experiment Name: At_Roots__P Parameter: Age (day) Value: 7 vs. 21
  misc_feature: MA Experiment 20000185 PARAMETER Experiment Name: At_Roots__P Parameter: Organism Value: A. thaliana
  misc_feature: MA Experiment 20000185 PARAMETER Experiment Name: At_Roots__P Parameter: Tissue Value: Roots vs. Whole Plant
  misc_feature: MA Experiment ID: 20000439 Result: Up-regulated in Transcription
  misc_feature: MA Experiment 20000439 PARAMETER Experiment Name: At_Roots__P Parameter: Age (day) Value: 14 vs. 21
  misc_feature: MA Experiment 20000439 PARAMETER Experiment Name: At_Roots__P Parameter: Organism Value: A. thaliana
  misc_feature: MA Experiment 20000439 PARAMETER Experiment Name: At_Roots__P Parameter: Tissue Value: Roots vs. Whole Plant

SEQ ID NO: 94355 - protein, 456 aa, Arabidopsis thaliana; identical to SEQ ID NO: 90599
  peptide (1)..(456): Ceres Seq. ID no. 12724489
  misc_feature (235)..(432): Pfam Name: alpha/beta hydrolase fold Pfam Description: alpha/beta hydrolase fold
  misc_feature (1)..(456): Homolog of NCBI NO: 15222256 NR Description: polyneuridine aldehyde esterase, putative; id: At1g69240.1 [Arabidopsis thaliana]
  misc_feature (1)..(451): Homolog of NCBI NO: 15222699 NR Description: hypothetical protein; protein id: At1g26360.1
  misc_feature (119)..(456): Homolog of NCBI NO: 25404802 NR Description: probable alpha/beta hydrolase F23O10.18 - Arabidopsis thaliana >gi|12325081|gb|AAG52490.1|AC018364_8
  misc_feature (154)..(452): Homolog of NCBI NO: 15230077 NR Description: alpha/beta hydrolase, putative; protein id: [Arabidopsis thaliana] >gi|10092202|gb|AAG12619.1|AC074284_5
  misc_feature (235)..(432): Homolog of NCBI NO: 25518436 NR Description: hypothetical protein T1K7.26 - Arabidopsis >gi|9797761|gb|AAF98579.1|AC013427_22 Contains similarity to protein from Oryza sativa gb|Z34271 and contains an alpha/beta
  misc_feature (1)..(169): Homolog of NCBI NO: 25404802 NR Description: probable alpha/beta hydrolase F23O10.18 - Arabidopsis thaliana >gi|12325081|gb|AAG52490.1|AC018364_8
  misc_feature (185)..(451): Homolog of NCBI NO: 30681236 NR Description: hydrolase family [Arabidopsis thaliana] Unknown protein [Arabidopsis thaliana]
  misc_feature (198)..(451): Homolog of NCBI NO: 7485010 NR Description: host response protein homolog T5L19.30 - thaliana >gi|4538993|emb|CAB39614.1| putative host response [Arabidopsis thaliana] >gi|7267686|emb|CAB78113.1| putative host
  misc_feature (153)..(451): Homolog of NCBI NO: 15218463 NR Description: polyneuridine aldehyde esterase, putative; id: At1g33990.1, supported by cDNA: 8327., supported by cDNA: [Arabidopsis thaliana] >gi|10092445|gb|AAG12848.1|AC079286_5
  misc_feature (153)..(451): Homolog of NCBI NO: 21595837 NR Description: polyneuridine aldehyde esterase, putative

SEQ ID NO: 94356 - DNA, 2364 bp, Arabidopsis thaliana; identical to SEQ ID NO: 90600
  misc_feature (1)..(2364): Ceres Seq. ID no. 12724494
  misc_feature: MA Experiment ID: 20000307 Result: Down-regulated in Transcription
  misc_feature: MA Experiment 20000307 PARAMETER Experiment Name: At_Germinating_Seeds_Sub_P Parameter: Age (hr) Value: 24 vs. 0
  misc_feature: MA Experiment 20000307 PARAMETER Experiment Name: At_Germinating_Seeds_Sub_P Parameter: Organism Value: A. thaliana
  misc_feature: MA Experiment 20000307 PARAMETER Experiment Name: At_Germinating_Seeds_Sub_P Parameter: Plant Line Value: WS
  misc_feature: MA Experiment 20000307 PARAMETER Experiment Name: At_Germinating_Seeds_Sub_P Parameter: Tissue Value: Germinating Seeds
  misc_feature: MA Experiment ID: 20000355 Result: Up-regulated in Transcription
  misc_feature: MA Experiment 20000355 PARAMETER Experiment Name: At_Siliques_Sub_P Parameter: Age (day) Value: 21
  misc_feature: MA Experiment 20000355 PARAMETER Experiment Name: At_Siliques_Sub_P Parameter: Organism Value: A. thaliana
  misc_feature: MA Experiment 20000355 PARAMETER Experiment Name: At_Siliques_Sub_P Parameter: Plant Line Value: WS
  misc_feature: MA Experiment 20000355 PARAMETER Experiment Name: At_Siliques_Sub_P Parameter: Tissue Value: Less Than 5mm Siliques vs. Whole Plant

SEQ ID NO: 94357 - protein, 787 aa, Arabidopsis thaliana; identical to SEQ ID NO: 90601
  peptide (1)..(787): Ceres Seq. ID no. 12724495
  misc_feature (471)..(505): Pfam Name: PPR repeat Pfam Description: PPR repeat
  misc_feature (19)..(787): Homolog of NCBI NO: 38606535 NR Description: OSJNBa0016O02.23 [Oryza sativa (japonica
  misc_feature (15)..(787): Homolog of NCBI NO: 38423978 NR Description: PPR-repeat protein-like [Oryza sativa (japonica
  misc_feature (20)..(748): Homolog of NCBI NO: 38567725 NR Description: B1358B12.23 [Oryza sativa (japonica
  misc_feature (20)..(748): Homolog of NCBI NO: 38347057 NR Description: OSJNBa0060P14.4 [Oryza sativa (japonica
  misc_feature (81)..(782): Homolog of NCBI NO: 15234006 NR Description: putative protein; protein id: At4g18750.1
  misc_feature (7)..(775): Homolog of NCBI NO: 15233590 NR Description: putative protein; protein id: At4g21300.1
  misc_feature (23)..(759): Homolog of NCBI NO: 18394615 NR Description: hypothetical protein; protein id: At1g18485.1
  misc_feature (23)..(759): Homolog of NCBI NO: 25402861 NR Description: protein F15H18.4 [imported] - Arabidopsis >gi|6714305|gb|AAF26001.1|AC013354_20 F15H18.4 [Arabidopsis
  misc_feature (16)..(781): Homolog of NCBI NO: 15236324 NR Description: putative protein; protein id: At4g13650.1
  misc_feature (5)..(783): Homolog of NCBI NO: 34897084 NR Description: hypothetical protein [Oryza sativa (japonica group)] >gi|12957718|gb|AAK09236.1| hypothetical protein [Oryza

SEQ ID NO: 94358 - protein, 783 aa, Arabidopsis thaliana; identical to SEQ ID NO: 90602
  peptide (1)..(783): Ceres Seq. ID no. 12724496
  misc_feature (467)..(501): Pfam Name: PPR repeat Pfam Description: PPR repeat
  misc_feature (15)..(783): Homolog of NCBI NO: 38606535 NR Description: OSJNBa0016O02.23 [Oryza sativa (japonica
  misc_feature (11)..(783): Homolog of NCBI NO: 38423978 NR Description: PPR-repeat protein-like [Oryza sativa (japonica
  misc_feature (16)..(744): Homolog of NCBI NO: 38567725 NR Description: B1358B12.23 [Oryza sativa (japonica
  misc_feature (16)..(744): Homolog of NCBI NO: 38347057 NR Description: OSJNBa0060P14.4 [Oryza sativa (japonica
  misc_feature (77)..(778): Homolog of NCBI NO: 15234006 NR Description: putative protein; protein id: At4g18750.1
  misc_feature (3)..(771): Homolog of NCBI NO: 15233590 NR Description: putative protein; protein id: At4g21300.1
  misc_feature (19)..(755): Homolog of NCBI NO: 18394615 NR Description: hypothetical protein; protein id: At1g18485.1
  misc_feature (19)..(755): Homolog of NCBI NO: 25402861 NR Description: protein F15H18.4 [imported] - Arabidopsis >gi|6714305|gb|AAF26001.1|AC013354_20 F15H18.4 [Arabidopsis
  misc_feature (12)..(777): Homolog of NCBI NO: 15236324 NR Description: putative protein; protein id: At4g13650.1
  misc_feature (1)..(779): Homolog of NCBI NO: 34897084 NR Description: hypothetical protein [Oryza sativa (japonica group)] >gi|12957718|gb|AAK09236.1| hypothetical protein [Oryza

SEQ ID NO: 94359 - protein, 741 aa, Arabidopsis thaliana; identical to SEQ ID NO: 88898
  peptide (1)..(741): Ceres Seq. ID no. 12724497
  misc_feature (425)..(459): Pfam Name: PPR repeat Pfam Description: PPR repeat
  misc_feature (1)..(741): Homolog of NCBI NO: 38606535 NR Description: OSJNBa0016O02.23 [Oryza sativa (japonica
  misc_feature (1)..(741): Homolog of NCBI NO: 38423978 NR Description: PPR-repeat protein-like [Oryza sativa (japonica
  misc_feature (1)..(702): Homolog of NCBI NO: 38567725 NR Description: B1358B12.23 [Oryza sativa (japonica
  misc_feature (1)..(702): Homolog of NCBI NO: 38347057 NR Description: OSJNBa0060P14.4 [Oryza sativa (japonica
  misc_feature (35)..(736): Homolog of NCBI NO: 15234006 NR Description: putative protein; protein id: At4g18750.1
  misc_feature (1)..(729): Homolog of NCBI NO: 15233590 NR Description: putative protein; protein id: At4g21300.1
  misc_feature (1)..(713): Homolog of NCBI NO: 18394615 NR Description: hypothetical protein; protein id: At1g18485.1
  misc_feature (1)..(713): Homolog of NCBI NO: 25402861 NR Description: protein F15H18.4 [imported] - Arabidopsis >gi|6714305|gb|AAF26001.1|AC013354_20 F15H18.4 [Arabidopsis
  misc_feature (1)..(735): Homolog of NCBI NO: 15236324 NR Description: putative protein; protein id: At4g13650.1
  misc_feature (1)..(737): Homolog of NCBI NO: 34897084 NR Description: hypothetical protein [Oryza sativa (japonica group)] >gi|12957718|gb|AAK09236.1| hypothetical protein [Oryza

SEQ ID NO: 94360 - DNA, 993 bp, Arabidopsis thaliana; identical to SEQ ID NO: 90604
  misc_feature (1)..(993): Ceres Seq. ID no. 12724534
  misc_feature: MA Experiment ID: 20000184 Result: Up-regulated in Transcription
  misc_feature: MA Experiment 20000184 PARAMETER Experiment Name: At_Shoots__P Parameter: Age (day) Value: 7
  misc_feature: MA Experiment 20000184 PARAMETER Experiment Name: At_Shoots__P Parameter: Tissue Value: Shoots vs. Whole Plant

SEQ ID NO: 94361 - protein, 330 aa, Arabidopsis thaliana; identical to SEQ ID NO: 90605
  peptide (1)..(330): Ceres Seq. ID no. 12724535
  misc_feature (107)..(153): Pfam Name: Myb-like DNA-binding domain Pfam Description: Myb-like DNA-binding domain
  misc_feature (1)..(330): Homolog of NCBI NO: 15222362 NR Description: MYB-family transcription factor, putative; id: At1g69560.1, supported by cDNA: gi_7644365 [Arabidopsis
  misc_feature (41)..(277): Homolog of NCBI NO: 18396049 NR Description: myb-related protein, putative; protein id: supported by cDNA: gi_13430157 [Arabidopsis thaliana]
  misc_feature (41)..(277): Homolog of NCBI NO: 25403271 NR Description: protein T24P13.16 [imported] - Arabidopsis >gi|9295726|gb|AAF87032.1|AC006535_10 T24P13.16 [Arabidopsis
  misc_feature (106)..(232): Homolog of NCBI NO: 34903242 NR Description: unnamed protein product [Oryza sativa (japonica group)] >gi|6539552|dbj|BAA88169.1| unnamed protein product
  misc_feature (39)..(218): Homolog of NCBI NO: 7939552 NR Description: MYB transcription factor-like protein
  misc_feature (106)..(328): Homolog of NCBI NO: 11358543 NR Description: myb-related transcription factor MYB54 [imported] Arabidopsis thaliana >gi|3941472|gb|AAC83612.1| putative
  misc_feature (106)..(328): Homolog of NCBI NO: 15219462 NR Description: myb family transcription factor(MYB54); protein
  misc_feature (76)..(218): Homolog of NCBI NO: 18406019 NR Description: expressed protein; protein id: At3g29020.1, by cDNA: gi_9864076 [Arabidopsis thaliana]
  misc_feature (87)..(219): Homolog of NCBI NO: 15238028 NR Description: MYB56 R2R3-MYB factor family member; protein id:
  misc_feature (106)..(219): Homolog of NCBI NO: 9759057 NR Description: Myb-like transcription factor-like protein

SEQ ID NO: 94362 - protein, 328 aa, Arabidopsis thaliana; identical to SEQ ID NO: 90606
  peptide (1)..(328): Ceres Seq. ID no. 12724536
  misc_feature (105)..(151): Pfam Name: Myb-like DNA-binding domain Pfam Description: Myb-like DNA-binding domain
  misc_feature (1)..(328): Homolog of NCBI NO: 15222362 NR Description: MYB-family transcription factor, putative; id: At1g69560.1, supported by cDNA: gi_7644365 [Arabidopsis
  misc_feature (39)..(275): Homolog of NCBI NO: 18396049 NR Description: myb-related protein, putative; protein id: supported by cDNA: gi_13430157 [Arabidopsis thaliana]
  misc_feature (39)..(275): Homolog of NCBI NO: 25403271 NR Description: protein T24P13.16 [imported] - Arabidopsis >gi|9295726|gb|AAF87032.1|AC006535_10 T24P13.16 [Arabidopsis
  misc_feature (104)..(230): Homolog of NCBI NO: 34903242 NR Description: unnamed protein product [Oryza sativa (japonica group)] >gi|6539552|dbj|BAA88169.1| unnamed protein product
  misc_feature (37)..(216): Homolog of NCBI NO: 7939552 NR Description: MYB transcription factor-like protein
  misc_feature (104)..(326): Homolog of NCBI NO: 11358543 NR Description: myb-related transcription factor MYB54 [imported] Arabidopsis thaliana >gi|3941472|gb|AAC83612.1| putative
  misc_feature (104)..(326): Homolog of NCBI NO: 15219462 NR Description: myb family transcription factor(MYB54); protein
  misc_feature (74)..(216): Homolog of NCBI NO: 18406019 NR Description: expressed protein; protein id: At3g29020.1, by cDNA: gi_9864076 [Arabidopsis thaliana]
  misc_feature (85)..(217): Homolog of NCBI NO: 15238028 NR Description: MYB56 R2R3-MYB factor family member; protein id:
  misc_feature (104)..(217): Homolog of NCBI NO: 9759057 NR Description: Myb-like transcription factor-like protein

SEQ ID NO: 94363 - protein, 294 aa, Arabidopsis thaliana; identical to SEQ ID NO: 90607
  peptide (1)..(294): Ceres Seq. ID no. 12724537
  misc_feature (71)..(117): Pfam Name: Myb-like DNA-binding domain Pfam Description: Myb-like DNA-binding domain
  misc_feature (1)..(294): Homolog of NCBI NO: 15222362 NR Description: MYB-family transcription factor, putative; id: At1g69560.1, supported by cDNA: gi_7644365 [Arabidopsis
  misc_feature (5)..(241): Homolog of NCBI NO: 18396049 NR Description: myb-related protein, putative; protein id: supported by cDNA: gi_13430157 [Arabidopsis thaliana]
  misc_feature (5)..(241): Homolog of NCBI NO: 25403271 NR Description: protein T24P13.16 [imported] - Arabidopsis >gi|9295726|gb|AAF87032.1|AC006535_10 T24P13.16 [Arabidopsis
  misc_feature (70)..(196): Homolog of NCBI NO: 34903242 NR Description: unnamed protein product [Oryza sativa (japonica group)] >gi|6539552|dbj|BAA88169.1| unnamed protein product
  misc_feature (3)..(182): Homolog of NCBI NO: 7939552 NR Description: MYB transcription factor-like protein
  misc_feature (70)..(292): Homolog of NCBI NO: 11358543 NR Description: myb-related transcription factor MYB54 [imported] Arabidopsis thaliana >gi|3941472|gb|AAC83612.1| putative
  misc_feature (70)..(292): Homolog of NCBI NO: 15219462 NR Description: myb family transcription factor(MYB54); protein
  misc_feature (40)..(182): Homolog of NCBI NO: 18406019 NR Description: expressed protein; protein id: At3g29020.1, by cDNA: gi_9864076 [Arabidopsis thaliana]
  misc_feature (51)..(183): Homolog of NCBI NO: 15238028 NR Description: MYB56 R2R3-MYB factor family member; protein id:
  misc_feature (70)..(183): Homolog of NCBI NO: 9759057 NR Description: Myb-like transcription factor-like protein

SEQ ID NO: 94364 - DNA, 729 bp, Arabidopsis thaliana; identical to SEQ ID NO: 90608
  misc_feature (1)..(729): Ceres Seq. ID no. 12724541
  misc_feature: MA Experiment ID: 20000180 Result: Down-regulated in Transcription
  misc_feature: MA Experiment 20000180 PARAMETER Experiment Name: At_Germinating_Seeds_P Parameter: Age (hr) Value: 24 vs. 0
  misc_feature: MA Experiment 20000180 PARAMETER Experiment Name: At_Germinating_Seeds_P Parameter: Tissue Value: Germinating Seeds
  misc_feature: MA Experiment ID: 20000185 Result: Up-regulated in Transcription
  misc_feature: MA Experiment 20000185 PARAMETER Experiment Name: At_Roots__P Parameter: Age (day) Value: 7 vs. 21
  misc_feature: MA Experiment 20000185 PARAMETER Experiment Name: At_Roots__P Parameter: Organism Value: A. thaliana
  misc_feature: MA Experiment 20000185 PARAMETER Experiment Name: At_Roots__P Parameter: Tissue Value: Roots vs. Whole Plant
  misc_feature: MA Experiment ID: 20000264 Result: Up-regulated in Transcription
  misc_feature: MA Experiment 20000264 PARAMETER Experiment Name: At_Open_Flower_P Parameter: Age (day) Value: 21
  misc_feature: MA Experiment 20000264 PARAMETER Experiment Name: At_Open_Flower_P Parameter: Plant Line Value: WS
  misc_feature: MA Experiment 20000264 PARAMETER Experiment Name: At_Open_Flower_P Parameter: Tissue Value: Open Flower vs. Whole Plant
  misc_feature: MA Experiment ID: 20000265 Result: Up-regulated in Transcription
  misc_feature: MA Experiment 20000265 PARAMETER Experiment Name: At_Open_Flower_P Parameter: Age (day) Value: 21
  misc_feature: MA Experiment 20000265 PARAMETER Experiment Name: At_Open_Flower_P Parameter: Plant Line Value: WS
  misc_feature: MA Experiment 20000265 PARAMETER Experiment Name: At_Open_Flower_P Parameter: Tissue Value: Closed Flower vs. Whole Plant
  misc_feature: MA Experiment ID: 20000286 Result: Up-regulated in Transcription
  misc_feature: MA Experiment 20000286 PARAMETER Experiment Name: At_Open_Flower_P Parameter: Age (day) Value: 21
  misc_feature: MA Experiment 20000286 PARAMETER Experiment Name: At_Open_Flower_P Parameter: Plant Line Value: WS
  misc_feature: MA Experiment 20000286 PARAMETER Experiment Name: At_Open_Flower_P Parameter: Tissue Value: Half Open vs. Whole Plant
  misc_feature: MA Experiment ID: 20000437 Result: Up-regulated in Transcription
  misc_feature: MA Experiment 20000437 PARAMETER Experiment Name: At_Drought_P Parameter: Age (day) Value: 8
  misc_feature: MA Experiment 20000437 PARAMETER Experiment Name: At_Drought_P Parameter: Organism Value: A. thaliana
  misc_feature: MA Experiment 20000437 PARAMETER Experiment Name: At_Drought_P Parameter: Plant Line Value: WS
  misc_feature: MA Experiment 20000437 PARAMETER Experiment Name: At_Drought_P Parameter: Timepoint (hr) Value: 24
  misc_feature: MA Experiment 20000437 PARAMETER Experiment Name: At_Drought_P Parameter: Tissue Value: Whole Plant
  misc_feature: MA Experiment 20000437 PARAMETER Experiment Name: At_Drought_P Parameter: Treatment Value: Drought vs. No Drought
  misc_feature: MA Experiment ID: 20000439 Result: Up-regulated in Transcription
  misc_feature: MA Experiment 20000439 PARAMETER Experiment Name: At_Roots__P Parameter: Age (day) Value: 14 vs. 21
  misc_feature: MA Experiment 20000439 PARAMETER Experiment Name: At_Roots__P Parameter: Organism Value: A. thaliana
  misc_feature: MA Experiment 20000439 PARAMETER Experiment Name: At_Roots__P Parameter: Tissue Value: Roots vs. Whole Plant
  misc_feature: MA Experiment ID: 20000574 Result: Up-regulated in Transcription
  misc_feature: MA Experiment 20000574 PARAMETER Experiment Name: At_100uM_ABA_Mutants__P Parameter: Organism Value: A. thaliana
  misc_feature: MA Experiment 20000574 PARAMETER Experiment Name: At_100uM_ABA_Mutants__P Parameter: Plant Line Value: CS23 vs. Ler wt
  misc_feature: MA Experiment 20000574 PARAMETER Experiment Name: At_100uM_ABA_Mutants__P Parameter: Timepoint (hr) Value: N/A
  misc_feature: MA Experiment 20000574 PARAMETER Experiment Name: At_100uM_ABA_Mutants__P Parameter: Tissue Value: Whole Plant
  misc_feature: MA Experiment 20000574 PARAMETER Experiment Name: At_100uM_ABA_Mutants__P Parameter: Treatment Value: None
  misc_feature: MA Experiment ID: 20000794 Result: Up-regulated in Transcription
  misc_feature: MA Experiment 20000794 PARAMETER Experiment Name: At_Petals_P Parameter: Age (day) Value: 23-25 days
  misc_feature: MA Experiment 20000794 PARAMETER Experiment Name: At_Petals_P Parameter: Plant Line Value: WS
  misc_feature: MA Experiment 20000794 PARAMETER Experiment Name: At_Petals_P Parameter: Tissue Value: Petals vs. Whole plant

SEQ ID NO: 94365 - protein, 242 aa, Arabidopsis thaliana; identical to SEQ ID NO: 90609
  peptide (1)..(242): Ceres Seq. ID no. 12724542
  misc_feature (26)..(87): Pfam Name: ZF-HD protein dimerisation region Pfam Description: ZF-HD protein dimerisation region
  misc_feature (1)..(242): Homolog of NCBI NO: 15222382 NR Description: hypothetical protein; protein id: At1g69600.1
  misc_feature (97)..(236): Homolog of NCBI NO: 13277220 NR Description: ZF-HD homeobox protein [Flaveria bidentis]
  misc_feature (29)..(114): Homolog of NCBI NO: 13277220 NR Description: ZF-HD homeobox protein [Flaveria bidentis]
  misc_feature (1)..(230): Homolog of NCBI NO: 9757750 NR Description: gb|AAF24606.1~gene_id:MUF9.11~similar to unknown
  misc_feature (27)..(230): Homolog of NCBI NO: 15239341 NR Description: putative protein; protein id: At5g60480.1
  misc_feature (29)..(214): Homolog of NCBI NO: 15228530 NR Description: unknown protein; protein id: At3g28920.1, by cDNA: gi_20260543 [Arabidopsis thaliana] contains similarity to unknown
  misc_feature (28)..(215): Homolog of NCBI NO: 13277218 NR Description: ZF-HD homeobox protein [Flaveria bidentis]
  misc_feature (29)..(212): Homolog of NCBI NO: 13277216 NR Description: ZF-HD homeobox protein [Flaveria trinervia]
  misc_feature (31)..(221): Homolog of NCBI NO: 15242243 NR Description: putative protein; protein id: At5g15210.1
  misc_feature (31)..(215): Homolog of NCBI NO: 15238445 NR Description: hypothetical protein common family; protein id: [Arabidopsis thaliana] >gi|9759621|dbj|BAB11563.1| contains to unknown protein~gene_id:MNA5.14~pir||T05568 [Arabidopsis

SEQ ID NO: 94366 - protein, 216 aa, Arabidopsis thaliana; identical to SEQ ID NO: 90610
  peptide (1)..(216): Ceres Seq. ID no. 12724543
  misc_feature (1)..(61): Pfam Name: ZF-HD protein dimerisation region Pfam Description: ZF-HD protein dimerisation region
  misc_feature (1)..(216): Homolog of NCBI NO: 15222382 NR Description: hypothetical protein; protein id: At1g69600.1
  misc_feature (71)..(210): Homolog of NCBI NO: 13277220 NR Description: ZF-HD homeobox protein [Flaveria bidentis]
  misc_feature (3)..(88): Homolog of NCBI NO: 13277220 NR Description: ZF-HD homeobox protein [Flaveria bidentis]
  misc_feature (1)..(204): Homolog of NCBI NO: 9757750 NR Description: gb|AAF24606.1~gene_id:MUF9.11~similar to unknown
  misc_feature (1)..(204): Homolog of NCBI NO: 15239341 NR Description: putative protein; protein id: At5g60480.1
  misc_feature (3)..(188): Homolog of NCBI NO: 15228530 NR Description: unknown protein; protein id: At3g28920.1, by cDNA: gi_20260543 [Arabidopsis thaliana] contains similarity to unknown
  misc_feature (2)..(189): Homolog of NCBI NO: 13277218 NR Description: ZF-HD homeobox protein [Flaveria bidentis]
  misc_feature (3)..(186): Homolog of NCBI NO: 13277216 NR Description: ZF-HD homeobox protein [Flaveria trinervia]
  misc_feature (5)..(195): Homolog of NCBI NO: 15242243 NR Description: putative protein; protein id: At5g15210.1
  misc_feature (5)..(189): Homolog of NCBI NO: 15238445 NR Description: hypothetical protein common family; protein id: [Arabidopsis thaliana] >gi|9759621|dbj|BAB11563.1| contains to unknown protein~gene_id:MNA5.14~pir||T05568 [Arabidopsis

SEQ ID NO: 94367 - protein, 189 aa, Arabidopsis thaliana; identical to SEQ ID NO: 90611
  peptide (1)..(189): Ceres Seq. ID no. 12724544
  misc_feature (1)..(189): Homolog of NCBI NO: 15222382 NR Description: hypothetical protein; protein id: At1g69600.1
  misc_feature (44)..(183): Homolog of NCBI NO: 13277220 NR Description: ZF-HD homeobox protein [Flaveria bidentis]
  misc_feature (1)..(61): Homolog of NCBI NO: 13277220 NR Description: ZF-HD homeobox protein [Flaveria bidentis]
  misc_feature (1)..(177): Homolog of NCBI NO: 9757750 NR Description: gb|AAF24606.1~gene_id:MUF9.11~similar to unknown
  misc_feature (1)..(177): Homolog of NCBI NO: 15239341 NR Description: putative protein; protein id: At5g60480.1
  misc_feature (1)..(161): Homolog of NCBI NO: 15228530 NR Description: unknown protein; protein id: At3g28920.1, by cDNA: gi_20260543 [Arabidopsis thaliana] contains similarity to unknown
  misc_feature (1)..(162): Homolog of NCBI NO: 13277218 NR Description: ZF-HD homeobox protein [Flaveria bidentis]
  misc_feature (1)..(159): Homolog of NCBI NO: 13277216 NR Description: ZF-HD homeobox protein [Flaveria trinervia]
  misc_feature (1)..(168): Homolog of NCBI NO: 15242243 NR Description: putative protein; protein id: At5g15210.1
  misc_feature (1)..(162): Homolog of NCBI NO: 15238445 NR Description: hypothetical protein common family; protein id: [Arabidopsis thaliana] >gi|9759621|dbj|BAB11563.1| contains to unknown protein~gene_id:MNA5.14~pir||T05568 [Arabidopsis

SEQ ID NO: 94368 - DNA, 2379 bp, Arabidopsis thaliana; identical to SEQ ID NO: 90612
  misc_feature (1)..(2379): Ceres Seq. ID no. 12724555
  misc_feature: MA Experiment ID: 20000185 Result: Down-regulated in Transcription
  misc_feature: MA Experiment 20000185 PARAMETER Experiment Name: At_Roots__P Parameter: Age (day) Value: 7 vs. 21
  misc_feature: MA Experiment 20000185 PARAMETER Experiment Name: At_Roots__P Parameter: Organism Value: A. thaliana
  misc_feature: MA Experiment 20000185 PARAMETER Experiment Name: At_Roots__P Parameter: Tissue Value: Roots vs. Whole Plant
  misc_feature: MA Experiment ID: 20000439 Result: Down-regulated in Transcription
  misc_feature: MA Experiment 20000439 PARAMETER Experiment Name: At_Roots__P Parameter: Age (day) Value: 14 vs. 21
  misc_feature: MA Experiment 20000439 PARAMETER Experiment Name: At_Roots__P Parameter: Organism Value: A. thaliana
  misc_feature: MA Experiment 20000439 PARAMETER Experiment Name: At_Roots__P Parameter: Tissue Value: Roots vs. Whole Plant
  misc_feature: MA Experiment ID: 20000441 Result: Up-regulated in Transcription
  misc_feature: MA Experiment 20000441 PARAMETER Experiment Name: At_1uM_BR-BRZ__P Parameter: Tissue Value: Shoot Apices
  misc_feature: MA Experiment 20000441 PARAMETER Experiment Name: At_1uM_BR-BRZ__P Parameter: Treatment Value: 1uM BR vs. No Treatment
  misc_feature: MA Experiment ID: 20000443 Result: Up-regulated in Transcription
  misc_feature: MA Experiment 20000443 PARAMETER Experiment Name: At_1uM_BR-BRZ__P Parameter: Tissue Value: Shoot Apices
  misc_feature: MA Experiment 20000443 PARAMETER Experiment Name: At_1uM_BR-BRZ__P Parameter: Treatment Value: 1uM BRZ vs. No Treatment
  misc_feature: MA Experiment ID: 20000460 Result: Down-regulated in Transcription
  misc_feature: MA Experiment 20000460 PARAMETER Experiment Name: At_10percent_PEG_P Parameter: Age (day) Value: 12
  misc_feature: MA Experiment 20000460 PARAMETER Experiment Name: At_10percent_PEG_P Parameter: Organism Value: A. thaliana
  misc_feature: MA Experiment 20000460 PARAMETER Experiment Name: At_10percent_PEG_P Parameter: Plant Line Value: WS
  misc_feature: MA Experiment 20000460 PARAMETER Experiment Name: At_10percent_PEG_P Parameter: Timepoint (day) Value: 12
  misc_feature: MA Experiment 20000460 PARAMETER Experiment Name: At_10percent_PEG_P Parameter: Tissue Value: Whole Plant
  misc_feature: MA Experiment 20000460 PARAMETER Experiment Name: At_10percent_PEG_P Parameter: Treatment Value: 10percent PEG vs. No Treatment
  misc_feature: MA Experiment ID: 20000527 Result: Down-regulated in Transcription
  misc_feature: MA Experiment 20000527 PARAMETER Experiment Name: At_10percent_PEG_P Parameter: Age (day) Value: 20
  misc_feature: MA Experiment 20000527 PARAMETER Experiment Name: At_10percent_PEG_P Parameter: Organism Value: A. thaliana
  misc_feature: MA Experiment 20000527 PARAMETER Experiment Name: At_10percent_PEG_P Parameter: Plant Line Value: WS
  misc_feature: MA Experiment 20000527 PARAMETER Experiment Name: At_10percent_PEG_P Parameter: Timepoint (day) Value: 20
  misc_feature: MA Experiment 20000527 PARAMETER Experiment Name: At_10percent_PEG_P Parameter: Tissue Value: Whole Plant
  misc_feature: MA Experiment 20000527 PARAMETER Experiment Name: At_10percent_PEG_P Parameter: Treatment Value: 10percent PEG vs. No Treatment
  misc_feature: MA Experiment ID: 20000573 Result: Down-regulated in Transcription
  misc_feature: MA Experiment 20000573 PARAMETER Experiment Name: At_100uM_ABA_Mutants__P Parameter: Organism Value: A. thaliana
  misc_feature: MA Experiment 20000573 PARAMETER Experiment Name: At_100uM_ABA_Mutants__P Parameter: Plant Line Value: CS22 vs. Ler wt
  misc_feature: MA Experiment 20000573 PARAMETER Experiment Name: At_100uM_ABA_Mutants__P Parameter: Timepoint (hr) Value: N/A
  misc_feature: MA Experiment 20000573 PARAMETER Experiment Name: At_100uM_ABA_Mutants__P Parameter: Tissue Value: Whole Plant
  misc_feature: MA Experiment 20000573 PARAMETER Experiment Name: At_100uM_ABA_Mutants__P Parameter: Treatment Value: None
  misc_feature: MA Experiment ID: 20000794 Result: Down-regulated in Transcription
  misc_feature: MA Experiment 20000794 PARAMETER Experiment Name: At_Petals_P Parameter: Age (day) Value: 23-25 days
  misc_feature: MA Experiment 20000794 PARAMETER Experiment Name: At_Petals_P Parameter: Plant Line Value: WS
  misc_feature: MA Experiment 20000794 PARAMETER Experiment Name: At_Petals_P Parameter: Tissue Value: Petals vs. Whole plant
  misc_feature: MA Experiment ID: 20001248 Result: Down-regulated in Transcription
  misc_feature: MA Experiment 20001248 PARAMETER Experiment Name: At_Far-red-induction_P Parameter: Age (day) Value: 7
  misc_feature: MA Experiment 20001248 PARAMETER Experiment Name: At_Far-red-induction_P Parameter: Light Value: Far-red vs. White
  misc_feature: MA Experiment 20001248 PARAMETER Experiment Name: At_Far-red-induction_P Parameter: Organism Value: A. thaliana
  misc_feature: MA Experiment 20001248 PARAMETER Experiment Name: At_Far-red-induction_P Parameter: Plant Line Value: Columbia
  misc_feature: MA Experiment 20001248 PARAMETER Experiment Name: At_Far-red-induction_P Parameter: Timepoint (hr) Value: 4
  misc_feature: MA Experiment 20001248 PARAMETER Experiment Name: At_Far-red-induction_P Parameter: Tissue Value: Whole Plant
  misc_feature: MA Experiment ID: 20001556 Result: Down-regulated in Transcription
  misc_feature: MA Experiment 20001556 PARAMETER Experiment Name: At_Drought_Soil_Dry_P Parameter: Age (day) Value: 26
  misc_feature: MA Experiment 20001556 PARAMETER Experiment Name: At_Drought_Soil_Dry_P Parameter: Organism Value: A. thaliana
  misc_feature: MA Experiment 20001556 PARAMETER Experiment Name: At_Drought_Soil_Dry_P Parameter: Plant Line Value: WS
  misc_feature: MA Experiment 20001556 PARAMETER Experiment Name: At_Drought_Soil_Dry_P Parameter: Post Timepoint (hr) Value: None
  misc_feature: MA Experiment 20001556 PARAMETER Experiment Name: At_Drought_Soil_Dry_P Parameter: Post-Treatment Value: None
  misc_feature: MA Experiment 20001556 PARAMETER Experiment Name: At_Drought_Soil_Dry_P Parameter: Timepoint (day) Value: 12
  misc_feature: MA Experiment 20001556 PARAMETER Experiment Name: At_Drought_Soil_Dry_P Parameter: Treatment Value: Drought vs. No Drought
  misc_feature: MA Experiment ID: 20001559 Result: Down-regulated in Transcription
  misc_feature: MA Experiment 20001559 PARAMETER Experiment Name: At_Drought_Soil_Dry_P Parameter: Age (day) Value: 28
  misc_feature: MA Experiment 20001559 PARAMETER Experiment Name: At_Drought_Soil_Dry_P Parameter: Organism Value: A. thaliana
  misc_feature: MA Experiment 20001559 PARAMETER Experiment Name: At_Drought_Soil_Dry_P Parameter: Plant Line Value: WS
  misc_feature: MA Experiment 20001559 PARAMETER Experiment Name: At_Drought_Soil_Dry_P Parameter: Post Timepoint (hr) Value: 29
  misc_feature: MA Experiment 20001559 PARAMETER Experiment Name: At_Drought_Soil_Dry_P Parameter: Post-Treatment Value: Re-Water vs. No Drought
  misc_feature: MA Experiment 20001559 PARAMETER Experiment Name: At_Drought_Soil_Dry_P Parameter: Timepoint (day) Value: 14
  misc_feature: MA Experiment 20001559 PARAMETER Experiment Name: At_Drought_Soil_Dry_P Parameter: Treatment Value: Drought vs. No Drought
  misc_feature: MA Experiment ID: 20001904 Result: Down-regulated in Transcription
  misc_feature: MA Experiment 20001904 PARAMETER Experiment Name: At_Drought_Reproduction_P Parameter: Age (day) Value: 37
  misc_feature: MA Experiment 20001904 PARAMETER Experiment Name: At_Drought_Reproduction_P Parameter: Organism Value: A. thaliana
  misc_feature: MA Experiment 20001904 PARAMETER Experiment Name: At_Drought_Reproduction_P Parameter: Plant Line Value: WS
  misc_feature: MA Experiment 20001904 PARAMETER Experiment Name: At_Drought_Reproduction_P Parameter: Timepoint (day) Value: 7
  misc_feature: MA Experiment 20001904 PARAMETER Experiment Name: At_Drought_Reproduction_P Parameter: Tissue Value: Rosettes
  misc_feature: MA Experiment 20001904 PARAMETER Experiment Name: At_Drought_Reproduction_P Parameter: Treatment Value: Drought vs. No Drought

SEQ ID NO: 94369 - protein, 792 aa, Arabidopsis thaliana; identical to SEQ ID NO: 90613
  peptide (1)..(792): Ceres Seq. ID no. 12724556
  misc_feature (447)..(714): Pfam Name: Protein kinase domain Pfam Description: Protein kinase domain
  misc_feature (1)..(788): Homolog of NCBI NO: 15219447 NR Description: WAK-like kinase (WLK); protein id: At1g79680.1,
  misc_feature (1)..(778): Homolog of NCBI NO: 25405037 NR Description: protein F20B17.10 [imported] - Arabidopsis >gi|7715604|gb|AAF68122.1|AC010793_17 F20B17.10 [Arabidopsis
  misc_feature (5)..(791): Homolog of NCBI NO: 15223546 NR Description: WAK-like kinase (WLK); protein id: At1g19390.1
  misc_feature (5)..(771): Homolog of NCBI NO: 25287654 NR Description: protein F18O14.11 [imported] - Arabidopsis >gi|8778443|gb|AAF79451.1|AC025808_33 F18O14.11 [Arabidopsis
  misc_feature (11)..(791): Homolog of NCBI NO: 22329045 NR Description: WAK-like kinase (WLK); protein id: At4g31100.1
  misc_feature (13)..(746): Homolog of NCBI NO: 15220882 NR Description: WAK-like kinase (WLK); protein id: At1g17910.1
  misc_feature (376)..(791): Homolog of NCBI NO: 7486495 NR Description: hypothetical protein F6E21.30 - Arabidopsis >gi|7270013|emb|CAB79829.1| putative protein [Arabidopsis
  misc_feature (376)..(791): Homolog of NCBI NO: 30688910 NR Description: WAK-like kinase (WLK) [Arabidopsis thaliana]
  misc_feature (12)..(337): Homolog of NCBI NO: 7486495 NR Description: hypothetical protein F6E21.30 - Arabidopsis >gi|7270013|emb|CAB79829.1| putative protein [Arabidopsis
  misc_feature (12)..(337): Homolog of NCBI NO: 30688910 NR Description: WAK-like kinase (WLK) [Arabidopsis thaliana]

SEQ ID NO: 94370 - protein, 747 aa, Arabidopsis thaliana; identical to SEQ ID NO: 90614
  peptide (1)..(747): Ceres Seq. ID no. 12724557
  misc_feature (402)..(669): Pfam Name: Protein kinase domain Pfam Description: Protein kinase domain
  misc_feature (1)..(743): Homolog of NCBI NO: 15219447 NR Description: WAK-like kinase (WLK); protein id: At1g79680.1,
  misc_feature (1)..(733): Homolog of NCBI NO: 25405037 NR Description: protein F20B17.10 [imported] - Arabidopsis >gi|7715604|gb|AAF68122.1|AC010793_17 F20B17.10 [Arabidopsis
  misc_feature (1)..(746): Homolog of NCBI NO: 15223546 NR Description: WAK-like kinase (WLK); protein id: At1g19390.1
  misc_feature (1)..(726): Homolog of NCBI NO: 25287654 NR Description: protein F18O14.11 [imported] - Arabidopsis >gi|8778443|gb|AAF79451.1|AC025808_33 F18O14.11 [Arabidopsis
  misc_feature (1)..(746): Homolog of NCBI NO: 22329045 NR Description: WAK-like kinase (WLK); protein id: At4g31100.1
  misc_feature (1)..(701): Homolog of NCBI NO: 15220882 NR Description: WAK-like kinase (WLK); protein id: At1g17910.1
  misc_feature (331)..(746): Homolog of NCBI NO: 7486495 NR Description: hypothetical protein F6E21.30 - Arabidopsis >gi|7270013|emb|CAB79829.1| putative protein [Arabidopsis
  misc_feature (331)..(746): Homolog of NCBI NO: 30688910 NR Description: WAK-like kinase (WLK) [Arabidopsis thaliana]
  misc_feature (1)..(292): Homolog of NCBI NO: 7486495 NR Description: hypothetical protein F6E21.30 - Arabidopsis >gi|7270013|emb|CAB79829.1| putative protein [Arabidopsis
  misc_feature (1)..(292): Homolog of NCBI NO: 30688910 NR Description: WAK-like kinase (WLK) [Arabidopsis thaliana]

SEQ ID NO: 94371 - protein, 598 aa, Arabidopsis thaliana; identical to SEQ ID NO: 90615
  peptide (1)..(598): Ceres Seq. ID no. 12724558
  misc_feature (253)..(520): Pfam Name: Protein kinase domain Pfam Description: Protein kinase domain
  misc_feature (1)..(594): Homolog of NCBI NO: 15219447 NR Description: WAK-like kinase (WLK); protein id: At1g79680.1,
  misc_feature (1)..(584): Homolog of NCBI NO: 25405037 NR Description: protein F20B17.10 [imported] - Arabidopsis >gi|7715604|gb|AAF68122.1|AC010793_17 F20B17.10 [Arabidopsis
  misc_feature (1)..(597): Homolog of NCBI NO: 15223546 NR Description: WAK-like kinase (WLK); protein id: At1g19390.1
  misc_feature (1)..(577): Homolog of NCBI NO: 25287654 NR Description: protein F18O14.11 [imported] - Arabidopsis >gi|8778443|gb|AAF79451.1|AC025808_33 F18O14.11 [Arabidopsis
  misc_feature (1)..(597): Homolog of NCBI NO: 22329045 NR Description: WAK-like kinase (WLK); protein id: At4g31100.1
  misc_feature (1)..(552): Homolog of NCBI NO: 15220882 NR Description: WAK-like kinase (WLK); protein id: At1g17910.1
  misc_feature (182)..(597): Homolog of NCBI NO: 7486495 NR Description: hypothetical protein F6E21.30 - Arabidopsis >gi|7270013|emb|CAB79829.1| putative protein [Arabidopsis
  misc_feature (182)..(597): Homolog of NCBI NO: 30688910 NR Description: WAK-like kinase (WLK) [Arabidopsis thaliana]
  misc_feature (1)..(143): Homolog of NCBI NO: 7486495 NR Description: hypothetical protein F6E21.30 - Arabidopsis >gi|7270013|emb|CAB79829.1| putative protein [Arabidopsis
  misc_feature (1)..(143): Homolog of NCBI NO: 30688910 NR Description: WAK-like kinase (WLK) [Arabidopsis thaliana]

SEQ ID NO: 94372 - DNA, 1131 bp, Arabidopsis thaliana; identical to SEQ ID NO: 90616
  misc_feature (1)..(1131): Ceres Seq. ID no. 12724563
  misc_feature: MA Experiment ID: 20000166 Result: Up-regulated in Transcription
  misc_feature: MA Experiment 20000166 PARAMETER Experiment Name: At_100uM_ABA_P Parameter: Age (day) Value: 14
  misc_feature: MA Experiment 20000166 PARAMETER Experiment Name: At_100uM_ABA_P Parameter: Organism Value: A. thaliana
  misc_feature: MA Experiment 20000166 PARAMETER Experiment Name: At_100uM_ABA_P Parameter: Plant Line Value: WS
  misc_feature: MA Experiment 20000166 PARAMETER Experiment Name: At_100uM_ABA_P Parameter: Timepoint (hr) Value: 1
  misc_feature: MA Experiment 20000166 PARAMETER Experiment Name: At_100uM_ABA_P Parameter: Tissue Value: Aerial
  misc_feature: MA Experiment 20000166 PARAMETER Experiment Name: At_100uM_ABA_P Parameter: Treatment Value: 100uM ABA vs. No Treatment
  misc_feature: MA Experiment ID: 20000179 Result: Down-regulated in Transcription
  misc_feature: MA Experiment 20000179 PARAMETER Experiment Name: At_Germinating_Seeds_P Parameter: Age (hr) Value: 6 vs. 0
  misc_feature: MA Experiment 20000179 PARAMETER Experiment Name: At_Germinating_Seeds_P Parameter: Tissue Value: Germinating Seeds
  misc_feature: MA Experiment ID: 20000180 Result: Down-regulated in Transcription
  misc_feature: MA Experiment 20000180 PARAMETER Experiment Name: At_Germinating_Seeds_P Parameter: Age (hr) Value: 24 vs. 0
  misc_feature: MA Experiment 20000180 PARAMETER Experiment Name: At_Germinating_Seeds_P Parameter: Tissue Value: Germinating Seeds
  misc_feature: MA Experiment ID: 20000182 Result: Up-regulated in Transcription
  misc_feature: MA Experiment 20000182 PARAMETER Experiment Name: At_2mM_SA_P Parameter: Age (day) Value: 14
  misc_feature: MA Experiment 20000182 PARAMETER Experiment Name: At_2mM_SA_P Parameter: Organism Value: A. thaliana
  misc_feature: MA Experiment 20000182 PARAMETER Experiment Name: At_2mM_SA_P Parameter: Plant Line Value: WS
  misc_feature: MA Experiment 20000182 PARAMETER Experiment Name: At_2mM_SA_P Parameter: Timepoint (hr) Value: 6
  misc_feature: MA Experiment 20000182 PARAMETER Experiment Name: At_2mM_SA_P Parameter: Tissue Value: Aerial
  misc_feature: MA Experiment 20000182 PARAMETER Experiment Name: At_2mM_SA_P Parameter: Treatment Value: 2mM SA vs. No Treatment
  misc_feature: MA Experiment ID: 20000184 Result: Down-regulated in Transcription
  misc_feature: MA Experiment 20000184 PARAMETER Experiment Name: At_Shoots__P Parameter: Age (day) Value: 7
  misc_feature: MA Experiment 20000184 PARAMETER Experiment Name: At_Shoots__P Parameter: Tissue Value: Shoots vs. Whole Plant
  misc_feature: MA Experiment ID: 20000234 Result: Down-regulated in Transcription
  misc_feature: MA Experiment 20000234 PARAMETER Experiment Name: At_Siliques_P Parameter: Age (day) Value: 21
  misc_feature: MA Experiment 20000234 PARAMETER Experiment Name: At_Siliques_P Parameter: Organism Value: A. thaliana
  misc_feature: MA Experiment 20000234 PARAMETER Experiment Name: At_Siliques_P Parameter: Plant Line Value: WS
  misc_feature: MA Experiment 20000234 PARAMETER Experiment Name: At_Siliques_P Parameter: Tissue Value: Less Than 5mm Siliques vs. Whole Plant
  misc_feature: MA Experiment ID: 20000235 Result: Down-regulated in Transcription
  misc_feature: MA Experiment 20000235 PARAMETER Experiment Name: At_Siliques_P Parameter: Age (day) Value: 21
  misc_feature: MA Experiment 20000235 PARAMETER Experiment Name: At_Siliques_P Parameter: Organism Value: A. thaliana
  misc_feature: MA Experiment 20000235 PARAMETER Experiment Name: At_Siliques_P Parameter: Plant Line Value: WS
  misc_feature: MA Experiment 20000235 PARAMETER Experiment Name: At_Siliques_P Parameter: Tissue Value: 5-10mm Siliques vs. Whole Plant
  misc_feature: MA Experiment ID: 20000264 Result: Down-regulated in Transcription
  misc_feature: MA Experiment 20000264 PARAMETER Experiment Name: At_Open_Flower_P Parameter: Age (day) Value: 21
  misc_feature: MA Experiment 20000264 PARAMETER Experiment Name: At_Open_Flower_P Parameter: Plant Line Value: WS
  misc_feature: MA Experiment 20000264 PARAMETER Experiment Name: At_Open_Flower_P Parameter: Tissue Value: Open Flower vs. Whole Plant
  misc_feature: MA Experiment ID: 20000265 Result: Down-regulated in Transcription
  misc_feature: MA Experiment 20000265 PARAMETER Experiment Name: At_Open_Flower_P Parameter: Age (day) Value: 21
  misc_feature: MA Experiment 20000265 PARAMETER Experiment Name: At_Open_Flower_P Parameter: Plant Line Value: WS
  misc_feature: MA Experiment 20000265 PARAMETER Experiment Name: At_Open_Flower_P Parameter: Tissue Value: Closed Flower vs. Whole Plant
  misc_feature: MA Experiment ID: 20000286 Result: Down-regulated in Transcription
  misc_feature: MA Experiment 20000286 PARAMETER Experiment Name: At_Open_Flower_P Parameter: Age (day) Value: 21
  misc_feature: MA Experiment 20000286 PARAMETER Experiment Name: At_Open_Flower_P Parameter: Plant Line Value: WS
  misc_feature: MA Experiment 20000286 PARAMETER Experiment Name: At_Open_Flower_P Parameter: Tissue Value: Half Open vs. Whole Plant
  misc_feature: MA Experiment ID: 20000437 Result: Up-regulated in Transcription
  misc_feature: MA Experiment 20000437 PARAMETER Experiment Name: At_Drought_P Parameter: Age (day) Value: 8
  misc_feature: MA Experiment 20000437 PARAMETER Experiment Name: At_Drought_P Parameter: Organism Value: A. thaliana
  misc_feature: MA Experiment 20000437 PARAMETER Experiment Name: At_Drought_P Parameter: Plant Line Value: WS
  misc_feature: MA Experiment 20000437 PARAMETER Experiment Name: At_Drought_P Parameter: Timepoint (hr) Value: 24
  misc_feature: MA Experiment 20000437 PARAMETER Experiment Name: At_Drought_P Parameter: Tissue Value: Whole Plant
  misc_feature: MA Experiment 20000437 PARAMETER Experiment Name: At_Drought_P Parameter: Treatment Value: Drought vs. No Drought
  misc_feature: MA Experiment ID: 20000438 Result: Down-regulated in Transcription
  misc_feature: MA Experiment 20000438 PARAMETER Experiment Name: At_Shoots__P Parameter: Age (day) Value: 14
  misc_feature: MA Experiment 20000438 PARAMETER Experiment Name: At_Shoots__P Parameter: Tissue Value: Shoots vs. Whole Plant
  misc_feature: MA Experiment ID: 20000453 Result: Up-regulated in Transcription
  misc_feature: MA Experiment 20000453 PARAMETER Experiment Name: At_100uM_ABA_P Parameter: Age (day) Value: 15
  misc_feature: MA Experiment 20000453 PARAMETER Experiment Name: At_100uM_ABA_P Parameter: Organism Value: A. thaliana
  misc_feature: MA Experiment 20000453 PARAMETER Experiment Name: At_100uM_ABA_P Parameter: Plant Line Value: WS
  misc_feature: MA Experiment 20000453 PARAMETER Experiment Name: At_100uM_ABA_P Parameter: Timepoint (hr) Value: 24
  misc_feature: MA Experiment 20000453 PARAMETER Experiment Name: At_100uM_ABA_P Parameter: Tissue Value: Aerial
  misc_feature: MA Experiment 20000453 PARAMETER Experiment Name: At_100uM_ABA_P Parameter: Treatment Value: 100uM ABA vs. No Treatment
  misc_feature: MA Experiment ID: 20000460 Result: Up-regulated in Transcription
  misc_feature: MA Experiment 20000460 PARAMETER Experiment Name: At_10percent_PEG_P Parameter: Age (day) Value: 12
  misc_feature: MA Experiment 20000460 PARAMETER Experiment Name: At_10percent_PEG_P Parameter: Organism Value: A. thaliana
  misc_feature: MA Experiment 20000460 PARAMETER Experiment Name: At_10percent_PEG_P Parameter: Plant Line Value: WS
  misc_feature: MA Experiment 20000460 PARAMETER Experiment Name: At_10percent_PEG_P Parameter: Timepoint (day) Value: 12
  misc_feature: MA Experiment 20000460 PARAMETER Experiment Name: At_10percent_PEG_P Parameter: Tissue Value: Whole Plant
  misc_feature: MA Experiment 20000460 PARAMETER Experiment Name: At_10percent_PEG_P Parameter: Treatment Value: 10percent PEG vs. No Treatment
  misc_feature: MA Experiment ID: 20000495 Result: Down-regulated in Transcription
  misc_feature: MA Experiment 20000495 PARAMETER Experiment Name: At_Guard_Cells_P Parameter: Harvest Date Value: 8/2/2002
  misc_feature: MA Experiment 20000495 PARAMETER Experiment Name: At_Guard_Cells_P Parameter: Organism Value: A. thaliana
  misc_feature: MA Experiment 20000495 PARAMETER Experiment Name: At_Guard_Cells_P Parameter: Tissue Value: Guard Cells vs. Leaves
  misc_feature: MA Experiment ID: 20000794 Result: Down-regulated in Transcription
  misc_feature: MA Experiment 20000794 PARAMETER Experiment Name: At_Petals_P Parameter: Age (day) Value: 23-25 days
  misc_feature: MA Experiment 20000794 PARAMETER Experiment Name: At_Petals_P Parameter: Plant Line Value: WS
  misc_feature: MA Experiment 20000794 PARAMETER Experiment Name: At_Petals_P Parameter: Tissue Value: Petals vs. Whole plant
  misc_feature: MA Experiment ID: 20001554 Result: Up-regulated in Transcription
  misc_feature: MA Experiment 20001554 PARAMETER Experiment Name: At_Drought_Soil_Dry_P Parameter: Age (day) Value: 21
  misc_feature: MA Experiment 20001554 PARAMETER Experiment Name: At_Drought_Soil_Dry_P Parameter: Organism Value: A. thaliana
  misc_feature: MA Experiment 20001554 PARAMETER Experiment Name: At_Drought_Soil_Dry_P Parameter: Plant Line Value: WS
  misc_feature: MA Experiment 20001554 PARAMETER Experiment Name: At_Drought_Soil_Dry_P Parameter: Post Timepoint (hr) Value: None
  misc_feature: MA Experiment 20001554 PARAMETER Experiment Name: At_Drought_Soil_Dry_P Parameter: Post-Treatment Value: None
  misc_feature: MA Experiment 20001554 PARAMETER Experiment Name: At_Drought_Soil_Dry_P Parameter: Timepoint (day) Value: 7
  misc_feature: MA Experiment 20001554 PARAMETER Experiment Name: At_Drought_Soil_Dry_P Parameter: Treatment Value: Drought vs. No Drought
  misc_feature: MA Experiment ID: 20001555 Result: Up-regulated in Transcription
  misc_feature: MA Experiment 20001555 PARAMETER Experiment Name: At_Drought_Soil_Dry_P Parameter: Age (day) Value: 24
  misc_feature: MA Experiment 20001555 PARAMETER Experiment Name: At_Drought_Soil_Dry_P Parameter: Organism Value: A. thaliana
  misc_feature: MA Experiment 20001555 PARAMETER Experiment Name: At_Drought_Soil_Dry_P Parameter: Plant Line Value: WS
  misc_feature: MA Experiment 20001555 PARAMETER Experiment Name: At_Drought_Soil_Dry_P Parameter: Post Timepoint (hr) Value: None
  misc_feature: MA Experiment 20001555 PARAMETER Experiment Name: At_Drought_Soil_Dry_P Parameter: Post-Treatment Value: None
  misc_feature: MA Experiment 20001555 PARAMETER Experiment Name: At_Drought_Soil_Dry_P Parameter: Timepoint (day) Value: 10
  misc_feature: MA Experiment 20001555 PARAMETER Experiment Name: At_Drought_Soil_Dry_P Parameter: Treatment Value: Drought vs. No Drought
  misc_feature: MA Experiment ID: 20001905 Result: Up-regulated in Transcription
  misc_feature: MA Experiment 20001905 PARAMETER Experiment Name: At_Drought_Reproduction_P Parameter: Age (day) Value: 40
  misc_feature: MA Experiment 20001905 PARAMETER Experiment Name: At_Drought_Reproduction_P Parameter: Organism Value: A. thaliana
  misc_feature: MA Experiment 20001905 PARAMETER Experiment Name: At_Drought_Reproduction_P Parameter: Plant Line Value: WS
  misc_feature: MA Experiment 20001905 PARAMETER Experiment Name: At_Drought_Reproduction_P Parameter: Timepoint (day) Value: 10
  misc_feature: MA Experiment 20001905 PARAMETER Experiment Name: At_Drought_Reproduction_P Parameter: Tissue Value: Rosettes
  misc_feature: MA Experiment 20001905 PARAMETER Experiment Name: At_Drought_Reproduction_P Parameter: Treatment Value: Drought vs. No Drought
  misc_feature: MA Experiment ID: 20001911 Result: Up-regulated in Transcription
  misc_feature: MA Experiment 20001911 PARAMETER Experiment Name: At_Drought_Reproduction_P Parameter: Age (day) Value: 40
  misc_feature: MA Experiment 20001911 PARAMETER Experiment Name: At_Drought_Reproduction_P Parameter: Organism Value: A. thaliana
  misc_feature: MA Experiment 20001911 PARAMETER Experiment Name: At_Drought_Reproduction_P Parameter: Plant Line Value: WS
  misc_feature: MA Experiment 20001911 PARAMETER Experiment Name: At_Drought_Reproduction_P Parameter: Timepoint (day) Value: 10
  misc_feature: MA Experiment 20001911 PARAMETER Experiment Name: At_Drought_Reproduction_P Parameter: Tissue Value: Flowers
  misc_feature: MA Experiment 20001911 PARAMETER Experiment Name: At_Drought_Reproduction_P Parameter: Treatment Value: Drought vs. No Drought

SEQ ID NO: 94373 - protein, 376 aa, Arabidopsis thaliana; identical to SEQ ID NO: 90617
  peptide (1)..(376): Ceres Seq. ID no. 12724564
  misc_feature (1)..(376): Homolog of NCBI NO: 15222454 NR Description: putative protein kinase; protein id: At1g69790.1
  misc_feature (148)..(376): Homolog of NCBI NO: 25287598 NR Description: protein T7N9.2 [imported] - Arabidopsis thaliana
  misc_feature (9)..(171): Homolog of NCBI NO: 25287598 NR Description: protein T7N9.2 [imported] - Arabidopsis thaliana
  misc_feature (10)..(371): Homolog of NCBI NO: 15227042 NR Description: putative protein kinase; protein id: At2g02800.1, by cDNA: gi_16226562, supported by cDNA: gi_2852448 [Arabidopsis
  misc_feature (10)..(371): Homolog of NCBI NO: 26449871 NR Description: putative protein kinase [Arabidopsis thaliana]
  misc_feature (4)..(376): Homolog of NCBI NO: 15223723 NR Description: protein kinase; protein id: At1g14370.1, by cDNA: gi_12248034, supported by cDNA: gi_16649048, supported
  misc_feature (3)..(365): Homolog of NCBI NO: 19071648 NR Description: putative protein tyrosine-serine-threonine kinase
  misc_feature (14)..(365): Homolog of NCBI NO: 37534182 NR Description: putative serine /threonine kinase similar to NAK
  misc_feature (106)..(376): Homolog of NCBI NO: 15223401 NR Description: protein kinase, putative; protein id: At1g26970.1
  misc_feature (45)..(366): Homolog of NCBI NO: 15222437 NR Description: protein kinase APK1A; protein id: At1g07570.1

SEQ ID NO: 94374 - protein, 299 aa, Arabidopsis thaliana; identical to SEQ ID NO: 48262
  peptide (1)..(299): Ceres Seq. ID no. 12724565
  misc_feature (1)..(299): Homolog of NCBI NO: 15222454 NR Description: putative protein kinase; protein id: At1g69790.1
  misc_feature (71)..(299): Homolog of NCBI NO: 25287598 NR Description: protein T7N9.2 [imported] - Arabidopsis thaliana
  misc_feature (1)..(94): Homolog of NCBI NO: 25287598 NR Description: protein T7N9.2 [imported] - Arabidopsis thaliana
  misc_feature (1)..(294): Homolog of NCBI NO: 15227042 NR Description: putative protein kinase; protein id: At2g02800.1, by cDNA: gi_16226562, supported by cDNA: gi_2852448 [Arabidopsis
  misc_feature (1)..(294): Homolog of NCBI NO: 26449871 NR Description: putative protein kinase [Arabidopsis thaliana]
  misc_feature (1)..(299): Homolog of NCBI NO: 15223723 NR Description: protein kinase; protein id: At1g14370.1, by cDNA: gi_12248034, supported by cDNA: gi_16649048, supported
  misc_feature (1)..(288): Homolog of NCBI NO: 19071648 NR Description: putative protein tyrosine-serine-threonine kinase
  misc_feature (1)..(288): Homolog of NCBI NO: 37534182 NR Description: putative serine /threonine kinase similar to NAK
  misc_feature (29)..(299): Homolog of NCBI NO: 15223401 NR Description: protein kinase, putative; protein id: At1g26970.1
  misc_feature (1)..(289): Homolog of NCBI NO: 15222437 NR Description: protein kinase APK1A; protein id: At1g07570.1

SEQ ID NO: 94375 - protein, 271 aa, Arabidopsis thaliana; identical to SEQ ID NO: 48263
  peptide (1)..(271): Ceres Seq. ID no. 12724566
  misc_feature (1)..(271): Homolog of NCBI NO: 15222454 NR Description: putative protein kinase; protein id: At1g69790.1
  misc_feature (43)..(271): Homolog of NCBI NO: 25287598 NR Description: protein T7N9.2 [imported] - Arabidopsis thaliana
  misc_feature (1)..(66): Homolog of NCBI NO: 25287598 NR Description: protein T7N9.2 [imported] - Arabidopsis thaliana
  misc_feature (1)..(266): Homolog of NCBI NO: 15227042 NR Description: putative protein kinase; protein id: At2g02800.1, by cDNA: gi_16226562, supported by cDNA: gi_2852448 [Arabidopsis
  misc_feature (1)..(266): Homolog of NCBI NO: 26449871 NR Description: putative protein kinase [Arabidopsis thaliana]
  misc_feature (1)..(271): Homolog of NCBI NO: 15223723 NR Description: protein kinase; protein id: At1g14370.1, by cDNA: gi_12248034, supported by cDNA: gi_16649048, supported
  misc_feature (1)..(260): Homolog of NCBI NO: 19071648 NR Description: putative protein tyrosine-serine-threonine kinase
  misc_feature (1)..(260): Homolog of NCBI NO: 37534182 NR Description: putative serine /threonine kinase similar to NAK
  misc_feature (1)..(271): Homolog of NCBI NO: 15223401 NR Description: protein kinase, putative; protein id: At1g26970.1
  misc_feature (1)..(261): Homolog of NCBI NO: 15222437 NR Description: protein kinase APK1A; protein id: At1g07570.1

SEQ ID NO: 94376 - DNA, 1164 bp, Arabidopsis thaliana; identical to SEQ ID NO: 90620
  misc_feature (1)..(1164): Ceres Seq. ID no. 12724567
  misc_feature: MA Experiment ID: 20000185 Result: Up-regulated in Transcription
  misc_feature: MA Experiment 20000185 PARAMETER Experiment Name: At_Roots__P Parameter: Age (day) Value: 7 vs. 21
  misc_feature: MA Experiment 20000185 PARAMETER Experiment Name: At_Roots__P Parameter: Organism Value: A. thaliana
  misc_feature: MA Experiment 20000185 PARAMETER Experiment Name: At_Roots__P Parameter: Tissue Value: Roots vs. Whole Plant
  misc_feature: MA Experiment ID: 20000439 Result: Up-regulated in Transcription
  misc_feature: MA Experiment 20000439 PARAMETER Experiment Name: At_Roots__P Parameter: Age (day) Value: 14 vs. 21
  misc_feature: MA Experiment 20000439 PARAMETER Experiment Name: At_Roots__P Parameter: Organism Value: A. thaliana
  misc_feature: MA Experiment 20000439 PARAMETER Experiment Name: At_Roots__P Parameter: Tissue Value: Roots vs. Whole Plant

SEQ ID NO: 94377 - protein, 387 aa, Arabidopsis thaliana; identical to SEQ ID NO: 90621
  peptide (1)..(387): Ceres Seq. ID no. 12724568
  misc_feature (202)..(263): Pfam Name: WRKY DNA -binding domain Pfam Description: WRKY DNA -binding domain
  misc_feature (1)..(387): Homolog of NCBI NO: 18409374 NR Description: WRKY family transcription factor; protein id: supported by cDNA: gi_15384220 [Arabidopsis thaliana]
  misc_feature (24)..(376): Homolog of NCBI NO: 15242221 NR Description: WRKY family transcription factor; protein id:
  misc_feature (170)..(333): Homolog of NCBI NO: 15234284 NR Description: WRKY family transcription factor; protein id: supported by cDNA: gi_19172391 [Arabidopsis thaliana]
  misc_feature (21)..(83): Homolog of NCBI NO: 15234284 NR Description: WRKY family transcription factor; protein id: supported by cDNA: gi_19172391 [Arabidopsis thaliana]
  misc_feature (26)..(362): Homolog of NCBI NO: 30686070 NR Description: WRKY family transcription factor [Arabidopsis >gi|20978774|sp|Q8VWV6|WR61_ARATH Probable WRKY transcription
  misc_feature (14)..(339): Homolog of NCBI NO: 15233516 NR Description: WRKY family transcription factor; protein id: supported by cDNA: gi_15990593 [Arabidopsis thaliana]
  misc_feature (33)..(362): Homolog of NCBI NO: 25518561 NR Description: hypothetical protein F6A14.5 - Arabidopsis >gi|6730700|gb|AAF27095.1|AC011809_4 Hypothetical protein
  misc_feature (202)..(333): Homolog of NCBI NO: 7488096 NR Description: probable DNA-binding protein T15B16.12 -
  misc_feature (21)..(87): Homolog of NCBI NO: 7488096 NR Description: probable DNA-binding protein T15B16.12 -
  misc_feature (14)..(327): Homolog of NCBI NO: 18415833 NR Description: WRKY family transcription factor; protein id: supported by cDNA: gi_15990589 [Arabidopsis thaliana]

SEQ ID NO: 94378 - protein, 371 aa, Arabidopsis thaliana; identical to SEQ ID NO: 90622
  peptide (1)..(371): Ceres Seq. ID no. 12724569
  misc_feature (186)..(247): Pfam Name: WRKY DNA -binding domain Pfam Description: WRKY DNA -binding domain
  misc_feature (1)..(371): Homolog of NCBI NO: 18409374 NR Description: WRKY family transcription factor; protein id: supported by cDNA: gi_15384220 [Arabidopsis thaliana]
  misc_feature (8)..(360): Homolog of NCBI NO: 15242221 NR Description: WRKY family transcription factor; protein id:
  misc_feature (154)..(317): Homolog of NCBI NO: 15234284 NR Description: WRKY family transcription factor; protein id: supported by cDNA: gi_19172391 [Arabidopsis thaliana]
  misc_feature (5)..(67): Homolog of NCBI NO: 15234284 NR Description: WRKY family transcription factor; protein id: supported by cDNA: gi_19172391 [Arabidopsis thaliana]
  misc_feature (10)..(346): Homolog of NCBI NO: 30686070 NR Description: WRKY family transcription factor [Arabidopsis >gi|20978774|sp|Q8VWV6|WR61_ARATH Probable WRKY transcription
  misc_feature (1)..(323): Homolog of NCBI NO: 15233516 NR Description: WRKY family transcription factor; protein id: supported by cDNA: gi_15990593 [Arabidopsis thaliana]
  misc_feature (17)..(346): Homolog of NCBI NO: 25518561 NR Description: hypothetical protein F6A14.5 - Arabidopsis >gi|6730700|gb|AAF27095.1|AC011809_4 Hypothetical protein
  misc_feature (186)..(317): Homolog of NCBI NO: 7488096 NR Description: probable DNA-binding protein T15B16.12 -
  misc_feature (5)..(71): Homolog of NCBI NO: 7488096 NR Description: probable DNA-binding protein T15B16.12 -
  misc_feature (1)..(311): Homolog of NCBI NO: 18415833 NR Description: WRKY family transcription factor; protein id: supported by cDNA: gi_15990589 [Arabidopsis thaliana]

SEQ ID NO: 94379 - protein, 329 aa, Arabidopsis thaliana; identical to SEQ ID NO: 90623
  peptide (1)..(329): Ceres Seq. ID no. 12724570
  misc_feature (144)..(205): Pfam Name: WRKY DNA -binding domain Pfam Description: WRKY DNA -binding domain
  misc_feature (1)..(329): Homolog of NCBI NO: 18409374 NR Description: WRKY family transcription factor; protein id: supported by cDNA: gi_15384220 [Arabidopsis thaliana]
  misc_feature (1)..(318): Homolog of NCBI NO: 15242221 NR Description: WRKY family transcription factor; protein id:
  misc_feature (112)..(275): Homolog of NCBI NO: 15234284 NR Description: WRKY family transcription factor; protein id: supported by cDNA: gi_19172391 [Arabidopsis thaliana]
  misc_feature (1)..(25): Homolog of NCBI NO: 15234284 NR Description: WRKY family transcription factor; protein id: supported by cDNA: gi_19172391 [Arabidopsis thaliana]
  misc_feature (1)..(304): Homolog of NCBI NO: 30686070 NR Description: WRKY family transcription factor [Arabidopsis >gi|20978774|sp|Q8VWV6|WR61_ARATH Probable WRKY transcription
  misc_feature (1)..(281): Homolog of NCBI NO: 15233516 NR Description: WRKY family transcription factor; protein id: supported by cDNA: gi_15990593 [Arabidopsis thaliana]
  misc_feature (1)..(304): Homolog of NCBI NO: 25518561 NR Description: hypothetical protein F6A14.5 - Arabidopsis >gi|6730700|gb|AAF27095.1|AC011809_4 Hypothetical protein
  misc_feature (144)..(275): Homolog of NCBI NO: 7488096 NR Description: probable DNA-binding protein T15B16.12 -
  misc_feature (1)..(29): Homolog of NCBI NO: 7488096 NR Description: probable DNA-binding protein T15B16.12 -
  misc_feature (1)..(269): Homolog of NCBI NO: 18415833 NR Description: WRKY family transcription factor; protein id: supported by cDNA: gi_15990589 [Arabidopsis thaliana]

SEQ ID NO: 94380 - DNA, 2939 bp, Arabidopsis thaliana; identical to SEQ ID NO: 90624
  misc_feature (1)..(2939): Ceres Seq. ID no. 12724571
  misc_feature: MA Experiment ID: 20000173 Result: Down-regulated in Transcription
  misc_feature: MA Experiment 20000173 PARAMETER Experiment Name: At_42deg_Heat_P Parameter: Age (day) Value: 14
  misc_feature: MA Experiment 20000173 PARAMETER Experiment Name: At_42deg_Heat_P Parameter: Organism Value: A. thaliana
  misc_feature: MA Experiment 20000173 PARAMETER Experiment Name: At_42deg_Heat_P Parameter: Plant Line Value: WS
  misc_feature: MA Experiment 20000173 PARAMETER Experiment Name: At_42deg_Heat_P Parameter: Temperature (deg C) Value: 42 vs. 22
  misc_feature: MA Experiment 20000173 PARAMETER Experiment Name: At_42deg_Heat_P Parameter: Timepoint (hr) Value: 6
  misc_feature: MA Experiment 20000173 PARAMETER Experiment Name: At_42deg_Heat_P Parameter: Tissue Value: Aerial
  misc_feature: MA Experiment ID: 20000179 Result: Up-regulated in Transcription
  misc_feature: MA Experiment 20000179 PARAMETER Experiment Name: At_Germinating_Seeds_P Parameter: Age (hr) Value: 6 vs. 0
  misc_feature: MA Experiment 20000179 PARAMETER Experiment Name: At_Germinating_Seeds_P Parameter: Tissue Value: Germinating Seeds
  misc_feature: MA Experiment ID: 20000180 Result: Up-regulated in Transcription
  misc_feature: MA Experiment 20000180 PARAMETER Experiment Name: At_Germinating_Seeds_P Parameter: Age (hr) Value: 24 vs. 0
  misc_feature: MA Experiment 20000180 PARAMETER Experiment Name: At_Germinating_Seeds_P Parameter: Tissue Value: Germinating Seeds
  misc_feature: MA Experiment ID: 20000184 Result: Down-regulated in Transcription
  misc_feature: MA Experiment 20000184 PARAMETER Experiment Name: At_Shoots__P Parameter: Age (day) Value: 7
  misc_feature: MA Experiment 20000184 PARAMETER Experiment Name: At_Shoots__P Parameter: Tissue Value: Shoots vs. Whole Plant
  misc_feature: MA Experiment ID: 20000185 Result: Down-regulated in Transcription
  misc_feature: MA Experiment 20000185 PARAMETER Experiment Name: At_Roots__P Parameter: Age (day) Value: 7 vs. 21
  misc_feature: MA Experiment 20000185 PARAMETER Experiment Name: At_Roots__P Parameter: Organism Value: A. thaliana
  misc_feature: MA Experiment 20000185 PARAMETER Experiment Name: At_Roots__P Parameter: Tissue Value: Roots vs. Whole Plant
  misc_feature: MA Experiment ID: 20000439 Result: Down-regulated in Transcription
  misc_feature: MA Experiment 20000439 PARAMETER Experiment Name: At_Roots__P Parameter: Age (day) Value: 14 vs. 21
  misc_feature: MA Experiment 20000439 PARAMETER Experiment Name: At_Roots__P Parameter: Organism Value: A. thaliana
  misc_feature: MA Experiment 20000439 PARAMETER Experiment Name: At_Roots__P Parameter: Tissue Value: Roots vs. Whole Plant
  misc_feature: MA Experiment ID: 20001247 Result: Down-regulated in Transcription
  misc_feature: MA Experiment 20001247 PARAMETER Experiment Name: At_Far-red-induction_P Parameter: Age (day) Value: 7
  misc_feature: MA Experiment 20001247 PARAMETER Experiment Name: At_Far-red-induction_P Parameter: Light Value: Far-red vs. White
  misc_feature: MA Experiment 20001247 PARAMETER Experiment Name: At_Far-red-induction_P Parameter: Organism Value: A. thaliana
  misc_feature: MA Experiment 20001247 PARAMETER Experiment Name: At_Far-red-induction_P Parameter: Plant Line Value: Columbia
  misc_feature: MA Experiment 20001247 PARAMETER Experiment Name: At_Far-red-induction_P Parameter: Timepoint (hr) Value: 1
  misc_feature: MA Experiment 20001247 PARAMETER Experiment Name: At_Far-red-induction_P Parameter: Tissue Value: Whole Plant
  misc_feature: MA Experiment ID: 20001451 Result: Down-regulated in Transcription
  misc_feature: MA Experiment 20001451 PARAMETER Experiment Name: At_Far-red-induction_P Parameter: Age (day) Value: 7
  misc_feature: MA Experiment 20001451 PARAMETER Experiment Name: At_Far-red-induction_P Parameter: Light Value: Far-red vs. White
  misc_feature: MA Experiment 20001451 PARAMETER Experiment Name: At_Far-red-induction_P Parameter: Organism Value: A. thaliana
  misc_feature: MA Experiment 20001451 PARAMETER Experiment Name: At_Far-red-induction_P Parameter: Plant Line Value: Columbia
  misc_feature: MA Experiment 20001451 PARAMETER Experiment Name: At_Far-red-induction_P Parameter: Timepoint (hr) Value: 24
  misc_feature: MA Experiment 20001451 PARAMETER Experiment Name: At_Far-red-induction_P Parameter: Tissue Value: Whole Plant
  misc_feature: MA Experiment ID: 20001557 Result: Down-regulated in Transcription
  misc_feature: MA Experiment 20001557 PARAMETER Experiment Name: At_Drought_Soil_Dry_P Parameter: Age (day) Value: 27
  misc_feature: MA Experiment 20001557 PARAMETER Experiment Name: At_Drought_Soil_Dry_P Parameter: Organism Value: A. thaliana
  misc_feature: MA Experiment 20001557 PARAMETER Experiment Name: At_Drought_Soil_Dry_P Parameter: Plant Line Value: WS
  misc_feature: MA Experiment 20001557 PARAMETER Experiment Name: At_Drought_Soil_Dry_P Parameter: Post Timepoint (hr) Value: 3
  misc_feature: MA Experiment 20001557 PARAMETER Experiment Name: At_Drought_Soil_Dry_P Parameter: Post-Treatment Value: Re-Water vs. No Drought
  misc_feature: MA Experiment 20001557 PARAMETER Experiment Name: At_Drought_Soil_Dry_P Parameter: Timepoint (day) Value: 13
  misc_feature: MA Experiment 20001557 PARAMETER Experiment Name: At_Drought_Soil_Dry_P Parameter: Treatment Value: Drought vs. No Drought
  misc_feature: MA Experiment ID: 20001905 Result: Down-regulated in Transcription
  misc_feature: MA Experiment 20001905 PARAMETER Experiment Name: At_Drought_Reproduction_P Parameter: Age (day) Value: 40
  misc_feature: MA Experiment 20001905 PARAMETER Experiment Name: At_Drought_Reproduction_P Parameter: Organism Value: A. thaliana
  misc_feature: MA Experiment 20001905 PARAMETER Experiment Name: At_Drought_Reproduction_P Parameter: Plant Line Value: WS
  misc_feature: MA Experiment 20001905 PARAMETER Experiment Name: At_Drought_Reproduction_P Parameter: Timepoint (day) Value: 10
  misc_feature: MA Experiment 20001905 PARAMETER Experiment Name: At_Drought_Reproduction_P Parameter: Tissue Value: Rosettes
  misc_feature: MA Experiment 20001905 PARAMETER Experiment Name: At_Drought_Reproduction_P Parameter: Treatment Value: Drought vs. No Drought
  misc_feature: MA Experiment ID: 20001906 Result: Down-regulated in Transcription
  misc_feature: MA Experiment 20001906 PARAMETER Experiment Name: At_Drought_Reproduction_P Parameter: Age (day) Value: 35
  misc_feature: MA Experiment 20001906 PARAMETER Experiment Name: At_Drought_Reproduction_P Parameter: Organism Value: A. thaliana
  misc_feature: MA Experiment 20001906 PARAMETER Experiment Name: At_Drought_Reproduction_P Parameter: Plant Line Value: WS
  misc_feature: MA Experiment 20001906 PARAMETER Experiment Name: At_Drought_Reproduction_P Parameter: Timepoint (day) Value: 5
  misc_feature: MA Experiment 20001906 PARAMETER Experiment Name: At_Drought_Reproduction_P Parameter: Tissue Value: Siliques
  misc_feature: MA Experiment 20001906 PARAMETER Experiment Name: At_Drought_Reproduction_P Parameter: Treatment Value: Drought vs. No Drought

SEQ ID NO: 94381 - protein, 902 aa, Arabidopsis thaliana; identical to SEQ ID NO: 90625
  peptide (1)..(902): Ceres Seq. ID no. 12724572
  misc_feature (207)..(902): Homolog of NCBI NO: 34910588 NR Description: putative alpha-amylase [Oryza sativa (japonica
  misc_feature (77)..(209): Homolog of NCBI NO: 34910588 NR Description: putative alpha-amylase [Oryza sativa (japonica
  misc_feature (509)..(899): Homolog of NCBI NO: 38346145 NR Description: OSJNBb0118P14.5 [Oryza sativa (japonica
  misc_feature (509)..(899): Homolog of NCBI NO: 15222959 NR Description: alpha-amylase, putative; protein id: At1g76130.1,
  misc_feature (496)..(899): Homolog of NCBI NO: 25289325 NR Description: protein T23E18.6 [imported] - Arabidopsis >gi|6573706|gb|AAF17626.1|AC009978_2 T23E18.6 [Arabidopsis
  misc_feature (508)..(900): Homolog of NCBI NO: 1220453 NR Description: alpha-amylase
  misc_feature (502)..(899): Homolog of NCBI NO: 7532799 NR Description: alpha-amylase [Malus x domestica]
  misc_feature (508)..(900): Homolog of NCBI NO: 3769330 NR Description: alpha-amylase [Phaseolus vulgaris]
  misc_feature (512)..(900): Homolog of NCBI NO: 228404 NR Description: alpha amylase
  misc_feature (508)..(899): Homolog of NCBI NO: 23027235 NR Description: hypothetical protein [Microbulbifer degradans

SEQ ID NO: 94382 - protein, 887 aa, Arabidopsis thaliana; identical to SEQ ID NO: 90626
  peptide (1)..(887): Ceres Seq. ID no. 12724573
  misc_feature (192)..(887): Homolog of NCBI NO: 34910588 NR Description: putative alpha-amylase [Oryza sativa (japonica
  misc_feature (62)..(194): Homolog of NCBI NO: 34910588 NR Description: putative alpha-amylase [Oryza sativa (japonica
  misc_feature (494)..(884): Homolog of NCBI NO: 38346145 NR Description: OSJNBb0118P14.5 [Oryza sativa (japonica
  misc_feature (494)..(884): Homolog of NCBI NO: 15222959 NR Description: alpha-amylase, putative; protein id: At1g76130.1,
  misc_feature (481)..(884): Homolog of NCBI NO: 25289325 NR Description: protein T23E18.6 [imported] - Arabidopsis >gi|6573706|gb|AAF17626.1|AC009978_2 T23E18.6 [Arabidopsis
  misc_feature (493)..(885): Homolog of NCBI NO: 1220453 NR Description: alpha-amylase
  misc_feature (487)..(884): Homolog of NCBI NO: 7532799 NR Description: alpha-amylase [Malus x domestica]
  misc_feature (493)..(885): Homolog of NCBI NO: 3769330 NR Description: alpha-amylase [Phaseolus vulgaris]
  misc_feature (497)..(885): Homolog of NCBI NO: 228404 NR Description: alpha amylase
  misc_feature (493)..(884): Homolog of NCBI NO: 23027235 NR Description: hypothetical protein [Microbulbifer degradans

SEQ ID NO: 94383 - protein, 831 aa, Arabidopsis thaliana; identical to SEQ ID NO: 90627
  peptide (1)..(831): Ceres Seq. ID no. 12724574
  misc_feature (136)..(831): Homolog of NCBI NO: 34910588 NR Description: putative alpha-amylase [Oryza sativa (japonica
  misc_feature (6)..(138): Homolog of NCBI NO: 34910588 NR Description: putative alpha-amylase [Oryza sativa (japonica
  misc_feature (438)..(828): Homolog of NCBI NO: 38346145 NR Description: OSJNBb0118P14.5 [Oryza sativa (japonica
  misc_feature (438)..(828): Homolog of NCBI NO: 15222959 NR Description: alpha-amylase, putative; protein id: At1g76130.1,
  misc_feature (425)..(828): Homolog of NCBI NO: 25289325 NR Description: protein T23E18.6 [imported] - Arabidopsis >gi|6573706|gb|AAF17626.1|AC009978_2 T23E18.6 [Arabidopsis
  misc_feature (437)..(829): Homolog of NCBI NO: 1220453 NR Description: alpha-amylase
  misc_feature (431)..(828): Homolog of NCBI NO: 7532799 NR Description: alpha-amylase [Malus x domestica]
  misc_feature (437)..(829): Homolog of NCBI NO: 3769330 NR Description: alpha-amylase [Phaseolus vulgaris]
  misc_feature (441)..(829): Homolog of NCBI NO: 228404 NR Description: alpha amylase
  misc_feature (437)..(828): Homolog of NCBI NO: 23027235 NR Description: hypothetical protein [Microbulbifer degradans

SEQ ID NO: 94384 - DNA, 1995 bp, Arabidopsis thaliana; identical to SEQ ID NO: 90628
  misc_feature (1)..(1995): Ceres Seq. ID no. 12724575
  misc_feature: MA Experiment ID: 20000227 Result: Down-regulated in Transcription
  misc_feature: MA Experiment 20000227 PARAMETER Experiment Name: At_Root-Tips-vs-Tops_P Parameter: Tissue Value: Root Tips vs. Root Tops
  misc_feature: MA Experiment ID: 20000234 Result: Down-regulated in Transcription
  misc_feature: MA Experiment 20000234 PARAMETER Experiment Name: At_Siliques_P Parameter: Age (day) Value: 21
  misc_feature: MA Experiment 20000234 PARAMETER Experiment Name: At_Siliques_P Parameter: Organism Value: A. thaliana
  misc_feature: MA Experiment 20000234 PARAMETER Experiment Name: At_Siliques_P Parameter: Plant Line Value: WS
  misc_feature: MA Experiment 20000234 PARAMETER Experiment Name: At_Siliques_P Parameter: Tissue Value: Less Than 5mm Siliques vs. Whole Plant
  misc_feature: MA Experiment ID: 20000264 Result: Down-regulated in Transcription
  misc_feature: MA Experiment 20000264 PARAMETER Experiment Name: At_Open_Flower_P Parameter: Age (day) Value: 21
  misc_feature: MA Experiment 20000264 PARAMETER Experiment Name: At_Open_Flower_P Parameter: Plant Line Value: WS
  misc_feature: MA Experiment 20000264 PARAMETER Experiment Name: At_Open_Flower_P Parameter: Tissue Value: Open Flower vs. Whole Plant
  misc_feature: MA Experiment ID: 20000265 Result: Down-regulated in Transcription
  misc_feature: MA Experiment 20000265 PARAMETER Experiment Name: At_Open_Flower_P Parameter: Age (day) Value: 21
  misc_feature: MA Experiment 20000265 PARAMETER Experiment Name: At_Open_Flower_P Parameter: Plant Line Value: WS
  misc_feature: MA Experiment 20000265 PARAMETER Experiment Name: At_Open_Flower_P Parameter: Tissue Value: Closed Flower vs. Whole Plant
  misc_feature: MA Experiment ID: 20000286 Result: Down-regulated in Transcription
  misc_feature: MA Experiment 20000286 PARAMETER Experiment Name: At_Open_Flower_P Parameter: Age (day) Value: 21
  misc_feature: MA Experiment 20000286 PARAMETER Experiment Name: At_Open_Flower_P Parameter: Plant Line Value: WS
  misc_feature: MA Experiment 20000286 PARAMETER Experiment Name: At_Open_Flower_P Parameter: Tissue Value: Half Open vs. Whole Plant
  misc_feature: MA Experiment ID: 20000443 Result: Up-regulated in Transcription
  misc_feature: MA Experiment 20000443 PARAMETER Experiment Name: At_1uM_BR-BRZ__P Parameter: Tissue Value: Shoot Apices
  misc_feature: MA Experiment 20000443 PARAMETER Experiment Name: At_1uM_BR-BRZ__P Parameter: Treatment Value: 1uM BRZ vs. No Treatment
  misc_feature: MA Experiment ID: 20000451 Result: Up-regulated in Transcription
  misc_feature: MA Experiment 20000451 PARAMETER Experiment Name: At_CS6879_Shoots-Roots_P Parameter: Age (day) Value: 14
  misc_feature: MA Experiment 20000451 PARAMETER Experiment Name: At_CS6879_Shoots-Roots_P Parameter: Organism Value: A. thaliana
  misc_feature: MA Experiment 20000451 PARAMETER Experiment Name: At_CS6879_Shoots-Roots_P Parameter: Plant Line Value: CS6879 vs. WS
  misc_feature: MA Experiment 20000451 PARAMETER Experiment Name: At_CS6879_Shoots-Roots_P Parameter: Tissue Value: Roots
  misc_feature: MA Experiment ID: 20000794 Result: Down-regulated in Transcription
  misc_feature: MA Experiment 20000794 PARAMETER Experiment Name: At_Petals_P Parameter: Age (day) Value: 23-25 days
  misc_feature: MA Experiment 20000794 PARAMETER Experiment Name: At_Petals_P Parameter: Plant Line Value: WS
  misc_feature: MA Experiment 20000794 PARAMETER Experiment Name: At_Petals_P Parameter: Tissue Value: Petals vs. Whole plant

SEQ ID NO: 94385 - protein, 585 aa, Arabidopsis thaliana; identical to SEQ ID NO: 90629
  peptide (1)..(585): Ceres Seq. ID no. 12724576
  misc_feature (97)..(514): Pfam Name: POT family Pfam Description: POT family
  misc_feature (1)..(585): Homolog of NCBI NO: 18409382 NR Description: nitrate transporter (NTL1); protein id: supported by cDNA: gi_17064753, supported by cDNA: gi_3377516 thaliana] >gi|23397158|gb|AAN31862.1| putative nitrate
  misc_feature (1)..(585): Homolog of NCBI NO: 17064754 NR Description: nitrate transporter (NTL1) [Arabidopsis thaliana]
  misc_feature (2)..(585): Homolog of NCBI NO: 25404844 NR Description: nitrate transporter (NTL1), 53025-56402 - Arabidopsis thaliana >gi|12325224|gb|AAG52554.1|AC010675_2
  misc_feature (1)..(585): Homolog of NCBI NO: 11358579 NR Description: nitrate transporter NTL1 [validated] - thaliana >gi|3377517|gb|AAC28086.1| nitrate transporter NTL1
  misc_feature (267)..(585): Homolog of NCBI NO: 22329803 NR Description: nitrate transporter, putative; protein id: supported by cDNA: gi_18175947, supported by cDNA: gi_20465362 thaliana] >gi|18175948|gb|AAL59956.1| putative nitrate
  misc_feature (1)..(281): Homolog of NCBI NO: 22329803 NR Description: nitrate transporter, putative; protein id: supported by cDNA: gi_18175947, supported by cDNA: gi_20465362 thaliana] >gi|18175948|gb|AAL59956.1| putative nitrate
  misc_feature (267)..(585): Homolog of NCBI NO: 25403281 NR Description: protein T7N9.10 [imported] - Arabidopsis thaliana
  misc_feature (6)..(281): Homolog of NCBI NO: 25403281 NR Description: protein T7N9.10 [imported] - Arabidopsis thaliana
  misc_feature (1)..(580): Homolog of NCBI NO: 15241938 NR Description: nitrate transporter NTL1 - like protein; protein
  misc_feature (1)..(580): Homolog of NCBI NO: 10177451 NR Description: nitrate transporter NTL1 [Arabidopsis thaliana]

SEQ ID NO: 94386 - protein, 557 aa, Arabidopsis thaliana; identical to SEQ ID NO: 88606
  peptide (1)..(557): Ceres Seq. ID no. 12724577
  misc_feature (69)..(486): Pfam Name: POT family Pfam Description: POT family
  misc_feature (1)..(557): Homolog of NCBI NO: 18409382 NR Description: nitrate transporter (NTL1); protein id: supported by cDNA: gi_17064753, supported by cDNA: gi_3377516 thaliana] >gi|23397158|gb|AAN31862.1| putative nitrate
  misc_feature (1)..(557): Homolog of NCBI NO: 17064754 NR Description: nitrate transporter (NTL1) [Arabidopsis thaliana]
  misc_feature (1)..(557): Homolog of NCBI NO: 25404844 NR Description: nitrate transporter (NTL1), 53025-56402 - Arabidopsis thaliana >gi|12325224|gb|AAG52554.1|AC010675_2
  misc_feature (1)..(557): Homolog of NCBI NO: 11358579 NR Description: nitrate transporter NTL1 [validated] - thaliana >gi|3377517|gb|AAC28086.1| nitrate transporter NTL1
  misc_feature (239)..(557): Homolog of NCBI NO: 22329803 NR Description: nitrate transporter, putative; protein id: supported by cDNA: gi_18175947, supported by cDNA: gi_20465362 thaliana] >gi|18175948|gb|AAL59956.1| putative nitrate
  misc_feature (1)..(253): Homolog of NCBI NO: 22329803 NR Description: nitrate transporter, putative; protein id: supported by cDNA: gi_18175947, supported by cDNA: gi_20465362 thaliana] >gi|18175948|gb|AAL59956.1| putative nitrate
  misc_feature (239)..(557): Homolog of NCBI NO: 25403281 NR Description: protein T7N9.10 [imported] - Arabidopsis thaliana
  misc_feature (1)..(253): Homolog of NCBI NO: 25403281 NR Description: protein T7N9.10 [imported] - Arabidopsis thaliana
  misc_feature (1)..(552): Homolog of NCBI NO: 15241938 NR Description: nitrate transporter NTL1 - like protein; protein
  misc_feature (1)..(552): Homolog of NCBI NO: 10177451 NR Description: nitrate transporter NTL1 [Arabidopsis thaliana]

SEQ ID NO: 94387 - protein, 525 aa, Arabidopsis thaliana; identical to SEQ ID NO: 90631
  peptide (1)..(525): Ceres Seq. ID no. 12724578
  misc_feature (37)..(454): Pfam Name: POT family Pfam Description: POT family
  misc_feature (1)..(525): Homolog of NCBI NO: 18409382 NR Description: nitrate transporter (NTL1); protein id: supported by cDNA: gi_17064753, supported by cDNA: gi_3377516 thaliana] >gi|23397158|gb|AAN31862.1| putative nitrate
  misc_feature (1)..(525): Homolog of NCBI NO: 17064754 NR Description: nitrate transporter (NTL1) [Arabidopsis thaliana]
  misc_feature (1)..(525): Homolog of NCBI NO: 25404844 NR Description: nitrate transporter (NTL1), 53025-56402 - Arabidopsis thaliana >gi|12325224|gb|AAG52554.1|AC010675_2
  misc_feature (1)..(525): Homolog of NCBI NO: 11358579 NR Description: nitrate transporter NTL1 [validated] - thaliana >gi|3377517|gb|AAC28086.1| nitrate transporter NTL1
  misc_feature (207)..(525): Homolog of NCBI NO: 22329803 NR Description: nitrate transporter, putative; protein id: supported by cDNA: gi_18175947, supported by cDNA: gi_20465362 thaliana] >gi|18175948|gb|AAL59956.1| putative nitrate
  misc_feature (1)..(221): Homolog of NCBI NO: 22329803 NR Description: nitrate transporter, putative; protein id: supported by cDNA: gi_18175947, supported by cDNA: gi_20465362 thaliana] >gi|18175948|gb|AAL59956.1| putative nitrate
  misc_feature (207)..(525): Homolog of NCBI NO: 25403281 NR Description: protein T7N9.10 [imported] - Arabidopsis thaliana
  misc_feature (1)..(221): Homolog of NCBI NO: 25403281 NR Description: protein T7N9.10 [imported] - Arabidopsis thaliana
  misc_feature (1)..(520): Homolog of NCBI NO: 15241938 NR Description: nitrate transporter NTL1 - like protein; protein
  misc_feature (1)..(520): Homolog of NCBI NO: 10177451 NR Description: nitrate transporter NTL1 [Arabidopsis thaliana]

SEQ ID NO: 94388 - DNA, 1267 bp, Arabidopsis thaliana; identical to SEQ ID NO: 90632
  misc_feature (1)..(1267): Ceres Seq. ID no. 12724617
  misc_feature: MA Experiment ID: 20001905 Result: Down-regulated in Transcription
  misc_feature: MA Experiment 20001905 PARAMETER Experiment Name: At_Drought_Reproduction_P Parameter: Age (day) Value: 40
  misc_feature: MA Experiment 20001905 PARAMETER Experiment Name: At_Drought_Reproduction_P Parameter: Organism Value: A. thaliana
  misc_feature: MA Experiment 20001905 PARAMETER Experiment Name: At_Drought_Reproduction_P Parameter: Plant Line Value: WS
  misc_feature: MA Experiment 20001905 PARAMETER Experiment Name: At_Drought_Reproduction_P Parameter: Timepoint (day) Value: 10
  misc_feature: MA Experiment 20001905 PARAMETER Experiment Name: At_Drought_Reproduction_P Parameter: Tissue Value: Rosettes
  misc_feature: MA Experiment 20001905 PARAMETER Experiment Name: At_Drought_Reproduction_P Parameter: Treatment Value: Drought vs. No Drought

SEQ ID NO: 94389 - protein, 340 aa, Arabidopsis thaliana; identical to SEQ ID NO: 90633
  peptide (1)..(340): Ceres Seq. ID no. 12724618
  misc_feature (50)..(295): Pfam Name: Spermine/spermidine synthase Pfam Description: Spermine/spermidine synthase
  misc_feature (1)..(340): Homolog of NCBI NO: 15223115 NR Description: spermidine synthase, putative; protein id: supported by cDNA: gi_14030636 [Arabidopsis thaliana] Spermidine synthase 2 (Putrescine aminopropyltransferase 2)
  misc_feature (51)..(340): Homolog of NCBI NO: 2821961 NR Description: spermidine synthase [Arabidopsis thaliana]
  misc_feature (5)..(340): Homolog of NCBI NO: 15220885 NR Description: putative spermidine synthase; protein id: supported by cDNA: gi_17065033, supported by cDNA: gi_20260023 thaliana] >gi|12230014|sp|Q9ZUB3|SPD1_ARATH Spermidine gb|F14442
  misc_feature (10)..(338): Homolog of NCBI NO: 12230013 NR Description: Spermidine synthase (Putrescine (SPDSY) >gi|4138109|emb|CAA07020.1| spermidine synthase
  misc_feature (10)..(338): Homolog of NCBI NO: 15150055 NR Description: spermidine synthase [Solanum tuberosum]
  misc_feature (11)..(339): Homolog of NCBI NO: 23495354 NR Description: spermidine synthase [Malus x domestica]
  misc_feature (39)..(338): Homolog of NCBI NO: 6094327 NR Description: Spermidine synthase 1 (Putrescine
  misc_feature (40)..(339): Homolog of NCBI NO: 6094330 NR Description: Spermidine synthase 2 (Putrescine
  misc_feature (1)..(339): Homolog of NCBI NO: 23495352 NR Description: spermidine synthase [Malus x domestica]
  misc_feature (10)..(340): Homolog of NCBI NO: 12229958 NR Description: Spermidine synthase 1 (Putrescine

SEQ ID NO: 94390 - protein, 312 aa, Arabidopsis thaliana; identical to SEQ ID NO: 90634
  peptide (1)..(312): Ceres Seq. ID no. 12724619
  misc_feature (22)..(267): Pfam Name: Spermine/spermidine synthase Pfam Description: Spermine/spermidine synthase
  misc_feature (1)..(312): Homolog of NCBI NO: 15223115 NR Description: spermidine synthase, putative; protein id: supported by cDNA: gi_14030636 [Arabidopsis thaliana] Spermidine synthase 2 (Putrescine aminopropyltransferase 2)
  misc_feature (23)..(312): Homolog of NCBI NO: 2821961 NR Description: spermidine synthase [Arabidopsis thaliana]
  misc_feature (1)..(312): Homolog of NCBI NO: 15220885 NR Description: putative spermidine synthase; protein id: supported by cDNA: gi_17065033, supported by cDNA: gi_20260023 thaliana] >gi|12230014|sp|Q9ZUB3|SPD1_ARATH Spermidine gb|F14442
  misc_feature (1)..(310): Homolog of NCBI NO: 12230013 NR Description: Spermidine synthase (Putrescine (SPDSY) >gi|4138109|emb|CAA07020.1| spermidine synthase
  misc_feature (1)..(310): Homolog of NCBI NO: 15150055 NR Description: spermidine synthase [Solanum tuberosum]
  misc_feature (1)..(311): Homolog of NCBI NO: 23495354 NR Description: spermidine synthase [Malus x domestica]
  misc_feature (11)..(310): Homolog of NCBI NO: 6094327 NR Description: Spermidine synthase 1 (Putrescine
  misc_feature (12)..(311): Homolog of NCBI NO: 6094330 NR Description: Spermidine synthase 2 (Putrescine
  misc_feature (1)..(311): Homolog of NCBI NO: 23495352 NR Description: spermidine synthase [Malus x domestica]
  misc_feature (1)..(312): Homolog of NCBI NO: 12229958 NR Description: Spermidine synthase 1 (Putrescine

SEQ ID NO: 94391 - protein, 297 aa, Arabidopsis thaliana; identical to SEQ ID NO: 90635
  peptide (1)..(297): Ceres Seq. ID no. 12724620
  misc_feature (7)..(252): Pfam Name: Spermine/spermidine synthase Pfam Description: Spermine/spermidine synthase
  misc_feature (1)..(297): Homolog of NCBI NO: 15223115 NR Description: spermidine synthase, putative; protein id: supported by cDNA: gi_14030636 [Arabidopsis thaliana] Spermidine synthase 2 (Putrescine aminopropyltransferase 2)
  misc_feature (8)..(297): Homolog of NCBI NO: 2821961 NR Description: spermidine synthase [Arabidopsis thaliana]
  misc_feature (1)..(297): Homolog of NCBI NO: 15220885 NR Description: putative spermidine synthase; protein id: supported by cDNA: gi_17065033, supported by cDNA: gi_20260023 thaliana] >gi|12230014|sp|Q9ZUB3|SPD1_ARATH Spermidine gb|F14442
  misc_feature (1)..(295): Homolog of NCBI NO: 12230013 NR Description: Spermidine synthase (Putrescine (SPDSY) >gi|4138109|emb|CAA07020.1| spermidine synthase
  misc_feature (1)..(295): Homolog of NCBI NO: 15150055 NR Description: spermidine synthase [Solanum tuberosum]
  misc_feature (1)..(296): Homolog of NCBI NO: 23495354 NR Description: spermidine synthase [Malus x domestica]
  misc_feature (1)..(295): Homolog of NCBI NO: 6094327 NR Description: Spermidine synthase 1 (Putrescine
  misc_feature (1)..(296): Homolog of NCBI NO: 6094330 NR Description: Spermidine synthase 2 (Putrescine
  misc_feature (1)..(296): Homolog of NCBI NO: 23495352 NR Description: spermidine synthase [Malus x domestica]
  misc_feature (1)..(297): Homolog of NCBI NO: 12229958 NR Description: Spermidine synthase 1 (Putrescine

SEQ ID NO: 94392 - DNA, 918 bp, Arabidopsis thaliana; identical to SEQ ID NO: 90636
  misc_feature (1)..(918): Ceres Seq. ID no. 12724628
  misc_feature: MA Experiment ID: 20000173 Result: Up-regulated in Transcription
  misc_feature: MA Experiment 20000173 PARAMETER Experiment Name: At_42deg_Heat_P Parameter: Age (day) Value: 14
  misc_feature: MA Experiment 20000173 PARAMETER Experiment Name: At_42deg_Heat_P Parameter: Organism Value: A. thaliana
  misc_feature: MA Experiment 20000173 PARAMETER Experiment Name: At_42deg_Heat_P Parameter: Plant Line Value: WS
  misc_feature: MA Experiment 20000173 PARAMETER Experiment Name: At_42deg_Heat_P Parameter: Temperature (deg C) Value: 42 vs. 22
  misc_feature: MA Experiment 20000173 PARAMETER Experiment Name: At_42deg_Heat_P Parameter: Timepoint (hr) Value: 6
  misc_feature: MA Experiment 20000173 PARAMETER Experiment Name: At_42deg_Heat_P Parameter: Tissue Value: Aerial
  misc_feature: MA Experiment ID: 20000180 Result: Down-regulated in Transcription
  misc_feature: MA Experiment 20000180 PARAMETER Experiment Name: At_Germinating_Seeds_P Parameter: Age (hr) Value: 24 vs. 0
  misc_feature: MA Experiment 20000180 PARAMETER Experiment Name: At_Germinating_Seeds_P Parameter: Tissue Value: Germinating Seeds

SEQ ID NO: 94393 - protein, 305 aa, Arabidopsis thaliana; identical to SEQ ID NO: 90637
  peptide (1)..(305): Ceres Seq. ID no. 12724629
  misc_feature (1)..(305): Homolog of NCBI NO: 15223159 NR Description: hypothetical protein; protein id: At1g70440.1
  misc_feature (1)..(290): Homolog of NCBI NO: 7485680 NR Description: hypothetical protein F17O7.2 - Arabidopsis
  misc_feature (1)..(304): Homolog of NCBI NO: 15220787 NR Description: hypothetical protein; protein id: At1g23550.1
  misc_feature (1)..(304): Homolog of NCBI NO: 8778582 NR Description: F28C11.18 [Arabidopsis thaliana]
  misc_feature (1)..(144): Homolog of NCBI NO: 12325040 NR Description: hypothetical protein, 3' partial; 433-1
  misc_feature (9)..(301): Homolog of NCBI NO: 21592445 NR Description: unknown [Arabidopsis thaliana]
  misc_feature (9)..(301): Homolog of NCBI NO: 15241862 NR Description: putative protein; protein id: At5g62520.1, by cDNA: 23920., supported by cDNA: gi_15450638, supported by gi_17386159 [Arabidopsis thaliana] >gi|10178083|dbj|BAB11502.1|
  misc_feature (51)..(238): Homolog of NCBI NO: 38345627 NR Description: OSJNBb0004A17.7 [Oryza sativa (japonica
  misc_feature (242)..(301): Homolog of NCBI NO: 38345627 NR Description: OSJNBb0004A17.7 [Oryza sativa (japonica
  misc_feature (50)..(229): Homolog of NCBI NO: 37537150 NR Description: putative CEO protein [Oryza sativa (japonica group)] >gi|18057156|gb|AAL58179.1| putative CEO protein [Oryza

SEQ ID NO: 94394 - protein, 248 aa, Arabidopsis thaliana; identical to SEQ ID NO: 90638
  peptide (1)..(248): Ceres Seq. ID no. 12724630
  misc_feature (1)..(248): Homolog of NCBI NO: 15223159 NR Description: hypothetical protein; protein id: At1g70440.1
  misc_feature (1)..(233): Homolog of NCBI NO: 7485680 NR Description: hypothetical protein F17O7.2 - Arabidopsis
  misc_feature (1)..(247): Homolog of NCBI NO: 15220787 NR Description: hypothetical protein; protein id: At1g23550.1
  misc_feature (1)..(247): Homolog of NCBI NO: 8778582 NR Description: F28C11.18 [Arabidopsis thaliana]
  misc_feature (1)..(87): Homolog of NCBI NO: 12325040 NR Description: hypothetical protein, 3' partial; 433-1
  misc_feature (1)..(244): Homolog of NCBI NO: 21592445 NR Description: unknown [Arabidopsis thaliana]
  misc_feature (1)..(244): Homolog of NCBI NO: 15241862 NR Description: putative protein; protein id: At5g62520.1, by cDNA: 23920., supported by cDNA: gi_15450638, supported by gi_17386159 [Arabidopsis thaliana] >gi|10178083|dbj|BAB11502.1|
  misc_feature (1)..(181): Homolog of NCBI NO: 38345627 NR Description: OSJNBb0004A17.7 [Oryza sativa (japonica
  misc_feature (185)..(244): Homolog of NCBI NO: 38345627 NR Description: OSJNBb0004A17.7 [Oryza sativa (japonica
  misc_feature (1)..(172): Homolog of NCBI NO: 37537150 NR Description: putative CEO protein [Oryza sativa (japonica group)] >gi|18057156|gb|AAL58179.1| putative CEO protein [Oryza

SEQ ID NO: 94395 - protein, 211 aa, Arabidopsis thaliana; identical to SEQ ID NO: 90639
  peptide (1)..(211): Ceres Seq. ID no. 12724631
  misc_feature (1)..(211): Homolog of NCBI NO: 15223159 NR Description: hypothetical protein; protein id: At1g70440.1
  misc_feature (1)..(196): Homolog of NCBI NO: 7485680 NR Description: hypothetical protein F17O7.2 - Arabidopsis
  misc_feature (1)..(210): Homolog of NCBI NO: 15220787 NR Description: hypothetical protein; protein id: At1g23550.1
  misc_feature (1)..(210): Homolog of NCBI NO: 8778582 NR Description: F28C11.18 [Arabidopsis thaliana]
  misc_feature (1)..(50): Homolog of NCBI NO: 12325040 NR Description: hypothetical protein, 3' partial; 433-1
  misc_feature (1)..(207): Homolog of NCBI NO: 21592445 NR Description: unknown [Arabidopsis thaliana]
  misc_feature (1)..(207): Homolog of NCBI NO: 15241862 NR Description: putative protein; protein id: At5g62520.1, by cDNA: 23920., supported by cDNA: gi_15450638, supported by gi_17386159 [Arabidopsis thaliana] >gi|10178083|dbj|BAB11502.1|
  misc_feature (1)..(144): Homolog of NCBI NO: 38345627 NR Description: OSJNBb0004A17.7 [Oryza sativa (japonica
  misc_feature (148)..(207): Homolog of NCBI NO: 38345627 NR Description: OSJNBb0004A17.7 [Oryza sativa (japonica
  misc_feature (1)..(135): Homolog of NCBI NO: 37537150 NR Description: putative CEO protein [Oryza sativa (japonica group)] >gi|18057156|gb|AAL58179.1| putative CEO protein [Oryza

SEQ ID NO: 94396 - DNA, 1185 bp, Arabidopsis thaliana; identical to SEQ ID NO: 90640
  misc_feature (1)..(1185): Ceres Seq. ID no. 12724632
  misc_feature: MA Experiment ID: 20000180 Result: Up-regulated in Transcription
  misc_feature: MA Experiment 20000180 PARAMETER Experiment Name: At_Germinating_Seeds_P Parameter: Age (hr) Value: 24 vs. 0
  misc_feature: MA Experiment 20000180 PARAMETER Experiment Name: At_Germinating_Seeds_P Parameter: Tissue Value: Germinating Seeds
  misc_feature: MA Experiment ID: 20000227 Result: Up-regulated in Transcription
  misc_feature: MA Experiment 20000227 PARAMETER Experiment Name: At_Root-Tips-vs-Tops_P Parameter: Tissue Value: Root Tips vs. Root Tops

SEQ ID NO: 94397 - protein, 394 aa, Arabidopsis thaliana; identical to SEQ ID NO: 90641
  peptide (1)..(394): Ceres Seq. ID no. 12724633
  misc_feature (1)..(394): Homolog of NCBI NO: 15223160 NR Description: putative protein kinase; protein id: At1g70450.1
  misc_feature (1)..(319): Homolog of NCBI NO: 7434323 NR Description: protein kinase homolog F17O7.1 - Arabidopsis >gi|3176673|gb|AAC18796.1| Similar to serine/threonine kinase
  misc_feature (19)..(355): Homolog of NCBI NO: 15223161 NR Description: putative protein kinase; protein id: At1g70460.1
  misc_feature (26)..(189): Homolog of NCBI NO: 15220786 NR Description: Pto kinase interactor, putative; protein id:
  misc_feature (216)..(355): Homolog of NCBI NO: 15220786 NR Description: Pto kinase interactor, putative; protein id:
  misc_feature (26)..(355): Homolog of NCBI NO: 15218591 NR Description: protein kinase, putative; protein id: At1g10620.1
  misc_feature (216)..(355): Homolog of NCBI NO: 8778584 NR Description: F28C11.17 [Arabidopsis thaliana]
  misc_feature (26)..(124): Homolog of NCBI NO: 8778584 NR Description: F28C11.17 [Arabidopsis thaliana]
  misc_feature (136)..(189): Homolog of NCBI NO: 8778584 NR Description: F28C11.17 [Arabidopsis thaliana]
  misc_feature (26)..(355): Homolog of NCBI NO: 25518375 NR Description: hypothetical protein F5O8.10 - Arabidopsis

SEQ ID NO: 94398 - protein, 365 aa, Arabidopsis thaliana; identical to SEQ ID NO: 90642
  peptide (1)..(365): Ceres Seq. ID no. 12724634
  misc_feature (1)..(365): Homolog of NCBI NO: 15223160 NR Description: putative protein kinase; protein id: At1g70450.1
  misc_feature (1)..(290): Homolog of NCBI NO: 7434323 NR Description: protein kinase homolog F17O7.1 - Arabidopsis >gi|3176673|gb|AAC18796.1| Similar to serine/threonine kinase
  misc_feature (1)..(326): Homolog of NCBI NO: 15223161 NR Description: putative protein kinase; protein id: At1g70460.1
  misc_feature (1)..(160): Homolog of NCBI NO: 15220786 NR Description: Pto kinase interactor, putative; protein id:
  misc_feature (187)..(326): Homolog of NCBI NO: 15220786 NR Description: Pto kinase interactor, putative; protein id:
  misc_feature (1)..(326): Homolog of NCBI NO: 15218591 NR Description: protein kinase, putative; protein id: At1g10620.1
  misc_feature (187)..(326): Homolog of NCBI NO: 8778584 NR Description: F28C11.17 [Arabidopsis thaliana]
  misc_feature (1)..(95): Homolog of NCBI NO: 8778584 NR Description: F28C11.17 [Arabidopsis thaliana]
  misc_feature (107)..(160): Homolog of NCBI NO: 8778584 NR Description: F28C11.17 [Arabidopsis thaliana]
  misc_feature (1)..(326): Homolog of NCBI NO: 25518375 NR Description: hypothetical protein F5O8.10 - Arabidopsis

SEQ ID NO: 94399 - DNA, 2133 bp, Arabidopsis thaliana; identical to SEQ ID NO: 90643
  misc_feature (1)..(2133): Ceres Seq. ID no. 12724635
  misc_feature: MA Experiment ID: 20000180 Result: Up-regulated in Transcription
  misc_feature: MA Experiment 20000180 PARAMETER Experiment Name: At_Germinating_Seeds_P Parameter: Age (hr) Value: 24 vs. 0
  misc_feature: MA Experiment 20000180 PARAMETER Experiment Name: At_Germinating_Seeds_P Parameter: Tissue Value: Germinating Seeds
  misc_feature: MA Experiment ID: 20000227 Result: Up-regulated in Transcription
  misc_feature: MA Experiment 20000227 PARAMETER Experiment Name: At_Root-Tips-vs-Tops_P Parameter: Tissue Value: Root Tips vs. Root Tops
  misc_feature: MA Experiment ID: 20000439 Result: Up-regulated in Transcription
  misc_feature: MA Experiment 20000439 PARAMETER Experiment Name: At_Roots__P Parameter: Age (day) Value: 14 vs. 21
  misc_feature: MA Experiment 20000439 PARAMETER Experiment Name: At_Roots__P Parameter: Organism Value: A. thaliana
  misc_feature: MA Experiment 20000439 PARAMETER Experiment Name: At_Roots__P Parameter: Tissue Value: Roots vs. Whole Plant

SEQ ID NO: 94400 - protein, 710 aa, Arabidopsis thaliana; identical to SEQ ID NO: 90644
  peptide (1)..(710): Ceres Seq. ID no. 12724636
  misc_feature (1)..(492): Homolog of NCBI NO: 15220786 NR Description: Pto kinase interactor, putative; protein id:
  misc_feature (519)..(710): Homolog of NCBI NO: 15220786 NR Description: Pto kinase interactor, putative; protein id:
  misc_feature (1)..(428): Homolog of NCBI NO: 8778584 NR Description: F28C11.17 [Arabidopsis thaliana]
  misc_feature (519)..(710): Homolog of NCBI NO: 8778584 NR Description: F28C11.17 [Arabidopsis thaliana]
  misc_feature (30)..(704): Homolog of NCBI NO: 15218591 NR Description: protein kinase, putative; protein id: At1g10620.1
  misc_feature (4)..(698): Homolog of NCBI NO: 15218591 NR Description: protein kinase, putative; protein id: At1g10620.1
  misc_feature (3)..(710): Homolog of NCBI NO: 25518375 NR Description: hypothetical protein F5O8.10 - Arabidopsis
  misc_feature (4)..(492): Homolog of NCBI NO: 25402610 NR Description: protein F20B24.6 [imported] - Arabidopsis >gi|6573752|gb|AAF17672.1|AC009398_21 F20B24.6 [Arabidopsis
  misc_feature (519)..(704): Homolog of NCBI NO: 25402610 NR Description: protein F20B24.6 [imported] - Arabidopsis >gi|6573752|gb|AAF17672.1|AC009398_21 F20B24.6 [Arabidopsis
  misc_feature (298)..(684): Homolog of NCBI NO: 15221470 NR Description: protein kinase, putative; protein id: supported by cDNA: gi_21280864 [Arabidopsis thaliana]

SEQ ID NO: 94401 - protein, 475 aa, Arabidopsis thaliana; identical to SEQ ID NO: 90645
  peptide (1)..(475): Ceres Seq. ID no. 12724637
  misc_feature (1)..(257): Homolog of NCBI NO: 15220786 NR Description: Pto kinase interactor, putative; protein id:
  misc_feature (284)..(475): Homolog of NCBI NO: 15220786 NR Description: Pto kinase interactor, putative; protein id:
  misc_feature (1)..(193): Homolog of NCBI NO: 8778584 NR Description: F28C11.17 [Arabidopsis thaliana]
  misc_feature (284)..(475): Homolog of NCBI NO: 8778584 NR Description: F28C11.17 [Arabidopsis thaliana]
  misc_feature (1)..(469): Homolog of NCBI NO: 15218591 NR Description: protein kinase, putative; protein id: At1g10620.1
  misc_feature (1)..(463): Homolog of NCBI NO: 15218591 NR Description: protein kinase, putative; protein id: At1g10620.1
  misc_feature (1)..(475): Homolog of NCBI NO: 25518375 NR Description: hypothetical protein F5O8.10 - Arabidopsis
  misc_feature (1)..(257): Homolog of NCBI NO: 25402610 NR Description: protein F20B24.6 [imported] - Arabidopsis >gi|6573752|gb|AAF17672.1|AC009398_21 F20B24.6 [Arabidopsis
  misc_feature (284)..(469): Homolog of NCBI NO: 25402610 NR Description: protein F20B24.6 [imported] - Arabidopsis >gi|6573752|gb|AAF17672.1|AC009398_21 F20B24.6 [Arabidopsis
  misc_feature (63)..(449): Homolog of NCBI NO: 15221470 NR Description: protein kinase, putative; protein id: supported by cDNA: gi_21280864 [Arabidopsis thaliana]

SEQ ID NO: 94402 - protein, 461 aa, Arabidopsis thaliana; identical to SEQ ID NO: 90646
  peptide (1)..(461): Ceres Seq. ID no. 12724638
  misc_feature (1)..(243): Homolog of NCBI NO: 15220786 NR Description: Pto kinase interactor, putative; protein id:
  misc_feature (270)..(461): Homolog of NCBI NO: 15220786 NR Description: Pto kinase interactor, putative; protein id:
  misc_feature (1)..(179): Homolog of NCBI NO: 8778584 NR Description: F28C11.17 [Arabidopsis thaliana]
  misc_feature (270)..(461): Homolog of NCBI NO: 8778584 NR Description: F28C11.17 [Arabidopsis thaliana]
  misc_feature (1)..(455): Homolog of NCBI NO: 15218591 NR Description: protein kinase, putative; protein id: At1g10620.1
  misc_feature (1)..(449): Homolog of NCBI NO: 15218591 NR Description: protein kinase, putative; protein id: At1g10620.1
  misc_feature (1)..(461): Homolog of NCBI NO: 25518375 NR Description: hypothetical protein F5O8.10 - Arabidopsis
  misc_feature (1)..(243): Homolog of NCBI NO: 25402610 NR Description: protein F20B24.6 [imported] - Arabidopsis >gi|6573752|gb|AAF17672.1|AC009398_21 F20B24.6 [Arabidopsis
  misc_feature (270)..(455): Homolog of NCBI NO: 25402610 NR Description: protein F20B24.6 [imported] - Arabidopsis >gi|6573752|gb|AAF17672.1|AC009398_21 F20B24.6 [Arabidopsis
  misc_feature (49)..(435): Homolog of NCBI NO: 15221470 NR Description: protein kinase, putative; protein id: supported by cDNA: gi_21280864 [Arabidopsis thaliana]

SEQ ID NO: 94403 - DNA, 933 bp, Arabidopsis thaliana; identical to SEQ ID NO: 90647
  misc_feature (1)..(933): Ceres Seq. ID no. 12724646
  misc_feature: MA Experiment ID: 20000171 Result: Up-regulated in Transcription
  misc_feature: MA Experiment 20000171 PARAMETER Experiment Name: At_42deg_Heat_P Parameter: Age (day) Value: 14
  misc_feature: MA Experiment 20000171 PARAMETER Experiment Name: At_42deg_Heat_P Parameter: Organism Value: A. thaliana
  misc_feature: MA Experiment 20000171 PARAMETER Experiment Name: At_42deg_Heat_P Parameter: Plant Line Value: WS
  misc_feature: MA Experiment 20000171 PARAMETER Experiment Name: At_42deg_Heat_P Parameter: Temperature (deg C) Value: 42 vs. 22
  misc_feature: MA Experiment 20000171 PARAMETER Experiment Name: At_42deg_Heat_P Parameter: Timepoint (hr) Value: 1
  misc_feature: MA Experiment 20000171 PARAMETER Experiment Name: At_42deg_Heat_P Parameter: Tissue Value: Aerial
  misc_feature: MA Experiment ID: 20000173 Result: Up-regulated in Transcription
  misc_feature: MA Experiment 20000173 PARAMETER Experiment Name: At_42deg_Heat_P Parameter: Age (day) Value: 14
  misc_feature: MA Experiment 20000173 PARAMETER Experiment Name: At_42deg_Heat_P Parameter: Organism Value: A. thaliana
  misc_feature: MA Experiment 20000173 PARAMETER Experiment Name: At_42deg_Heat_P Parameter: Plant Line Value: WS
  misc_feature: MA Experiment 20000173 PARAMETER Experiment Name: At_42deg_Heat_P Parameter: Temperature (deg C) Value: 42 vs. 22
  misc_feature: MA Experiment 20000173 PARAMETER Experiment Name: At_42deg_Heat_P Parameter: Timepoint (hr) Value: 6
  misc_feature: MA Experiment 20000173 PARAMETER Experiment Name: At_42deg_Heat_P Parameter: Tissue Value: Aerial
  misc_feature: MA Experiment ID: 20000182 Result: Up-regulated in Transcription
  misc_feature: MA Experiment 20000182 PARAMETER Experiment Name: At_2mM_SA_P Parameter: Age (day) Value: 14
  misc_feature: MA Experiment 20000182 PARAMETER Experiment Name: At_2mM_SA_P Parameter: Organism Value: A. thaliana
  misc_feature: MA Experiment 20000182 PARAMETER Experiment Name: At_2mM_SA_P Parameter: Plant Line Value: WS
  misc_feature: MA Experiment 20000182 PARAMETER Experiment Name: At_2mM_SA_P Parameter: Timepoint (hr) Value: 6
  misc_feature: MA Experiment 20000182 PARAMETER Experiment Name: At_2mM_SA_P Parameter: Tissue Value: Aerial
  misc_feature: MA Experiment 20000182 PARAMETER Experiment Name: At_2mM_SA_P Parameter: Treatment Value: 2mM SA vs. No Treatment
  misc_feature: MA Experiment ID: 20000184 Result: Up-regulated in Transcription
  misc_feature: MA Experiment 20000184 PARAMETER Experiment Name: At_Shoots__P Parameter: Age (day) Value: 7
  misc_feature: MA Experiment 20000184 PARAMETER Experiment Name: At_Shoots__P Parameter: Tissue Value: Shoots vs. Whole Plant
  misc_feature: MA Experiment ID: 20000185 Result: Up-regulated in Transcription
  misc_feature: MA Experiment 20000185 PARAMETER Experiment Name: At_Roots__P Parameter: Age (day) Value: 7 vs. 21
  misc_feature: MA Experiment 20000185 PARAMETER Experiment Name: At_Roots__P Parameter: Organism Value: A. thaliana
  misc_feature: MA Experiment 20000185 PARAMETER Experiment Name: At_Roots__P Parameter: Tissue Value: Roots vs. Whole Plant
  misc_feature: MA Experiment ID: 20000213 Result: Up-regulated in Transcription
  misc_feature: MA Experiment 20000213 PARAMETER Experiment Name: At_4deg_Cold_P Parameter: Timepoint (hr) Value: 2
  misc_feature: MA Experiment ID: 20000234 Result: Down-regulated in Transcription
  misc_feature: MA Experiment 20000234 PARAMETER Experiment Name: At_Siliques_P Parameter: Age (day) Value: 21
  misc_feature: MA Experiment 20000234 PARAMETER Experiment Name: At_Siliques_P Parameter: Organism Value: A. thaliana
  misc_feature: MA Experiment 20000234 PARAMETER Experiment Name: At_Siliques_P Parameter: Plant Line Value: WS
  misc_feature: MA Experiment 20000234 PARAMETER Experiment Name: At_Siliques_P Parameter: Tissue Value: Less Than 5mm Siliques vs. Whole Plant
  misc_feature: MA Experiment ID: 20000235 Result: Down-regulated in Transcription
  misc_feature: MA Experiment 20000235 PARAMETER Experiment Name: At_Siliques_P Parameter: Age (day) Value: 21
  misc_feature: MA Experiment 20000235 PARAMETER Experiment Name: At_Siliques_P Parameter: Organism Value: A. thaliana
  misc_feature: MA Experiment 20000235 PARAMETER Experiment Name: At_Siliques_P Parameter: Plant Line Value: WS
  misc_feature: MA Experiment 20000235 PARAMETER Experiment Name: At_Siliques_P Parameter: Tissue Value: 5-10mm Siliques vs. Whole Plant
  misc_feature: MA Experiment ID: 20000438 Result: Up-regulated in Transcription
  misc_feature: MA Experiment 20000438 PARAMETER Experiment Name: At_Shoots__P Parameter: Age (day) Value: 14
  misc_feature: MA Experiment 20000438 PARAMETER Experiment Name: At_Shoots__P Parameter: Tissue Value: Shoots vs. Whole Plant
  misc_feature: MA Experiment ID: 20000439 Result: Up-regulated in Transcription
  misc_feature: MA Experiment 20000439 PARAMETER Experiment Name: At_Roots__P Parameter: Age (day) Value: 14 vs. 21
  misc_feature: MA Experiment 20000439 PARAMETER Experiment Name: At_Roots__P Parameter: Organism Value: A. thaliana
  misc_feature: MA Experiment 20000439 PARAMETER Experiment Name: At_Roots__P Parameter: Tissue Value: Roots vs. Whole Plant
  misc_feature: MA Experiment ID: 20000443 Result: Up-regulated in Transcription
  misc_feature: MA Experiment 20000443 PARAMETER Experiment Name: At_1uM_BR-BRZ__P Parameter: Tissue Value: Shoot Apices
  misc_feature: MA Experiment 20000443 PARAMETER Experiment Name: At_1uM_BR-BRZ__P Parameter: Treatment Value: 1uM BRZ vs. No Treatment
  misc_feature: MA Experiment ID: 20000451 Result: Up-regulated in Transcription
  misc_feature: MA Experiment 20000451 PARAMETER Experiment Name: At_CS6879_Shoots-Roots_P Parameter: Age (day) Value: 14
  misc_feature: MA Experiment 20000451 PARAMETER Experiment Name: At_CS6879_Shoots-Roots_P Parameter: Organism Value: A. thaliana
  misc_feature: MA Experiment 20000451 PARAMETER Experiment Name: At_CS6879_Shoots-Roots_P Parameter: Plant Line Value: CS6879 vs. WS
  misc_feature: MA Experiment 20000451 PARAMETER Experiment Name: At_CS6879_Shoots-Roots_P Parameter: Tissue Value: Roots
  misc_feature: MA Experiment ID: 20000495 Result: Down-regulated in Transcription
  misc_feature: MA Experiment 20000495 PARAMETER Experiment Name: At_Guard_Cells_P Parameter: Harvest Date Value: 8/2/2002
  misc_feature: MA Experiment 20000495 PARAMETER Experiment Name: At_Guard_Cells_P Parameter: Organism Value: A. thaliana
  misc_feature: MA Experiment 20000495 PARAMETER Experiment Name: At_Guard_Cells_P Parameter: Tissue Value: Guard Cells vs. Leaves
  misc_feature: MA Experiment ID: 20000573 Result: Down-regulated in Transcription
  misc_feature: MA Experiment 20000573 PARAMETER Experiment Name: At_100uM_ABA_Mutants__P Parameter: Organism Value: A. thaliana
  misc_feature: MA Experiment 20000573 PARAMETER Experiment Name: At_100uM_ABA_Mutants__P Parameter: Plant Line Value: CS22 vs. Ler wt
  misc_feature: MA Experiment 20000573 PARAMETER Experiment Name: At_100uM_ABA_Mutants__P Parameter: Timepoint (hr) Value: N/A
  misc_feature: MA Experiment 20000573 PARAMETER Experiment Name: At_100uM_ABA_Mutants__P Parameter: Tissue Value: Whole Plant
  misc_feature: MA Experiment 20000573 PARAMETER Experiment Name: At_100uM_ABA_Mutants__P Parameter: Treatment Value: None
  misc_feature: MA Experiment ID: 20000574 Result: Down-regulated in Transcription
  misc_feature: MA Experiment 20000574 PARAMETER Experiment Name: At_100uM_ABA_Mutants__P Parameter: Organism Value: A. thaliana
  misc_feature: MA Experiment 20000574 PARAMETER Experiment Name: At_100uM_ABA_Mutants__P Parameter: Plant Line Value: CS23 vs. Ler wt
  misc_feature: MA Experiment 20000574 PARAMETER Experiment Name: At_100uM_ABA_Mutants__P Parameter: Timepoint (hr) Value: N/A
  misc_feature: MA Experiment 20000574 PARAMETER Experiment Name: At_100uM_ABA_Mutants__P Parameter: Tissue Value: Whole Plant
  misc_feature: MA Experiment 20000574 PARAMETER Experiment Name: At_100uM_ABA_Mutants__P Parameter: Treatment Value: None
  misc_feature: MA Experiment ID: 20000709 Result: Up-regulated in Transcription
  misc_feature: MA Experiment 20000709 PARAMETER Experiment Name: At_15mM_NH4NO3_L-to-H_P Parameter: Age (hr) Value: 14
  misc_feature: MA Experiment 20000709 PARAMETER Experiment Name: At_15mM_NH4NO3_L-to-H_P Parameter: Organism Value: A. thaliana
  misc_feature: MA Experiment 20000709 PARAMETER Experiment Name: At_15mM_NH4NO3_L-to-H_P Parameter: Plant Line Value: WS
  misc_feature: MA Experiment 20000709 PARAMETER Experiment Name: At_15mM_NH4NO3_L-to-H_P Parameter: Timepoint (hr) Value: 4
  misc_feature: MA Experiment 20000709 PARAMETER Experiment Name: At_15mM_NH4NO3_L-to-H_P Parameter: Tissue Value: Aerial
  misc_feature: MA Experiment 20000709 PARAMETER Experiment Name: At_15mM_NH4NO3_L-to-H_P Parameter: Treatment Value: 15mM NH4NO3 vs. 30mM Mannitol
  misc_feature: MA Experiment ID: 20001247 Result: Up-regulated in Transcription
  misc_feature: MA Experiment 20001247 PARAMETER Experiment Name: At_Far-red-induction_P Parameter: Age (day) Value: 7
  misc_feature: MA Experiment 20001247 PARAMETER Experiment Name: At_Far-red-induction_P Parameter: Light Value: Far-red vs. White
  misc_feature: MA Experiment 20001247 PARAMETER Experiment Name: At_Far-red-induction_P Parameter: Organism Value: A. thaliana
  misc_feature: MA Experiment 20001247 PARAMETER Experiment Name: At_Far-red-induction_P Parameter: Plant Line Value: Columbia
  misc_feature: MA Experiment 20001247 PARAMETER Experiment Name: At_Far-red-induction_P Parameter: Timepoint (hr) Value: 1
  misc_feature: MA Experiment 20001247 PARAMETER Experiment Name: At_Far-red-induction_P Parameter: Tissue Value: Whole Plant
  misc_feature: MA Experiment ID: 20001248 Result: Down-regulated in Transcription
  misc_feature: MA Experiment 20001248 PARAMETER Experiment Name: At_Far-red-induction_P Parameter: Age (day) Value: 7
  misc_feature: MA Experiment 20001248 PARAMETER Experiment Name: At_Far-red-induction_P Parameter: Light Value: Far-red vs. White
  misc_feature: MA Experiment 20001248 PARAMETER Experiment Name: At_Far-red-induction_P Parameter: Organism Value: A. thaliana
  misc_feature: MA Experiment 20001248 PARAMETER Experiment Name: At_Far-red-induction_P Parameter: Plant Line Value: Columbia
  misc_feature: MA Experiment 20001248 PARAMETER Experiment Name: At_Far-red-induction_P Parameter: Timepoint (hr) Value: 4
  misc_feature: MA Experiment 20001248 PARAMETER Experiment Name: At_Far-red-induction_P Parameter: Tissue Value: Whole Plant
  misc_feature: MA Experiment ID: 20001450 Result: Down-regulated in Transcription
  misc_feature: MA Experiment 20001450 PARAMETER Experiment Name: At_Far-red-induction_P Parameter: Age (day) Value: 7
  misc_feature: MA Experiment 20001450 PARAMETER Experiment Name: At_Far-red-induction_P Parameter: Light Value: Far-red vs. White
  misc_feature: MA Experiment 20001450 PARAMETER Experiment Name: At_Far-red-induction_P Parameter: Organism Value: A. thaliana
  misc_feature: MA Experiment 20001450 PARAMETER Experiment Name: At_Far-red-induction_P Parameter: Plant Line Value: Columbia
  misc_feature: MA Experiment 20001450 PARAMETER Experiment Name: At_Far-red-induction_P Parameter: Timepoint (hr) Value: 8
  misc_feature: MA Experiment 20001450 PARAMETER Experiment Name: At_Far-red-induction_P Parameter: Tissue Value: Whole Plant
  misc_feature: MA Experiment ID: 20001459 Result: Up-regulated in Transcription
  misc_feature: MA Experiment 20001459 PARAMETER Experiment Name: At_50mM_NH4NO3_L-to-H_P Parameter: Age (day) Value: Undefined
  misc_feature: MA Experiment 20001459 PARAMETER Experiment Name: At_50mM_NH4NO3_L-to-H_P Parameter: Organism Value: Undefined
  misc_feature: MA Experiment 20001459 PARAMETER Experiment Name: At_50mM_NH4NO3_L-to-H_P Parameter: Plant Line Value: Undefined
  misc_feature: MA Experiment 20001459 PARAMETER Experiment Name: At_50mM_NH4NO3_L-to-H_P Parameter: Timepoint (hr) Value: 4
  misc_feature: MA Experiment 20001459 PARAMETER Experiment Name: At_50mM_NH4NO3_L-to-H_P Parameter: Tissue Value: Siliques
  misc_feature: MA Experiment 20001459 PARAMETER Experiment Name: At_50mM_NH4NO3_L-to-H_P Parameter: Treatment Value: 50mM NH4NO3 vs. 100mM Manitol
  misc_feature: MA Experiment ID: 20001554 Result: Up-regulated in Transcription
  misc_feature: MA Experiment 20001554 PARAMETER Experiment Name: At_Drought_Soil_Dry_P Parameter: Age (day) Value: 21
  misc_feature: MA Experiment 20001554 PARAMETER Experiment Name: At_Drought_Soil_Dry_P Parameter: Organism Value: A. thaliana
  misc_feature: MA Experiment 20001554 PARAMETER Experiment Name: At_Drought_Soil_Dry_P Parameter: Plant Line Value: WS
  misc_feature: MA Experiment 20001554 PARAMETER Experiment Name: At_Drought_Soil_Dry_P Parameter: Post Timepoint (hr) Value: None
  misc_feature: MA Experiment 20001554 PARAMETER Experiment Name: At_Drought_Soil_Dry_P Parameter: Post-Treatment Value: None
  misc_feature: MA Experiment 20001554 PARAMETER Experiment Name: At_Drought_Soil_Dry_P Parameter: Timepoint (day) Value: 7
  misc_feature: MA Experiment 20001554 PARAMETER Experiment Name: At_Drought_Soil_Dry_P Parameter: Treatment Value: Drought vs. No Drought
  misc_feature: MA Experiment ID: 20001556 Result: Down-regulated in Transcription
  misc_feature: MA Experiment 20001556 PARAMETER Experiment Name: At_Drought_Soil_Dry_P Parameter: Age (day) Value: 26
  misc_feature: MA Experiment 20001556 PARAMETER Experiment Name: At_Drought_Soil_Dry_P Parameter: Organism Value: A. thaliana
  misc_feature: MA Experiment 20001556 PARAMETER Experiment Name: At_Drought_Soil_Dry_P Parameter: Plant Line Value: WS
  misc_feature: MA Experiment 20001556 PARAMETER Experiment Name: At_Drought_Soil_Dry_P Parameter: Post Timepoint (hr) Value: None
  misc_feature: MA Experiment 20001556 PARAMETER Experiment Name: At_Drought_Soil_Dry_P Parameter: Post-Treatment Value: None
  misc_feature: MA Experiment 20001556 PARAMETER Experiment Name: At_Drought_Soil_Dry_P Parameter: Timepoint (day) Value: 12
  misc_feature: MA Experiment 20001556 PARAMETER Experiment Name: At_Drought_Soil_Dry_P Parameter: Treatment Value: Drought vs. No Drought
  misc_feature: MA Experiment ID: 20001557 Result: Down-regulated in Transcription
  misc_feature: MA Experiment 20001557 PARAMETER Experiment Name: At_Drought_Soil_Dry_P Parameter: Age (day) Value: 27
  misc_feature: MA Experiment 20001557 PARAMETER Experiment Name: At_Drought_Soil_Dry_P Parameter: Organism Value: A. thaliana
  misc_feature: MA Experiment 20001557 PARAMETER Experiment Name: At_Drought_Soil_Dry_P Parameter: Plant Line Value: WS
  misc_feature: MA Experiment 20001557 PARAMETER Experiment Name: At_Drought_Soil_Dry_P Parameter: Post Timepoint (hr) Value: 3
  misc_feature: MA Experiment 20001557 PARAMETER Experiment Name: At_Drought_Soil_Dry_P Parameter: Post-Treatment Value: Re-Water vs. No Drought
  misc_feature: MA Experiment 20001557 PARAMETER Experiment Name: At_Drought_Soil_Dry_P Parameter: Timepoint (day) Value: 13
  misc_feature: MA Experiment 20001557 PARAMETER Experiment Name: At_Drought_Soil_Dry_P Parameter: Treatment Value: Drought vs. No Drought
  misc_feature: MA Experiment ID: 20001558 Result: Down-regulated in Transcription
  misc_feature: MA Experiment 20001558 PARAMETER Experiment Name: At_Drought_Soil_Dry_P Parameter: Age (day) Value: 27
  misc_feature: MA Experiment 20001558 PARAMETER Experiment Name: At_Drought_Soil_Dry_P Parameter: Organism Value: A. thaliana
  misc_feature: MA Experiment 20001558 PARAMETER Experiment Name: At_Drought_Soil_Dry_P Parameter: Plant Line Value: WS
  misc_feature: MA Experiment 20001558 PARAMETER Experiment Name: At_Drought_Soil_Dry_P Parameter: Post Timepoint (hr) Value: 6
  misc_feature: MA Experiment 20001558 PARAMETER Experiment Name: At_Drought_Soil_Dry_P Parameter: Post-Treatment Value: Re-Water vs. No Drought
  misc_feature: MA Experiment 20001558 PARAMETER Experiment Name: At_Drought_Soil_Dry_P Parameter: Timepoint (day) Value: 13
  misc_feature: MA Experiment 20001558 PARAMETER Experiment Name: At_Drought_Soil_Dry_P Parameter: Treatment Value: Drought vs. No Drought
  misc_feature: MA Experiment ID: 20001559 Result: Down-regulated in Transcription
  misc_feature: MA Experiment 20001559 PARAMETER Experiment Name: At_Drought_Soil_Dry_P Parameter: Age (day) Value: 28
  misc_feature: MA Experiment 20001559 PARAMETER Experiment Name: At_Drought_Soil_Dry_P Parameter: Organism Value: A. thaliana
  misc_feature: MA Experiment 20001559 PARAMETER Experiment Name: At_Drought_Soil_Dry_P Parameter: Plant Line Value: WS
  misc_feature: MA Experiment 20001559 PARAMETER Experiment Name: At_Drought_Soil_Dry_P Parameter: Post Timepoint (hr) Value: 29
  misc_feature: MA Experiment 20001559 PARAMETER Experiment Name: At_Drought_Soil_Dry_P Parameter: Post-Treatment Value: Re-Water vs. No Drought
  misc_feature: MA Experiment 20001559 PARAMETER Experiment Name: At_Drought_Soil_Dry_P Parameter: Timepoint (day) Value: 14
  misc_feature: MA Experiment 20001559 PARAMETER Experiment Name: At_Drought_Soil_Dry_P Parameter: Treatment Value: Drought vs. No Drought
  misc_feature: MA Experiment ID: 20001762 Result: Up-regulated in Transcription
  misc_feature: MA Experiment 20001762 PARAMETER Experiment Name: At_50mM_NH4NO3_L-to-H_P Parameter: Timepoint (hr) Value: 6
  misc_feature: MA Experiment 20001762 PARAMETER Experiment Name: At_50mM_NH4NO3_L-to-H_P Parameter: Tissue Value: Siliques
  misc_feature: MA Experiment 20001762 PARAMETER Experiment Name: At_50mM_NH4NO3_L-to-H_P Parameter: Treatment Value: 50mM NH4NO3 vs 100mM Mannitol
  misc_feature: MA Experiment ID: 20001904 Result: Down-regulated in Transcription
  misc_feature: MA Experiment 20001904 PARAMETER Experiment Name: At_Drought_Reproduction_P Parameter: Age (day) Value: 37
  misc_feature: MA Experiment 20001904 PARAMETER Experiment Name: At_Drought_Reproduction_P Parameter: Organism Value: A. thaliana
  misc_feature: MA Experiment 20001904 PARAMETER Experiment Name: At_Drought_Reproduction_P Parameter: Plant Line Value: WS
  misc_feature: MA Experiment 20001904 PARAMETER Experiment Name: At_Drought_Reproduction_P Parameter: Timepoint (day) Value: 7
  misc_feature: MA Experiment 20001904 PARAMETER Experiment Name: At_Drought_Reproduction_P Parameter: Tissue Value: Rosettes
  misc_feature: MA Experiment 20001904 PARAMETER Experiment Name: At_Drought_Reproduction_P Parameter: Treatment Value: Drought vs. No Drought
  misc_feature: MA Experiment ID: 20001905 Result: Down-regulated in Transcription
  misc_feature: MA Experiment 20001905 PARAMETER Experiment Name: At_Drought_Reproduction_P Parameter: Age (day) Value: 40
  misc_feature: MA Experiment 20001905 PARAMETER Experiment Name: At_Drought_Reproduction_P Parameter: Organism Value: A. thaliana
  misc_feature: MA Experiment 20001905 PARAMETER Experiment Name: At_Drought_Reproduction_P Parameter: Plant Line Value: WS
  misc_feature: MA Experiment 20001905 PARAMETER Experiment Name: At_Drought_Reproduction_P Parameter: Timepoint (day) Value: 10
  misc_feature: MA Experiment 20001905 PARAMETER Experiment Name: At_Drought_Reproduction_P Parameter: Tissue Value: Rosettes
  misc_feature: MA Experiment 20001905 PARAMETER Experiment Name: At_Drought_Reproduction_P Parameter: Treatment Value: Drought vs. No Drought

SEQ ID NO: 94404 - protein, 310 aa, Arabidopsis thaliana; identical to SEQ ID NO: 90648
  peptide (1)..(310): Ceres Seq. ID no. 12724647
  misc_feature (84)..(307): Pfam Name: Putative undecaprenyl diphosphate synthase Pfam Description: Putative undecaprenyl diphosphate synthase
  misc_feature (1)..(310): Homolog of NCBI NO: 15237748 NR Description: dehydrodolichyl diphosphate synthase (DEDOL-PP putative; protein id: At5g58770.1 [Arabidopsis thaliana] contains similarity to unknown
  misc_feature (61)..(309): Homolog of NCBI NO: 34908428 NR Description: putative undecaprenyl pyrophosphate synthetase
  misc_feature (54)..(308): Homolog of NCBI NO: 18424146 NR Description: dehydrodolichyl diphosphate synthase (DEDOL-PP putative; protein id: At5g58782.1, supported by cDNA: 11295.
  misc_feature (54)..(308): Homolog of NCBI NO: 21618322 NR Description: undecaprenyl pyrophosphate synthetase-like
  misc_feature (45)..(308): Homolog of NCBI NO: 18424144 NR Description: dehydrodolichyl diphosphate synthase (DEDOL-PP putative; protein id: At5g58780.1, supported by cDNA: gi_19699276 thaliana] >gi|19699277|gb|AAL91250.1| AT5g58780/mzn1_230
  misc_feature (52)..(308): Homolog of NCBI NO: 8843800 NR Description: cis-prenyltransferase homolog-like; undecaprenyl
  misc_feature (76)..(308): Homolog of NCBI NO: 18424148 NR Description: dehydrodolichyl diphosphate synthase (DEDOL-PP
  misc_feature (72)..(308): Homolog of NCBI NO: 7447521 NR Description: hypothetical protein At2g23410 [imported] -
  misc_feature (72)..(308): Homolog of NCBI NO: 18400264 NR Description: dehydrodolichyl diphosphate synthase (DEDOL-PP protein id: At2g23410.1, supported by cDNA: gi_6651293
  misc_feature (64)..(306): Homolog of NCBI NO: 17230487 NR Description: undecaprenyl pyrophosphate synthetase [Nostoc sp.

SEQ ID NO: 94405 - protein, 234 aa, Arabidopsis thaliana; identical to SEQ ID NO: 90649
  peptide (1)..(234): Ceres Seq. ID no. 12724648
  misc_feature (8)..(231): Pfam Name: Putative undecaprenyl diphosphate synthase Pfam Description: Putative undecaprenyl diphosphate synthase
  misc_feature (1)..(234): Homolog of NCBI NO: 15237748 NR Description: dehydrodolichyl diphosphate synthase (DEDOL-PP putative; protein id: At5g58770.1 [Arabidopsis thaliana] contains similarity to unknown
  misc_feature (1)..(233): Homolog of NCBI NO: 34908428 NR Description: putative undecaprenyl pyrophosphate synthetase
  misc_feature (1)..(232): Homolog of NCBI NO: 18424146 NR Description: dehydrodolichyl diphosphate synthase (DEDOL-PP putative; protein id: At5g58782.1, supported by cDNA: 11295.
  misc_feature (1)..(232): Homolog of NCBI NO: 21618322 NR Description: undecaprenyl pyrophosphate synthetase-like
  misc_feature (1)..(232): Homolog of NCBI NO: 18424144 NR Description: dehydrodolichyl diphosphate synthase (DEDOL-PP putative; protein id: At5g58780.1, supported by cDNA: gi_19699276 thaliana] >gi|19699277|gb|AAL91250.1| AT5g58780/mzn1_230
  misc_feature (1)..(232): Homolog of NCBI NO: 8843800 NR Description: cis-prenyltransferase homolog-like; undecaprenyl
  misc_feature (1)..(232): Homolog of NCBI NO: 18424148 NR Description: dehydrodolichyl diphosphate synthase (DEDOL-PP
  misc_feature (1)..(232): Homolog of NCBI NO: 7447521 NR Description: hypothetical protein At2g23410 [imported] -
  misc_feature (1)..(232): Homolog of NCBI NO: 18400264 NR Description: dehydrodolichyl diphosphate synthase (DEDOL-PP protein id: At2g23410.1, supported by cDNA: gi_6651293
  misc_feature (1)..(230): Homolog of NCBI NO: 17230487 NR Description: undecaprenyl pyrophosphate synthetase [Nostoc sp.

SEQ ID NO: 94406 - protein, 226 aa, Arabidopsis thaliana; identical to SEQ ID NO: 90650
  peptide (1)..(226): Ceres Seq. ID no. 12724649
  misc_feature (1)..(223): Pfam Name: Putative undecaprenyl diphosphate synthase Pfam Description: Putative undecaprenyl diphosphate synthase
  misc_feature (1)..(226): Homolog of NCBI NO: 15237748 NR Description: dehydrodolichyl diphosphate synthase (DEDOL-PP putative; protein id: At5g58770.1 [Arabidopsis thaliana] contains similarity to unknown
  misc_feature (1)..(225): Homolog of NCBI NO: 34908428 NR Description: putative undecaprenyl pyrophosphate synthetase
  misc_feature (1)..(224): Homolog of NCBI NO: 18424146 NR Description: dehydrodolichyl diphosphate synthase (DEDOL-PP putative; protein id: At5g58782.1, supported by cDNA: 11295.
  misc_feature (1)..(224): Homolog of NCBI NO: 21618322 NR Description: undecaprenyl pyrophosphate synthetase-like
  misc_feature (1)..(224): Homolog of NCBI NO: 18424144 NR Description: dehydrodolichyl diphosphate synthase (DEDOL-PP putative; protein id: At5g58780.1, supported by cDNA: gi_19699276 thaliana] >gi|19699277|gb|AAL91250.1| AT5g58780/mzn1_230
  misc_feature (1)..(224): Homolog of NCBI NO: 8843800 NR Description: cis-prenyltransferase homolog-like; undecaprenyl
  misc_feature (1)..(224): Homolog of NCBI NO: 18424148 NR Description: dehydrodolichyl diphosphate synthase (DEDOL-PP
  misc_feature (1)..(224): Homolog of NCBI NO: 7447521 NR Description: hypothetical protein At2g23410 [imported] -
  misc_feature (1)..(224): Homolog of NCBI NO: 18400264 NR Description: dehydrodolichyl diphosphate synthase (DEDOL-PP protein id: At2g23410.1, supported by cDNA: gi_6651293
  misc_feature (1)..(222): Homolog of NCBI NO: 17230487 NR Description: undecaprenyl pyrophosphate synthetase [Nostoc sp.

SEQ ID NO: 94407 - DNA, 735 bp, Arabidopsis thaliana; identical to SEQ ID NO: 90651
  misc_feature (1)..(735): Ceres Seq. ID no. 12724654
  misc_feature: MA Experiment ID: 20000171 Result: Up-regulated in Transcription
  misc_feature: MA Experiment 20000171 PARAMETER Experiment Name: At_42deg_Heat_P Parameter: Age (day) Value: 14
  misc_feature: MA Experiment 20000171 PARAMETER Experiment Name: At_42deg_Heat_P Parameter: Organism Value: A. thaliana
  misc_feature: MA Experiment 20000171 PARAMETER Experiment Name: At_42deg_Heat_P Parameter: Plant Line Value: WS
  misc_feature: MA Experiment 20000171 PARAMETER Experiment Name: At_42deg_Heat_P Parameter: Temperature (deg C) Value: 42 vs. 22
  misc_feature: MA Experiment 20000171 PARAMETER Experiment Name: At_42deg_Heat_P Parameter: Timepoint (hr) Value: 1
  misc_feature: MA Experiment 20000171 PARAMETER Experiment Name: At_42deg_Heat_P Parameter: Tissue Value: Aerial
  misc_feature: MA Experiment ID: 20000185 Result: Up-regulated in Transcription
  misc_feature: MA Experiment 20000185 PARAMETER Experiment Name: At_Roots__P Parameter: Age (day) Value: 7 vs. 21
  misc_feature: MA Experiment 20000185 PARAMETER Experiment Name: At_Roots__P Parameter: Organism Value: A. thaliana
  misc_feature: MA Experiment 20000185 PARAMETER Experiment Name: At_Roots__P Parameter: Tissue Value: Roots vs. Whole Plant
  misc_feature: MA Experiment ID: 20000227 Result: Up-regulated in Transcription
  misc_feature: MA Experiment 20000227 PARAMETER Experiment Name: At_Root-Tips-vs-Tops_P Parameter: Tissue Value: Root Tips vs. Root Tops

SEQ ID NO: 94408 - protein, 244 aa, Arabidopsis thaliana; identical to SEQ ID NO: 69923
  peptide (1)..(244): Ceres Seq. ID no. 12724655
  misc_feature (19)..(242): Pfam Name: Putative undecaprenyl diphosphate synthase Pfam Description: Putative undecaprenyl diphosphate synthase
  misc_feature (1)..(244): Homolog of NCBI NO: 8843800 NR Description: cis-prenyltransferase homolog-like; undecaprenyl
  misc_feature (1)..(244): Homolog of NCBI NO: 18424148 NR Description: dehydrodolichyl diphosphate synthase (DEDOL-PP
  misc_feature (9)..(244): Homolog of NCBI NO: 18424144 NR Description: dehydrodolichyl diphosphate synthase (DEDOL-PP putative; protein id: At5g58780.1, supported by cDNA: gi_19699276 thaliana] >gi|19699277|gb|AAL91250.1| AT5g58780/mzn1_230
  misc_feature (9)..(244): Homolog of NCBI NO: 18424146 NR Description: dehydrodolichyl diphosphate synthase (DEDOL-PP putative; protein id: At5g58782.1, supported by cDNA: 11295.
  misc_feature (9)..(244): Homolog of NCBI NO: 21618322 NR Description: undecaprenyl pyrophosphate synthetase-like
  misc_feature (9)..(244): Homolog of NCBI NO: 7447521 NR Description: hypothetical protein At2g23410 [imported] -
  misc_feature (9)..(244): Homolog of NCBI NO: 18400264 NR Description: dehydrodolichyl diphosphate synthase (DEDOL-PP protein id: At2g23410.1, supported by cDNA: gi_6651293
  misc_feature (20)..(244): Homolog of NCBI NO: 8843798 NR Description: undecaprenyl pyrophosphate synthetase-like
  misc_feature (12)..(244): Homolog of NCBI NO: 8843799 NR Description: undecaprenyl pyrophosphate synthetase-like
  misc_feature (11)..(243): Homolog of NCBI NO: 15237748 NR Description: dehydrodolichyl diphosphate synthase (DEDOL-PP putative; protein id: At5g58770.1 [Arabidopsis thaliana] contains similarity to unknown

SEQ ID NO: 94409 - protein, 233 aa, Arabidopsis thaliana; identical to SEQ ID NO: 69924
  peptide (1)..(233): Ceres Seq. ID no. 12724656
  misc_feature (8)..(231): Pfam Name: Putative undecaprenyl diphosphate synthase Pfam Description: Putative undecaprenyl diphosphate synthase
  misc_feature (1)..(233): Homolog of NCBI NO: 8843800 NR Description: cis-prenyltransferase homolog-like; undecaprenyl
  misc_feature (1)..(233): Homolog of NCBI NO: 18424148 NR Description: dehydrodolichyl diphosphate synthase (DEDOL-PP
  misc_feature (1)..(233): Homolog of NCBI NO: 18424144 NR Description: dehydrodolichyl diphosphate synthase (DEDOL-PP putative; protein id: At5g58780.1, supported by cDNA: gi_19699276 thaliana] >gi|19699277|gb|AAL91250.1| AT5g58780/mzn1_230
  misc_feature (1)..(233): Homolog of NCBI NO: 18424146 NR Description: dehydrodolichyl diphosphate synthase (DEDOL-PP putative; protein id: At5g58782.1, supported by cDNA: 11295.
  misc_feature (1)..(233): Homolog of NCBI NO: 21618322 NR Description: undecaprenyl pyrophosphate synthetase-like
  misc_feature (1)..(233): Homolog of NCBI NO: 7447521 NR Description: hypothetical protein At2g23410 [imported] -
  misc_feature (1)..(233): Homolog of NCBI NO: 18400264 NR Description: dehydrodolichyl diphosphate synthase (DEDOL-PP protein id: At2g23410.1, supported by cDNA: gi_6651293
  misc_feature (9)..(233): Homolog of NCBI NO: 8843798 NR Description: undecaprenyl pyrophosphate synthetase-like
  misc_feature (1)..(233): Homolog of NCBI NO: 8843799 NR Description: undecaprenyl pyrophosphate synthetase-like
  misc_feature (1)..(232): Homolog of NCBI NO: 15237748 NR Description: dehydrodolichyl diphosphate synthase (DEDOL-PP putative; protein id: At5g58770.1 [Arabidopsis thaliana] contains similarity to unknown

SEQ ID NO: 94410 - protein, 199 aa, Arabidopsis thaliana; identical to SEQ ID NO: 90654
  peptide (1)..(199): Ceres Seq. ID no. 12724657
  misc_feature (1)..(197): Pfam Name: Putative undecaprenyl diphosphate synthase Pfam Description: Putative undecaprenyl diphosphate synthase
  misc_feature (1)..(199): Homolog of NCBI NO: 8843800 NR Description: cis-prenyltransferase homolog-like; undecaprenyl
  misc_feature (1)..(199): Homolog of NCBI NO: 18424148 NR Description: dehydrodolichyl diphosphate synthase (DEDOL-PP
  misc_feature (1)..(199): Homolog of NCBI NO: 18424144 NR Description: dehydrodolichyl diphosphate synthase (DEDOL-PP putative; protein id: At5g58780.1, supported by cDNA: gi_19699276 thaliana] >gi|19699277|gb|AAL91250.1| AT5g58780/mzn1_230
  misc_feature (1)..(199): Homolog of NCBI NO: 18424146 NR Description: dehydrodolichyl diphosphate synthase (DEDOL-PP putative; protein id: At5g58782.1, supported by cDNA: 11295.
  misc_feature (1)..(199): Homolog of NCBI NO: 21618322 NR Description: undecaprenyl pyrophosphate synthetase-like
  misc_feature (1)..(199): Homolog of NCBI NO: 7447521 NR Description: hypothetical protein At2g23410 [imported] -
  misc_feature (1)..(199): Homolog of NCBI NO: 18400264 NR Description: dehydrodolichyl diphosphate synthase (DEDOL-PP protein id: At2g23410.1, supported by cDNA: gi_6651293
  misc_feature (1)..(199): Homolog of NCBI NO: 8843798 NR Description: undecaprenyl pyrophosphate synthetase-like
  misc_feature (1)..(199): Homolog of NCBI NO: 8843799 NR Description: undecaprenyl pyrophosphate synthetase-like
  misc_feature (1)..(198): Homolog of NCBI NO: 15237748 NR Description: dehydrodolichyl diphosphate synthase (DEDOL-PP putative; protein id: At5g58770.1 [Arabidopsis thaliana] contains similarity to unknown

SEQ ID NO: 94411 - DNA, 561 bp, Arabidopsis thaliana; identical to SEQ ID NO: 90655
  misc_feature (1)..(561): Ceres Seq. ID no. 12724705
  misc_feature: MA Experiment ID: 20001904 Result: Up-regulated in Transcription
  misc_feature: MA Experiment 20001904 PARAMETER Experiment Name: At_Drought_Reproduction_P Parameter: Age (day) Value: 37
  misc_feature: MA Experiment 20001904 PARAMETER Experiment Name: At_Drought_Reproduction_P Parameter: Organism Value: A. thaliana
  misc_feature: MA Experiment 20001904 PARAMETER Experiment Name: At_Drought_Reproduction_P Parameter: Plant Line Value: WS
  misc_feature: MA Experiment 20001904 PARAMETER Experiment Name: At_Drought_Reproduction_P Parameter: Timepoint (day) Value: 7
  misc_feature: MA Experiment 20001904 PARAMETER Experiment Name: At_Drought_Reproduction_P Parameter: Tissue Value: Rosettes
  misc_feature: MA Experiment 20001904 PARAMETER Experiment Name: At_Drought_Reproduction_P Parameter: Treatment Value: Drought vs. No Drought
  misc_feature: MA Experiment ID: 20001905 Result: Up-regulated in Transcription
  misc_feature: MA Experiment 20001905 PARAMETER Experiment Name: At_Drought_Reproduction_P Parameter: Age (day) Value: 40
  misc_feature: MA Experiment 20001905 PARAMETER Experiment Name: At_Drought_Reproduction_P Parameter: Organism Value: A. thaliana
  misc_feature: MA Experiment 20001905 PARAMETER Experiment Name: At_Drought_Reproduction_P Parameter: Plant Line Value: WS
  misc_feature: MA Experiment 20001905 PARAMETER Experiment Name: At_Drought_Reproduction_P Parameter: Timepoint (day) Value: 10
  misc_feature: MA Experiment 20001905 PARAMETER Experiment Name: At_Drought_Reproduction_P Parameter: Tissue Value: Rosettes
  misc_feature: MA Experiment 20001905 PARAMETER Experiment Name: At_Drought_Reproduction_P Parameter: Treatment Value: Drought vs. No Drought

SEQ ID NO: 94412 - protein, 186 aa, Arabidopsis thaliana; identical to SEQ ID NO: 90656
  peptide (1)..(186): Ceres Seq. ID no. 12724706
  misc_feature (113)..(186): Pfam Name: Transcription factor IIA, alpha/beta subunit Pfam Description: Transcription factor IIA, alpha/beta subunit
  misc_feature (1)..(186): Homolog of NCBI NO: 15237841 NR Description: putative protein; protein id: At5g59230.1 thaliana] >gi|9759244|dbj|BAB09768.1| gene_id:MNC17.14~unknown
  misc_feature (116)..(186): Homolog of NCBI NO: 18390773 NR Description: transcription factor IIA large subunit; protein At1g07470.1, supported by cDNA: 19512., supported by cDNA: supported by cDNA: gi_15146225, supported by cDNA: gi_15983369
  misc_feature (4)..(68): Homolog of NCBI NO: 18390773 NR Description: transcription factor IIA large subunit; protein At1g07470.1, supported by cDNA: 19512., supported by cDNA: supported by cDNA: gi_15146225, supported by cDNA: gi_15983369
  misc_feature (116)..(186): Homolog of NCBI NO: 1429226 NR Description: TFIIA [Arabidopsis thaliana]
  misc_feature (4)..(68): Homolog of NCBI NO: 1429226 NR Description: TFIIA [Arabidopsis thaliana]
  misc_feature (116)..(186): Homolog of NCBI NO: 30680148 NR Description: transcription factor IIA large subunit thaliana] >gi|30680153|ref|NP_172228.3| transcription factor IIA subunit [Arabidopsis thaliana] >gi|11358887|pir||T51333
  misc_feature (4)..(68): Homolog of NCBI NO: 30680148 NR Description: transcription factor IIA large subunit thaliana] >gi|30680153|ref|NP_172228.3| transcription factor IIA subunit [Arabidopsis thaliana] >gi|11358887|pir||T51333
  misc_feature (116)..(181): Homolog of NCBI NO: 25406976 NR Description: protein F22G5.18 [imported] - Arabidopsis >gi|8778565|gb|AAF79573.1|AC022464_31 F22G5.18 [Arabidopsis
  misc_feature (4)..(68): Homolog of NCBI NO: 25406976 NR Description: protein F22G5.18 [imported] - Arabidopsis >gi|8778565|gb|AAF79573.1|AC022464_31 F22G5.18 [Arabidopsis
  misc_feature (116)..(179): Homolog of NCBI NO: 25406978 NR Description: protein F22G5.14 [imported] - Arabidopsis >gi|8778543|gb|AAF79551.1|AC022464_9 F22G5.14 [Arabidopsis

SEQ ID NO: 94413 - protein, 143 aa, Arabidopsis thaliana; identical to SEQ ID NO: 90657
  peptide (1)..(143): Ceres Seq. ID no. 12724707
  misc_feature (70)..(143): Pfam Name: Transcription factor IIA, alpha/beta subunit Pfam Description: Transcription factor IIA, alpha/beta subunit
  misc_feature (1)..(143): Homolog of NCBI NO: 15237841 NR Description: putative protein; protein id: At5g59230.1 thaliana] >gi|9759244|dbj|BAB09768.1| gene_id:MNC17.14~unknown
  misc_feature (73)..(143): Homolog of NCBI NO: 18390773 NR Description: transcription factor IIA large subunit; protein At1g07470.1, supported by cDNA: 19512., supported by cDNA: supported by cDNA: gi_15146225, supported by cDNA: gi_15983369
  misc_feature (1)..(25): Homolog of NCBI NO: 18390773 NR Description: transcription factor IIA large subunit; protein At1g07470.1, supported by cDNA: 19512., supported by cDNA: supported by cDNA: gi_15146225, supported by cDNA: gi_15983369
  misc_feature (73)..(143): Homolog of NCBI NO: 1429226 NR Description: TFIIA [Arabidopsis thaliana]
  misc_feature (1)..(25): Homolog of NCBI NO: 1429226 NR Description: TFIIA [Arabidopsis thaliana]
  misc_feature (73)..(143): Homolog of NCBI NO: 30680148 NR Description: transcription factor IIA large subunit thaliana] >gi|30680153|ref|NP_172228.3| transcription factor IIA subunit [Arabidopsis thaliana] >gi|11358887|pir||T51333
  misc_feature (1)..(25): Homolog of NCBI NO: 30680148 NR Description: transcription factor IIA large subunit thaliana] >gi|30680153|ref|NP_172228.3| transcription factor IIA subunit [Arabidopsis thaliana] >gi|11358887|pir||T51333
  misc_feature (73)..(138): Homolog of NCBI NO: 25406976 NR Description: protein F22G5.18 [imported] - Arabidopsis >gi|8778565|gb|AAF79573.1|AC022464_31 F22G5.18 [Arabidopsis
  misc_feature (1)..(25): Homolog of NCBI NO: 25406976 NR Description: protein F22G5.18 [imported] - Arabidopsis >gi|8778565|gb|AAF79573.1|AC022464_31 F22G5.18 [Arabidopsis
  misc_feature (73)..(136): Homolog of NCBI NO: 25406978 NR Description: protein F22G5.14 [imported] - Arabidopsis >gi|8778543|gb|AAF79551.1|AC022464_9 F22G5.14 [Arabidopsis

SEQ ID NO: 94414 - protein, 138 aa, Arabidopsis thaliana; identical to SEQ ID NO: 90658
  peptide (1)..(138): Ceres Seq. ID no. 12724708
  misc_feature (65)..(138): Pfam Name: Transcription factor IIA, alpha/beta subunit Pfam Description: Transcription factor IIA, alpha/beta subunit
  misc_feature (1)..(138): Homolog of NCBI NO: 15237841 NR Description: putative protein; protein id: At5g59230.1 thaliana] >gi|9759244|dbj|BAB09768.1| gene_id:MNC17.14~unknown
  misc_feature (68)..(138): Homolog of NCBI NO: 18390773 NR Description: transcription factor IIA large subunit; protein At1g07470.1, supported by cDNA: 19512., supported by cDNA: supported by cDNA: gi_15146225, supported by cDNA: gi_15983369
  misc_feature (1)..(20): Homolog of NCBI NO: 18390773 NR Description: transcription factor IIA large subunit; protein At1g07470.1, supported by cDNA: 19512., supported by cDNA: supported by cDNA: gi_15146225, supported by cDNA: gi_15983369
  misc_feature (68)..(138): Homolog of NCBI NO: 1429226 NR Description: TFIIA [Arabidopsis thaliana]
  misc_feature (1)..(20): Homolog of NCBI NO: 1429226 NR Description: TFIIA [Arabidopsis thaliana]
  misc_feature (68)..(138): Homolog of NCBI NO: 30680148 NR Description: transcription factor IIA large subunit thaliana] >gi|30680153|ref|NP_172228.3| transcription factor IIA subunit [Arabidopsis thaliana] >gi|11358887|pir||T51333
  misc_feature (1)..(20): Homolog of NCBI NO: 30680148 NR Description: transcription factor IIA large subunit thaliana] >gi|30680153|ref|NP_172228.3| transcription factor IIA subunit [Arabidopsis thaliana] >gi|11358887|pir||T51333
  misc_feature (68)..(133): Homolog of NCBI NO: 25406976 NR Description: protein F22G5.18 [imported] - Arabidopsis >gi|8778565|gb|AAF79573.1|AC022464_31 F22G5.18 [Arabidopsis
  misc_feature (1)..(20): Homolog of NCBI NO: 25406976 NR Description: protein F22G5.18 [imported] - Arabidopsis >gi|8778565|gb|AAF79573.1|AC022464_31 F22G5.18 [Arabidopsis
  misc_feature (68)..(131): Homolog of NCBI NO: 25406978 NR Description: protein F22G5.14 [imported] - Arabidopsis >gi|8778543|gb|AAF79551.1|AC022464_9 F22G5.14 [Arabidopsis

SEQ ID NO: 94415 - DNA, 2025 bp, Arabidopsis thaliana; identical to SEQ ID NO: 90659
  misc_feature (1)..(2025): Ceres Seq. ID no. 12724712
  misc_feature: MA Experiment ID: 20000227 Result: Down-regulated in Transcription
  misc_feature: MA Experiment 20000227 PARAMETER Experiment Name: At_Root-Tips-vs-Tops_P Parameter: Tissue Value: Root Tips vs. Root Tops
  misc_feature: MA Experiment ID: 20000439 Result: Up-regulated in Transcription
  misc_feature: MA Experiment 20000439 PARAMETER Experiment Name: At_Roots__P Parameter: Age (day) Value: 14 vs. 21
  misc_feature: MA Experiment 20000439 PARAMETER Experiment Name: At_Roots__P Parameter: Organism Value: A. thaliana
  misc_feature: MA Experiment 20000439 PARAMETER Experiment Name: At_Roots__P Parameter: Tissue Value: Roots vs. Whole Plant

SEQ ID NO: 94416 - protein, 674 aa, Arabidopsis thaliana; identical to SEQ ID NO: 90660
  peptide (1)..(674): Ceres Seq. ID no. 12724713
  misc_feature (290)..(674): Homolog of NCBI NO: 15237850 NR Description: receptor-like protein kinase; protein id:
  misc_feature (1)..(253): Homolog of NCBI NO: 15237850 NR Description: receptor-like protein kinase; protein id:
  misc_feature (364)..(674): Homolog of NCBI NO: 9759248 NR Description: receptor-like protein kinase-like protein
  misc_feature (1)..(277): Homolog of NCBI NO: 9759248 NR Description: receptor-like protein kinase-like protein
  misc_feature (24)..(674): Homolog of NCBI NO: 15230694 NR Description: receptor-like protein kinase; protein id:
  misc_feature (3)..(674): Homolog of NCBI NO: 15239260 NR Description: receptor like protein kinase; protein id:
  misc_feature (12)..(674): Homolog of NCBI NO: 15239268 NR Description: receptor-like protein kinase; protein id:
  misc_feature (231)..(674): Homolog of NCBI NO: 34395078 NR Description: putative receptor kinase Lecrk [Oryza sativa
  misc_feature (28)..(287): Homolog of NCBI NO: 34395078 NR Description: putative receptor kinase Lecrk [Oryza sativa
  misc_feature (18)..(674): Homolog of NCBI NO: 15230670 NR Description: receptor-like protein kinase; protein id:

SEQ ID NO: 94417 - protein, 630 aa, Arabidopsis thaliana; identical to SEQ ID NO: 90661
  peptide (1)..(630): Ceres Seq. ID no. 12724714
  misc_feature (246)..(630): Homolog of NCBI NO: 15237850 NR Description: receptor-like protein kinase; protein id:
  misc_feature (1)..(209): Homolog of NCBI NO: 15237850 NR Description: receptor-like protein kinase; protein id:
  misc_feature (320)..(630): Homolog of NCBI NO: 9759248 NR Description: receptor-like protein kinase-like protein
  misc_feature (1)..(233): Homolog of NCBI NO: 9759248 NR Description: receptor-like protein kinase-like protein
  misc_feature (1)..(630): Homolog of NCBI NO: 15230694 NR Description: receptor-like protein kinase; protein id:
  misc_feature (1)..(630): Homolog of NCBI NO: 15239260 NR Description: receptor like protein kinase; protein id:
  misc_feature (1)..(630): Homolog of NCBI NO: 15239268 NR Description: receptor-like protein kinase; protein id:
  misc_feature (187)..(630): Homolog of NCBI NO: 34395078 NR Description: putative receptor kinase Lecrk [Oryza sativa
  misc_feature (1)..(243): Homolog of NCBI NO: 34395078 NR Description: putative receptor kinase Lecrk [Oryza sativa
  misc_feature (1)..(630): Homolog of NCBI NO: 15230670 NR Description: receptor-like protein kinase; protein id:

SEQ ID NO: 94418 - protein, 571 aa, Arabidopsis thaliana; identical to SEQ ID NO: 90662
  peptide (1)..(571): Ceres Seq. ID no. 12724715
  misc_feature (187)..(571): Homolog of NCBI NO: 15237850 NR Description: receptor-like protein kinase; protein id:
  misc_feature (1)..(150): Homolog of NCBI NO: 15237850 NR Description: receptor-like protein kinase; protein id:
  misc_feature (261)..(571): Homolog of NCBI NO: 9759248 NR Description: receptor-like protein kinase-like protein
  misc_feature (1)..(174): Homolog of NCBI NO: 9759248 NR Description: receptor-like protein kinase-like protein
  misc_feature (1)..(571): Homolog of NCBI NO: 15230694 NR Description: receptor-like protein kinase; protein id:
  misc_feature (1)..(571): Homolog of NCBI NO: 15239260 NR Description: receptor like protein kinase; protein id:
  misc_feature (1)..(571): Homolog of NCBI NO: 15239268 NR Description: receptor-like protein kinase; protein id:
  misc_feature (128)..(571): Homolog of NCBI NO: 34395078 NR Description: putative receptor kinase Lecrk [Oryza sativa
  misc_feature (1)..(184): Homolog of NCBI NO: 34395078 NR Description: putative receptor kinase Lecrk [Oryza sativa
  misc_feature (1)..(571): Homolog of NCBI NO: 15230670 NR Description: receptor-like protein kinase; protein id:

SEQ ID NO: 94419 - DNA, 801 bp, Arabidopsis thaliana; identical to SEQ ID NO: 90663
  misc_feature (1)..(801): Ceres Seq. ID no. 12724740
  misc_feature: MA Experiment ID: 20000182 Result: Up-regulated in Transcription
  misc_feature: MA Experiment 20000182 PARAMETER Experiment Name: At_2mM_SA_P Parameter: Age (day) Value: 14
  misc_feature: MA Experiment 20000182 PARAMETER Experiment Name: At_2mM_SA_P Parameter: Organism Value: A. thaliana
  misc_feature: MA Experiment 20000182 PARAMETER Experiment Name: At_2mM_SA_P Parameter: Plant Line Value: WS
  misc_feature: MA Experiment 20000182 PARAMETER Experiment Name: At_2mM_SA_P Parameter: Timepoint (hr) Value: 6
  misc_feature: MA Experiment 20000182 PARAMETER Experiment Name: At_2mM_SA_P Parameter: Tissue Value: Aerial
  misc_feature: MA Experiment 20000182 PARAMETER Experiment Name: At_2mM_SA_P Parameter: Treatment Value: 2mM SA vs. No Treatment
  misc_feature: MA Experiment ID: 20000185 Result: Up-regulated in Transcription
  misc_feature: MA Experiment 20000185 PARAMETER Experiment Name: At_Roots__P Parameter: Age (day) Value: 7 vs. 21
  misc_feature: MA Experiment 20000185 PARAMETER Experiment Name: At_Roots__P Parameter: Organism Value: A. thaliana
  misc_feature: MA Experiment 20000185 PARAMETER Experiment Name: At_Roots__P Parameter: Tissue Value: Roots vs. Whole Plant
  misc_feature: MA Experiment ID: 20000437 Result: Up-regulated in Transcription
  misc_feature: MA Experiment 20000437 PARAMETER Experiment Name: At_Drought_P Parameter: Age (day) Value: 8
  misc_feature: MA Experiment 20000437 PARAMETER Experiment Name: At_Drought_P Parameter: Organism Value: A. thaliana
  misc_feature: MA Experiment 20000437 PARAMETER Experiment Name: At_Drought_P Parameter: Plant Line Value: WS
  misc_feature: MA Experiment 20000437 PARAMETER Experiment Name: At_Drought_P Parameter: Timepoint (hr) Value: 24
  misc_feature: MA Experiment 20000437 PARAMETER Experiment Name: At_Drought_P Parameter: Tissue Value: Whole Plant
  misc_feature: MA Experiment 20000437 PARAMETER Experiment Name: At_Drought_P Parameter: Treatment Value: Drought vs. No Drought
  misc_feature: MA Experiment ID: 20000439 Result: Up-regulated in Transcription
  misc_feature: MA Experiment 20000439 PARAMETER Experiment Name: At_Roots__P Parameter: Age (day) Value: 14 vs. 21
  misc_feature: MA Experiment 20000439 PARAMETER Experiment Name: At_Roots__P Parameter: Organism Value: A. thaliana
  misc_feature: MA Experiment 20000439 PARAMETER Experiment Name: At_Roots__P Parameter: Tissue Value: Roots vs. Whole Plant

SEQ ID NO: 94420 - protein, 266 aa, Arabidopsis thaliana; identical to SEQ ID NO: 90664
  peptide (1)..(266): Ceres Seq. ID no. 12724741
  misc_feature (11)..(215): Pfam Name: haloacid dehalogenase-like hydrolase Pfam Description: haloacid dehalogenase-like hydrolase
  misc_feature (1)..(266): Homolog of NCBI NO: 8885554 NR Description: ripening-related protein-like; hydrolase-like
  misc_feature (1)..(266): Homolog of NCBI NO: 15238429 NR Description: putative ripening-related protein - like; protein
  misc_feature (3)..(147): Homolog of NCBI NO: 7406669 NR Description: putative ripening-related protein [Vitis vinifera]
  misc_feature (161)..(266): Homolog of NCBI NO: 7406669 NR Description: putative ripening-related protein [Vitis vinifera]
  misc_feature (1)..(266): Homolog of NCBI NO: 15241720 NR Description: putative protein; protein id: At5g02230.1, by cDNA: 36724. [Arabidopsis thaliana] >gi|11358409|pir||T48244
  misc_feature (1)..(266): Homolog of NCBI NO: 21593165 NR Description: unknown [Arabidopsis thaliana]
  misc_feature (3)..(153): Homolog of NCBI NO: 30697234 NR Description: haloacid dehalogenase-like hydrolase family
  misc_feature (161)..(262): Homolog of NCBI NO: 30697234 NR Description: haloacid dehalogenase-like hydrolase family
  misc_feature (3)..(153): Homolog of NCBI NO: 21618155 NR Description: putative ripening-related protein-like
  misc_feature (161)..(262): Homolog of NCBI NO: 21618155 NR Description: putative ripening-related protein-like

SEQ ID NO: 94421 - protein, 226 aa, Arabidopsis thaliana; identical to SEQ ID NO: 90665
  peptide (1)..(226): Ceres Seq. ID no. 12724742
  misc_feature (1)..(175): Pfam Name: haloacid dehalogenase-like hydrolase Pfam Description: haloacid dehalogenase-like hydrolase
  misc_feature (1)..(226): Homolog of NCBI NO: 8885554 NR Description: ripening-related protein-like; hydrolase-like
  misc_feature (1)..(226): Homolog of NCBI NO: 15238429 NR Description: putative ripening-related protein - like; protein
  misc_feature (1)..(107): Homolog of NCBI NO: 7406669 NR Description: putative ripening-related protein [Vitis vinifera]
  misc_feature (121)..(226): Homolog of NCBI NO: 7406669 NR Description: putative ripening-related protein [Vitis vinifera]
  misc_feature (1)..(226): Homolog of NCBI NO: 15241720 NR Description: putative protein; protein id: At5g02230.1, by cDNA: 36724. [Arabidopsis thaliana] >gi|11358409|pir||T48244
  misc_feature (1)..(226): Homolog of NCBI NO: 21593165 NR Description: unknown [Arabidopsis thaliana]
  misc_feature (1)..(113): Homolog of NCBI NO: 30697234 NR Description: haloacid dehalogenase-like hydrolase family
  misc_feature (121)..(222): Homolog of NCBI NO: 30697234 NR Description: haloacid dehalogenase-like hydrolase family
  misc_feature (1)..(113): Homolog of NCBI NO: 21618155 NR Description: putative ripening-related protein-like
  misc_feature (121)..(222): Homolog of NCBI NO: 21618155 NR Description: putative ripening-related protein-like

SEQ ID NO: 94422 - protein, 200 aa, Arabidopsis thaliana; identical to SEQ ID NO: 90666
  peptide (1)..(200): Ceres Seq. ID no. 12724743
  misc_feature (1)..(149): Pfam Name: haloacid dehalogenase-like hydrolase Pfam Description: haloacid dehalogenase-like hydrolase
  misc_feature (1)..(200): Homolog of NCBI NO: 8885554 NR Description: ripening-related protein-like; hydrolase-like
  misc_feature (1)..(200): Homolog of NCBI NO: 15238429 NR Description: putative ripening-related protein - like; protein
  misc_feature (1)..(81): Homolog of NCBI NO: 7406669 NR Description: putative ripening-related protein [Vitis vinifera]
  misc_feature (95)..(200): Homolog of NCBI NO: 7406669 NR Description: putative ripening-related protein [Vitis vinifera]
  misc_feature (1)..(200): Homolog of NCBI NO: 15241720 NR Description: putative protein; protein id: At5g02230.1, by cDNA: 36724. [Arabidopsis thaliana] >gi|11358409|pir||T48244
  misc_feature (1)..(200): Homolog of NCBI NO: 21593165 NR Description: unknown [Arabidopsis thaliana]
  misc_feature (1)..(87): Homolog of NCBI NO: 30697234 NR Description: haloacid dehalogenase-like hydrolase family
  misc_feature (95)..(196): Homolog of NCBI NO: 30697234 NR Description: haloacid dehalogenase-like hydrolase family
  misc_feature (1)..(87): Homolog of NCBI NO: 21618155 NR Description: putative ripening-related protein-like
  misc_feature (95)..(196): Homolog of NCBI NO: 21618155 NR Description: putative ripening-related protein-like

SEQ ID NO: 94423 - DNA, 1095 bp, Arabidopsis thaliana; identical to SEQ ID NO: 90667
  misc_feature (1)..(1095): Ceres Seq. ID no. 12724748
  misc_feature: MA Experiment ID: 20000179 Result: Down-regulated in Transcription
  misc_feature: MA Experiment 20000179 PARAMETER Experiment Name: At_Germinating_Seeds_P Parameter: Age (hr) Value: 6 vs. 0
  misc_feature: MA Experiment 20000179 PARAMETER Experiment Name: At_Germinating_Seeds_P Parameter: Tissue Value: Germinating Seeds
  misc_feature: MA Experiment ID: 20000180 Result: Down-regulated in Transcription
  misc_feature: MA Experiment 20000180 PARAMETER Experiment Name: At_Germinating_Seeds_P Parameter: Age (hr) Value: 24 vs. 0
  misc_feature: MA Experiment 20000180 PARAMETER Experiment Name: At_Germinating_Seeds_P Parameter: Tissue Value: Germinating Seeds
  misc_feature: MA Experiment ID: 20000185 Result: Up-regulated in Transcription
  misc_feature: MA Experiment 20000185 PARAMETER Experiment Name: At_Roots__P Parameter: Age (day) Value: 7 vs. 21
  misc_feature: MA Experiment 20000185 PARAMETER Experiment Name: At_Roots__P Parameter: Organism Value: A. thaliana
  misc_feature: MA Experiment 20000185 PARAMETER Experiment Name: At_Roots__P Parameter: Tissue Value: Roots vs. Whole Plant
  misc_feature: MA Experiment ID: 20000227 Result: Down-regulated in Transcription
  misc_feature: MA Experiment 20000227 PARAMETER Experiment Name: At_Root-Tips-vs-Tops_P Parameter: Tissue Value: Root Tips vs. Root Tops
  misc_feature: MA Experiment ID: 20000439 Result: Up-regulated in Transcription
  misc_feature: MA Experiment 20000439 PARAMETER Experiment Name: At_Roots__P Parameter: Age (day) Value: 14 vs. 21
  misc_feature: MA Experiment 20000439 PARAMETER Experiment Name: At_Roots__P Parameter: Organism Value: A. thaliana
  misc_feature: MA Experiment 20000439 PARAMETER Experiment Name: At_Roots__P Parameter: Tissue Value: Roots vs. Whole Plant

SEQ ID NO: 94424 - protein, 364 aa, Arabidopsis thaliana; identical to SEQ ID NO: 90668
  peptide (1)..(364): Ceres Seq. ID no. 12724749
  misc_feature (213)..(312): Pfam Name: 2OG-Fe(II) oxygenase superfamily Pfam Description: 2OG-Fe(II) oxygenase superfamily
  misc_feature (1)..(364): Homolog of NCBI NO: 15238458 NR Description: 1-aminocyclopropane-1-carboxylate oxidase - like protein id: At5g59530.1 [Arabidopsis thaliana]
  misc_feature (1)..(364): Homolog of NCBI NO: 15238459 NR Description: 1-aminocyclopropane-1-carboxylate oxidase - like protein id: At5g59540.1, supported by cDNA: gi_15983482
  misc_feature (7)..(364): Homolog of NCBI NO: 15219715 NR Description: putative 1-aminocyclopropane-1-carboxylate protein id: At1g04350.1, supported by cDNA: gi_15292974, by cDNA: gi_21281120 [Arabidopsis thaliana]
  misc_feature (33)..(364): Homolog of NCBI NO: 15219718 NR Description: putative 1-aminocyclopropane-1-carboxylate protein id: At1g04380.1 [Arabidopsis thaliana]
  misc_feature (1)..(364): Homolog of NCBI NO: 15239868 NR Description: 1-aminocyclopropane-1-carboxylate oxidase; id: At5g43440.1, supported by cDNA: gi_15983808 [Arabidopsis
  misc_feature (9)..(364): Homolog of NCBI NO: 30679748 NR Description: 2-oxoglutarate-dependent dioxygenase, putative thaliana] >gi|30102640|gb|AAP21238.1| At1g06620 [Arabidopsis
  misc_feature (1)..(364): Homolog of NCBI NO: 15239870 NR Description: 1-aminocyclopropane-1-carboxylate oxidase; id: At5g43450.1, supported by cDNA: gi_14596164 [Arabidopsis
  misc_feature (1)..(364): Homolog of NCBI NO: 14596165 NR Description: 1-aminocyclopropane-1-carboxylate oxidase
  misc_feature (8)..(364): Homolog of NCBI NO: 5031283 NR Description: unknown [Prunus armeniaca]
  misc_feature (3)..(364): Homolog of NCBI NO: 15221544 NR Description: oxidoreductase, putative; protein id: supported by cDNA: gi_13430545 [Arabidopsis thaliana] putative oxidoreductase [Arabidopsis thaliana]

SEQ ID NO: 94425 - protein, 206 aa, Arabidopsis thaliana; identical to SEQ ID NO: 90669
  peptide (1)..(206): Ceres Seq. ID no. 12724750
  misc_feature (55)..(154): Pfam Name: 2OG-Fe(II) oxygenase superfamily Pfam Description: 2OG-Fe(II) oxygenase superfamily
  misc_feature (1)..(206): Homolog of NCBI NO: 15238458 NR Description: 1-aminocyclopropane-1-carboxylate oxidase - like protein id: At5g59530.1 [Arabidopsis thaliana]
  misc_feature (1)..(206): Homolog of NCBI NO: 15238459 NR Description: 1-aminocyclopropane-1-carboxylate oxidase - like protein id: At5g59540.1, supported by cDNA: gi_15983482
  misc_feature (1)..(206): Homolog of NCBI NO: 15219715 NR Description: putative 1-aminocyclopropane-1-carboxylate protein id: At1g04350.1, supported by cDNA: gi_15292974, by cDNA: gi_21281120 [Arabidopsis thaliana]
  misc_feature (1)..(206): Homolog of NCBI NO: 15219718 NR Description: putative 1-aminocyclopropane-1-carboxylate protein id: At1g04380.1 [Arabidopsis thaliana]
  misc_feature (1)..(206): Homolog of NCBI NO: 15239868 NR Description: 1-aminocyclopropane-1-carboxylate oxidase; id: At5g43440.1, supported by cDNA: gi_15983808 [Arabidopsis
  misc_feature (1)..(206): Homolog of NCBI NO: 30679748 NR Description: 2-oxoglutarate-dependent dioxygenase, putative thaliana] >gi|30102640|gb|AAP21238.1| At1g06620 [Arabidopsis
  misc_feature (1)..(206): Homolog of NCBI NO: 15239870 NR Description: 1-aminocyclopropane-1-carboxylate oxidase; id: At5g43450.1, supported by cDNA: gi_14596164 [Arabidopsis
  misc_feature (1)..(206): Homolog of NCBI NO: 14596165 NR Description: 1-aminocyclopropane-1-carboxylate oxidase
  misc_feature (1)..(206): Homolog of NCBI NO: 5031283 NR Description: unknown [Prunus armeniaca]
  misc_feature (1)..(206): Homolog of NCBI NO: 15221544 NR Description: oxidoreductase, putative; protein id: supported by cDNA: gi_13430545 [Arabidopsis thaliana] putative oxidoreductase [Arabidopsis thaliana]

SEQ ID NO: 94426 - protein, 188 aa, Arabidopsis thaliana; identical to SEQ ID NO: 90670
  peptide (1)..(188): Ceres Seq. ID no. 12724751
  misc_feature (37)..(136): Pfam Name: 2OG-Fe(II) oxygenase superfamily Pfam Description: 2OG-Fe(II) oxygenase superfamily
  misc_feature (1)..(188): Homolog of NCBI NO: 15238458 NR Description: 1-aminocyclopropane-1-carboxylate oxidase - like protein id: At5g59530.1 [Arabidopsis thaliana]
  misc_feature (1)..(188): Homolog of NCBI NO: 15238459 NR Description: 1-aminocyclopropane-1-carboxylate oxidase - like protein id: At5g59540.1, supported by cDNA: gi_15983482
  misc_feature (1)..(188): Homolog of NCBI NO: 15219715 NR Description: putative 1-aminocyclopropane-1-carboxylate protein id: At1g04350.1, supported by cDNA: gi_15292974, by cDNA: gi_21281120 [Arabidopsis thaliana]
  misc_feature (1)..(188): Homolog of NCBI NO: 15219718 NR Description: putative 1-aminocyclopropane-1-carboxylate protein id: At1g04380.1 [Arabidopsis thaliana]
  misc_feature (1)..(188): Homolog of NCBI NO: 15239868 NR Description: 1-aminocyclopropane-1-carboxylate oxidase; id: At5g43440.1, supported by cDNA: gi_15983808 [Arabidopsis
  misc_feature (1)..(188): Homolog of NCBI NO: 30679748 NR Description: 2-oxoglutarate-dependent dioxygenase, putative thaliana] >gi|30102640|gb|AAP21238.1| At1g06620 [Arabidopsis
  misc_feature (1)..(188): Homolog of NCBI NO: 15239870 NR Description: 1-aminocyclopropane-1-carboxylate oxidase; id: At5g43450.1, supported by cDNA: gi_14596164 [Arabidopsis
  misc_feature (1)..(188): Homolog of NCBI NO: 14596165 NR Description: 1-aminocyclopropane-1-carboxylate oxidase
  misc_feature (1)..(188): Homolog of NCBI NO: 5031283 NR Description: unknown [Prunus armeniaca]
  misc_feature (1)..(188): Homolog of NCBI NO: 15221544 NR Description: oxidoreductase, putative; protein id: supported by cDNA: gi_13430545 [Arabidopsis thaliana] putative oxidoreductase [Arabidopsis thaliana]

SEQ ID NO: 94427 - DNA, 1224 bp, Arabidopsis thaliana; identical to SEQ ID NO: 90671
  misc_feature (1)..(1224): Ceres Seq. ID no. 12724752
  misc_feature: MA Experiment ID: 108434 Result: Down-regulated in Transcription
  misc_feature: MA Experiment 108434 PARAMETER Experiment Name: At_Root_Tips_cDNA_P Parameter: Tissue Value: Root Tips
  misc_feature: MA Experiment ID: 108463 Result: Up-regulated in Transcription
  misc_feature: MA Experiment 108463 PARAMETER Experiment Name: At_Germinating_Seeds_cDNA_P Parameter: Age (day) Value: 3 vs. 0
  misc_feature: MA Experiment 108463 PARAMETER Experiment Name: At_Germinating_Seeds_cDNA_P Parameter: Tissue Value: Germinating Seeds
  misc_feature: MA Experiment ID: 108464 Result: Up-regulated in Transcription
  misc_feature: MA Experiment 108464 PARAMETER Experiment Name: At_Germinating_Seeds_cDNA_P Parameter: Age (day) Value: 4 vs. 0
  misc_feature: MA Experiment 108464 PARAMETER Experiment Name: At_Germinating_Seeds_cDNA_P Parameter: Tissue Value: Germinating Seeds
  misc_feature: MA Experiment ID: 108488 Result: Down-regulated in Transcription
  misc_feature: MA Experiment ID: 108573 Result: Up-regulated in Transcription
  misc_feature: MA Experiment 108573 PARAMETER Experiment Name: At_Drought_cDNA_P Parameter: Timepoint (hr) Value: 6
  misc_feature: MA Experiment 108573 PARAMETER Experiment Name: At_Drought_cDNA_P Parameter: Tissue Value: Aerial
  misc_feature: MA Experiment 108573 PARAMETER Experiment Name: At_Drought_cDNA_P Parameter: Treatment Value: Drought vs. No Drought
  misc_feature: MA Experiment ID: 108577 Result: Down-regulated in Transcription
  misc_feature: MA Experiment 108577 PARAMETER Experiment Name: At_42deg_Heat_cDNA_P Parameter: Temperature (deg C) Value: 42 vs. 22
  misc_feature: MA Experiment 108577 PARAMETER Experiment Name: At_42deg_Heat_cDNA_P Parameter: Timepoint (hr) Value: 6
  misc_feature: MA Experiment 108577 PARAMETER Experiment Name: At_42deg_Heat_cDNA_P Parameter: Tissue Value: Aerial
  misc_feature: MA Experiment ID: 108585 Result: Up-regulated in Transcription
  misc_feature: MA Experiment 108585 PARAMETER Experiment Name: At_5mM_NaNP_cDNA_P Parameter: Timepoint (hr) Value: 6
  misc_feature: MA Experiment 108585 PARAMETER Experiment Name: At_5mM_NaNP_cDNA_P Parameter: Tissue Value: Aerial
  misc_feature: MA Experiment 108585 PARAMETER Experiment Name: At_5mM_NaNP_cDNA_P Parameter: Treatment Value: null
  misc_feature: MA Experiment ID: 108595 Result: Up-regulated in Transcription
  misc_feature: MA Experiment 108595 PARAMETER Experiment Name: At_Ler-pi_Ovule_cDNA_P Parameter: Plant Line Value: null
  misc_feature: MA Experiment ID: 108667 Result: Up-regulated in Transcription
  misc_feature: MA Experiment 108667 PARAMETER Experiment Name: At_2mM_SA_cDNA_P Parameter: Plant Line Value: WS
  misc_feature: MA Experiment 108667 PARAMETER Experiment Name: At_2mM_SA_cDNA_P Parameter: Timepoint (hr) Value: 1
  misc_feature: MA Experiment 108667 PARAMETER Experiment Name: At_2mM_SA_cDNA_P Parameter: Treatment Value: 2mM SA vs. No Treatment
  misc_feature: MA Experiment ID: 20000088 Result: Up-regulated in Transcription
  misc_feature: MA Experiment 20000088 PARAMETER Experiment Name: At_100uM_ABA_Mutants_cDNA_P Parameter: Plant Line Value: Landsberg
  misc_feature: MA Experiment 20000088 PARAMETER Experiment Name: At_100uM_ABA_Mutants_cDNA_P Parameter: Timepoint (hr) Value: 6
  misc_feature: MA Experiment 20000088 PARAMETER Experiment Name: At_100uM_ABA_Mutants_cDNA_P Parameter: Tissue Value: Aerial
  misc_feature: MA Experiment 20000088 PARAMETER Experiment Name: At_100uM_ABA_Mutants_cDNA_P Parameter: Treatment Value: 100uM ABA vs. No Treatment
  misc_feature: MA Experiment ID: 20000185 Result: Down-regulated in Transcription
  misc_feature: MA Experiment 20000185 PARAMETER Experiment Name: At_Roots__P Parameter: Age (day) Value: 7 vs. 21
  misc_feature: MA Experiment 20000185 PARAMETER Experiment Name: At_Roots__P Parameter: Organism Value: A. thaliana
  misc_feature: MA Experiment 20000185 PARAMETER Experiment Name: At_Roots__P Parameter: Tissue Value: Roots vs. Whole Plant
  misc_feature: MA Experiment ID: 20000234 Result: Down-regulated in Transcription
  misc_feature: MA Experiment 20000234 PARAMETER Experiment Name: At_Siliques_P Parameter: Age (day) Value: 21
  misc_feature: MA Experiment 20000234 PARAMETER Experiment Name: At_Siliques_P Parameter: Organism Value: A. thaliana
  misc_feature: MA Experiment 20000234 PARAMETER Experiment Name: At_Siliques_P Parameter: Plant Line Value: WS
  misc_feature: MA Experiment 20000234 PARAMETER Experiment Name: At_Siliques_P Parameter: Tissue Value: Less Than 5mm Siliques vs. Whole Plant
  misc_feature: MA Experiment ID: 20000235 Result: Down-regulated in Transcription
  misc_feature: MA Experiment 20000235 PARAMETER Experiment Name: At_Siliques_P Parameter: Age (day) Value: 21
  misc_feature: MA Experiment 20000235 PARAMETER Experiment Name: At_Siliques_P Parameter: Organism Value: A. thaliana
  misc_feature: MA Experiment 20000235 PARAMETER Experiment Name: At_Siliques_P Parameter: Plant Line Value: WS
  misc_feature: MA Experiment 20000235 PARAMETER Experiment Name: At_Siliques_P Parameter: Tissue Value: 5-10mm Siliques vs. Whole Plant
  misc_feature: MA Experiment ID: 20000264 Result: Down-regulated in Transcription
  misc_feature: MA Experiment 20000264 PARAMETER Experiment Name: At_Open_Flower_P Parameter: Age (day) Value: 21
  misc_feature: MA Experiment 20000264 PARAMETER Experiment Name: At_Open_Flower_P Parameter: Plant Line Value: WS
  misc_feature: MA Experiment 20000264 PARAMETER Experiment Name: At_Open_Flower_P Parameter: Tissue Value: Open Flower vs. Whole Plant
  misc_feature: MA Experiment ID: 20000265 Result: Down-regulated in Transcription
  misc_feature: MA Experiment 20000265 PARAMETER Experiment Name: At_Open_Flower_P Parameter: Age (day) Value: 21
  misc_feature: MA Experiment 20000265 PARAMETER Experiment Name: At_Open_Flower_P Parameter: Plant Line Value: WS
  misc_feature: MA Experiment 20000265 PARAMETER Experiment Name: At_Open_Flower_P Parameter: Tissue Value: Closed Flower vs. Whole Plant
  misc_feature: MA Experiment ID: 20000286 Result: Down-regulated in Transcription
  misc_feature: MA Experiment 20000286 PARAMETER Experiment Name: At_Open_Flower_P Parameter: Age (day) Value: 21
  misc_feature: MA Experiment 20000286 PARAMETER Experiment Name: At_Open_Flower_P Parameter: Plant Line Value: WS
  misc_feature: MA Experiment 20000286 PARAMETER Experiment Name: At_Open_Flower_P Parameter: Tissue Value: Half Open vs. Whole Plant
  misc_feature: MA Experiment ID: 20000439 Result: Down-regulated in Transcription
  misc_feature: MA Experiment 20000439 PARAMETER Experiment Name: At_Roots__P Parameter: Age (day) Value: 14 vs. 21
  misc_feature: MA Experiment 20000439 PARAMETER Experiment Name: At_Roots__P Parameter: Organism Value: A. thaliana
  misc_feature: MA Experiment 20000439 PARAMETER Experiment Name: At_Roots__P Parameter: Tissue Value: Roots vs. Whole Plant
  misc_feature: MA Experiment ID: 20000460 Result: Up-regulated in Transcription
  misc_feature: MA Experiment 20000460 PARAMETER Experiment Name: At_10percent_PEG_P Parameter: Age (day) Value: 12
  misc_feature: MA Experiment 20000460 PARAMETER Experiment Name: At_10percent_PEG_P Parameter: Organism Value: A. thaliana
  misc_feature: MA Experiment 20000460 PARAMETER Experiment Name: At_10percent_PEG_P Parameter: Plant Line Value: WS
  misc_feature: MA Experiment 20000460 PARAMETER Experiment Name: At_10percent_PEG_P Parameter: Timepoint (day) Value: 12
  misc_feature: MA Experiment 20000460 PARAMETER Experiment Name: At_10percent_PEG_P Parameter: Tissue Value: Whole Plant
  misc_feature: MA Experiment 20000460 PARAMETER Experiment Name: At_10percent_PEG_P Parameter: Treatment Value: 10percent PEG vs. No Treatment
  misc_feature: MA Experiment ID: 20000527 Result: Up-regulated in Transcription
  misc_feature: MA Experiment 20000527 PARAMETER Experiment Name: At_10percent_PEG_P Parameter: Age (day) Value: 20
  misc_feature: MA Experiment 20000527 PARAMETER Experiment Name: At_10percent_PEG_P Parameter: Organism Value: A. thaliana
  misc_feature: MA Experiment 20000527 PARAMETER Experiment Name: At_10percent_PEG_P Parameter: Plant Line Value: WS
  misc_feature: MA Experiment 20000527 PARAMETER Experiment Name: At_10percent_PEG_P Parameter: Timepoint (day) Value: 20
  misc_feature: MA Experiment 20000527 PARAMETER Experiment Name: At_10percent_PEG_P Parameter: Tissue Value: Whole Plant
  misc_feature: MA Experiment 20000527 PARAMETER Experiment Name: At_10percent_PEG_P Parameter: Treatment Value: 10percent PEG vs. No Treatment
  misc_feature: MA Experiment ID: 20000794 Result: Down-regulated in Transcription
  misc_feature: MA Experiment 20000794 PARAMETER Experiment Name: At_Petals_P Parameter: Age (day) Value: 23-25 days
  misc_feature: MA Experiment 20000794 PARAMETER Experiment Name: At_Petals_P Parameter: Plant Line Value: WS
  misc_feature: MA Experiment 20000794 PARAMETER Experiment Name: At_Petals_P Parameter: Tissue Value: Petals vs. Whole plant
  misc_feature: MA Experiment ID: 20001247 Result: Up-regulated in Transcription
  misc_feature: MA Experiment 20001247 PARAMETER Experiment Name: At_Far-red-induction_P Parameter: Age (day) Value: 7
  misc_feature: MA Experiment 20001247 PARAMETER Experiment Name: At_Far-red-induction_P Parameter: Light Value: Far-red vs. White
  misc_feature: MA Experiment 20001247 PARAMETER Experiment Name: At_Far-red-induction_P Parameter: Organism Value: A. thaliana
  misc_feature: MA Experiment 20001247 PARAMETER Experiment Name: At_Far-red-induction_P Parameter: Plant Line Value: Columbia
  misc_feature: MA Experiment 20001247 PARAMETER Experiment Name: At_Far-red-induction_P Parameter: Timepoint (hr) Value: 1
  misc_feature: MA Experiment 20001247 PARAMETER Experiment Name: At_Far-red-induction_P Parameter: Tissue Value: Whole Plant

SEQ ID NO: 94428 - protein, 407 aa, Arabidopsis thaliana; identical to SEQ ID NO: 35169
  peptide (1)..(407): Ceres Seq. ID no. 12724753
  misc_feature (199)..(239): Pfam Name: Zinc finger, C3HC4 type (RING finger) Pfam Description: Zinc finger, C3HC4 type (RING finger)
  misc_feature (1)..(407): Homolog of NCBI NO: 8885559 NR Description: emb|CAB62332.1~gene_id:F2O15.22~strong similarity
  misc_feature (1)..(407): Homolog of NCBI NO: 18424254 NR Description: putative protein; protein id: At5g59550.1, by cDNA: gi_15450686, supported by cDNA: gi_17380611 [Arabidopsis >gi|15450687|gb|AAK96615.1| AT5g59550/f2o15_210 [Arabidopsis
  misc_feature (3)..(392): Homolog of NCBI NO: 15232595 NR Description: putative protein; protein id: At3g46620.1, by cDNA: gi_20260607 [Arabidopsis thaliana]
  misc_feature (2)..(386): Homolog of NCBI NO: 14719329 NR Description: putative RING-H2 finger protein [Oryza sativa]
  misc_feature (15)..(395): Homolog of NCBI NO: 18405141 NR Description: expressed protein; protein id: At2g39720.1, by cDNA: 253849., supported by cDNA: gi_18377863, supported by gi_20334831, supported by cDNA: gi_3790594 [Arabidopsis thaliana]
  misc_feature (102)..(320): Homolog of NCBI NO: 34902106 NR Description: unknown protein [Oryza sativa (japonica
  misc_feature (138)..(325): Homolog of NCBI NO: 34906008 NR Description: putative RING-H2 finger protein RHC2a [Oryza
  misc_feature (13)..(276): Homolog of NCBI NO: 34908968 NR Description: P0003D09.21 [Oryza sativa (japonica
  misc_feature (14)..(259): Homolog of NCBI NO: 18410530 NR Description: Expressed protein; protein id: At3g56580.1, by cDNA: gi_15028360 [Arabidopsis thaliana] unknown protein [Arabidopsis thaliana]
  misc_feature (17)..(254): Homolog of NCBI NO: 18405518 NR Description: expressed protein; protein id: At2g40830.1,

SEQ ID NO: 94429 - protein, 262 aa, Arabidopsis thaliana; identical to SEQ ID NO: 35170
  peptide (1)..(262): Ceres Seq. ID no. 12724754
  misc_feature (54)..(94): Pfam Name: Zinc finger, C3HC4 type (RING finger) Pfam Description: Zinc finger, C3HC4 type (RING finger)
  misc_feature (1)..(262): Homolog of NCBI NO: 8885559 NR Description: emb|CAB62332.1~gene_id:F2O15.22~strong similarity
  misc_feature (1)..(262): Homolog of NCBI NO: 18424254 NR Description: putative protein; protein id: At5g59550.1, by cDNA: gi_15450686, supported by cDNA: gi_17380611 [Arabidopsis >gi|15450687|gb|AAK96615.1| AT5g59550/f2o15_210 [Arabidopsis
  misc_feature (1)..(247): Homolog of NCBI NO: 15232595 NR Description: putative protein; protein id: At3g46620.1, by cDNA: gi_20260607 [Arabidopsis thaliana]
  misc_feature (1)..(241): Homolog of NCBI NO: 14719329 NR Description: putative RING-H2 finger protein [Oryza sativa]
  misc_feature (1)..(250): Homolog of NCBI NO: 18405141 NR Description: expressed protein; protein id: At2g39720.1, by cDNA: 253849., supported by cDNA: gi_18377863, supported by gi_20334831, supported by cDNA: gi_3790594 [Arabidopsis thaliana]
  misc_feature (1)..(175): Homolog of NCBI NO: 34902106 NR Description: unknown protein [Oryza sativa (japonica
  misc_feature (1)..(180): Homolog of NCBI NO: 34906008 NR Description: putative RING-H2 finger protein RHC2a [Oryza
  misc_feature (1)..(131): Homolog of NCBI NO: 34908968 NR Description: P0003D09.21 [Oryza sativa (japonica
  misc_feature (1)..(114): Homolog of NCBI NO: 18410530 NR Description: Expressed protein; protein id: At3g56580.1, by cDNA: gi_15028360 [Arabidopsis thaliana] unknown protein [Arabidopsis thaliana]
  misc_feature (1)..(109): Homolog of NCBI NO: 18405518 NR Description: expressed protein; protein id: At2g40830.1,

SEQ ID NO: 94430 - DNA, 2823 bp, Arabidopsis thaliana; identical to SEQ ID NO: 90674
  misc_feature (1)..(2823): Ceres Seq. ID no. 12724764
  misc_feature: MA Experiment ID: 20000314 Result: Up-regulated in Transcription
  misc_feature: MA Experiment 20000314 PARAMETER Experiment Name: At_14day_Shoots-Roots_Sub_P Parameter: Age (day) Value: 14
  misc_feature: MA Experiment 20000314 PARAMETER Experiment Name: At_14day_Shoots-Roots_Sub_P Parameter: Organism Value: A. thaliana
  misc_feature: MA Experiment 20000314 PARAMETER Experiment Name: At_14day_Shoots-Roots_Sub_P Parameter: Plant Line Value: WS
  misc_feature: MA Experiment 20000314 PARAMETER Experiment Name: At_14day_Shoots-Roots_Sub_P Parameter: Tissue Value: Roots vs. Whole Plant
  misc_feature: MA Experiment ID: 20000315 Result: Down-regulated in Transcription
  misc_feature: MA Experiment 20000315 PARAMETER Experiment Name: At_14day_Shoots-Roots_Sub_P Parameter: Age (day) Value: 14
  misc_feature: MA Experiment 20000315 PARAMETER Experiment Name: At_14day_Shoots-Roots_Sub_P Parameter: Organism Value: A. thaliana
  misc_feature: MA Experiment 20000315 PARAMETER Experiment Name: At_14day_Shoots-Roots_Sub_P Parameter: Plant Line Value: WS
  misc_feature: MA Experiment 20000315 PARAMETER Experiment Name: At_14day_Shoots-Roots_Sub_P Parameter: Tissue Value: Shoots vs. Whole Plant
  misc_feature: MA Experiment ID: 20000327 Result: Down-regulated in Transcription
  misc_feature: MA Experiment 20000327 PARAMETER Experiment Name: At_42deg_Heat_Sub_P Parameter: Age (day) Value: 14
  misc_feature: MA Experiment 20000327 PARAMETER Experiment Name: At_42deg_Heat_Sub_P Parameter: Organism Value: A. thaliana
  misc_feature: MA Experiment 20000327 PARAMETER Experiment Name: At_42deg_Heat_Sub_P Parameter: Plant Line Value: WS
  misc_feature: MA Experiment 20000327 PARAMETER Experiment Name: At_42deg_Heat_Sub_P Parameter: Temperature (deg C) Value: 42 vs. 22
  misc_feature: MA Experiment 20000327 PARAMETER Experiment Name: At_42deg_Heat_Sub_P Parameter: Timepoint (hr) Value: 1
  misc_feature: MA Experiment 20000327 PARAMETER Experiment Name: At_42deg_Heat_Sub_P Parameter: Tissue Value: Aerial
  misc_feature: MA Experiment ID: 20000328 Result: Down-regulated in Transcription
  misc_feature: MA Experiment 20000328 PARAMETER Experiment Name: At_42deg_Heat_Sub_P Parameter: Age (day) Value: 14
  misc_feature: MA Experiment 20000328 PARAMETER Experiment Name: At_42deg_Heat_Sub_P Parameter: Organism Value: A. thaliana
  misc_feature: MA Experiment 20000328 PARAMETER Experiment Name: At_42deg_Heat_Sub_P Parameter: Plant Line Value: WS
  misc_feature: MA Experiment 20000328 PARAMETER Experiment Name: At_42deg_Heat_Sub_P Parameter: Temperature (deg C) Value: 42 vs. 22
  misc_feature: MA Experiment 20000328 PARAMETER Experiment Name: At_42deg_Heat_Sub_P Parameter: Timepoint (hr) Value: 6
  misc_feature: MA Experiment 20000328 PARAMETER Experiment Name: At_42deg_Heat_Sub_P Parameter: Tissue Value: Aerial
  misc_feature: MA Experiment ID: 20000347 Result: Up-regulated in Transcription
  misc_feature: MA Experiment 20000347 PARAMETER Experiment Name: At_2mM_SA_Sub_P Parameter: Age (day) Value: 14
  misc_feature: MA Experiment 20000347 PARAMETER Experiment Name: At_2mM_SA_Sub_P Parameter: Organism Value: A. thaliana
  misc_feature: MA Experiment 20000347 PARAMETER Experiment Name: At_2mM_SA_Sub_P Parameter: Plant Line Value: WS
  misc_feature: MA Experiment 20000347 PARAMETER Experiment Name: At_2mM_SA_Sub_P Parameter: Timepoint (hr) Value: 6
  misc_feature: MA Experiment 20000347 PARAMETER Experiment Name: At_2mM_SA_Sub_P Parameter: Tissue Value: Aerial
  misc_feature: MA Experiment 20000347 PARAMETER Experiment Name: At_2mM_SA_Sub_P Parameter: Treatment Value: 2mM SA vs. No Treatment

SEQ ID NO: 94431 - protein, 868 aa, Arabidopsis thaliana; identical to SEQ ID NO: 90675
  peptide (1)..(868): Ceres Seq. ID no. 12724765
  misc_feature (1)..(868): Homolog of NCBI NO: 9758834 NR Description: receptor-like protein kinase [Arabidopsis
  misc_feature (1)..(868): Homolog of NCBI NO: 15238493 NR Description: serine/threonine-specific protein kinase - like;
  misc_feature (16)..(868): Homolog of NCBI NO: 9758831 NR Description: receptor-like protein kinase [Arabidopsis
  misc_feature (8)..(496): Homolog of NCBI NO: 9294681 NR Description: receptor-like protein kinase [Arabidopsis
  misc_feature (404)..(868): Homolog of NCBI NO: 9294681 NR Description: receptor-like protein kinase [Arabidopsis
  misc_feature (306)..(608): Homolog of NCBI NO: 15238490 NR Description: leucine-rich repeat transmembrane protein kinase,
  misc_feature (634)..(868): Homolog of NCBI NO: 15238490 NR Description: leucine-rich repeat transmembrane protein kinase,
  misc_feature (178)..(265): Homolog of NCBI NO: 15238490 NR Description: leucine-rich repeat transmembrane protein kinase,
  misc_feature (1)..(79): Homolog of NCBI NO: 15238490 NR Description: leucine-rich repeat transmembrane protein kinase,
  misc_feature (7)..(493): Homolog of NCBI NO: 25387119 NR Description: probable protein kinase [imported] - Arabidopsis >gi|9802783|gb|AAF99852.1|AC015448_2 Putative protein kinase

SEQ ID NO: 94432 - protein, 691 aa, Arabidopsis thaliana; identical to SEQ ID NO: 90676
  peptide (1)..(691): Ceres Seq. ID no. 12724766
  misc_feature (1)..(691): Homolog of NCBI NO: 9758834 NR Description: receptor-like protein kinase [Arabidopsis
  misc_feature (1)..(691): Homolog of NCBI NO: 15238493 NR Description: serine/threonine-specific protein kinase - like;
  misc_feature (1)..(691): Homolog of NCBI NO: 9758831 NR Description: receptor-like protein kinase [Arabidopsis
  misc_feature (1)..(319): Homolog of NCBI NO: 9294681 NR Description: receptor-like protein kinase [Arabidopsis
  misc_feature (227)..(691): Homolog of NCBI NO: 9294681 NR Description: receptor-like protein kinase [Arabidopsis
  misc_feature (129)..(431): Homolog of NCBI NO: 15238490 NR Description: leucine-rich repeat transmembrane protein kinase,
  misc_feature (457)..(691): Homolog of NCBI NO: 15238490 NR Description: leucine-rich repeat transmembrane protein kinase,
  misc_feature (1)..(88): Homolog of NCBI NO: 15238490 NR Description: leucine-rich repeat transmembrane protein kinase,
  misc_feature (1)..(316): Homolog of NCBI NO: 25387119 NR Description: probable protein kinase [imported] - Arabidopsis >gi|9802783|gb|AAF99852.1|AC015448_2 Putative protein kinase
  misc_feature (235)..(691): Homolog of NCBI NO: 25387119 NR Description: probable protein kinase [imported] - Arabidopsis >gi|9802783|gb|AAF99852.1|AC015448_2 Putative protein kinase

SEQ ID NO: 94433 - protein, 648 aa, Arabidopsis thaliana; identical to SEQ ID NO: 90677
  peptide (1)..(648): Ceres Seq. ID no. 12724767
  misc_feature (1)..(648): Homolog of NCBI NO: 9758834 NR Description: receptor-like protein kinase [Arabidopsis
  misc_feature (1)..(648): Homolog of NCBI NO: 15238493 NR Description: serine/threonine-specific protein kinase - like;
  misc_feature (1)..(648): Homolog of NCBI NO: 9758831 NR Description: receptor-like protein kinase [Arabidopsis
  misc_feature (1)..(276): Homolog of NCBI NO: 9294681 NR Description: receptor-like protein kinase [Arabidopsis
  misc_feature (184)..(648): Homolog of NCBI NO: 9294681 NR Description: receptor-like protein kinase [Arabidopsis
  misc_feature (86)..(388): Homolog of NCBI NO: 15238490 NR Description: leucine-rich repeat transmembrane protein kinase,
  misc_feature (414)..(648): Homolog of NCBI NO: 15238490 NR Description: leucine-rich repeat transmembrane protein kinase,
  misc_feature (1)..(45): Homolog of NCBI NO: 15238490 NR Description: leucine-rich repeat transmembrane protein kinase,
  misc_feature (1)..(273): Homolog of NCBI NO: 25387119 NR Description: probable protein kinase [imported] - Arabidopsis >gi|9802783|gb|AAF99852.1|AC015448_2 Putative protein kinase
  misc_feature (192)..(648): Homolog of NCBI NO: 25387119 NR Description: probable protein kinase [imported] - Arabidopsis >gi|9802783|gb|AAF99852.1|AC015448_2 Putative protein kinase

SEQ ID NO: 94434 - DNA, 1323 bp, Arabidopsis thaliana; identical to SEQ ID NO: 90678
  misc_feature (1)..(1323): Ceres Seq. ID no. 12724802
  misc_feature: MA Experiment ID: 20000166 Result: Up-regulated in Transcription
  misc_feature: MA Experiment 20000166 PARAMETER Experiment Name: At_100uM_ABA_P Parameter: Age (day) Value: 14
  misc_feature: MA Experiment 20000166 PARAMETER Experiment Name: At_100uM_ABA_P Parameter: Organism Value: A. thaliana
  misc_feature: MA Experiment 20000166 PARAMETER Experiment Name: At_100uM_ABA_P Parameter: Plant Line Value: WS
  misc_feature: MA Experiment 20000166 PARAMETER Experiment Name: At_100uM_ABA_P Parameter: Timepoint (hr) Value: 1
  misc_feature: MA Experiment 20000166 PARAMETER Experiment Name: At_100uM_ABA_P Parameter: Tissue Value: Aerial
  misc_feature: MA Experiment 20000166 PARAMETER Experiment Name: At_100uM_ABA_P Parameter: Treatment Value: 100uM ABA vs. No Treatment
  misc_feature: MA Experiment ID: 20000173 Result: Up-regulated in Transcription
  misc_feature: MA Experiment 20000173 PARAMETER Experiment Name: At_42deg_Heat_P Parameter: Age (day) Value: 14
  misc_feature: MA Experiment 20000173 PARAMETER Experiment Name: At_42deg_Heat_P Parameter: Organism Value: A. thaliana
  misc_feature: MA Experiment 20000173 PARAMETER Experiment Name: At_42deg_Heat_P Parameter: Plant Line Value: WS
  misc_feature: MA Experiment 20000173 PARAMETER Experiment Name: At_42deg_Heat_P Parameter: Temperature (deg C) Value: 42 vs. 22
  misc_feature: MA Experiment 20000173 PARAMETER Experiment Name: At_42deg_Heat_P Parameter: Timepoint (hr) Value: 6
  misc_feature: MA Experiment 20000173 PARAMETER Experiment Name: At_42deg_Heat_P Parameter: Tissue Value: Aerial
  misc_feature: MA Experiment ID: 20000182 Result: Up-regulated in Transcription
  misc_feature: MA Experiment 20000182 PARAMETER Experiment Name: At_2mM_SA_P Parameter: Age (day) Value: 14
  misc_feature: MA Experiment 20000182 PARAMETER Experiment Name: At_2mM_SA_P Parameter: Organism Value: A. thaliana
  misc_feature: MA Experiment 20000182 PARAMETER Experiment Name: At_2mM_SA_P Parameter: Plant Line Value: WS
  misc_feature: MA Experiment 20000182 PARAMETER Experiment Name: At_2mM_SA_P Parameter: Timepoint (hr) Value: 6
  misc_feature: MA Experiment 20000182 PARAMETER Experiment Name: At_2mM_SA_P Parameter: Tissue Value: Aerial
  misc_feature: MA Experiment 20000182 PARAMETER Experiment Name: At_2mM_SA_P Parameter: Treatment Value: 2mM SA vs. No Treatment
  misc_feature: MA Experiment ID: 20000235 Result: Down-regulated in Transcription
  misc_feature: MA Experiment 20000235 PARAMETER Experiment Name: At_Siliques_P Parameter: Age (day) Value: 21
  misc_feature: MA Experiment 20000235 PARAMETER Experiment Name: At_Siliques_P Parameter: Organism Value: A. thaliana
  misc_feature: MA Experiment 20000235 PARAMETER Experiment Name: At_Siliques_P Parameter: Plant Line Value: WS
  misc_feature: MA Experiment 20000235 PARAMETER Experiment Name: At_Siliques_P Parameter: Tissue Value: 5-10mm Siliques vs. Whole Plant
  misc_feature: MA Experiment ID: 20000265 Result: Down-regulated in Transcription
  misc_feature: MA Experiment 20000265 PARAMETER Experiment Name: At_Open_Flower_P Parameter: Age (day) Value: 21
  misc_feature: MA Experiment 20000265 PARAMETER Experiment Name: At_Open_Flower_P Parameter: Plant Line Value: WS
  misc_feature: MA Experiment 20000265 PARAMETER Experiment Name: At_Open_Flower_P Parameter: Tissue Value: Closed Flower vs. Whole Plant
  misc_feature: MA Experiment ID: 20000286 Result: Down-regulated in Transcription
  misc_feature: MA Experiment 20000286 PARAMETER Experiment Name: At_Open_Flower_P Parameter: Age (day) Value: 21
  misc_feature: MA Experiment 20000286 PARAMETER Experiment Name: At_Open_Flower_P Parameter: Plant Line Value: WS
  misc_feature: MA Experiment 20000286 PARAMETER Experiment Name: At_Open_Flower_P Parameter: Tissue Value: Half Open vs. Whole Plant
  misc_feature: MA Experiment ID: 20001451 Result: Up-regulated in Transcription
  misc_feature: MA Experiment 20001451 PARAMETER Experiment Name: At_Far-red-induction_P Parameter: Age (day) Value: 7
  misc_feature: MA Experiment 20001451 PARAMETER Experiment Name: At_Far-red-induction_P Parameter: Light Value: Far-red vs. White
  misc_feature: MA Experiment 20001451 PARAMETER Experiment Name: At_Far-red-induction_P Parameter: Organism Value: A. thaliana
  misc_feature: MA Experiment 20001451 PARAMETER Experiment Name: At_Far-red-induction_P Parameter: Plant Line Value: Columbia
  misc_feature: MA Experiment 20001451 PARAMETER Experiment Name: At_Far-red-induction_P Parameter: Timepoint (hr) Value: 24
  misc_feature: MA Experiment 20001451 PARAMETER Experiment Name: At_Far-red-induction_P Parameter: Tissue Value: Whole Plant

SEQ ID NO: 94435 - protein, 339 aa, Arabidopsis thaliana; identical to SEQ ID NO: 90679
  peptide (1)..(339): Ceres Seq. ID no. 12724803
  misc_feature (26)..(331): Pfam Name: Cotton fibre expressed protein Pfam Description: Cotton fibre expressed protein
  misc_feature (14)..(339): Homolog of NCBI NO: 15239605 NR Description: cotton fiber expressed protein 1-like protein; id: At5g54300.1, supported by cDNA: gi_20466705 [Arabidopsis
  misc_feature (27)..(337): Homolog of NCBI NO: 34898720 NR Description: putative fiber protein [Oryza sativa (japonica group)] >gi|23617203|dbj|BAC20874.1| putative fiber protein
  misc_feature (29)..(337): Homolog of NCBI NO: 7484716 NR Description: fiber protein 1 [imported] - upland cotton
  misc_feature (11)..(326): Homolog of NCBI NO: 25373435 NR Description: hypothetical protein [imported] - Arabidopsis >gi|5734737|gb|AAD50002.1|AC007259_15 Unknown protein
  misc_feature (20)..(326): Homolog of NCBI NO: 15220310 NR Description: hypothetical protein; protein id: At1g11220.1
  misc_feature (158)..(336): Homolog of NCBI NO: 25373438 NR Description: hypothetical protein F11P17.2 [imported] - thaliana >gi|2443876|gb|AAB71469.1| Hypothetical protein
  misc_feature (158)..(336): Homolog of NCBI NO: 30696552 NR Description: cotton fiber expressed protein -related
  misc_feature (29)..(281): Homolog of NCBI NO: 7484717 NR Description: fiber protein 2 [imported] - upland cotton
  misc_feature (27)..(336): Homolog of NCBI NO: 18391249 NR Description: expressed protein; protein id: At1g11210.1, by cDNA: 37592., supported by cDNA: gi_13358179, supported by gi_15146279, supported by cDNA: gi_19699167 [Arabidopsis
  misc_feature (27)..(336): Homolog of NCBI NO: 21593266 NR Description: unknown [Arabidopsis thaliana]

SEQ ID NO: 94436 - protein, 326 aa, Arabidopsis thaliana; identical to SEQ ID NO: 90680
  peptide (1)..(326): Ceres Seq. ID no. 12724804
  misc_feature (13)..(318): Pfam Name: Cotton fibre expressed protein Pfam Description: Cotton fibre expressed protein
  misc_feature (1)..(326): Homolog of NCBI NO: 15239605 NR Description: cotton fiber expressed protein 1-like protein; id: At5g54300.1, supported by cDNA: gi_20466705 [Arabidopsis
  misc_feature (14)..(324): Homolog of NCBI NO: 34898720 NR Description: putative fiber protein [Oryza sativa (japonica group)] >gi|23617203|dbj|BAC20874.1| putative fiber protein
  misc_feature (16)..(324): Homolog of NCBI NO: 7484716 NR Description: fiber protein 1 [imported] - upland cotton
  misc_feature (1)..(313): Homolog of NCBI NO: 25373435 NR Description: hypothetical protein [imported] - Arabidopsis >gi|5734737|gb|AAD50002.1|AC007259_15 Unknown protein
  misc_feature (7)..(313): Homolog of NCBI NO: 15220310 NR Description: hypothetical protein; protein id: At1g11220.1
  misc_feature (145)..(323): Homolog of NCBI NO: 25373438 NR Description: hypothetical protein F11P17.2 [imported] - thaliana >gi|2443876|gb|AAB71469.1| Hypothetical protein
  misc_feature (145)..(323): Homolog of NCBI NO: 30696552 NR Description: cotton fiber expressed protein -related
  misc_feature (16)..(268): Homolog of NCBI NO: 7484717 NR Description: fiber protein 2 [imported] - upland cotton
  misc_feature (14)..(323): Homolog of NCBI NO: 18391249 NR Description: expressed protein; protein id: At1g11210.1, by cDNA: 37592., supported by cDNA: gi_13358179, supported by gi_15146279, supported by cDNA: gi_19699167 [Arabidopsis
  misc_feature (14)..(323): Homolog of NCBI NO: 21593266 NR Description: unknown [Arabidopsis thaliana]

SEQ ID NO: 94437 - protein, 299 aa, Arabidopsis thaliana; identical to SEQ ID NO: 90681
  peptide (1)..(299): Ceres Seq. ID no. 12724805
  misc_feature (1)..(291): Pfam Name: Cotton fibre expressed protein Pfam Description: Cotton fibre expressed protein
  misc_feature (1)..(299): Homolog of NCBI NO: 15239605 NR Description: cotton fiber expressed protein 1-like protein; id: At5g54300.1, supported by cDNA: gi_20466705 [Arabidopsis
  misc_feature (1)..(297): Homolog of NCBI NO: 34898720 NR Description: putative fiber protein [Oryza sativa (japonica group)] >gi|23617203|dbj|BAC20874.1| putative fiber protein
  misc_feature (1)..(297): Homolog of NCBI NO: 7484716 NR Description: fiber protein 1 [imported] - upland cotton
  misc_feature (1)..(286): Homolog of NCBI NO: 25373435 NR Description: hypothetical protein [imported] - Arabidopsis >gi|5734737|gb|AAD50002.1|AC007259_15 Unknown protein
  misc_feature (1)..(286): Homolog of NCBI NO: 15220310 NR Description: hypothetical protein; protein id: At1g11220.1
  misc_feature (118)..(296): Homolog of NCBI NO: 25373438 NR Description: hypothetical protein F11P17.2 [imported] - thaliana >gi|2443876|gb|AAB71469.1| Hypothetical protein
  misc_feature (118)..(296): Homolog of NCBI NO: 30696552 NR Description: cotton fiber expressed protein -related
  misc_feature (1)..(241): Homolog of NCBI NO: 7484717 NR Description: fiber protein 2 [imported] - upland cotton
  misc_feature (1)..(296): Homolog of NCBI NO: 18391249 NR Description: expressed protein; protein id: At1g11210.1, by cDNA: 37592., supported by cDNA: gi_13358179, supported by gi_15146279, supported by cDNA: gi_19699167 [Arabidopsis
  misc_feature (1)..(296): Homolog of NCBI NO: 21593266 NR Description: unknown [Arabidopsis thaliana]

SEQ ID NO: 94438 - DNA, 879 bp, Arabidopsis thaliana; identical to SEQ ID NO: 90682
  misc_feature (1)..(879): Ceres Seq. ID no. 12724820
  misc_feature: MA Experiment ID: 20000184 Result: Down-regulated in Transcription
  misc_feature: MA Experiment 20000184 PARAMETER Experiment Name: At_Shoots__P Parameter: Age (day) Value: 7
  misc_feature: MA Experiment 20000184 PARAMETER Experiment Name: At_Shoots__P Parameter: Tissue Value: Shoots vs. Whole Plant
  misc_feature: MA Experiment ID: 20000234 Result: Up-regulated in Transcription
  misc_feature: MA Experiment 20000234 PARAMETER Experiment Name: At_Siliques_P Parameter: Age (day) Value: 21
  misc_feature: MA Experiment 20000234 PARAMETER Experiment Name: At_Siliques_P Parameter: Organism Value: A. thaliana
  misc_feature: MA Experiment 20000234 PARAMETER Experiment Name: At_Siliques_P Parameter: Plant Line Value: WS
  misc_feature: MA Experiment 20000234 PARAMETER Experiment Name: At_Siliques_P Parameter: Tissue Value: Less Than 5mm Siliques vs. Whole Plant
  misc_feature: MA Experiment ID: 20000235 Result: Up-regulated in Transcription
  misc_feature: MA Experiment 20000235 PARAMETER Experiment Name: At_Siliques_P Parameter: Age (day) Value: 21
  misc_feature: MA Experiment 20000235 PARAMETER Experiment Name: At_Siliques_P Parameter: Organism Value: A. thaliana
  misc_feature: MA Experiment 20000235 PARAMETER Experiment Name: At_Siliques_P Parameter: Plant Line Value: WS
  misc_feature: MA Experiment 20000235 PARAMETER Experiment Name: At_Siliques_P Parameter: Tissue Value: 5-10mm Siliques vs. Whole Plant
  misc_feature: MA Experiment ID: 20000264 Result: Up-regulated in Transcription
  misc_feature: MA Experiment 20000264 PARAMETER Experiment Name: At_Open_Flower_P Parameter: Age (day) Value: 21
  misc_feature: MA Experiment 20000264 PARAMETER Experiment Name: At_Open_Flower_P Parameter: Plant Line Value: WS
  misc_feature: MA Experiment 20000264 PARAMETER Experiment Name: At_Open_Flower_P Parameter: Tissue Value: Open Flower vs. Whole Plant
  misc_feature: MA Experiment ID: 20000286 Result: Up-regulated in Transcription
  misc_feature: MA Experiment 20000286 PARAMETER Experiment Name: At_Open_Flower_P Parameter: Age (day) Value: 21
  misc_feature: MA Experiment 20000286 PARAMETER Experiment Name: At_Open_Flower_P Parameter: Plant Line Value: WS
  misc_feature: MA Experiment 20000286 PARAMETER Experiment Name: At_Open_Flower_P Parameter: Tissue Value: Half Open vs. Whole Plant
  misc_feature: MA Experiment ID: 20000438 Result: Down-regulated in Transcription
  misc_feature: MA Experiment 20000438 PARAMETER Experiment Name: At_Shoots__P Parameter: Age (day) Value: 14
  misc_feature: MA Experiment 20000438 PARAMETER Experiment Name: At_Shoots__P Parameter: Tissue Value: Shoots vs. Whole Plant
  misc_feature: MA Experiment ID: 20000451 Result: Up-regulated in Transcription
  misc_feature: MA Experiment 20000451 PARAMETER Experiment Name: At_CS6879_Shoots-Roots_P Parameter: Age (day) Value: 14
  misc_feature: MA Experiment 20000451 PARAMETER Experiment Name: At_CS6879_Shoots-Roots_P Parameter: Organism Value: A. thaliana
  misc_feature: MA Experiment 20000451 PARAMETER Experiment Name: At_CS6879_Shoots-Roots_P Parameter: Plant Line Value: CS6879 vs. WS
  misc_feature: MA Experiment 20000451 PARAMETER Experiment Name: At_CS6879_Shoots-Roots_P Parameter: Tissue Value: Roots
  misc_feature: MA Experiment ID: 20000794 Result: Up-regulated in Transcription
  misc_feature: MA Experiment 20000794 PARAMETER Experiment Name: At_Petals_P Parameter: Age (day) Value: 23-25 days
  misc_feature: MA Experiment 20000794 PARAMETER Experiment Name: At_Petals_P Parameter: Plant Line Value: WS
  misc_feature: MA Experiment 20000794 PARAMETER Experiment Name: At_Petals_P Parameter: Tissue Value: Petals vs. Whole plant
  misc_feature: MA Experiment ID: 20001557 Result: Up-regulated in Transcription
  misc_feature: MA Experiment 20001557 PARAMETER Experiment Name: At_Drought_Soil_Dry_P Parameter: Age (day) Value: 27
  misc_feature: MA Experiment 20001557 PARAMETER Experiment Name: At_Drought_Soil_Dry_P Parameter: Organism Value: A. thaliana
  misc_feature: MA Experiment 20001557 PARAMETER Experiment Name: At_Drought_Soil_Dry_P Parameter: Plant Line Value: WS
  misc_feature: MA Experiment 20001557 PARAMETER Experiment Name: At_Drought_Soil_Dry_P Parameter: Post Timepoint (hr) Value: 3
  misc_feature: MA Experiment 20001557 PARAMETER Experiment Name: At_Drought_Soil_Dry_P Parameter: Post-Treatment Value: Re-Water vs. No Drought
  misc_feature: MA Experiment 20001557 PARAMETER Experiment Name: At_Drought_Soil_Dry_P Parameter: Timepoint (day) Value: 13
  misc_feature: MA Experiment 20001557 PARAMETER Experiment Name: At_Drought_Soil_Dry_P Parameter: Treatment Value: Drought vs. No Drought

SEQ ID NO: 94439 - protein, 292 aa, Arabidopsis thaliana; identical to SEQ ID NO: 90683
  peptide (1)..(292): Ceres Seq. ID no. 12724821
  misc_feature (1)..(292): Homolog of NCBI NO: 15239632 NR Description: putative protein; protein id: At5g54400.1 thaliana] >gi|8885583|dbj|BAA97513.1|
  misc_feature (1)..(291): Homolog of NCBI NO: 18400797 NR Description: expressed protein; protein id: At3g15530.1, by cDNA: 15303. [Arabidopsis thaliana] >gi|7021738|gb|AAF35419.1| protein [Arabidopsis thaliana] >gi|15795118|dbj|BAB02382.1|
  misc_feature (69)..(276): Homolog of NCBI NO: 22971588 NR Description: hypothetical protein [Chloroflexus aurantiacus]
  misc_feature (112)..(288): Homolog of NCBI NO: 23127439 NR Description: hypothetical protein [Nostoc punctiforme]

SEQ ID NO: 94440 - protein, 192 aa, Arabidopsis thaliana; identical to SEQ ID NO: 90684
  peptide (1)..(192): Ceres Seq. ID no. 12724822
  misc_feature (1)..(192): Homolog of NCBI NO: 15239632 NR Description: putative protein; protein id: At5g54400.1 thaliana] >gi|8885583|dbj|BAA97513.1|
  misc_feature (1)..(191): Homolog of NCBI NO: 18400797 NR Description: expressed protein; protein id: At3g15530.1, by cDNA: 15303. [Arabidopsis thaliana] >gi|7021738|gb|AAF35419.1| protein [Arabidopsis thaliana] >gi|15795118|dbj|BAB02382.1|
  misc_feature (1)..(176): Homolog of NCBI NO: 22971588 NR Description: hypothetical protein [Chloroflexus aurantiacus]
  misc_feature (12)..(188): Homolog of NCBI NO: 23127439 NR Description: hypothetical protein [Nostoc punctiforme]

SEQ ID NO: 94441 - protein, 188 aa, Arabidopsis thaliana; identical to SEQ ID NO: 90685
  peptide (1)..(188): Ceres Seq. ID no. 12724823
  misc_feature (1)..(188): Homolog of NCBI NO: 15239632 NR Description: putative protein; protein id: At5g54400.1 thaliana] >gi|8885583|dbj|BAA97513.1|
  misc_feature (1)..(187): Homolog of NCBI NO: 18400797 NR Description: expressed protein; protein id: At3g15530.1, by cDNA: 15303. [Arabidopsis thaliana] >gi|7021738|gb|AAF35419.1| protein [Arabidopsis thaliana] >gi|15795118|dbj|BAB02382.1|
  misc_feature (1)..(172): Homolog of NCBI NO: 22971588 NR Description: hypothetical protein [Chloroflexus aurantiacus]
  misc_feature (8)..(184): Homolog of NCBI NO: 23127439 NR Description: hypothetical protein [Nostoc punctiforme]

SEQ ID NO: 94442 - DNA, 1572 bp, Arabidopsis thaliana; identical to SEQ ID NO: 90686
  misc_feature (1)..(1572): Ceres Seq. ID no. 12724855
  misc_feature: MA Experiment ID: 20000264 Result: Up-regulated in Transcription
  misc_feature: MA Experiment 20000264 PARAMETER Experiment Name: At_Open_Flower_P Parameter: Age (day) Value: 21
  misc_feature: MA Experiment 20000264 PARAMETER Experiment Name: At_Open_Flower_P Parameter: Plant Line Value: WS
  misc_feature: MA Experiment 20000264 PARAMETER Experiment Name: At_Open_Flower_P Parameter: Tissue Value: Open Flower vs. Whole Plant
  misc_feature: MA Experiment ID: 20000265 Result: Up-regulated in Transcription
  misc_feature: MA Experiment 20000265 PARAMETER Experiment Name: At_Open_Flower_P Parameter: Age (day) Value: 21
  misc_feature: MA Experiment 20000265 PARAMETER Experiment Name: At_Open_Flower_P Parameter: Plant Line Value: WS
  misc_feature: MA Experiment 20000265 PARAMETER Experiment Name: At_Open_Flower_P Parameter: Tissue Value: Closed Flower vs. Whole Plant
  misc_feature: MA Experiment ID: 20000794 Result: Up-regulated in Transcription
  misc_feature: MA Experiment 20000794 PARAMETER Experiment Name: At_Petals_P Parameter: Age (day) Value: 23-25 days
  misc_feature: MA Experiment 20000794 PARAMETER Experiment Name: At_Petals_P Parameter: Plant Line Value: WS
  misc_feature: MA Experiment 20000794 PARAMETER Experiment Name: At_Petals_P Parameter: Tissue Value: Petals vs. Whole plant

SEQ ID NO: 94443 - protein, 523 aa, Arabidopsis thaliana; identical to SEQ ID NO: 90687
  peptide (1)..(523): Ceres Seq. ID no. 12724856
  misc_feature (1)..(523): Homolog of NCBI NO: 22327832 NR Description: glycosyl hydrolase family 1; protein id:
  misc_feature (5)..(523): Homolog of NCBI NO: 9758949 NR Description: beta-glucosidase [Arabidopsis thaliana]
  misc_feature (30)..(403): Homolog of NCBI NO: 37532728 NR Description: putative beta-glucosidase [Oryza sativa (japonica
  misc_feature (371)..(497): Homolog of NCBI NO: 37532728 NR Description: putative beta-glucosidase [Oryza sativa (japonica
  misc_feature (26)..(493): Homolog of NCBI NO: 22658440 NR Description: beta-glucosidase [Oryza sativa (japonica
  misc_feature (6)..(497): Homolog of NCBI NO: 15222734 NR Description: glycosyl hydrolase family 1; protein id: supported by cDNA: 125606., supported by cDNA: gi_15028208
  misc_feature (30)..(497): Homolog of NCBI NO: 21537259 NR Description: beta-glucosidase, putative [Arabidopsis thaliana]
  misc_feature (30)..(493): Homolog of NCBI NO: 38344468 NR Description: OSJNBa0022H21.3 [Oryza sativa (japonica
  misc_feature (29)..(523): Homolog of NCBI NO: 7435445 NR Description: beta-glucosidase (EC 3.2.1.21) precursor isoform
  misc_feature (29)..(523): Homolog of NCBI NO: 15778634 NR Description: amygdalin hydrolase isoform AH I precursor

SEQ ID NO: 94444 - protein, 519 aa, Arabidopsis thaliana; identical to SEQ ID NO: 90688
  peptide (1)..(519): Ceres Seq. ID no. 12724857
  misc_feature (1)..(519): Homolog of NCBI NO: 22327832 NR Description: glycosyl hydrolase family 1; protein id:
  misc_feature (1)..(519): Homolog of NCBI NO: 9758949 NR Description: beta-glucosidase [Arabidopsis thaliana]
  misc_feature (26)..(399): Homolog of NCBI NO: 37532728 NR Description: putative beta-glucosidase [Oryza sativa (japonica
  misc_feature (367)..(493): Homolog of NCBI NO: 37532728 NR Description: putative beta-glucosidase [Oryza sativa (japonica
  misc_feature (22)..(489): Homolog of NCBI NO: 22658440 NR Description: beta-glucosidase [Oryza sativa (japonica
  misc_feature (2)..(493): Homolog of NCBI NO: 15222734 NR Description: glycosyl hydrolase family 1; protein id: supported by cDNA: 125606., supported by cDNA: gi_15028208
  misc_feature (26)..(493): Homolog of NCBI NO: 21537259 NR Description: beta-glucosidase, putative [Arabidopsis thaliana]
  misc_feature (26)..(489): Homolog of NCBI NO: 38344468 NR Description: OSJNBa0022H21.3 [Oryza sativa (japonica
  misc_feature (25)..(519): Homolog of NCBI NO: 7435445 NR Description: beta-glucosidase (EC 3.2.1.21) precursor isoform
  misc_feature (25)..(519): Homolog of NCBI NO: 15778634 NR Description: amygdalin hydrolase isoform AH I precursor

SEQ ID NO: 94445 - protein, 426 aa, Arabidopsis thaliana; identical to SEQ ID NO: 90689
  peptide (1)..(426): Ceres Seq. ID no. 12724858
  misc_feature (1)..(426): Homolog of NCBI NO: 22327832 NR Description: glycosyl hydrolase family 1; protein id:
  misc_feature (1)..(426): Homolog of NCBI NO: 9758949 NR Description: beta-glucosidase [Arabidopsis thaliana]
  misc_feature (1)..(306): Homolog of NCBI NO: 37532728 NR Description: putative beta-glucosidase [Oryza sativa (japonica
  misc_feature (274)..(400): Homolog of NCBI NO: 37532728 NR Description: putative beta-glucosidase [Oryza sativa (japonica
  misc_feature (1)..(396): Homolog of NCBI NO: 22658440 NR Description: beta-glucosidase [Oryza sativa (japonica
  misc_feature (1)..(400): Homolog of NCBI NO: 15222734 NR Description: glycosyl hydrolase family 1; protein id: supported by cDNA: 125606., supported by cDNA: gi_15028208
  misc_feature (1)..(400): Homolog of NCBI NO: 21537259 NR Description: beta-glucosidase, putative [Arabidopsis thaliana]
  misc_feature (1)..(396): Homolog of NCBI NO: 38344468 NR Description: OSJNBa0022H21.3 [Oryza sativa (japonica
  misc_feature (1)..(426): Homolog of NCBI NO: 7435445 NR Description: beta-glucosidase (EC 3.2.1.21) precursor isoform
  misc_feature (1)..(426): Homolog of NCBI NO: 16757966 NR Description: amygdalin hydrolase isoform AH I precursor

SEQ ID NO: 94446 - DNA, 1721 bp, Arabidopsis thaliana; identical to SEQ ID NO: 90690
  misc_feature (1)..(1721): Ceres Seq. ID no. 12724862
  misc_feature: MA Experiment ID: 20000173 Result: Down-regulated in Transcription
  misc_feature: MA Experiment 20000173 PARAMETER Experiment Name: At_42deg_Heat_P Parameter: Age (day) Value: 14
  misc_feature: MA Experiment 20000173 PARAMETER Experiment Name: At_42deg_Heat_P Parameter: Organism Value: A. thaliana
  misc_feature: MA Experiment 20000173 PARAMETER Experiment Name: At_42deg_Heat_P Parameter: Plant Line Value: WS
  misc_feature: MA Experiment 20000173 PARAMETER Experiment Name: At_42deg_Heat_P Parameter: Temperature (deg C) Value: 42 vs. 22
  misc_feature: MA Experiment 20000173 PARAMETER Experiment Name: At_42deg_Heat_P Parameter: Timepoint (hr) Value: 6
  misc_feature: MA Experiment 20000173 PARAMETER Experiment Name: At_42deg_Heat_P Parameter: Tissue Value: Aerial
  misc_feature: MA Experiment ID: 20000179 Result: Up-regulated in Transcription
  misc_feature: MA Experiment 20000179 PARAMETER Experiment Name: At_Germinating_Seeds_P Parameter: Age (hr) Value: 6 vs. 0
  misc_feature: MA Experiment 20000179 PARAMETER Experiment Name: At_Germinating_Seeds_P Parameter: Tissue Value: Germinating Seeds
  misc_feature: MA Experiment ID: 20000185 Result: Up-regulated in Transcription
  misc_feature: MA Experiment 20000185 PARAMETER Experiment Name: At_Roots__P Parameter: Age (day) Value: 7 vs. 21
  misc_feature: MA Experiment 20000185 PARAMETER Experiment Name: At_Roots__P Parameter: Organism Value: A. thaliana
  misc_feature: MA Experiment 20000185 PARAMETER Experiment Name: At_Roots__P Parameter: Tissue Value: Roots vs. Whole Plant
  misc_feature: MA Experiment ID: 20000234 Result: Up-regulated in Transcription
  misc_feature: MA Experiment 20000234 PARAMETER Experiment Name: At_Siliques_P Parameter: Age (day) Value: 21
  misc_feature: MA Experiment 20000234 PARAMETER Experiment Name: At_Siliques_P Parameter: Organism Value: A. thaliana
  misc_feature: MA Experiment 20000234 PARAMETER Experiment Name: At_Siliques_P Parameter: Plant Line Value: WS
  misc_feature: MA Experiment 20000234 PARAMETER Experiment Name: At_Siliques_P Parameter: Tissue Value: Less Than 5mm Siliques vs. Whole Plant
  misc_feature: MA Experiment ID: 20000437 Result: Down-regulated in Transcription
  misc_feature: MA Experiment 20000437 PARAMETER Experiment Name: At_Drought_P Parameter: Age (day) Value: 8
  misc_feature: MA Experiment 20000437 PARAMETER Experiment Name: At_Drought_P Parameter: Organism Value: A. thaliana
  misc_feature: MA Experiment 20000437 PARAMETER Experiment Name: At_Drought_P Parameter: Plant Line Value: WS
  misc_feature: MA Experiment 20000437 PARAMETER Experiment Name: At_Drought_P Parameter: Timepoint (hr) Value: 24
  misc_feature: MA Experiment 20000437 PARAMETER Experiment Name: At_Drought_P Parameter: Tissue Value: Whole Plant
  misc_feature: MA Experiment 20000437 PARAMETER Experiment Name: At_Drought_P Parameter: Treatment Value: Drought vs. No Drought
  misc_feature: MA Experiment ID: 20000573 Result: Down-regulated in Transcription
  misc_feature: MA Experiment 20000573 PARAMETER Experiment Name: At_100uM_ABA_Mutants__P Parameter: Organism Value: A. thaliana
  misc_feature: MA Experiment 20000573 PARAMETER Experiment Name: At_100uM_ABA_Mutants__P Parameter: Plant Line Value: CS22 vs. Ler wt
  misc_feature: MA Experiment 20000573 PARAMETER Experiment Name: At_100uM_ABA_Mutants__P Parameter: Timepoint (hr) Value: N/A
  misc_feature: MA Experiment 20000573 PARAMETER Experiment Name: At_100uM_ABA_Mutants__P Parameter: Tissue Value: Whole Plant
  misc_feature: MA Experiment 20000573 PARAMETER Experiment Name: At_100uM_ABA_Mutants__P Parameter: Treatment Value: None
  misc_feature: MA Experiment ID: 20000574 Result: Down-regulated in Transcription
  misc_feature: MA Experiment 20000574 PARAMETER Experiment Name: At_100uM_ABA_Mutants__P Parameter: Organism Value: A. thaliana
  misc_feature: MA Experiment 20000574 PARAMETER Experiment Name: At_100uM_ABA_Mutants__P Parameter: Plant Line Value: CS23 vs. Ler wt
  misc_feature: MA Experiment 20000574 PARAMETER Experiment Name: At_100uM_ABA_Mutants__P Parameter: Timepoint (hr) Value: N/A
  misc_feature: MA Experiment 20000574 PARAMETER Experiment Name: At_100uM_ABA_Mutants__P Parameter: Tissue Value: Whole Plant
  misc_feature: MA Experiment 20000574 PARAMETER Experiment Name: At_100uM_ABA_Mutants__P Parameter: Treatment Value: None
  misc_feature: MA Experiment ID: 20001911 Result: Down-regulated in Transcription
  misc_feature: MA Experiment 20001911 PARAMETER Experiment Name: At_Drought_Reproduction_P Parameter: Age (day) Value: 40
  misc_feature: MA Experiment 20001911 PARAMETER Experiment Name: At_Drought_Reproduction_P Parameter: Organism Value: A. thaliana
  misc_feature: MA Experiment 20001911 PARAMETER Experiment Name: At_Drought_Reproduction_P Parameter: Plant Line Value: WS
  misc_feature: MA Experiment 20001911 PARAMETER Experiment Name: At_Drought_Reproduction_P Parameter: Timepoint (day) Value: 10
  misc_feature: MA Experiment 20001911 PARAMETER Experiment Name: At_Drought_Reproduction_P Parameter: Tissue Value: Flowers
  misc_feature: MA Experiment 20001911 PARAMETER Experiment Name: At_Drought_Reproduction_P Parameter: Treatment Value: Drought vs. No Drought

SEQ ID NO: 94447 - protein, 261 aa, Arabidopsis thaliana; identical to SEQ ID NO: 90691
  peptide (1)..(261): Ceres Seq. ID no. 12724863
  misc_feature (1)..(228): Homolog of NCBI NO: 30696480 NR Description: protein kinase family [Arabidopsis thaliana]
  misc_feature (1)..(228): Homolog of NCBI NO: 38636770 NR Description: putative serine/threonine-specific protein kinase
  misc_feature (1)..(261): Homolog of NCBI NO: 30696478 NR Description: protein kinase family [Arabidopsis thaliana]
  misc_feature (63)..(261): Homolog of NCBI NO: 15912249 NR Description: AT5g54590/MRB17_9 [Arabidopsis thaliana]
  misc_feature (8)..(228): Homolog of NCBI NO: 1076634 NR Description: serine/threonine-specific protein kinase NPK15
  misc_feature (1)..(228): Homolog of NCBI NO: 11358843 NR Description: serine/threonine-specific protein kinase-like
  misc_feature (1)..(228): Homolog of NCBI NO: 18417765 NR Description: serine/threonine-specific protein kinase-like protein id: At5g15730.1, supported by cDNA: 25636. [Arabidopsis
  misc_feature (103)..(226): Homolog of NCBI NO: 38345516 NR Description: OSJNBa0039K24.19 [Oryza sativa (japonica
  misc_feature (60)..(246): Homolog of NCBI NO: 8778594 NR Description: F5M15.3 [Arabidopsis thaliana]
  misc_feature (29)..(227): Homolog of NCBI NO: 18397825 NR Description: putative protein kinase; protein id: At3g07070.1 thaliana] >gi|6642658|gb|AAF20239.1|AC012395_26 putative protein

SEQ ID NO: 94448 - protein, 199 aa, Arabidopsis thaliana; identical to SEQ ID NO: 90692
  peptide (1)..(199): Ceres Seq. ID no. 12724864
  misc_feature (1)..(166): Homolog of NCBI NO: 30696480 NR Description: protein kinase family [Arabidopsis thaliana]
  misc_feature (1)..(166): Homolog of NCBI NO: 38636770 NR Description: putative serine/threonine-specific protein kinase
  misc_feature (1)..(199): Homolog of NCBI NO: 30696478 NR Description: protein kinase family [Arabidopsis thaliana]
  misc_feature (1)..(199): Homolog of NCBI NO: 15912249 NR Description: AT5g54590/MRB17_9 [Arabidopsis thaliana]
  misc_feature (1)..(166): Homolog of NCBI NO: 1076634 NR Description: serine/threonine-specific protein kinase NPK15
  misc_feature (1)..(166): Homolog of NCBI NO: 11358843 NR Description: serine/threonine-specific protein kinase-like
  misc_feature (1)..(166): Homolog of NCBI NO: 18417765 NR Description: serine/threonine-specific protein kinase-like protein id: At5g15730.1, supported by cDNA: 25636. [Arabidopsis
  misc_feature (41)..(164): Homolog of NCBI NO: 38345516 NR Description: OSJNBa0039K24.19 [Oryza sativa (japonica
  misc_feature (1)..(184): Homolog of NCBI NO: 8778594 NR Description: F5M15.3 [Arabidopsis thaliana]
  misc_feature (1)..(165): Homolog of NCBI NO: 18397825 NR Description: putative protein kinase; protein id: At3g07070.1 thaliana] >gi|6642658|gb|AAF20239.1|AC012395_26 putative protein

SEQ ID NO: 94449 - protein, 192 aa, Arabidopsis thaliana; identical to SEQ ID NO: 90693
  peptide (1)..(192): Ceres Seq. ID no. 12724865
  misc_feature (1)..(192): Homolog of NCBI NO: 30696480 NR Description: protein kinase family [Arabidopsis thaliana]
  misc_feature (1)..(174): Homolog of NCBI NO: 38636770 NR Description: putative serine/threonine-specific protein kinase
  misc_feature (1)..(131): Homolog of NCBI NO: 1076634 NR Description: serine/threonine-specific protein kinase NPK15
  misc_feature (1)..(148): Homolog of NCBI NO: 11358843 NR Description: serine/threonine-specific protein kinase-like
  misc_feature (1)..(148): Homolog of NCBI NO: 18417765 NR Description: serine/threonine-specific protein kinase-like protein id: At5g15730.1, supported by cDNA: 25636. [Arabidopsis
  misc_feature (1)..(129): Homolog of NCBI NO: 38345516 NR Description: OSJNBa0039K24.19 [Oryza sativa (japonica
  misc_feature (1)..(155): Homolog of NCBI NO: 8778594 NR Description: F5M15.3 [Arabidopsis thaliana]
  misc_feature (1)..(128): Homolog of NCBI NO: 18397825 NR Description: putative protein kinase; protein id: At3g07070.1 thaliana] >gi|6642658|gb|AAF20239.1|AC012395_26 putative protein
  misc_feature (1)..(128): Homolog of NCBI NO: 28416685 NR Description: At3g07070 [Arabidopsis thaliana]
  misc_feature (1)..(129): Homolog of NCBI NO: 11994661 NR Description: receptor protein kinase-like protein [Arabidopsis

SEQ ID NO: 94450 - DNA, 2794 bp, Arabidopsis thaliana; identical to SEQ ID NO: 90694
  misc_feature (1)..(2794): Ceres Seq. ID no. 12724878
  misc_feature: MA Experiment ID: 20000185 Result: Up-regulated in Transcription
  misc_feature: MA Experiment 20000185 PARAMETER Experiment Name: At_Roots__P Parameter: Age (day) Value: 7 vs. 21
  misc_feature: MA Experiment 20000185 PARAMETER Experiment Name: At_Roots__P Parameter: Organism Value: A. thaliana
  misc_feature: MA Experiment 20000185 PARAMETER Experiment Name: At_Roots__P Parameter: Tissue Value: Roots vs. Whole Plant
  misc_feature: MA Experiment ID: 20000235 Result: Up-regulated in Transcription
  misc_feature: MA Experiment 20000235 PARAMETER Experiment Name: At_Siliques_P Parameter: Age (day) Value: 21
  misc_feature: MA Experiment 20000235 PARAMETER Experiment Name: At_Siliques_P Parameter: Organism Value: A. thaliana
  misc_feature: MA Experiment 20000235 PARAMETER Experiment Name: At_Siliques_P Parameter: Plant Line Value: WS
  misc_feature: MA Experiment 20000235 PARAMETER Experiment Name: At_Siliques_P Parameter: Tissue Value: 5-10mm Siliques vs. Whole Plant
  misc_feature: MA Experiment ID: 20000264 Result: Up-regulated in Transcription
  misc_feature: MA Experiment 20000264 PARAMETER Experiment Name: At_Open_Flower_P Parameter: Age (day) Value: 21
  misc_feature: MA Experiment 20000264 PARAMETER Experiment Name: At_Open_Flower_P Parameter: Plant Line Value: WS
  misc_feature: MA Experiment 20000264 PARAMETER Experiment Name: At_Open_Flower_P Parameter: Tissue Value: Open Flower vs. Whole Plant
  misc_feature: MA Experiment ID: 20000265 Result: Up-regulated in Transcription
  misc_feature: MA Experiment 20000265 PARAMETER Experiment Name: At_Open_Flower_P Parameter: Age (day) Value: 21
  misc_feature: MA Experiment 20000265 PARAMETER Experiment Name: At_Open_Flower_P Parameter: Plant Line Value: WS
  misc_feature: MA Experiment 20000265 PARAMETER Experiment Name: At_Open_Flower_P Parameter: Tissue Value: Closed Flower vs. Whole Plant
  misc_feature: MA Experiment ID: 20000495 Result: Up-regulated in Transcription
  misc_feature: MA Experiment 20000495 PARAMETER Experiment Name: At_Guard_Cells_P Parameter: Harvest Date Value: 8/2/2002
  misc_feature: MA Experiment 20000495 PARAMETER Experiment Name: At_Guard_Cells_P Parameter: Organism Value: A. thaliana
  misc_feature: MA Experiment 20000495 PARAMETER Experiment Name: At_Guard_Cells_P Parameter: Tissue Value: Guard Cells vs. Leaves

SEQ ID NO: 94451 - protein, 754 aa, Arabidopsis thaliana; identical to SEQ ID NO: 90695
  peptide (1)..(754): Ceres Seq. ID no. 12724879
  misc_feature (83)..(376): Pfam Name: Myosin tail Pfam Description: Myosin tail
  misc_feature (27)..(754): Homolog of NCBI NO: 25295723 NR Description: kinesin-like protein [imported] - Arabidopsis
  misc_feature (27)..(754): Homolog of NCBI NO: 30680014 NR Description: kinesin-like protein A, putative [Arabidopsis
  misc_feature (27)..(754): Homolog of NCBI NO: 34849893 NR Description: At4g05190 [Arabidopsis thaliana]
  misc_feature (2)..(754): Homolog of NCBI NO: 15233583 NR Description: kinesin-like protein A (katA); protein id:
  misc_feature (27)..(729): Homolog of NCBI NO: 39546247 NR Description: OSJNBa0089N06.17 [Oryza sativa (japonica
  misc_feature (89)..(747): Homolog of NCBI NO: 34915504 NR Description: putative kinesin-related protein katA [Oryza
  misc_feature (350)..(747): Homolog of NCBI NO: 33354214 NR Description: kinesin-related protein KLPA-like protein [Oryza
  misc_feature (392)..(742): Homolog of NCBI NO: 15208457 NR Description: kinesin heavy chain [Zea mays]
  misc_feature (466)..(738): Homolog of NCBI NO: 15208463 NR Description: kinesin heavy chain [Zea mays]
  misc_feature (191)..(741): Homolog of NCBI NO: 3133267 NR Description: kinesin-related protein K2 [Dictyostelium

SEQ ID NO: 94452 - protein, 750 aa, Arabidopsis thaliana; identical to SEQ ID NO: 90696
  peptide (1)..(750): Ceres Seq. ID no. 12724880
  misc_feature (79)..(372): Pfam Name: Myosin tail Pfam Description: Myosin tail
  misc_feature (23)..(750): Homolog of NCBI NO: 25295723 NR Description: kinesin-like protein [imported] - Arabidopsis
  misc_feature (23)..(750): Homolog of NCBI NO: 30680014 NR Description: kinesin-like protein A, putative [Arabidopsis
  misc_feature (23)..(750): Homolog of NCBI NO: 34849893 NR Description: At4g05190 [Arabidopsis thaliana]
  misc_feature (1)..(750): Homolog of NCBI NO: 15233583 NR Description: kinesin-like protein A (katA); protein id:
  misc_feature (23)..(725): Homolog of NCBI NO: 39546247 NR Description: OSJNBa0089N06.17 [Oryza sativa (japonica
  misc_feature (85)..(743): Homolog of NCBI NO: 34915504 NR Description: putative kinesin-related protein katA [Oryza
  misc_feature (346)..(743): Homolog of NCBI NO: 33354214 NR Description: kinesin-related protein KLPA-like protein [Oryza
  misc_feature (388)..(738): Homolog of NCBI NO: 15208457 NR Description: kinesin heavy chain [Zea mays]
  misc_feature (462)..(734): Homolog of NCBI NO: 15208463 NR Description: kinesin heavy chain [Zea mays]
  misc_feature (187)..(737): Homolog of NCBI NO: 3133267 NR Description: kinesin-related protein K2 [Dictyostelium

SEQ ID NO: 94453 - protein, 684 aa, Arabidopsis thaliana; identical to SEQ ID NO: 90697
  peptide (1)..(684): Ceres Seq. ID no. 12724881
  misc_feature (13)..(306): Pfam Name: Myosin tail Pfam Description: Myosin tail
  misc_feature (1)..(684): Homolog of NCBI NO: 25295723 NR Description: kinesin-like protein [imported] - Arabidopsis
  misc_feature (1)..(684): Homolog of NCBI NO: 30680014 NR Description: kinesin-like protein A, putative [Arabidopsis
  misc_feature (1)..(684): Homolog of NCBI NO: 34849893 NR Description: At4g05190 [Arabidopsis thaliana]
  misc_feature (1)..(684): Homolog of NCBI NO: 15233583 NR Description: kinesin-like protein A (katA); protein id:
  misc_feature (1)..(659): Homolog of NCBI NO: 39546247 NR Description: OSJNBa0089N06.17 [Oryza sativa (japonica
  misc_feature (19)..(677): Homolog of NCBI NO: 34915504 NR Description: putative kinesin-related protein katA [Oryza
  misc_feature (280)..(677): Homolog of NCBI NO: 33354214 NR Description: kinesin-related protein KLPA-like protein [Oryza
  misc_feature (322)..(672): Homolog of NCBI NO: 15208457 NR Description: kinesin heavy chain [Zea mays]
  misc_feature (396)..(668): Homolog of NCBI NO: 15208463 NR Description: kinesin heavy chain [Zea mays]
  misc_feature (121)..(671): Homolog of NCBI NO: 3133267 NR Description: kinesin-related protein K2 [Dictyostelium

SEQ ID NO: 94454 - DNA, 1721 bp, Arabidopsis thaliana; identical to SEQ ID NO: 90698
  misc_feature (1)..(1721): Ceres Seq. ID no. 12724914
  misc_feature: MA Experiment ID: 20000171 Result: Up-regulated in Transcription
  misc_feature: MA Experiment 20000171 PARAMETER Experiment Name: At_42deg_Heat_P Parameter: Age (day) Value: 14
  misc_feature: MA Experiment 20000171 PARAMETER Experiment Name: At_42deg_Heat_P Parameter: Organism Value: A. thaliana
  misc_feature: MA Experiment 20000171 PARAMETER Experiment Name: At_42deg_Heat_P Parameter: Plant Line Value: WS
  misc_feature: MA Experiment 20000171 PARAMETER Experiment Name: At_42deg_Heat_P Parameter: Temperature (deg C) Value: 42 vs. 22
  misc_feature: MA Experiment 20000171 PARAMETER Experiment Name: At_42deg_Heat_P Parameter: Timepoint (hr) Value: 1
  misc_feature: MA Experiment 20000171 PARAMETER Experiment Name: At_42deg_Heat_P Parameter: Tissue Value: Aerial
  misc_feature: MA Experiment ID: 20000182 Result: Up-regulated in Transcription
  misc_feature: MA Experiment 20000182 PARAMETER Experiment Name: At_2mM_SA_P Parameter: Age (day) Value: 14
  misc_feature: MA Experiment 20000182 PARAMETER Experiment Name: At_2mM_SA_P Parameter: Organism Value: A. thaliana
  misc_feature: MA Experiment 20000182 PARAMETER Experiment Name: At_2mM_SA_P Parameter: Plant Line Value: WS
  misc_feature: MA Experiment 20000182 PARAMETER Experiment Name: At_2mM_SA_P Parameter: Timepoint (hr) Value: 6
  misc_feature: MA Experiment 20000182 PARAMETER Experiment Name: At_2mM_SA_P Parameter: Tissue Value: Aerial
  misc_feature: MA Experiment 20000182 PARAMETER Experiment Name: At_2mM_SA_P Parameter: Treatment Value: 2mM SA vs. No Treatment
  misc_feature: MA Experiment ID: 20000264 Result: Down-regulated in Transcription
  misc_feature: MA Experiment 20000264 PARAMETER Experiment Name: At_Open_Flower_P Parameter: Age (day) Value: 21
  misc_feature: MA Experiment 20000264 PARAMETER Experiment Name: At_Open_Flower_P Parameter: Plant Line Value: WS
  misc_feature: MA Experiment 20000264 PARAMETER Experiment Name: At_Open_Flower_P Parameter: Tissue Value: Open Flower vs. Whole Plant
  misc_feature: MA Experiment ID: 20001451 Result: Down-regulated in Transcription
  misc_feature: MA Experiment 20001451 PARAMETER Experiment Name: At_Far-red-induction_P Parameter: Age (day) Value: 7
  misc_feature: MA Experiment 20001451 PARAMETER Experiment Name: At_Far-red-induction_P Parameter: Light Value: Far-red vs. White
  misc_feature: MA Experiment 20001451 PARAMETER Experiment Name: At_Far-red-induction_P Parameter: Organism Value: A. thaliana
  misc_feature: MA Experiment 20001451 PARAMETER Experiment Name: At_Far-red-induction_P Parameter: Plant Line Value: Columbia
  misc_feature: MA Experiment 20001451 PARAMETER Experiment Name: At_Far-red-induction_P Parameter: Timepoint (hr) Value: 24
  misc_feature: MA Experiment 20001451 PARAMETER Experiment Name: At_Far-red-induction_P Parameter: Tissue Value: Whole Plant
  misc_feature: MA Experiment ID: 20001905 Result: Up-regulated in Transcription
  misc_feature: MA Experiment 20001905 PARAMETER Experiment Name: At_Drought_Reproduction_P Parameter: Age (day) Value: 40
  misc_feature: MA Experiment 20001905 PARAMETER Experiment Name: At_Drought_Reproduction_P Parameter: Organism Value: A. thaliana
  misc_feature: MA Experiment 20001905 PARAMETER Experiment Name: At_Drought_Reproduction_P Parameter: Plant Line Value: WS
  misc_feature: MA Experiment 20001905 PARAMETER Experiment Name: At_Drought_Reproduction_P Parameter: Timepoint (day) Value: 10
  misc_feature: MA Experiment 20001905 PARAMETER Experiment Name: At_Drought_Reproduction_P Parameter: Tissue Value: Rosettes
  misc_feature: MA Experiment 20001905 PARAMETER Experiment Name: At_Drought_Reproduction_P Parameter: Treatment Value: Drought vs. No Drought

SEQ ID NO: 94455 - protein, 491 aa, Arabidopsis thaliana; identical to SEQ ID NO: 90699
  peptide (1)..(491): Ceres Seq. ID no. 12724915
  misc_feature (22)..(490): Pfam Name: BT1 family Pfam Description: BT1 family
  misc_feature (1)..(491): Homolog of NCBI NO: 22327842 NR Description: putative protein; protein id: At5g54860.1, by cDNA: gi_20147214 [Arabidopsis thaliana]
  misc_feature (1)..(491): Homolog of NCBI NO: 9758266 NR Description: contains similarity to integral membrane
  misc_feature (127)..(490): Homolog of NCBI NO: 34904540 NR Description: B1066G12.15 [Oryza sativa (japonica
  misc_feature (281)..(485): Homolog of NCBI NO: 18408153 NR Description: expressed protein; protein id: At1g64890.1, by cDNA: gi_15028136 [Arabidopsis thaliana]
  misc_feature (18)..(212): Homolog of NCBI NO: 18408153 NR Description: expressed protein; protein id: At1g64890.1, by cDNA: gi_15028136 [Arabidopsis thaliana]
  misc_feature (281)..(485): Homolog of NCBI NO: 15028137 NR Description: unknown protein [Arabidopsis thaliana]
  misc_feature (281)..(485): Homolog of NCBI NO: 26449570 NR Description: unknown protein [Arabidopsis thaliana]
  misc_feature (18)..(212): Homolog of NCBI NO: 15028137 NR Description: unknown protein [Arabidopsis thaliana]
  misc_feature (18)..(212): Homolog of NCBI NO: 26449570 NR Description: unknown protein [Arabidopsis thaliana]
  misc_feature (268)..(482): Homolog of NCBI NO: 26450619 NR Description: unknown protein [Arabidopsis thaliana]

SEQ ID NO: 94456 - protein, 377 aa, Arabidopsis thaliana; identical to SEQ ID NO: 90700
  peptide (1)..(377): Ceres Seq. ID no. 12724916
  misc_feature (1)..(376): Pfam Name: BT1 family Pfam Description: BT1 family
  misc_feature (1)..(377): Homolog of NCBI NO: 22327842 NR Description: putative protein; protein id: At5g54860.1, by cDNA: gi_20147214 [Arabidopsis thaliana]
  misc_feature (1)..(377): Homolog of NCBI NO: 9758266 NR Description: contains similarity to integral membrane
  misc_feature (13)..(376): Homolog of NCBI NO: 34904540 NR Description: B1066G12.15 [Oryza sativa (japonica
  misc_feature (167)..(371): Homolog of NCBI NO: 18408153 NR Description: expressed protein; protein id: At1g64890.1, by cDNA: gi_15028136 [Arabidopsis thaliana]
  misc_feature (1)..(98): Homolog of NCBI NO: 18408153 NR Description: expressed protein; protein id: At1g64890.1, by cDNA: gi_15028136 [Arabidopsis thaliana]
  misc_feature (167)..(371): Homolog of NCBI NO: 15028137 NR Description: unknown protein [Arabidopsis thaliana]
  misc_feature (167)..(371): Homolog of NCBI NO: 26449570 NR Description: unknown protein [Arabidopsis thaliana]
  misc_feature (1)..(98): Homolog of NCBI NO: 15028137 NR Description: unknown protein [Arabidopsis thaliana]
  misc_feature (1)..(98): Homolog of NCBI NO: 26449570 NR Description: unknown protein [Arabidopsis thaliana]
  misc_feature (154)..(368): Homolog of NCBI NO: 26450619 NR Description: unknown protein [Arabidopsis thaliana]

SEQ ID NO: 94457 - protein, 365 aa, Arabidopsis thaliana; identical to SEQ ID NO: 90701
  peptide (1)..(365): Ceres Seq. ID no. 12724917
  misc_feature (1)..(364): Pfam Name: BT1 family Pfam Description: BT1 family
  misc_feature (1)..(365): Homolog of NCBI NO: 22327842 NR Description: putative protein; protein id: At5g54860.1, by cDNA: gi_20147214 [Arabidopsis thaliana]
  misc_feature (1)..(365): Homolog of NCBI NO: 9758266 NR Description: contains similarity to integral membrane
  misc_feature (1)..(364): Homolog of NCBI NO: 34904540 NR Description: B1066G12.15 [Oryza sativa (japonica
  misc_feature (155)..(359): Homolog of NCBI NO: 18408153 NR Description: expressed protein; protein id: At1g64890.1, by cDNA: gi_15028136 [Arabidopsis thaliana]
  misc_feature (1)..(86): Homolog of NCBI NO: 18408153 NR Description: expressed protein; protein id: At1g64890.1, by cDNA: gi_15028136 [Arabidopsis thaliana]
  misc_feature (155)..(359): Homolog of NCBI NO: 15028137 NR Description: unknown protein [Arabidopsis thaliana]
  misc_feature (155)..(359): Homolog of NCBI NO: 26449570 NR Description: unknown protein [Arabidopsis thaliana]
  misc_feature (1)..(86): Homolog of NCBI NO: 15028137 NR Description: unknown protein [Arabidopsis thaliana]
  misc_feature (1)..(86): Homolog of NCBI NO: 26449570 NR Description: unknown protein [Arabidopsis thaliana]
  misc_feature (142)..(356): Homolog of NCBI NO: 26450619 NR Description: unknown protein [Arabidopsis thaliana]

SEQ ID NO: 94458 - DNA, 1305 bp, Arabidopsis thaliana; identical to SEQ ID NO: 90702
  misc_feature (1)..(1305): Ceres Seq. ID no. 12724930
  misc_feature: MA Experiment ID: 20000171 Result: Up-regulated in Transcription
  misc_feature: MA Experiment 20000171 PARAMETER Experiment Name: At_42deg_Heat_P Parameter: Age (day) Value: 14
  misc_feature: MA Experiment 20000171 PARAMETER Experiment Name: At_42deg_Heat_P Parameter: Organism Value: A. thaliana
  misc_feature: MA Experiment 20000171 PARAMETER Experiment Name: At_42deg_Heat_P Parameter: Plant Line Value: WS
  misc_feature: MA Experiment 20000171 PARAMETER Experiment Name: At_42deg_Heat_P Parameter: Temperature (deg C) Value: 42 vs. 22
  misc_feature: MA Experiment 20000171 PARAMETER Experiment Name: At_42deg_Heat_P Parameter: Timepoint (hr) Value: 1
  misc_feature: MA Experiment 20000171 PARAMETER Experiment Name: At_42deg_Heat_P Parameter: Tissue Value: Aerial
  misc_feature: MA Experiment ID: 20000185 Result: Up-regulated in Transcription
  misc_feature: MA Experiment 20000185 PARAMETER Experiment Name: At_Roots__P Parameter: Age (day) Value: 7 vs. 21
  misc_feature: MA Experiment 20000185 PARAMETER Experiment Name: At_Roots__P Parameter: Organism Value: A. thaliana
  misc_feature: MA Experiment 20000185 PARAMETER Experiment Name: At_Roots__P Parameter: Tissue Value: Roots vs. Whole Plant
  misc_feature: MA Experiment ID: 20000439 Result: Up-regulated in Transcription
  misc_feature: MA Experiment 20000439 PARAMETER Experiment Name: At_Roots__P Parameter: Age (day) Value: 14 vs. 21
  misc_feature: MA Experiment 20000439 PARAMETER Experiment Name: At_Roots__P Parameter: Organism Value: A. thaliana
  misc_feature: MA Experiment 20000439 PARAMETER Experiment Name: At_Roots__P Parameter: Tissue Value: Roots vs. Whole Plant
  misc_feature: MA Experiment ID: 20000495 Result: Down-regulated in Transcription
  misc_feature: MA Experiment 20000495 PARAMETER Experiment Name: At_Guard_Cells_P Parameter: Harvest Date Value: 8/2/2002
  misc_feature: MA Experiment 20000495 PARAMETER Experiment Name: At_Guard_Cells_P Parameter: Organism Value: A. thaliana
  misc_feature: MA Experiment 20000495 PARAMETER Experiment Name: At_Guard_Cells_P Parameter: Tissue Value: Guard Cells vs. Leaves
  misc_feature: MA Experiment ID: 20000506 Result: Up-regulated in Transcription
  misc_feature: MA Experiment 20000506 PARAMETER Experiment Name: At_Wounding_P Parameter: Organism Value: A. thaliana
  misc_feature: MA Experiment 20000506 PARAMETER Experiment Name: At_Wounding_P Parameter: Plant Line Value: WS
  misc_feature: MA Experiment 20000506 PARAMETER Experiment Name: At_Wounding_P Parameter: Timepoint (hr) Value: 6
  misc_feature: MA Experiment 20000506 PARAMETER Experiment Name: At_Wounding_P Parameter: Tissue Value: Aerial
  misc_feature: MA Experiment 20000506 PARAMETER Experiment Name: At_Wounding_P Parameter: Treatment Value: Wounding vs. No Wounding
  misc_feature: MA Experiment ID: 20001557 Result: Up-regulated in Transcription
  misc_feature: MA Experiment 20001557 PARAMETER Experiment Name: At_Drought_Soil_Dry_P Parameter: Age (day) Value: 27
  misc_feature: MA Experiment 20001557 PARAMETER Experiment Name: At_Drought_Soil_Dry_P Parameter: Organism Value: A. thaliana
  misc_feature: MA Experiment 20001557 PARAMETER Experiment Name: At_Drought_Soil_Dry_P Parameter: Plant Line Value: WS
  misc_feature: MA Experiment 20001557 PARAMETER Experiment Name: At_Drought_Soil_Dry_P Parameter: Post Timepoint (hr) Value: 3
  misc_feature: MA Experiment 20001557 PARAMETER Experiment Name: At_Drought_Soil_Dry_P Parameter: Post-Treatment Value: Re-Water vs. No Drought
  misc_feature: MA Experiment 20001557 PARAMETER Experiment Name: At_Drought_Soil_Dry_P Parameter: Timepoint (day) Value: 13
  misc_feature: MA Experiment 20001557 PARAMETER Experiment Name: At_Drought_Soil_Dry_P Parameter: Treatment Value: Drought vs. No Drought
  misc_feature: MA Experiment ID: 20001904 Result: Down-regulated in Transcription
  misc_feature: MA Experiment 20001904 PARAMETER Experiment Name: At_Drought_Reproduction_P Parameter: Age (day) Value: 37
  misc_feature: MA Experiment 20001904 PARAMETER Experiment Name: At_Drought_Reproduction_P Parameter: Organism Value: A. thaliana
  misc_feature: MA Experiment 20001904 PARAMETER Experiment Name: At_Drought_Reproduction_P Parameter: Plant Line Value: WS
  misc_feature: MA Experiment 20001904 PARAMETER Experiment Name: At_Drought_Reproduction_P Parameter: Timepoint (day) Value: 7
  misc_feature: MA Experiment 20001904 PARAMETER Experiment Name: At_Drought_Reproduction_P Parameter: Tissue Value: Rosettes
  misc_feature: MA Experiment 20001904 PARAMETER Experiment Name: At_Drought_Reproduction_P Parameter: Treatment Value: Drought vs. No Drought

SEQ ID NO: 94459 - protein, 390 aa, Arabidopsis thaliana; identical to SEQ ID NO: 90703
  peptide (1)..(390): Ceres Seq. ID no. 12724931
  misc_feature (54)..(371): Pfam Name: GDSL-like Lipase/Acylhydrolase Pfam Description: GDSL-like Lipase/Acylhydrolase
  misc_feature (15)..(390): Homolog of NCBI NO: 15240452 NR Description: GDSL-motif lipase/hydrolase-like protein; protein At5g55050.1, supported by cDNA: gi_18175651 [Arabidopsis
  misc_feature (43)..(389): Homolog of NCBI NO: 29837765 NR Description: putative GDSL-like lipase/acylhydrolase [Oryza
  misc_feature (156)..(389): Homolog of NCBI NO: 13161399 NR Description: CPRD47 [Vigna unguiculata]
  misc_feature (22)..(387): Homolog of NCBI NO: 15229742 NR Description: putative protein; protein id: At3g50400.1 thaliana] >gi|7630026|emb|CAB88323.1| putative protein thaliana] >gi|26450386|dbj|BAC42308.1| unknown protein
  misc_feature (44)..(381): Homolog of NCBI NO: 21537293 NR Description: GDSL-motif lipase/hydrolase-like protein
  misc_feature (44)..(381): Homolog of NCBI NO: 30693137 NR Description: lipase family [Arabidopsis thaliana]
  misc_feature (25)..(389): Homolog of NCBI NO: 18398991 NR Description: unknown protein; protein id: At1g33811.1, by cDNA: gi_20466731 [Arabidopsis thaliana] unknown protein [Arabidopsis thaliana]
  misc_feature (55)..(389): Homolog of NCBI NO: 15235421 NR Description: Proline-rich APG - like protein; protein id:
  misc_feature (46)..(387): Homolog of NCBI NO: 34909504 NR Description: putative GDSL-motif lipase/hydrolase-like protein
  misc_feature (52)..(387): Homolog of NCBI NO: 18417760 NR Description: putative protein; protein id: At5g15720.1, by cDNA: 118296. [Arabidopsis thaliana]

SEQ ID NO: 94460 - protein, 376 aa, Arabidopsis thaliana; identical to SEQ ID NO: 90704
  peptide (1)..(376): Ceres Seq. ID no. 12724932
  misc_feature (40)..(357): Pfam Name: GDSL-like Lipase/Acylhydrolase Pfam Description: GDSL-like Lipase/Acylhydrolase
  misc_feature (1)..(376): Homolog of NCBI NO: 15240452 NR Description: GDSL-motif lipase/hydrolase-like protein; protein At5g55050.1, supported by cDNA: gi_18175651 [Arabidopsis
  misc_feature (29)..(375): Homolog of NCBI NO: 29837765 NR Description: putative GDSL-like lipase/acylhydrolase [Oryza
  misc_feature (142)..(375): Homolog of NCBI NO: 13161399 NR Description: CPRD47 [Vigna unguiculata]
  misc_feature (8)..(373): Homolog of NCBI NO: 15229742 NR Description: putative protein; protein id: At3g50400.1 thaliana] >gi|7630026|emb|CAB88323.1| putative protein thaliana] >gi|26450386|dbj|BAC42308.1| unknown protein
  misc_feature (30)..(367): Homolog of NCBI NO: 21537293 NR Description: GDSL-motif lipase/hydrolase-like protein
  misc_feature (30)..(367): Homolog of NCBI NO: 30693137 NR Description: lipase family [Arabidopsis thaliana]
  misc_feature (11)..(375): Homolog of NCBI NO: 18398991 NR Description: unknown protein; protein id: At1g33811.1, by cDNA: gi_20466731 [Arabidopsis thaliana] unknown protein [Arabidopsis thaliana]
  misc_feature (41)..(375): Homolog of NCBI NO: 15235421 NR Description: Proline-rich APG - like protein; protein id:
  misc_feature (32)..(373): Homolog of NCBI NO: 34909504 NR Description: putative GDSL-motif lipase/hydrolase-like protein
  misc_feature (38)..(373): Homolog of NCBI NO: 18417760 NR Description: putative protein; protein id: At5g15720.1, by cDNA: 118296. [Arabidopsis thaliana]

SEQ ID NO: 94461 - protein, 216 aa, Arabidopsis thaliana; identical to SEQ ID NO: 90705
  peptide (1)..(216): Ceres Seq. ID no. 12724933
  misc_feature (1)..(197): Pfam Name: GDSL-like Lipase/Acylhydrolase Pfam Description: GDSL-like Lipase/Acylhydrolase
  misc_feature (1)..(216): Homolog of NCBI NO: 15240452 NR Description: GDSL-motif lipase/hydrolase-like protein; protein At5g55050.1, supported by cDNA: gi_18175651 [Arabidopsis
  misc_feature (1)..(215): Homolog of NCBI NO: 29837765 NR Description: putative GDSL-like lipase/acylhydrolase [Oryza
  misc_feature (1)..(215): Homolog of NCBI NO: 13161399 NR Description: CPRD47 [Vigna unguiculata]
  misc_feature (1)..(213): Homolog of NCBI NO: 15229742 NR Description: putative protein; protein id: At3g50400.1 thaliana] >gi|7630026|emb|CAB88323.1| putative protein thaliana] >gi|26450386|dbj|BAC42308.1| unknown protein
  misc_feature (1)..(207): Homolog of NCBI NO: 21537293 NR Description: GDSL-motif lipase/hydrolase-like protein
  misc_feature (1)..(207): Homolog of NCBI NO: 30693137 NR Description: lipase family [Arabidopsis thaliana]
  misc_feature (1)..(215): Homolog of NCBI NO: 18398991 NR Description: unknown protein; protein id: At1g33811.1, by cDNA: gi_20466731 [Arabidopsis thaliana] unknown protein [Arabidopsis thaliana]
  misc_feature (1)..(215): Homolog of NCBI NO: 15235421 NR Description: Proline-rich APG - like protein; protein id:
  misc_feature (1)..(213): Homolog of NCBI NO: 34909504 NR Description: putative GDSL-motif lipase/hydrolase-like protein
  misc_feature (1)..(213): Homolog of NCBI NO: 18417760 NR Description: putative protein; protein id: At5g15720.1, by cDNA: 118296. [Arabidopsis thaliana]

SEQ ID NO: 94462 - DNA, 1347 bp, Arabidopsis thaliana; identical to SEQ ID NO: 90706
  misc_feature (1)..(1347): Ceres Seq. ID no. 12724934
  misc_feature: MA Experiment ID: 20000306 Result: Up-regulated in Transcription
  misc_feature: MA Experiment 20000306 PARAMETER Experiment Name: At_Germinating_Seeds_Sub_P Parameter: Age (hr) Value: 6 vs. 0
  misc_feature: MA Experiment 20000306 PARAMETER Experiment Name: At_Germinating_Seeds_Sub_P Parameter: Organism Value: A. thaliana
  misc_feature: MA Experiment 20000306 PARAMETER Experiment Name: At_Germinating_Seeds_Sub_P Parameter: Plant Line Value: WS
  misc_feature: MA Experiment 20000306 PARAMETER Experiment Name: At_Germinating_Seeds_Sub_P Parameter: Tissue Value: Germinating Seeds
  misc_feature: MA Experiment ID: 20000307 Result: Up-regulated in Transcription
  misc_feature: MA Experiment 20000307 PARAMETER Experiment Name: At_Germinating_Seeds_Sub_P Parameter: Age (hr) Value: 24 vs. 0
  misc_feature: MA Experiment 20000307 PARAMETER Experiment Name: At_Germinating_Seeds_Sub_P Parameter: Organism Value: A. thaliana
  misc_feature: MA Experiment 20000307 PARAMETER Experiment Name: At_Germinating_Seeds_Sub_P Parameter: Plant Line Value: WS
  misc_feature: MA Experiment 20000307 PARAMETER Experiment Name: At_Germinating_Seeds_Sub_P Parameter: Tissue Value: Germinating Seeds
  misc_feature: MA Experiment ID: 20000314 Result: Up-regulated in Transcription
  misc_feature: MA Experiment 20000314 PARAMETER Experiment Name: At_14day_Shoots-Roots_Sub_P Parameter: Age (day) Value: 14
  misc_feature: MA Experiment 20000314 PARAMETER Experiment Name: At_14day_Shoots-Roots_Sub_P Parameter: Organism Value: A. thaliana
  misc_feature: MA Experiment 20000314 PARAMETER Experiment Name: At_14day_Shoots-Roots_Sub_P Parameter: Plant Line Value: WS
  misc_feature: MA Experiment 20000314 PARAMETER Experiment Name: At_14day_Shoots-Roots_Sub_P Parameter: Tissue Value: Roots vs. Whole Plant
  misc_feature: MA Experiment ID: 20000347 Result: Up-regulated in Transcription
  misc_feature: MA Experiment 20000347 PARAMETER Experiment Name: At_2mM_SA_Sub_P Parameter: Age (day) Value: 14
  misc_feature: MA Experiment 20000347 PARAMETER Experiment Name: At_2mM_SA_Sub_P Parameter: Organism Value: A. thaliana
  misc_feature: MA Experiment 20000347 PARAMETER Experiment Name: At_2mM_SA_Sub_P Parameter: Plant Line Value: WS
  misc_feature: MA Experiment 20000347 PARAMETER Experiment Name: At_2mM_SA_Sub_P Parameter: Timepoint (hr) Value: 6
  misc_feature: MA Experiment 20000347 PARAMETER Experiment Name: At_2mM_SA_Sub_P Parameter: Tissue Value: Aerial
  misc_feature: MA Experiment 20000347 PARAMETER Experiment Name: At_2mM_SA_Sub_P Parameter: Treatment Value: 2mM SA vs. No Treatment
  misc_feature: MA Experiment ID: 20000348 Result: Up-regulated in Transcription
  misc_feature: MA Experiment 20000348 PARAMETER Experiment Name: At_100uM_ABA_Sub_P Parameter: Age (day) Value: 14
  misc_feature: MA Experiment 20000348 PARAMETER Experiment Name: At_100uM_ABA_Sub_P Parameter: Organism Value: A. thaliana
  misc_feature: MA Experiment 20000348 PARAMETER Experiment Name: At_100uM_ABA_Sub_P Parameter: Plant Line Value: WS
  misc_feature: MA Experiment 20000348 PARAMETER Experiment Name: At_100uM_ABA_Sub_P Parameter: Timepoint (hr) Value: 1
  misc_feature: MA Experiment 20000348 PARAMETER Experiment Name: At_100uM_ABA_Sub_P Parameter: Tissue Value: Aerial
  misc_feature: MA Experiment 20000348 PARAMETER Experiment Name: At_100uM_ABA_Sub_P Parameter: Treatment Value: 100uM ABA vs. No Treatment
  misc_feature: MA Experiment ID: 20000634 Result: Up-regulated in Transcription
  misc_feature: MA Experiment 20000634 PARAMETER Experiment Name: At_10percent_PEG_Sub_P Parameter: Age (day) Value: 12
  misc_feature: MA Experiment 20000634 PARAMETER Experiment Name: At_10percent_PEG_Sub_P Parameter: Organism Value: A. thaliana
  misc_feature: MA Experiment 20000634 PARAMETER Experiment Name: At_10percent_PEG_Sub_P Parameter: Plant Line Value: WS
  misc_feature: MA Experiment 20000634 PARAMETER Experiment Name: At_10percent_PEG_Sub_P Parameter: Timepoint (day) Value: 12
  misc_feature: MA Experiment 20000634 PARAMETER Experiment Name: At_10percent_PEG_Sub_P Parameter: Tissue Value: Whole Plant
  misc_feature: MA Experiment 20000634 PARAMETER Experiment Name: At_10percent_PEG_Sub_P Parameter: Treatment Value: 10% PEG vs. No Treatment

SEQ ID NO: 94463 - protein, 448 aa, Arabidopsis thaliana; identical to SEQ ID NO: 90707
  peptide (1)..(448): Ceres Seq. ID no. 12724935
  misc_feature (6)..(256): Pfam Name: Protein kinase domain Pfam Description: Protein kinase domain
  misc_feature (1)..(448): Homolog of NCBI NO: 15240456 NR Description: putative protein; protein id: At5g55090.1
  misc_feature (3)..(433): Homolog of NCBI NO: 15236903 NR Description: putative NPK1-related protein kinase; protein id:
  misc_feature (3)..(398): Homolog of NCBI NO: 19423926 NR Description: unknown protein [Arabidopsis thaliana]
  misc_feature (6)..(348): Homolog of NCBI NO: 15225692 NR Description: putative protein kinase; protein id: At2g32510.1
  misc_feature (5)..(301): Homolog of NCBI NO: 15220416 NR Description: putative NPK1-related MAP kinase; protein id: supported by cDNA: gi_17381165, supported by cDNA: gi_20259424
  misc_feature (6)..(346): Homolog of NCBI NO: 34911466 NR Description: NPK1-related protein kinase-like protein [Oryza
  misc_feature (6)..(285): Homolog of NCBI NO: 34911472 NR Description: NPK1-related protein kinase-like protein [Oryza
  misc_feature (6)..(347): Homolog of NCBI NO: 37530788 NR Description: putative NPK1-related protein kinase [Oryza
  misc_feature (6)..(347): Homolog of NCBI NO: 37530786 NR Description: putative NPK1-related protein kinase [Oryza
  misc_feature (12)..(285): Homolog of NCBI NO: 34911476 NR Description: NPK1-related protein kinase-like protein [Oryza

SEQ ID NO: 94464 - protein, 374 aa, Arabidopsis thaliana; identical to SEQ ID NO: 90708
  peptide (1)..(374): Ceres Seq. ID no. 12724936
  misc_feature (1)..(182): Pfam Name: Protein kinase domain Pfam Description: Protein kinase domain
  misc_feature (1)..(374): Homolog of NCBI NO: 15240456 NR Description: putative protein; protein id: At5g55090.1
  misc_feature (1)..(359): Homolog of NCBI NO: 15236903 NR Description: putative NPK1-related protein kinase; protein id:
  misc_feature (1)..(324): Homolog of NCBI NO: 19423926 NR Description: unknown protein [Arabidopsis thaliana]
  misc_feature (1)..(274): Homolog of NCBI NO: 15225692 NR Description: putative protein kinase; protein id: At2g32510.1
  misc_feature (1)..(227): Homolog of NCBI NO: 15220416 NR Description: putative NPK1-related MAP kinase; protein id: supported by cDNA: gi_17381165, supported by cDNA: gi_20259424
  misc_feature (1)..(272): Homolog of NCBI NO: 34911466 NR Description: NPK1-related protein kinase-like protein [Oryza
  misc_feature (1)..(211): Homolog of NCBI NO: 34911472 NR Description: NPK1-related protein kinase-like protein [Oryza
  misc_feature (1)..(273): Homolog of NCBI NO: 37530788 NR Description: putative NPK1-related protein kinase [Oryza
  misc_feature (1)..(273): Homolog of NCBI NO: 37530786 NR Description: putative NPK1-related protein kinase [Oryza
  misc_feature (1)..(211): Homolog of NCBI NO: 34911476 NR Description: NPK1-related protein kinase-like protein [Oryza

SEQ ID NO: 94465 - protein, 369 aa, Arabidopsis thaliana; identical to SEQ ID NO: 90709
  peptide (1)..(369): Ceres Seq. ID no. 12724937
  misc_feature (1)..(177): Pfam Name: Protein kinase domain Pfam Description: Protein kinase domain
  misc_feature (1)..(369): Homolog of NCBI NO: 15240456 NR Description: putative protein; protein id: At5g55090.1
  misc_feature (1)..(354): Homolog of NCBI NO: 15236903 NR Description: putative NPK1-related protein kinase; protein id:
  misc_feature (1)..(319): Homolog of NCBI NO: 19423926 NR Description: unknown protein [Arabidopsis thaliana]
  misc_feature (1)..(269): Homolog of NCBI NO: 15225692 NR Description: putative protein kinase; protein id: At2g32510.1
  misc_feature (1)..(222): Homolog of NCBI NO: 15220416 NR Description: putative NPK1-related MAP kinase; protein id: supported by cDNA: gi_17381165, supported by cDNA: gi_20259424
  misc_feature (1)..(267): Homolog of NCBI NO: 34911466 NR Description: NPK1-related protein kinase-like protein [Oryza
  misc_feature (1)..(206): Homolog of NCBI NO: 34911472 NR Description: NPK1-related protein kinase-like protein [Oryza
  misc_feature (1)..(268): Homolog of NCBI NO: 37530788 NR Description: putative NPK1-related protein kinase [Oryza
  misc_feature (1)..(268): Homolog of NCBI NO: 37530786 NR Description: putative NPK1-related protein kinase [Oryza
  misc_feature (1)..(206): Homolog of NCBI NO: 34911476 NR Description: NPK1-related protein kinase-like protein [Oryza

SEQ ID NO: 94466 - DNA, 1331 bp, Arabidopsis thaliana; identical to SEQ ID NO: 90710
  misc_feature (1)..(1331): Ceres Seq. ID no. 12724950
  misc_feature: MA Experiment ID: 20000171 Result: Down-regulated in Transcription
  misc_feature: MA Experiment 20000171 PARAMETER Experiment Name: At_42deg_Heat_P Parameter: Age (day) Value: 14
  misc_feature: MA Experiment 20000171 PARAMETER Experiment Name: At_42deg_Heat_P Parameter: Organism Value: A. thaliana
  misc_feature: MA Experiment 20000171 PARAMETER Experiment Name: At_42deg_Heat_P Parameter: Plant Line Value: WS
  misc_feature: MA Experiment 20000171 PARAMETER Experiment Name: At_42deg_Heat_P Parameter: Temperature (deg C) Value: 42 vs. 22
  misc_feature: MA Experiment 20000171 PARAMETER Experiment Name: At_42deg_Heat_P Parameter: Timepoint (hr) Value: 1
  misc_feature: MA Experiment 20000171 PARAMETER Experiment Name: At_42deg_Heat_P Parameter: Tissue Value: Aerial
  misc_feature: MA Experiment ID: 20000173 Result: Down-regulated in Transcription
  misc_feature: MA Experiment 20000173 PARAMETER Experiment Name: At_42deg_Heat_P Parameter: Age (day) Value: 14
  misc_feature: MA Experiment 20000173 PARAMETER Experiment Name: At_42deg_Heat_P Parameter: Organism Value: A. thaliana
  misc_feature: MA Experiment 20000173 PARAMETER Experiment Name: At_42deg_Heat_P Parameter: Plant Line Value: WS
  misc_feature: MA Experiment 20000173 PARAMETER Experiment Name: At_42deg_Heat_P Parameter: Temperature (deg C) Value: 42 vs. 22
  misc_feature: MA Experiment 20000173 PARAMETER Experiment Name: At_42deg_Heat_P Parameter: Timepoint (hr) Value: 6
  misc_feature: MA Experiment 20000173 PARAMETER Experiment Name: At_42deg_Heat_P Parameter: Tissue Value: Aerial
  misc_feature: MA Experiment ID: 20000227 Result: Down-regulated in Transcription
  misc_feature: MA Experiment 20000227 PARAMETER Experiment Name: At_Root-Tips-vs-Tops_P Parameter: Tissue Value: Root Tips vs. Root Tops

SEQ ID NO: 94467 - protein, 369 aa, Arabidopsis thaliana; identical to SEQ ID NO: 90711
  peptide (1)..(369): Ceres Seq. ID no. 12724951
  misc_feature (108)..(304): Pfam Name: Calcineurin-like phosphoesterase Pfam Description: Calcineurin-like phosphoesterase
  misc_feature (65)..(369): Homolog of NCBI NO: 15240488 NR Description: serine/threonine protein phosphatase; protein id:
  misc_feature (65)..(369): Homolog of NCBI NO: 629550 NR Description: phosphoprotein phosphatase (EC 3.1.3.16) X-2 EP128) - Arabidopsis thaliana >gi|397590|emb|CAA80312.1| protein
  misc_feature (65)..(369): Homolog of NCBI NO: 15236841 NR Description: phosphoprotein phosphatase (PPX-1); protein id: [Arabidopsis thaliana] >gi|1346782|sp|P48529|PPX1_ARATH
  misc_feature (66)..(369): Homolog of NCBI NO: 5410609 NR Description: protein phosphatase 4 catalytic subunit discoideum] >gi|28829486|gb|AAO52019.1| similar to Dictyostelium (Slime mold). Protein phosphatase 4 catalytic subunit (EC
  misc_feature (64)..(369): Homolog of NCBI NO: 4506027 NR Description: protein phosphatase 4 (formerly X), catalytic Protein phosphatase 4, catalytic subunit [Homo sapiens] protein phosphatase 4, catalytic subunit; protein phosphatase X
  misc_feature (64)..(369): Homolog of NCBI NO: 130788 NR Description: SERINE/THREONINE PROTEIN PHOSPHATASE 4 (PP4)
  misc_feature (64)..(369): Homolog of NCBI NO: 346323 NR Description: phosphoprotein phosphatase (EC 3.1.3.16) X
  misc_feature (65)..(369): Homolog of NCBI NO: 4101701 NR Description: serine/threonine phosphatase [Takifugu rubripes]
  misc_feature (66)..(369): Homolog of NCBI NO: 17864424 NR Description: Protein phosphatase 19C CG32505-PA
  misc_feature (61)..(369): Homolog of NCBI NO: 17554396 NR Description: Protein phosphatase PPH-4.1 (37.4 kD) (pph-4.1)

SEQ ID NO: 94468 - protein, 305 aa, Arabidopsis thaliana; identical to SEQ ID NO: 90712
  peptide (1)..(305): Ceres Seq. ID no. 12724952
  misc_feature (44)..(240): Pfam Name: Calcineurin-like phosphoesterase Pfam Description: Calcineurin-like phosphoesterase
  misc_feature (1)..(305): Homolog of NCBI NO: 15240488 NR Description: serine/threonine protein phosphatase; protein id:
  misc_feature (1)..(305): Homolog of NCBI NO: 629550 NR Description: phosphoprotein phosphatase (EC 3.1.3.16) X-2 EP128) - Arabidopsis thaliana >gi|397590|emb|CAA80312.1| protein
  misc_feature (1)..(305): Homolog of NCBI NO: 15236841 NR Description: phosphoprotein phosphatase (PPX-1); protein id: [Arabidopsis thaliana] >gi|1346782|sp|P48529|PPX1_ARATH
  misc_feature (2)..(305): Homolog of NCBI NO: 5410609 NR Description: protein phosphatase 4 catalytic subunit discoideum] >gi|28829486|gb|AAO52019.1| similar to Dictyostelium (Slime mold). Protein phosphatase 4 catalytic subunit (EC
  misc_feature (1)..(305): Homolog of NCBI NO: 4506027 NR Description: protein phosphatase 4 (formerly X), catalytic Protein phosphatase 4, catalytic subunit [Homo sapiens] protein phosphatase 4, catalytic subunit; protein phosphatase X
  misc_feature (1)..(305): Homolog of NCBI NO: 130788 NR Description: SERINE/THREONINE PROTEIN PHOSPHATASE 4 (PP4)
  misc_feature (1)..(305): Homolog of NCBI NO: 346323 NR Description: phosphoprotein phosphatase (EC 3.1.3.16) X
  misc_feature (1)..(305): Homolog of NCBI NO: 4101701 NR Description: serine/threonine phosphatase [Takifugu rubripes]
  misc_feature (2)..(305): Homolog of NCBI NO: 17864424 NR Description: Protein phosphatase 19C CG32505-PA
  misc_feature (1)..(305): Homolog of NCBI NO: 17554396 NR Description: Protein phosphatase PPH-4.1 (37.4 kD) (pph-4.1)

SEQ ID NO: 94469 - protein, 276 aa, Arabidopsis thaliana; identical to SEQ ID NO: 90713
  peptide (1)..(276): Ceres Seq. ID no. 12724953
  misc_feature (15)..(211): Pfam Name: Calcineurin-like phosphoesterase Pfam Description: Calcineurin-like phosphoesterase
  misc_feature (1)..(276): Homolog of NCBI NO: 15240488 NR Description: serine/threonine protein phosphatase; protein id:
  misc_feature (1)..(276): Homolog of NCBI NO: 629550 NR Description: phosphoprotein phosphatase (EC 3.1.3.16) X-2 EP128) - Arabidopsis thaliana >gi|397590|emb|CAA80312.1| protein
  misc_feature (1)..(276): Homolog of NCBI NO: 15236841 NR Description: phosphoprotein phosphatase (PPX-1); protein id: [Arabidopsis thaliana] >gi|1346782|sp|P48529|PPX1_ARATH
  misc_feature (1)..(276): Homolog of NCBI NO: 5410609 NR Description: protein phosphatase 4 catalytic subunit discoideum] >gi|28829486|gb|AAO52019.1| similar to Dictyostelium (Slime mold). Protein phosphatase 4 catalytic subunit (EC
  misc_feature (1)..(276): Homolog of NCBI NO: 4506027 NR Description: protein phosphatase 4 (formerly X), catalytic Protein phosphatase 4, catalytic subunit [Homo sapiens] protein phosphatase 4, catalytic subunit; protein phosphatase X
  misc_feature (1)..(276): Homolog of NCBI NO: 130788 NR Description: SERINE/THREONINE PROTEIN PHOSPHATASE 4 (PP4)
  misc_feature (1)..(276): Homolog of NCBI NO: 346323 NR Description: phosphoprotein phosphatase (EC 3.1.3.16) X
  misc_feature (1)..(276): Homolog of NCBI NO: 4101701 NR Description: serine/threonine phosphatase [Takifugu rubripes]
  misc_feature (1)..(276): Homolog of NCBI NO: 17864424 NR Description: Protein phosphatase 19C CG32505-PA
  misc_feature (1)..(276): Homolog of NCBI NO: 17554396 NR Description: Protein phosphatase PPH-4.1 (37.4 kD) (pph-4.1)

SEQ ID NO: 94470 - DNA, 1231 bp, Arabidopsis thaliana; identical to SEQ ID NO: 90714
  misc_feature (1)..(1231): Ceres Seq. ID no. 12724977
  misc_feature: MA Experiment ID: 20000184 Result: Up-regulated in Transcription
  misc_feature: MA Experiment 20000184 PARAMETER Experiment Name: At_Shoots__P Parameter: Age (day) Value: 7
  misc_feature: MA Experiment 20000184 PARAMETER Experiment Name: At_Shoots__P Parameter: Tissue Value: Shoots vs. Whole Plant
  misc_feature: MA Experiment ID: 20000438 Result: Up-regulated in Transcription
  misc_feature: MA Experiment 20000438 PARAMETER Experiment Name: At_Shoots__P Parameter: Age (day) Value: 14
  misc_feature: MA Experiment 20000438 PARAMETER Experiment Name: At_Shoots__P Parameter: Tissue Value: Shoots vs. Whole Plant
  misc_feature: MA Experiment ID: 20001248 Result: Down-regulated in Transcription
  misc_feature: MA Experiment 20001248 PARAMETER Experiment Name: At_Far-red-induction_P Parameter: Age (day) Value: 7
  misc_feature: MA Experiment 20001248 PARAMETER Experiment Name: At_Far-red-induction_P Parameter: Light Value: Far-red vs. White
  misc_feature: MA Experiment 20001248 PARAMETER Experiment Name: At_Far-red-induction_P Parameter: Organism Value: A. thaliana
  misc_feature: MA Experiment 20001248 PARAMETER Experiment Name: At_Far-red-induction_P Parameter: Plant Line Value: Columbia
  misc_feature: MA Experiment 20001248 PARAMETER Experiment Name: At_Far-red-induction_P Parameter: Timepoint (hr) Value: 4
  misc_feature: MA Experiment 20001248 PARAMETER Experiment Name: At_Far-red-induction_P Parameter: Tissue Value: Whole Plant

SEQ ID NO: 94471 - protein, 341 aa, Arabidopsis thaliana; identical to SEQ ID NO: 90715
  peptide (1)..(341): Ceres Seq. ID no. 12724978
  misc_feature (50)..(317): Pfam Name: MBOAT family Pfam Description: MBOAT family
  misc_feature (1)..(341): Homolog of NCBI NO: 15240500 NR Description: wax synthase-like protein; protein id:
  misc_feature (1)..(336): Homolog of NCBI NO: 15240499 NR Description: wax synthase-like protein; protein id: At5g55370.1
  misc_feature (1)..(336): Homolog of NCBI NO: 15240497 NR Description: wax synthase-like protein; protein id: At5g55350.1
  misc_feature (1)..(336): Homolog of NCBI NO: 15240496 NR Description: putative protein; protein id: At5g55340.1, by cDNA: 115917. [Arabidopsis thaliana] contains similarity to wax synthase~gene_id:MTE17.5 [Arabidopsis
  misc_feature (1)..(336): Homolog of NCBI NO: 15240498 NR Description: wax synthase-like protein; protein id: At5g55360.1
  misc_feature (1)..(336): Homolog of NCBI NO: 15218662 NR Description: hypothetical protein; protein id: At1g34500.1
  misc_feature (1)..(336): Homolog of NCBI NO: 8778260 NR Description: F12K21.17 [Arabidopsis thaliana]
  misc_feature (1)..(333): Homolog of NCBI NO: 15240495 NR Description: wax synthase-like protein; protein id: At5g55330.1
  misc_feature (1)..(336): Homolog of NCBI NO: 15218659 NR Description: hypothetical protein; protein id: At1g34490.1
  misc_feature (11)..(336): Homolog of NCBI NO: 27728714 NR Description: wax synthase isoform 1 [Vitis vinifera]

SEQ ID NO: 94472 - protein, 221 aa, Arabidopsis thaliana; identical to SEQ ID NO: 90716
  peptide (1)..(221): Ceres Seq. ID no. 12724979
  misc_feature (1)..(197): Pfam Name: MBOAT family Pfam Description: MBOAT family
  misc_feature (1)..(221): Homolog of NCBI NO: 15240500 NR Description: wax synthase-like protein; protein id:
  misc_feature (1)..(216): Homolog of NCBI NO: 15240499 NR Description: wax synthase-like protein; protein id: At5g55370.1
  misc_feature (1)..(216): Homolog of NCBI NO: 15240497 NR Description: wax synthase-like protein; protein id: At5g55350.1
  misc_feature (1)..(216): Homolog of NCBI NO: 15240496 NR Description: putative protein; protein id: At5g55340.1, by cDNA: 115917. [Arabidopsis thaliana] contains similarity to wax synthase~gene_id:MTE17.5 [Arabidopsis
  misc_feature (1)..(216): Homolog of NCBI NO: 15240498 NR Description: wax synthase-like protein; protein id: At5g55360.1
  misc_feature (1)..(216): Homolog of NCBI NO: 15218662 NR Description: hypothetical protein; protein id: At1g34500.1
  misc_feature (1)..(216): Homolog of NCBI NO: 8778260 NR Description: F12K21.17 [Arabidopsis thaliana]
  misc_feature (1)..(213): Homolog of NCBI NO: 15240495 NR Description: wax synthase-like protein; protein id: At5g55330.1
  misc_feature (1)..(216): Homolog of NCBI NO: 15218659 NR Description: hypothetical protein; protein id: At1g34490.1
  misc_feature (1)..(216): Homolog of NCBI NO: 27728714 NR Description: wax synthase isoform 1 [Vitis vinifera]

SEQ ID NO: 94473 - DNA, 1804 bp, Arabidopsis thaliana; identical to SEQ ID NO: 90717
  misc_feature (1)..(1804): Ceres Seq. ID no. 12724996
  misc_feature: MA Experiment ID: 108461 Result: Up-regulated in Transcription
  misc_feature: MA Experiment 108461 PARAMETER Experiment Name: At_Germinating_Seeds_cDNA_P Parameter: Age (day) Value: 1 vs. 0
  misc_feature: MA Experiment 108461 PARAMETER Experiment Name: At_Germinating_Seeds_cDNA_P Parameter: Tissue Value: Germinating Seeds
  misc_feature: MA Experiment ID: 108463 Result: Up-regulated in Transcription
  misc_feature: MA Experiment 108463 PARAMETER Experiment Name: At_Germinating_Seeds_cDNA_P Parameter: Age (day) Value: 3 vs. 0
  misc_feature: MA Experiment 108463 PARAMETER Experiment Name: At_Germinating_Seeds_cDNA_P Parameter: Tissue Value: Germinating Seeds
  misc_feature: MA Experiment ID: 108464 Result: Up-regulated in Transcription
  misc_feature: MA Experiment 108464 PARAMETER Experiment Name: At_Germinating_Seeds_cDNA_P Parameter: Age (day) Value: 4 vs. 0
  misc_feature: MA Experiment 108464 PARAMETER Experiment Name: At_Germinating_Seeds_cDNA_P Parameter: Tissue Value: Germinating Seeds
  misc_feature: MA Experiment ID: 108573 Result: Up-regulated in Transcription
  misc_feature: MA Experiment 108573 PARAMETER Experiment Name: At_Drought_cDNA_P Parameter: Timepoint (hr) Value: 6
  misc_feature: MA Experiment 108573 PARAMETER Experiment Name: At_Drought_cDNA_P Parameter: Tissue Value: Aerial
  misc_feature: MA Experiment 108573 PARAMETER Experiment Name: At_Drought_cDNA_P Parameter: Treatment Value: Drought vs. No Drought
  misc_feature: MA Experiment ID: 20000113 Result: Down-regulated in Transcription
  misc_feature: MA Experiment 20000113 PARAMETER Experiment Name: At_42deg_Heat_cDNA_P Parameter: Temperature (deg C) Value: 42 vs. 22
  misc_feature: MA Experiment 20000113 PARAMETER Experiment Name: At_42deg_Heat_cDNA_P Parameter: Timepoint (hr) Value: 8
  misc_feature: MA Experiment 20000113 PARAMETER Experiment Name: At_42deg_Heat_cDNA_P Parameter: Tissue Value: Aerial
  misc_feature: MA Experiment ID: 20000224 Result: Up-regulated in Transcription

SEQ ID NO: 94474 - protein, 460 aa, Arabidopsis thaliana; identical to SEQ ID NO: 90718
  peptide (1)..(460): Ceres Seq. ID no. 12724997
  misc_feature (112)..(182): Pfam Name: RNA recognition motif. (a.k.a. RRM, RBD, or RNP domain) Pfam Description: RNA recognition motif. (a.k.a. RRM, RBD, or RNP
  misc_feature (1)..(460): Homolog of NCBI NO: 18423760 NR Description: heterogeneous nuclear ribonucleoprotein (hnRNP), protein id: At5g55550.1, supported by cDNA: gi_15292724,
  misc_feature (1)..(445): Homolog of NCBI NO: 30696616 NR Description: RNA recognition motif (RRM)-containing protein
  misc_feature (1)..(444): Homolog of NCBI NO: 9758187 NR Description: RNA-binding protein-like [Arabidopsis thaliana]
  misc_feature (1)..(445): Homolog of NCBI NO: 22531168 NR Description: RNA-binding protein-like [Arabidopsis thaliana]
  misc_feature (1)..(445): Homolog of NCBI NO: 18416794 NR Description: heterogeneous nuclear ribonucleoprotein (hnRNP), protein id: At4g26650.1, supported by cDNA: gi_16930502, by cDNA: gi_20453244 [Arabidopsis thaliana]
  misc_feature (3)..(445): Homolog of NCBI NO: 7487039 NR Description: hypothetical protein T15N24.100 - Arabidopsis
  misc_feature (65)..(420): Homolog of NCBI NO: 2582639 NR Description: hnRNP-like protein [Arabidopsis thaliana]
  misc_feature (1)..(415): Homolog of NCBI NO: 6648193 NR Description: putative RNA-binding protein [Arabidopsis
  misc_feature (1)..(415): Homolog of NCBI NO: 18398061 NR Description: heterogeneous nuclear ribonucleoprotein (hnRNP), protein id: At3g07810.1, supported by cDNA: gi_15292696, by cDNA: gi_16930692 [Arabidopsis thaliana]
  misc_feature (1)..(415): Homolog of NCBI NO: 30680456 NR Description: heterogeneous nuclear ribonucleoprotein (hnRNP),

SEQ ID NO: 94475 - protein, 423 aa, Arabidopsis thaliana; identical to SEQ ID NO: 90719
  peptide (1)..(423): Ceres Seq. ID no. 12724998
  misc_feature (75)..(145): Pfam Name: RNA recognition motif. (a.k.a. RRM, RBD, or RNP domain) Pfam Description: RNA recognition motif. (a.k.a. RRM, RBD, or RNP
  misc_feature (1)..(423): Homolog of NCBI NO: 18423760 NR Description: heterogeneous nuclear ribonucleoprotein (hnRNP), protein id: At5g55550.1, supported by cDNA: gi_15292724,
  misc_feature (1)..(408): Homolog of NCBI NO: 30696616 NR Description: RNA recognition motif (RRM)-containing protein
  misc_feature (1)..(407): Homolog of NCBI NO: 9758187 NR Description: RNA-binding protein-like [Arabidopsis thaliana]
  misc_feature (1)..(408): Homolog of NCBI NO: 22531168 NR Description: RNA-binding protein-like [Arabidopsis thaliana]
  misc_feature (1)..(408): Homolog of NCBI NO: 18416794 NR Description: heterogeneous nuclear ribonucleoprotein (hnRNP), protein id: At4g26650.1, supported by cDNA: gi_16930502, by cDNA: gi_20453244 [Arabidopsis thaliana]
  misc_feature (1)..(408): Homolog of NCBI NO: 7487039 NR Description: hypothetical protein T15N24.100 - Arabidopsis
  misc_feature (28)..(383): Homolog of NCBI NO: 2582639 NR Description: hnRNP-like protein [Arabidopsis thaliana]
  misc_feature (1)..(378): Homolog of NCBI NO: 6648193 NR Description: putative RNA-binding protein [Arabidopsis
  misc_feature (1)..(378): Homolog of NCBI NO: 18398061 NR Description: heterogeneous nuclear ribonucleoprotein (hnRNP), protein id: At3g07810.1, supported by cDNA: gi_15292696, by cDNA: gi_16930692 [Arabidopsis thaliana]
  misc_feature (1)..(378): Homolog of NCBI NO: 30680456 NR Description: heterogeneous nuclear ribonucleoprotein (hnRNP),

SEQ ID NO: 94476 - protein, 396 aa, Arabidopsis thaliana; identical to SEQ ID NO: 90720
  peptide (1)..(396): Ceres Seq. ID no. 12724999
  misc_feature (48)..(118): Pfam Name: RNA recognition motif. (a.k.a. RRM, RBD, or RNP domain) Pfam Description: RNA recognition motif. (a.k.a. RRM, RBD, or RNP
  misc_feature (1)..(396): Homolog of NCBI NO: 18423760 NR Description: heterogeneous nuclear ribonucleoprotein (hnRNP), protein id: At5g55550.1, supported by cDNA: gi_15292724,
  misc_feature (1)..(381): Homolog of NCBI NO: 30696616 NR Description: RNA recognition motif (RRM)-containing protein
  misc_feature (1)..(380): Homolog of NCBI NO: 9758187 NR Description: RNA-binding protein-like [Arabidopsis thaliana]
  misc_feature (1)..(381): Homolog of NCBI NO: 22531168 NR Description: RNA-binding protein-like [Arabidopsis thaliana]
  misc_feature (1)..(381): Homolog of NCBI NO: 18416794 NR Description: heterogeneous nuclear ribonucleoprotein (hnRNP), protein id: At4g26650.1, supported by cDNA: gi_16930502, by cDNA: gi_20453244 [Arabidopsis thaliana]
  misc_feature (1)..(381): Homolog of NCBI NO: 7487039 NR Description: hypothetical protein T15N24.100 - Arabidopsis
  misc_feature (1)..(356): Homolog of NCBI NO: 2582639 NR Description: hnRNP-like protein [Arabidopsis thaliana]
  misc_feature (1)..(351): Homolog of NCBI NO: 6648193 NR Description: putative RNA-binding protein [Arabidopsis
  misc_feature (1)..(351): Homolog of NCBI NO: 18398061 NR Description: heterogeneous nuclear ribonucleoprotein (hnRNP), protein id: At3g07810.1, supported by cDNA: gi_15292696, by cDNA: gi_16930692 [Arabidopsis thaliana]
  misc_feature (1)..(351): Homolog of NCBI NO: 30680456 NR Description: heterogeneous nuclear ribonucleoprotein (hnRNP),

SEQ ID NO: 94477 - DNA, 1251 bp, Arabidopsis thaliana; identical to SEQ ID NO: 90721
  misc_feature (1)..(1251): Ceres Seq. ID no. 12725038
  misc_feature: MA Experiment ID: 108464 Result: Down-regulated in Transcription
  misc_feature: MA Experiment 108464 PARAMETER Experiment Name: At_Germinating_Seeds_cDNA_P Parameter: Age (day) Value: 4 vs. 0
  misc_feature: MA Experiment 108464 PARAMETER Experiment Name: At_Germinating_Seeds_cDNA_P Parameter: Tissue Value: Germinating Seeds
  misc_feature: MA Experiment ID: 108573 Result: Up-regulated in Transcription
  misc_feature: MA Experiment 108573 PARAMETER Experiment Name: At_Drought_cDNA_P Parameter: Timepoint (hr) Value: 6
  misc_feature: MA Experiment 108573 PARAMETER Experiment Name: At_Drought_cDNA_P Parameter: Tissue Value: Aerial
  misc_feature: MA Experiment 108573 PARAMETER Experiment Name: At_Drought_cDNA_P Parameter: Treatment Value: Drought vs. No Drought
  misc_feature: MA Experiment ID: 108576 Result: Down-regulated in Transcription
  misc_feature: MA Experiment 108576 PARAMETER Experiment Name: At_42deg_Heat_cDNA_P Parameter: Temperature (deg C) Value: 42 vs. 22
  misc_feature: MA Experiment 108576 PARAMETER Experiment Name: At_42deg_Heat_cDNA_P Parameter: Timepoint (hr) Value: 1
  misc_feature: MA Experiment 108576 PARAMETER Experiment Name: At_42deg_Heat_cDNA_P Parameter: Tissue Value: Aerial
  misc_feature: MA Experiment ID: 108577 Result: Down-regulated in Transcription
  misc_feature: MA Experiment 108577 PARAMETER Experiment Name: At_42deg_Heat_cDNA_P Parameter: Temperature (deg C) Value: 42 vs. 22
  misc_feature: MA Experiment 108577 PARAMETER Experiment Name: At_42deg_Heat_cDNA_P Parameter: Timepoint (hr) Value: 6
  misc_feature: MA Experiment 108577 PARAMETER Experiment Name: At_42deg_Heat_cDNA_P Parameter: Tissue Value: Aerial
  misc_feature: MA Experiment ID: 108595 Result: Down-regulated in Transcription
  misc_feature: MA Experiment 108595 PARAMETER Experiment Name: At_Ler-pi_Ovule_cDNA_P Parameter: Plant Line Value: null
  misc_feature: MA Experiment ID: 20000224 Result: Down-regulated in Transcription
  misc_feature: MA Experiment ID: 20000286 Result: Up-regulated in Transcription
  misc_feature: MA Experiment 20000286 PARAMETER Experiment Name: At_Open_Flower_P Parameter: Age (day) Value: 21
  misc_feature: MA Experiment 20000286 PARAMETER Experiment Name: At_Open_Flower_P Parameter: Plant Line Value: WS
  misc_feature: MA Experiment 20000286 PARAMETER Experiment Name: At_Open_Flower_P Parameter: Tissue Value: Half Open vs. Whole Plant
  misc_feature: MA Experiment ID: 20000573 Result: Up-regulated in Transcription
  misc_feature: MA Experiment 20000573 PARAMETER Experiment Name: At_100uM_ABA_Mutants__P Parameter: Organism Value: A. thaliana
  misc_feature: MA Experiment 20000573 PARAMETER Experiment Name: At_100uM_ABA_Mutants__P Parameter: Plant Line Value: CS22 vs. Ler wt
  misc_feature: MA Experiment 20000573 PARAMETER Experiment Name: At_100uM_ABA_Mutants__P Parameter: Timepoint (hr) Value: N/A
  misc_feature: MA Experiment 20000573 PARAMETER Experiment Name: At_100uM_ABA_Mutants__P Parameter: Tissue Value: Whole Plant
  misc_feature: MA Experiment 20000573 PARAMETER Experiment Name: At_100uM_ABA_Mutants__P Parameter: Treatment Value: None

SEQ ID NO: 94478 - protein, 282 aa, Arabidopsis thaliana; identical to SEQ ID NO: 90722
  peptide (1)..(282): Ceres Seq. ID no. 12725039
  misc_feature (4)..(282): Homolog of NCBI NO: 18394147 NR Description: expressed protein; protein id: At1g14685.1, by cDNA: gi_16604349 [Arabidopsis thaliana] T5E21.17 [Arabidopsis thaliana]
  misc_feature (4)..(282): Homolog of NCBI NO: 18391534 NR Description: expressed protein; protein id: At2g01930.1, by cDNA: 6899., supported by cDNA: gi_17528981, supported by gi_20465480 [Arabidopsis thaliana] >gi|25410944|pir||H84430
  misc_feature (4)..(282): Homolog of NCBI NO: 21594368 NR Description: unknown [Arabidopsis thaliana]

SEQ ID NO: 94479 - protein, 279 aa, Arabidopsis thaliana; identical to SEQ ID NO: 44176
  peptide (1)..(279): Ceres Seq. ID no. 12725040
  misc_feature (1)..(279): Homolog of NCBI NO: 18394147 NR Description: expressed protein; protein id: At1g14685.1, by cDNA: gi_16604349 [Arabidopsis thaliana] T5E21.17 [Arabidopsis thaliana]
  misc_feature (1)..(279): Homolog of NCBI NO: 18391534 NR Description: expressed protein; protein id: At2g01930.1, by cDNA: 6899., supported by cDNA: gi_17528981, supported by gi_20465480 [Arabidopsis thaliana] >gi|25410944|pir||H84430
  misc_feature (1)..(279): Homolog of NCBI NO: 21594368 NR Description: unknown [Arabidopsis thaliana]

SEQ ID NO: 94480 - protein, 252 aa, Arabidopsis thaliana; identical to SEQ ID NO: 44177
  peptide (1)..(252): Ceres Seq. ID no. 12725041
  misc_feature (1)..(252): Homolog of NCBI NO: 18394147 NR Description: expressed protein; protein id: At1g14685.1, by cDNA: gi_16604349 [Arabidopsis thaliana] T5E21.17 [Arabidopsis thaliana]
  misc_feature (1)..(252): Homolog of NCBI NO: 18391534 NR Description: expressed protein; protein id: At2g01930.1, by cDNA: 6899., supported by cDNA: gi_17528981, supported by gi_20465480 [Arabidopsis thaliana] >gi|25410944|pir||H84430
  misc_feature (1)..(252): Homolog of NCBI NO: 21594368 NR Description: unknown [Arabidopsis thaliana]

SEQ ID NO: 94481 - DNA, 1706 bp, Arabidopsis thaliana; identical to SEQ ID NO: 90725
  misc_feature (1)..(1706): Ceres Seq. ID no. 12725045
  misc_feature: MA Experiment ID: 108461 Result: Up-regulated in Transcription
  misc_feature: MA Experiment 108461 PARAMETER Experiment Name: At_Germinating_Seeds_cDNA_P Parameter: Age (day) Value: 1 vs. 0
  misc_feature: MA Experiment 108461 PARAMETER Experiment Name: At_Germinating_Seeds_cDNA_P Parameter: Tissue Value: Germinating Seeds
  misc_feature: MA Experiment ID: 108573 Result: Up-regulated in Transcription
  misc_feature: MA Experiment 108573 PARAMETER Experiment Name: At_Drought_cDNA_P Parameter: Timepoint (hr) Value: 6
  misc_feature: MA Experiment 108573 PARAMETER Experiment Name: At_Drought_cDNA_P Parameter: Tissue Value: Aerial
  misc_feature: MA Experiment 108573 PARAMETER Experiment Name: At_Drought_cDNA_P Parameter: Treatment Value: Drought vs. No Drought
  misc_feature: MA Experiment ID: 108585 Result: Up-regulated in Transcription
  misc_feature: MA Experiment 108585 PARAMETER Experiment Name: At_5mM_NaNP_cDNA_P Parameter: Timepoint (hr) Value: 6
  misc_feature: MA Experiment 108585 PARAMETER Experiment Name: At_5mM_NaNP_cDNA_P Parameter: Tissue Value: Aerial
  misc_feature: MA Experiment 108585 PARAMETER Experiment Name: At_5mM_NaNP_cDNA_P Parameter: Treatment Value: null
  misc_feature: MA Experiment ID: 20000113 Result: Down-regulated in Transcription
  misc_feature: MA Experiment 20000113 PARAMETER Experiment Name: At_42deg_Heat_cDNA_P Parameter: Temperature (deg C) Value: 42 vs. 22
  misc_feature: MA Experiment 20000113 PARAMETER Experiment Name: At_42deg_Heat_cDNA_P Parameter: Timepoint (hr) Value: 8
  misc_feature: MA Experiment 20000113 PARAMETER Experiment Name: At_42deg_Heat_cDNA_P Parameter: Tissue Value: Aerial
  misc_feature: MA Experiment ID: 20000224 Result: Up-regulated in Transcription

SEQ ID NO: 94482 - protein, 412 aa, Arabidopsis thaliana; identical to SEQ ID NO: 90726
  peptide (1)..(412): Ceres Seq. ID no. 12725046
  misc_feature (356)..(411): Pfam Name: 2OG-Fe(II) oxygenase superfamily Pfam Description: 2OG-Fe(II) oxygenase superfamily
  misc_feature (1)..(411): Homolog of NCBI NO: 18394153 NR Description: expressed protein; protein id: At1g14710.1
  misc_feature (1)..(331): Homolog of NCBI NO: 8778238 NR Description: F10B6.11 [Arabidopsis thaliana]
  misc_feature (330)..(411): Homolog of NCBI NO: 8778238 NR Description: F10B6.11 [Arabidopsis thaliana]
  misc_feature (1)..(177): Homolog of NCBI NO: 37530586 NR Description: unknown protein [Oryza sativa (japonica
  misc_feature (244)..(411): Homolog of NCBI NO: 37530586 NR Description: unknown protein [Oryza sativa (japonica
  misc_feature (178)..(411): Homolog of NCBI NO: 15236223 NR Description: hypothetical protein; protein id: At4g02940.1, by cDNA: gi_20260287 [Arabidopsis thaliana]
  misc_feature (6)..(111): Homolog of NCBI NO: 15236223 NR Description: hypothetical protein; protein id: At4g02940.1, by cDNA: gi_20260287 [Arabidopsis thaliana]
  misc_feature (122)..(411): Homolog of NCBI NO: 29367427 NR Description: unknown [Oryza sativa (japonica cultivar-group)]
  misc_feature (215)..(411): Homolog of NCBI NO: 25409091 NR Description: hypothetical protein At2g48080 [imported] - thaliana >gi|4249414|gb|AAD13711.1| unknown protein [Arabidopsis
  misc_feature (20)..(98): Homolog of NCBI NO: 25409091 NR Description: hypothetical protein At2g48080 [imported] - thaliana >gi|4249414|gb|AAD13711.1| unknown protein [Arabidopsis

SEQ ID NO: 94483 - protein, 410 aa, Arabidopsis thaliana; identical to SEQ ID NO: 90727
  peptide (1)..(410): Ceres Seq. ID no. 12725047
  misc_feature (354)..(409): Pfam Name: 2OG-Fe(II) oxygenase superfamily Pfam Description: 2OG-Fe(II) oxygenase superfamily
  misc_feature (1)..(409): Homolog of NCBI NO: 18394153 NR Description: expressed protein; protein id: At1g14710.1
  misc_feature (1)..(329): Homolog of NCBI NO: 8778238 NR Description: F10B6.11 [Arabidopsis thaliana]
  misc_feature (328)..(409): Homolog of NCBI NO: 8778238 NR Description: F10B6.11 [Arabidopsis thaliana]
  misc_feature (1)..(175): Homolog of NCBI NO: 37530586 NR Description: unknown protein [Oryza sativa (japonica
  misc_feature (242)..(409): Homolog of NCBI NO: 37530586 NR Description: unknown protein [Oryza sativa (japonica
  misc_feature (176)..(409): Homolog of NCBI NO: 15236223 NR Description: hypothetical protein; protein id: At4g02940.1, by cDNA: gi_20260287 [Arabidopsis thaliana]
  misc_feature (4)..(109): Homolog of NCBI NO: 15236223 NR Description: hypothetical protein; protein id: At4g02940.1, by cDNA: gi_20260287 [Arabidopsis thaliana]
  misc_feature (120)..(409): Homolog of NCBI NO: 29367427 NR Description: unknown [Oryza sativa (japonica cultivar-group)]
  misc_feature (213)..(409): Homolog of NCBI NO: 25409091 NR Description: hypothetical protein At2g48080 [imported] - thaliana >gi|4249414|gb|AAD13711.1| unknown protein [Arabidopsis
  misc_feature (18)..(96): Homolog of NCBI NO: 25409091 NR Description: hypothetical protein At2g48080 [imported] - thaliana >gi|4249414|gb|AAD13711.1| unknown protein [Arabidopsis

SEQ ID NO: 94484 - protein, 330 aa, Arabidopsis thaliana; identical to SEQ ID NO: 90728
  peptide (1)..(330): Ceres Seq. ID no. 12725048
  misc_feature (274)..(329): Pfam Name: 2OG-Fe(II) oxygenase superfamily Pfam Description: 2OG-Fe(II) oxygenase superfamily
  misc_feature (1)..(329): Homolog of NCBI NO: 18394153 NR Description: expressed protein; protein id: At1g14710.1
  misc_feature (1)..(249): Homolog of NCBI NO: 8778238 NR Description: F10B6.11 [Arabidopsis thaliana]
  misc_feature (248)..(329): Homolog of NCBI NO: 8778238 NR Description: F10B6.11 [Arabidopsis thaliana]
  misc_feature (1)..(95): Homolog of NCBI NO: 37530586 NR Description: unknown protein [Oryza sativa (japonica
  misc_feature (162)..(329): Homolog of NCBI NO: 37530586 NR Description: unknown protein [Oryza sativa (japonica
  misc_feature (96)..(329): Homolog of NCBI NO: 15236223 NR Description: hypothetical protein; protein id: At4g02940.1, by cDNA: gi_20260287 [Arabidopsis thaliana]
  misc_feature (1)..(29): Homolog of NCBI NO: 15236223 NR Description: hypothetical protein; protein id: At4g02940.1, by cDNA: gi_20260287 [Arabidopsis thaliana]
  misc_feature (40)..(329): Homolog of NCBI NO: 29367427 NR Description: unknown [Oryza sativa (japonica cultivar-group)]
  misc_feature (133)..(329): Homolog of NCBI NO: 25409091 NR Description: hypothetical protein At2g48080 [imported] - thaliana >gi|4249414|gb|AAD13711.1| unknown protein [Arabidopsis
  misc_feature (1)..(16): Homolog of NCBI NO: 25409091 NR Description: hypothetical protein At2g48080 [imported] - thaliana >gi|4249414|gb|AAD13711.1| unknown protein [Arabidopsis

SEQ ID NO: 94485 - DNA, 811 bp, Arabidopsis thaliana; identical to SEQ ID NO: 90729
  misc_feature (1)..(811): Ceres Seq. ID no. 12725049
  misc_feature: MA Experiment ID: 108433 Result: Up-regulated in Transcription
  misc_feature: MA Experiment 108433 PARAMETER Experiment Name: At_rhl_Mutant2_cDNA_P Parameter: Age (day) Value: 7
  misc_feature: MA Experiment 108433 PARAMETER Experiment Name: At_rhl_Mutant2_cDNA_P Parameter: Organism Value: A. thaliana
  misc_feature: MA Experiment 108433 PARAMETER Experiment Name: At_rhl_Mutant2_cDNA_P Parameter: Plant Line Value: rhl Mutant vs. wt landsburg
  misc_feature: MA Experiment 108433 PARAMETER Experiment Name: At_rhl_Mutant2_cDNA_P Parameter: Tissue Value: Roots
  misc_feature: MA Experiment ID: 108434 Result: Down-regulated in Transcription
  misc_feature: MA Experiment 108434 PARAMETER Experiment Name: At_Root_Tips_cDNA_P Parameter: Tissue Value: Root Tips
  misc_feature: MA Experiment ID: 108462 Result: Up-regulated in Transcription
  misc_feature: MA Experiment 108462 PARAMETER Experiment Name: At_Germinating_Seeds_cDNA_P Parameter: Age (day) Value: 2 vs. 0
  misc_feature: MA Experiment 108462 PARAMETER Experiment Name: At_Germinating_Seeds_cDNA_P Parameter: Tissue Value: Germinating Seeds
  misc_feature: MA Experiment ID: 108463 Result: Up-regulated in Transcription
  misc_feature: MA Experiment 108463 PARAMETER Experiment Name: At_Germinating_Seeds_cDNA_P Parameter: Age (day) Value: 3 vs. 0
  misc_feature: MA Experiment 108463 PARAMETER Experiment Name: At_Germinating_Seeds_cDNA_P Parameter: Tissue Value: Germinating Seeds
  misc_feature: MA Experiment ID: 108464 Result: Up-regulated in Transcription
  misc_feature: MA Experiment 108464 PARAMETER Experiment Name: At_Germinating_Seeds_cDNA_P Parameter: Age (day) Value: 4 vs. 0
  misc_feature: MA Experiment 108464 PARAMETER Experiment Name: At_Germinating_Seeds_cDNA_P Parameter: Tissue Value: Germinating Seeds
  misc_feature: MA Experiment ID: 108501 Result: Up-regulated in Transcription
  misc_feature: MA Experiment 108501 PARAMETER Experiment Name: At_ap2_floral_buds_cDNA_P Parameter: Plant Line Value: ap2 (Ler.)
  misc_feature: MA Experiment 108501 PARAMETER Experiment Name: At_ap2_floral_buds_cDNA_P Parameter: Tissue Value: Closed Flower
  misc_feature: MA Experiment ID: 20000112 Result: Down-regulated in Transcription
  misc_feature: MA Experiment 20000112 PARAMETER Experiment Name: At_42deg_Heat_cDNA_P Parameter: Temperature (deg C) Value: 42 vs. 22
  misc_feature: MA Experiment 20000112 PARAMETER Experiment Name: At_42deg_Heat_cDNA_P Parameter: Timepoint (hr) Value: 2
  misc_feature: MA Experiment 20000112 PARAMETER Experiment Name: At_42deg_Heat_cDNA_P Parameter: Tissue Value: Aerial
  misc_feature: MA Experiment ID: 20000182 Result: Up-regulated in Transcription
  misc_feature: MA Experiment 20000182 PARAMETER Experiment Name: At_2mM_SA_P Parameter: Age (day) Value: 14
  misc_feature: MA Experiment 20000182 PARAMETER Experiment Name: At_2mM_SA_P Parameter: Organism Value: A. thaliana
  misc_feature: MA Experiment 20000182 PARAMETER Experiment Name: At_2mM_SA_P Parameter: Plant Line Value: WS
  misc_feature: MA Experiment 20000182 PARAMETER Experiment Name: At_2mM_SA_P Parameter: Timepoint (hr) Value: 6
  misc_feature: MA Experiment 20000182 PARAMETER Experiment Name: At_2mM_SA_P Parameter: Tissue Value: Aerial
  misc_feature: MA Experiment 20000182 PARAMETER Experiment Name: At_2mM_SA_P Parameter: Treatment Value: 2mM SA vs. No Treatment
  misc_feature: MA Experiment ID: 20000185 Result: Down-regulated in Transcription
  misc_feature: MA Experiment 20000185 PARAMETER Experiment Name: At_Roots__P Parameter: Age (day) Value: 7 vs. 21
  misc_feature: MA Experiment 20000185 PARAMETER Experiment Name: At_Roots__P Parameter: Organism Value: A. thaliana
  misc_feature: MA Experiment 20000185 PARAMETER Experiment Name: At_Roots__P Parameter: Tissue Value: Roots vs. Whole Plant
  misc_feature: MA Experiment ID: 20000441 Result: Up-regulated in Transcription
  misc_feature: MA Experiment 20000441 PARAMETER Experiment Name: At_1uM_BR-BRZ__P Parameter: Tissue Value: Shoot Apices
  misc_feature: MA Experiment 20000441 PARAMETER Experiment Name: At_1uM_BR-BRZ__P Parameter: Treatment Value: 1uM BR vs. No Treatment
  misc_feature: MA Experiment ID: 20000495 Result: Up-regulated in Transcription
  misc_feature: MA Experiment 20000495 PARAMETER Experiment Name: At_Guard_Cells_P Parameter: Harvest Date Value: 8/2/2002
  misc_feature: MA Experiment 20000495 PARAMETER Experiment Name: At_Guard_Cells_P Parameter: Organism Value: A. thaliana
  misc_feature: MA Experiment 20000495 PARAMETER Experiment Name: At_Guard_Cells_P Parameter: Tissue Value: Guard Cells vs. Leaves
  misc_feature: MA Experiment ID: 20001248 Result: Up-regulated in Transcription
  misc_feature: MA Experiment 20001248 PARAMETER Experiment Name: At_Far-red-induction_P Parameter: Age (day) Value: 7
  misc_feature: MA Experiment 20001248 PARAMETER Experiment Name: At_Far-red-induction_P Parameter: Light Value: Far-red vs. White
  misc_feature: MA Experiment 20001248 PARAMETER Experiment Name: At_Far-red-induction_P Parameter: Organism Value: A. thaliana
  misc_feature: MA Experiment 20001248 PARAMETER Experiment Name: At_Far-red-induction_P Parameter: Plant Line Value: Columbia
  misc_feature: MA Experiment 20001248 PARAMETER Experiment Name: At_Far-red-induction_P Parameter: Timepoint (hr) Value: 4
  misc_feature: MA Experiment 20001248 PARAMETER Experiment Name: At_Far-red-induction_P Parameter: Tissue Value: Whole Plant
  misc_feature: MA Experiment ID: 20001450 Result: Up-regulated in Transcription
  misc_feature: MA Experiment 20001450 PARAMETER Experiment Name: At_Far-red-induction_P Parameter: Age (day) Value: 7
  misc_feature: MA Experiment 20001450 PARAMETER Experiment Name: At_Far-red-induction_P Parameter: Light Value: Far-red vs. White
  misc_feature: MA Experiment 20001450 PARAMETER Experiment Name: At_Far-red-induction_P Parameter: Organism Value: A. thaliana
  misc_feature: MA Experiment 20001450 PARAMETER Experiment Name: At_Far-red-induction_P Parameter: Plant Line Value: Columbia
  misc_feature: MA Experiment 20001450 PARAMETER Experiment Name: At_Far-red-induction_P Parameter: Timepoint (hr) Value: 8
  misc_feature: MA Experiment 20001450 PARAMETER Experiment Name: At_Far-red-induction_P Parameter: Tissue Value: Whole Plant
  misc_feature: MA Experiment ID: 20001906 Result: Down-regulated in Transcription
  misc_feature: MA Experiment 20001906 PARAMETER Experiment Name: At_Drought_Reproduction_P Parameter: Age (day) Value: 35
  misc_feature: MA Experiment 20001906 PARAMETER Experiment Name: At_Drought_Reproduction_P Parameter: Organism Value: A. thaliana
  misc_feature: MA Experiment 20001906 PARAMETER Experiment Name: At_Drought_Reproduction_P Parameter: Plant Line Value: WS
  misc_feature: MA Experiment 20001906 PARAMETER Experiment Name: At_Drought_Reproduction_P Parameter: Timepoint (day) Value: 5
  misc_feature: MA Experiment 20001906 PARAMETER Experiment Name: At_Drought_Reproduction_P Parameter: Tissue Value: Siliques
  misc_feature: MA Experiment 20001906 PARAMETER Experiment Name: At_Drought_Reproduction_P Parameter: Treatment Value: Drought vs. No Drought

SEQ ID NO: 94486 - protein, 214 aa, Arabidopsis thaliana; identical to SEQ ID NO: 22357
  peptide (1)..(214): Ceres Seq. ID no. 12725050
  misc_feature (14)..(214): Homolog of NCBI NO: 18394174 NR Description: expressed protein; protein id: At1g14890.1, by cDNA: 33355., supported by cDNA: gi_17529115 [Arabidopsis
  misc_feature (17)..(214): Homolog of NCBI NO: 15226321 NR Description: unknown protein; protein id: At2g01610.1
  misc_feature (26)..(211): Homolog of NCBI NO: 21554277 NR Description: unknown [Arabidopsis thaliana]
  misc_feature (22)..(211): Homolog of NCBI NO: 18409660 NR Description: expressed protein; protein id: At1g70720.1,
  misc_feature (22)..(211): Homolog of NCBI NO: 25406069 NR Description: hypothetical protein F5A18.10 [imported] -
  misc_feature (48)..(207): Homolog of NCBI NO: 15220674 NR Description: Unknown protein; protein id: At1g23205.1, by cDNA: 28033. [Arabidopsis thaliana] >gi|25402977|pir||D86366
  misc_feature (48)..(207): Homolog of NCBI NO: 21555465 NR Description: unknown [Arabidopsis thaliana]
  misc_feature (53)..(210): Homolog of NCBI NO: 112717 NR Description: 21 KD PROTEIN PRECURSOR (1.2 PROTEIN)
  misc_feature (14)..(210): Homolog of NCBI NO: 15232790 NR Description: putative protein; protein id: At3g47380.1
  misc_feature (14)..(211): Homolog of NCBI NO: 15234982 NR Description: putative protein; protein id: At4g25260.1, by cDNA: gi_16604469, supported by cDNA: gi_18958029 [Arabidopsis

SEQ ID NO: 94487 - protein, 201 aa, Arabidopsis thaliana; identical to SEQ ID NO: 22358
  peptide (1)..(201): Ceres Seq. ID no. 12725051
  misc_feature (1)..(201): Homolog of NCBI NO: 18394174 NR Description: expressed protein; protein id: At1g14890.1, by cDNA: 33355., supported by cDNA: gi_17529115 [Arabidopsis
  misc_feature (4)..(201): Homolog of NCBI NO: 15226321 NR Description: unknown protein; protein id: At2g01610.1
  misc_feature (13)..(198): Homolog of NCBI NO: 21554277 NR Description: unknown [Arabidopsis thaliana]
  misc_feature (9)..(198): Homolog of NCBI NO: 18409660 NR Description: expressed protein; protein id: At1g70720.1,
  misc_feature (9)..(198): Homolog of NCBI NO: 25406069 NR Description: hypothetical protein F5A18.10 [imported] -
  misc_feature (35)..(194): Homolog of NCBI NO: 15220674 NR Description: Unknown protein; protein id: At1g23205.1, by cDNA: 28033. [Arabidopsis thaliana] >gi|25402977|pir||D86366
  misc_feature (35)..(194): Homolog of NCBI NO: 21555465 NR Description: unknown [Arabidopsis thaliana]
  misc_feature (40)..(197): Homolog of NCBI NO: 112717 NR Description: 21 KD PROTEIN PRECURSOR (1.2 PROTEIN)
  misc_feature (1)..(197): Homolog of NCBI NO: 15232790 NR Description: putative protein; protein id: At3g47380.1
  misc_feature (1)..(198): Homolog of NCBI NO: 15234982 NR Description: putative protein; protein id: At4g25260.1, by cDNA: gi_16604469, supported by cDNA: gi_18958029 [Arabidopsis

SEQ ID NO: 94488 - DNA, 1189 bp, Arabidopsis thaliana; identical to SEQ ID NO: 90732
  misc_feature (1)..(1189): Ceres Seq. ID no. 12725056
  misc_feature: MA Experiment ID: 108434 Result: Down-regulated in Transcription
  misc_feature: MA Experiment 108434 PARAMETER Experiment Name: At_Root_Tips_cDNA_P Parameter: Tissue Value: Root Tips
  misc_feature: MA Experiment ID: 108579 Result: Up-regulated in Transcription
  misc_feature: MA Experiment 108579 PARAMETER Experiment Name: At_4deg_Cold_cDNA_P Parameter: Temperature (deg C) Value: 4 vs. 22
  misc_feature: MA Experiment 108579 PARAMETER Experiment Name: At_4deg_Cold_cDNA_P Parameter: Timepoint (hr) Value: 6
  misc_feature: MA Experiment 108579 PARAMETER Experiment Name: At_4deg_Cold_cDNA_P Parameter: Tissue Value: Aerial
  misc_feature: MA Experiment ID: 108595 Result: Down-regulated in Transcription
  misc_feature: MA Experiment 108595 PARAMETER Experiment Name: At_Ler-pi_Ovule_cDNA_P Parameter: Plant Line Value: null
  misc_feature: MA Experiment ID: 108668 Result: Down-regulated in Transcription
  misc_feature: MA Experiment 108668 PARAMETER Experiment Name: At_2mM_SA_cDNA_P Parameter: Plant Line Value: WS
  misc_feature: MA Experiment 108668 PARAMETER Experiment Name: At_2mM_SA_cDNA_P Parameter: Timepoint (hr) Value: 6
  misc_feature: MA Experiment 108668 PARAMETER Experiment Name: At_2mM_SA_cDNA_P Parameter: Treatment Value: 2mM SA vs. No Treatment
  misc_feature: MA Experiment ID: 20000071 Result: Up-regulated in Transcription
  misc_feature: MA Experiment 20000071 PARAMETER Experiment Name: At_100uM_ABA_Mutants_cDNA_P Parameter: Plant Line Value: CS8104
  misc_feature: MA Experiment 20000071 PARAMETER Experiment Name: At_100uM_ABA_Mutants_cDNA_P Parameter: Timepoint (hr) Value: 6
  misc_feature: MA Experiment 20000071 PARAMETER Experiment Name: At_100uM_ABA_Mutants_cDNA_P Parameter: Tissue Value: Aerial
  misc_feature: MA Experiment 20000071 PARAMETER Experiment Name: At_100uM_ABA_Mutants_cDNA_P Parameter: Treatment Value: 100uM ABA vs. No Treatment
  misc_feature: MA Experiment ID: 20000093 Result: Down-regulated in Transcription
  misc_feature: MA Experiment 20000093 PARAMETER Experiment Name: At_42deg_Heat_cDNA_P Parameter: Temperature (deg C) Value: 42 vs. 22
  misc_feature: MA Experiment 20000093 PARAMETER Experiment Name: At_42deg_Heat_cDNA_P Parameter: Timepoint (hr) Value: 0.5
  misc_feature: MA Experiment 20000093 PARAMETER Experiment Name: At_42deg_Heat_cDNA_P Parameter: Tissue Value: Aerial
  misc_feature: MA Experiment ID: 20000111 Result: Down-regulated in Transcription
  misc_feature: MA Experiment 20000111 PARAMETER Experiment Name: At_42deg_Heat_cDNA_P Parameter: Temperature (deg C) Value: 42 vs. 22
  misc_feature: MA Experiment 20000111 PARAMETER Experiment Name: At_42deg_Heat_cDNA_P Parameter: Timepoint (hr) Value: 6
  misc_feature: MA Experiment 20000111 PARAMETER Experiment Name: At_42deg_Heat_cDNA_P Parameter: Tissue Value: Aerial
  misc_feature: MA Experiment ID: 20000112 Result: Down-regulated in Transcription
  misc_feature: MA Experiment 20000112 PARAMETER Experiment Name: At_42deg_Heat_cDNA_P Parameter: Temperature (deg C) Value: 42 vs. 22
  misc_feature: MA Experiment 20000112 PARAMETER Experiment Name: At_42deg_Heat_cDNA_P Parameter: Timepoint (hr) Value: 2
  misc_feature: MA Experiment 20000112 PARAMETER Experiment Name: At_42deg_Heat_cDNA_P Parameter: Tissue Value: Aerial
  misc_feature: MA Experiment ID: 20000144 Result: Down-regulated in Transcription
  misc_feature: MA Experiment 20000144 PARAMETER Experiment Name: At_42deg_Heat_cDNA_P Parameter: Temperature (deg C) Value: 42 vs. 22
  misc_feature: MA Experiment 20000144 PARAMETER Experiment Name: At_42deg_Heat_cDNA_P Parameter: Timepoint (hr) Value: 1
  misc_feature: MA Experiment 20000144 PARAMETER Experiment Name: At_42deg_Heat_cDNA_P Parameter: Tissue Value: Aerial
  misc_feature: MA Experiment ID: 20000171 Result: Down-regulated in Transcription
  misc_feature: MA Experiment 20000171 PARAMETER Experiment Name: At_42deg_Heat_P Parameter: Age (day) Value: 14
  misc_feature: MA Experiment 20000171 PARAMETER Experiment Name: At_42deg_Heat_P Parameter: Organism Value: A. thaliana
  misc_feature: MA Experiment 20000171 PARAMETER Experiment Name: At_42deg_Heat_P Parameter: Plant Line Value: WS
  misc_feature: MA Experiment 20000171 PARAMETER Experiment Name: At_42deg_Heat_P Parameter: Temperature (deg C) Value: 42 vs. 22
  misc_feature: MA Experiment 20000171 PARAMETER Experiment Name: At_42deg_Heat_P Parameter: Timepoint (hr) Value: 1
  misc_feature: MA Experiment 20000171 PARAMETER Experiment Name: At_42deg_Heat_P Parameter: Tissue Value: Aerial
  misc_feature: MA Experiment ID: 20000182 Result: Down-regulated in Transcription
  misc_feature: MA Experiment 20000182 PARAMETER Experiment Name: At_2mM_SA_P Parameter: Age (day) Value: 14
  misc_feature: MA Experiment 20000182 PARAMETER Experiment Name: At_2mM_SA_P Parameter: Organism Value: A. thaliana
  misc_feature: MA Experiment 20000182 PARAMETER Experiment Name: At_2mM_SA_P Parameter: Plant Line Value: WS
  misc_feature: MA Experiment 20000182 PARAMETER Experiment Name: At_2mM_SA_P Parameter: Timepoint (hr) Value: 6
  misc_feature: MA Experiment 20000182 PARAMETER Experiment Name: At_2mM_SA_P Parameter: Tissue Value: Aerial
  misc_feature: MA Experiment 20000182 PARAMETER Experiment Name: At_2mM_SA_P Parameter: Treatment Value: 2mM SA vs. No Treatment
  misc_feature: MA Experiment ID: 20000437 Result: Up-regulated in Transcription
  misc_feature: MA Experiment 20000437 PARAMETER Experiment Name: At_Drought_P Parameter: Age (day) Value: 8
  misc_feature: MA Experiment 20000437 PARAMETER Experiment Name: At_Drought_P Parameter: Organism Value: A. thaliana
  misc_feature: MA Experiment 20000437 PARAMETER Experiment Name: At_Drought_P Parameter: Plant Line Value: WS
  misc_feature: MA Experiment 20000437 PARAMETER Experiment Name: At_Drought_P Parameter: Timepoint (hr) Value: 24
  misc_feature: MA Experiment 20000437 PARAMETER Experiment Name: At_Drought_P Parameter: Tissue Value: Whole Plant
  misc_feature: MA Experiment 20000437 PARAMETER Experiment Name: At_Drought_P Parameter: Treatment Value: Drought vs. No Drought
  misc_feature: MA Experiment ID: 20000794 Result: Down-regulated in Transcription
  misc_feature: MA Experiment 20000794 PARAMETER Experiment Name: At_Petals_P Parameter: Age (day) Value: 23-25 days
  misc_feature: MA Experiment 20000794 PARAMETER Experiment Name: At_Petals_P Parameter: Plant Line Value: WS
  misc_feature: MA Experiment 20000794 PARAMETER Experiment Name: At_Petals_P Parameter: Tissue Value: Petals vs. Whole plant
  misc_feature: MA Experiment ID: 20001556 Result: Up-regulated in Transcription
  misc_feature: MA Experiment 20001556 PARAMETER Experiment Name: At_Drought_Soil_Dry_P Parameter: Age (day) Value: 26
  misc_feature: MA Experiment 20001556 PARAMETER Experiment Name: At_Drought_Soil_Dry_P Parameter: Organism Value: A. thaliana
  misc_feature: MA Experiment 20001556 PARAMETER Experiment Name: At_Drought_Soil_Dry_P Parameter: Plant Line Value: WS
  misc_feature: MA Experiment 20001556 PARAMETER Experiment Name: At_Drought_Soil_Dry_P Parameter: Post Timepoint (hr) Value: None
  misc_feature: MA Experiment 20001556 PARAMETER Experiment Name: At_Drought_Soil_Dry_P Parameter: Post-Treatment Value: None
  misc_feature: MA Experiment 20001556 PARAMETER Experiment Name: At_Drought_Soil_Dry_P Parameter: Timepoint (day) Value: 12
  misc_feature: MA Experiment 20001556 PARAMETER Experiment Name: At_Drought_Soil_Dry_P Parameter: Treatment Value: Drought vs. No Drought
  misc_feature: MA Experiment ID: 20001905 Result: Up-regulated in Transcription
  misc_feature: MA Experiment 20001905 PARAMETER Experiment Name: At_Drought_Reproduction_P Parameter: Age (day) Value: 40
  misc_feature: MA Experiment 20001905 PARAMETER Experiment Name: At_Drought_Reproduction_P Parameter: Organism Value: A. thaliana
  misc_feature: MA Experiment 20001905 PARAMETER Experiment Name: At_Drought_Reproduction_P Parameter: Plant Line Value: WS
  misc_feature: MA Experiment 20001905 PARAMETER Experiment Name: At_Drought_Reproduction_P Parameter: Timepoint (day) Value: 10
  misc_feature: MA Experiment 20001905 PARAMETER Experiment Name: At_Drought_Reproduction_P Parameter: Tissue Value: Rosettes
  misc_feature: MA Experiment 20001905 PARAMETER Experiment Name: At_Drought_Reproduction_P Parameter: Treatment Value: Drought vs. No Drought
  misc_feature: MA Experiment ID: 20001908 Result: Up-regulated in Transcription
  misc_feature: MA Experiment 20001908 PARAMETER Experiment Name: At_Drought_Reproduction_P Parameter: Age (day) Value: 40
  misc_feature: MA Experiment 20001908 PARAMETER Experiment Name: At_Drought_Reproduction_P Parameter: Organism Value: A. thaliana
  misc_feature: MA Experiment 20001908 PARAMETER Experiment Name: At_Drought_Reproduction_P Parameter: Plant Line Value: WS
  misc_feature: MA Experiment 20001908 PARAMETER Experiment Name: At_Drought_Reproduction_P Parameter: Timepoint (day) Value: 10
  misc_feature: MA Experiment 20001908 PARAMETER Experiment Name: At_Drought_Reproduction_P Parameter: Tissue Value: Siliques
  misc_feature: MA Experiment 20001908 PARAMETER Experiment Name: At_Drought_Reproduction_P Parameter: Treatment Value: Drought vs. No Drought
  misc_feature: MA Experiment ID: 20001911 Result: Up-regulated in Transcription
  misc_feature: MA Experiment 20001911 PARAMETER Experiment Name: At_Drought_Reproduction_P Parameter: Age (day) Value: 40
  misc_feature: MA Experiment 20001911 PARAMETER Experiment Name: At_Drought_Reproduction_P Parameter: Organism Value: A. thaliana
  misc_feature: MA Experiment 20001911 PARAMETER Experiment Name: At_Drought_Reproduction_P Parameter: Plant Line Value: WS
  misc_feature: MA Experiment 20001911 PARAMETER Experiment Name: At_Drought_Reproduction_P Parameter: Timepoint (day) Value: 10
  misc_feature: MA Experiment 20001911 PARAMETER Experiment Name: At_Drought_Reproduction_P Parameter: Tissue Value: Flowers
  misc_feature: MA Experiment 20001911 PARAMETER Experiment Name: At_Drought_Reproduction_P Parameter: Treatment Value: Drought vs. No Drought

SEQ ID NO: 94489 - protein, 332 aa, Arabidopsis thaliana; identical to SEQ ID NO: 30747
  peptide (1)..(332): Ceres Seq. ID no. 12725057
  misc_feature (31)..(216): Pfam Name: Glycosyl hydrolases family 16 Pfam Description: Glycosyl hydrolases family 16
  misc_feature (1)..(332): Homolog of NCBI NO: 15223878 NR Description: xyloglucan endotransglycosylase (XTR2); protein At1g14720.1, supported by cDNA: 19079., supported by cDNA: supported by cDNA: gi_14326520, supported by cDNA: gi_2154610
  misc_feature (1)..(332): Homolog of NCBI NO: 5533313 NR Description: endoxyloglucan transferase [Arabidopsis thaliana]
  misc_feature (1)..(332): Homolog of NCBI NO: 15226364 NR Description: xyloglucan endotransglycosylase (EXGT-A3); id: At2g01850.1, supported by cDNA: 18876., supported by cDNA: supported by cDNA: gi_2154608 [Arabidopsis thaliana]
  misc_feature (1)..(332): Homolog of NCBI NO: 21553969 NR Description: putative xyloglucan-specific glucanase
  misc_feature (17)..(331): Homolog of NCBI NO: 6681351 NR Description: ETAG-A3 [Lycopersicon esculentum]
  misc_feature (24)..(324): Homolog of NCBI NO: 13560781 NR Description: endoxyloglucan transferase [Daucus carota]
  misc_feature (7)..(325): Homolog of NCBI NO: 2129774 NR Description: xyloglucan endo-1,4-beta-D-glucanase (EC 3.2.1.-) - Arabidopsis thaliana (fragment) >gi|1244754|gb|AAB18365.1|
  misc_feature (7)..(325): Homolog of NCBI NO: 15222593 NR Description: xyloglucan endotransglycosylase (XTR4), putative; id: At1g32170.1, supported by cDNA: 21403., supported by cDNA: [Arabidopsis thaliana] >gi|25313534|pir||B86446 probable
  misc_feature (7)..(325): Homolog of NCBI NO: 21618261 NR Description: endoxyloglucan transferase, putative [Arabidopsis
  misc_feature (26)..(329): Homolog of NCBI NO: 32470643 NR Description: putative xyloglucan endotransglycosylase-related

SEQ ID NO: 94490 - protein, 322 aa, Arabidopsis thaliana; identical to SEQ ID NO: 30748
  peptide (1)..(322): Ceres Seq. ID no. 12725058
  misc_feature (21)..(206): Pfam Name: Glycosyl hydrolases family 16 Pfam Description: Glycosyl hydrolases family 16
  misc_feature (1)..(322): Homolog of NCBI NO: 15223878 NR Description: xyloglucan endotransglycosylase (XTR2); protein At1g14720.1, supported by cDNA: 19079., supported by cDNA: supported by cDNA: gi_14326520, supported by cDNA: gi_2154610
  misc_feature (1)..(322): Homolog of NCBI NO: 5533313 NR Description: endoxyloglucan transferase [Arabidopsis thaliana]
  misc_feature (1)..(322): Homolog of NCBI NO: 15226364 NR Description: xyloglucan endotransglycosylase (EXGT-A3); id: At2g01850.1, supported by cDNA: 18876., supported by cDNA: supported by cDNA: gi_2154608 [Arabidopsis thaliana]
  misc_feature (1)..(322): Homolog of NCBI NO: 21553969 NR Description: putative xyloglucan-specific glucanase
  misc_feature (7)..(321): Homolog of NCBI NO: 6681351 NR Description: ETAG-A3 [Lycopersicon esculentum]
  misc_feature (14)..(314): Homolog of NCBI NO: 13560781 NR Description: endoxyloglucan transferase [Daucus carota]
  misc_feature (1)..(315): Homolog of NCBI NO: 2129774 NR Description: xyloglucan endo-1,4-beta-D-glucanase (EC 3.2.1.-) - Arabidopsis thaliana (fragment) >gi|1244754|gb|AAB18365.1|
  misc_feature (1)..(315): Homolog of NCBI NO: 15222593 NR Description: xyloglucan endotransglycosylase (XTR4), putative; id: At1g32170.1, supported by cDNA: 21403., supported by cDNA: [Arabidopsis thaliana] >gi|25313534|pir||B86446 probable
  misc_feature (1)..(315): Homolog of NCBI NO: 21618261 NR Description: endoxyloglucan transferase, putative [Arabidopsis
  misc_feature (16)..(319): Homolog of NCBI NO: 32470643 NR Description: putative xyloglucan endotransglycosylase-related

SEQ ID NO: 94491 - DNA, 657 bp, Arabidopsis thaliana; identical to SEQ ID NO: 90735
  misc_feature (1)..(657): Ceres Seq. ID no. 12725063
  misc_feature: MA Experiment ID: 20000314 Result: Up-regulated in Transcription
  misc_feature: MA Experiment 20000314 PARAMETER Experiment Name: At_14day_Shoots-Roots_Sub_P Parameter: Age (day) Value: 14
  misc_feature: MA Experiment 20000314 PARAMETER Experiment Name: At_14day_Shoots-Roots_Sub_P Parameter: Organism Value: A. thaliana
  misc_feature: MA Experiment 20000314 PARAMETER Experiment Name: At_14day_Shoots-Roots_Sub_P Parameter: Plant Line Value: WS
  misc_feature: MA Experiment 20000314 PARAMETER Experiment Name: At_14day_Shoots-Roots_Sub_P Parameter: Tissue Value: Roots vs. Whole Plant
  misc_feature: MA Experiment ID: 20000346 Result: Up-regulated in Transcription
  misc_feature: MA Experiment 20000346 PARAMETER Experiment Name: At_2mM_SA_Sub_P Parameter: Age (day) Value: 14
  misc_feature: MA Experiment 20000346 PARAMETER Experiment Name: At_2mM_SA_Sub_P Parameter: Organism Value: A. thaliana
  misc_feature: MA Experiment 20000346 PARAMETER Experiment Name: At_2mM_SA_Sub_P Parameter: Plant Line Value: WS
  misc_feature: MA Experiment 20000346 PARAMETER Experiment Name: At_2mM_SA_Sub_P Parameter: Timepoint (hr) Value: 1
  misc_feature: MA Experiment 20000346 PARAMETER Experiment Name: At_2mM_SA_Sub_P Parameter: Tissue Value: Aerial
  misc_feature: MA Experiment 20000346 PARAMETER Experiment Name: At_2mM_SA_Sub_P Parameter: Treatment Value: 2mM SA vs. No Treatment
  misc_feature: MA Experiment ID: 20000347 Result: Up-regulated in Transcription
  misc_feature: MA Experiment 20000347 PARAMETER Experiment Name: At_2mM_SA_Sub_P Parameter: Age (day) Value: 14
  misc_feature: MA Experiment 20000347 PARAMETER Experiment Name: At_2mM_SA_Sub_P Parameter: Organism Value: A. thaliana
  misc_feature: MA Experiment 20000347 PARAMETER Experiment Name: At_2mM_SA_Sub_P Parameter: Plant Line Value: WS
  misc_feature: MA Experiment 20000347 PARAMETER Experiment Name: At_2mM_SA_Sub_P Parameter: Timepoint (hr) Value: 6
  misc_feature: MA Experiment 20000347 PARAMETER Experiment Name: At_2mM_SA_Sub_P Parameter: Tissue Value: Aerial
  misc_feature: MA Experiment 20000347 PARAMETER Experiment Name: At_2mM_SA_Sub_P Parameter: Treatment Value: 2mM SA vs. No Treatment
  misc_feature: MA Experiment ID: 20000355 Result: Down-regulated in Transcription
  misc_feature: MA Experiment 20000355 PARAMETER Experiment Name: At_Siliques_Sub_P Parameter: Age (day) Value: 21
  misc_feature: MA Experiment 20000355 PARAMETER Experiment Name: At_Siliques_Sub_P Parameter: Organism Value: A. thaliana
  misc_feature: MA Experiment 20000355 PARAMETER Experiment Name: At_Siliques_Sub_P Parameter: Plant Line Value: WS
  misc_feature: MA Experiment 20000355 PARAMETER Experiment Name: At_Siliques_Sub_P Parameter: Tissue Value: Less Than 5mm Siliques vs. Whole Plant
  misc_feature: MA Experiment ID: 20000440 Result: Down-regulated in Transcription
  misc_feature: MA Experiment 20000440 PARAMETER Experiment Name: At_Closed-Flower__Sub_P Parameter: Tissue Value: Closed Flower vs. Whole Plant

SEQ ID NO: 94492 - protein, 152 aa, Arabidopsis thaliana; identical to SEQ ID NO: 27254
  peptide (1)..(152): Ceres Seq. ID no. 12725064
  misc_feature (12)..(116): Pfam Name: Protein of unknown function, DUF614 Pfam Description: Protein of unknown function, DUF614
  misc_feature (1)..(152): Homolog of NCBI NO: 15223920 NR Description: unknown protein; protein id: At1g14870.1, by cDNA: gi_18252924 [Arabidopsis thaliana] F10B6.27 [Arabidopsis thaliana] >gi|18252925|gb|AAL62389.1|
  misc_feature (1)..(152): Homolog of NCBI NO: 15223921 NR Description: unknown protein; protein id: At1g14880.1 thaliana] >gi|8778224|gb|AAF79233.1|AC006917_18 F10B6.29 thaliana] >gi|26452733|dbj|BAC43448.1| unknown protein
  misc_feature (54)..(152): Homolog of NCBI NO: 22327352 NR Description: unknown protein; protein id: At5g35525.1
  misc_feature (1)..(33): Homolog of NCBI NO: 22327352 NR Description: unknown protein; protein id: At5g35525.1
  misc_feature (8)..(147): Homolog of NCBI NO: 34897268 NR Description: unknown protein [Oryza sativa (japonica
  misc_feature (10)..(137): Homolog of NCBI NO: 34897274 NR Description: hypothetical protein [Oryza sativa (japonica group)] >gi|28372695|gb|AAO39879.1| hypothetical protein [Oryza
  misc_feature (10)..(132): Homolog of NCBI NO: 34897270 NR Description: hypothetical protein [Oryza sativa (japonica group)] >gi|28372688|gb|AAO39872.1| hypothetical protein [Oryza
  misc_feature (15)..(152): Homolog of NCBI NO: 15221456 NR Description: hypothetical protein; protein id: At1g68610.1
  misc_feature (1)..(152): Homolog of NCBI NO: 8272626 NR Description: ORFX [Lycopersicon esculentum] fw2.2 [Lycopersicon esculentum] >gi|27413997|gb|AAO12186.1| fw2.2 esculentum] >gi|27413999|gb|AAO12187.1| fw2.2 [Lycopersicon
  misc_feature (1)..(152): Homolog of NCBI NO: 27414005 NR Description: fw2.2 [Lycopersicon pimpinellifolium] fw2.2 [Lycopersicon pimpinellifolium] >gi|27414009|gb|AAO12192.1| [Lycopersicon pimpinellifolium] >gi|27414011|gb|AAO12193.1| fw2.2

SEQ ID NO: 94493 - DNA, 2754 bp, Arabidopsis thaliana; identical to SEQ ID NO: 90737
  misc_feature (1)..(2754): Ceres Seq. ID no. 12725068
  misc_feature: MA Experiment ID: 20000495 Result: Down-regulated in Transcription
  misc_feature: MA Experiment 20000495 PARAMETER Experiment Name: At_Guard_Cells_P Parameter: Harvest Date Value: 8/2/2002
  misc_feature: MA Experiment 20000495 PARAMETER Experiment Name: At_Guard_Cells_P Parameter: Organism Value: A. thaliana
  misc_feature: MA Experiment 20000495 PARAMETER Experiment Name: At_Guard_Cells_P Parameter: Tissue Value: Guard Cells vs. Leaves

SEQ ID NO: 94494 - protein, 846 aa, Arabidopsis thaliana; identical to SEQ ID NO: 44833
  peptide (1)..(846): Ceres Seq. ID no. 12725069
  misc_feature (9)..(168): Pfam Name: BRO1-like domain Pfam Description: BRO1-like domain
  misc_feature (4)..(839): Homolog of NCBI NO: 37535674 NR Description: putative signal tranduction protein [Oryza sativa
  misc_feature (10)..(817): Homolog of NCBI NO: 19880054 NR Description: ALG-2 interacting protein X [Dictyostelium >gi|28829646|gb|AAO52162.1| similar to Dictyostelium discoideum
  misc_feature (11)..(842): Homolog of NCBI NO: 6424942 NR Description: ALG-2 interacting protein 1 [Homo sapiens]
  misc_feature (16)..(842): Homolog of NCBI NO: 6755002 NR Description: programmed cell death 6 interacting protein [Mus
  misc_feature (16)..(842): Homolog of NCBI NO: 20071292 NR Description: programmed cell death 6 interacting protein [Mus
  misc_feature (11)..(842): Homolog of NCBI NO: 13375569 NR Description: HP95 [Homo sapiens]
  misc_feature (11)..(842): Homolog of NCBI NO: 22027538 NR Description: programmed cell death 6 interacting protein; interacting protein 1 [Homo sapiens]
  misc_feature (16)..(842): Homolog of NCBI NO: 30048422 NR Description: Pdcd6ip protein [Mus musculus]
  misc_feature (11)..(837): Homolog of NCBI NO: 31076857 NR Description: Programmed cell death 6 interacting protein transduction protein Xp95) >gi|4416376|gb|AAD20341.1| putative
  misc_feature (24)..(836): Homolog of NCBI NO: 20521926 NR Description: KIAA1471 protein [Homo sapiens]

SEQ ID NO: 94495 - protein, 837 aa, Arabidopsis thaliana; identical to SEQ ID NO: 44834
  peptide (1)..(837): Ceres Seq. ID no. 12725070
  misc_feature (1)..(159): Pfam Name: BRO1-like domain Pfam Description: BRO1-like domain
  misc_feature (1)..(830): Homolog of NCBI NO: 37535674 NR Description: putative signal tranduction protein [Oryza sativa
  misc_feature (1)..(808): Homolog of NCBI NO: 19880054 NR Description: ALG-2 interacting protein X [Dictyostelium >gi|28829646|gb|AAO52162.1| similar to Dictyostelium discoideum
  misc_feature (2)..(833): Homolog of NCBI NO: 6424942 NR Description: ALG-2 interacting protein 1 [Homo sapiens]
  misc_feature (7)..(833): Homolog of NCBI NO: 6755002 NR Description: programmed cell death 6 interacting protein [Mus
  misc_feature (7)..(833): Homolog of NCBI NO: 20071292 NR Description: programmed cell death 6 interacting protein [Mus
  misc_feature (2)..(833): Homolog of NCBI NO: 13375569 NR Description: HP95 [Homo sapiens]
  misc_feature (2)..(833): Homolog of NCBI NO: 22027538 NR Description: programmed cell death 6 interacting protein; interacting protein 1 [Homo sapiens]
  misc_feature (7)..(833): Homolog of NCBI NO: 30048422 NR Description: Pdcd6ip protein [Mus musculus]
  misc_feature (2)..(828): Homolog of NCBI NO: 31076857 NR Description: Programmed cell death 6 interacting protein transduction protein Xp95) >gi|4416376|gb|AAD20341.1| putative
  misc_feature (15)..(827): Homolog of NCBI NO: 20521926 NR Description: KIAA1471 protein [Homo sapiens]

SEQ ID NO: 94496 - protein, 692 aa, Arabidopsis thaliana; identical to SEQ ID NO: 44835
  peptide (1)..(692): Ceres Seq. ID no. 12725071
  misc_feature (569)..(683): Pfam Name: Extensin-like region Pfam Description: Extensin-like region
  misc_feature (1)..(685): Homolog of NCBI NO: 37535674 NR Description: putative signal tranduction protein [Oryza sativa
  misc_feature (1)..(663): Homolog of NCBI NO: 19880054 NR Description: ALG-2 interacting protein X [Dictyostelium >gi|28829646|gb|AAO52162.1| similar to Dictyostelium discoideum
  misc_feature (1)..(688): Homolog of NCBI NO: 6424942 NR Description: ALG-2 interacting protein 1 [Homo sapiens]
  misc_feature (1)..(688): Homolog of NCBI NO: 6755002 NR Description: programmed cell death 6 interacting protein [Mus
  misc_feature (1)..(688): Homolog of NCBI NO: 20071292 NR Description: programmed cell death 6 interacting protein [Mus
  misc_feature (1)..(688): Homolog of NCBI NO: 13375569 NR Description: HP95 [Homo sapiens]
  misc_feature (1)..(688): Homolog of NCBI NO: 22027538 NR Description: programmed cell death 6 interacting protein; interacting protein 1 [Homo sapiens]
  misc_feature (1)..(688): Homolog of NCBI NO: 30048422 NR Description: Pdcd6ip protein [Mus musculus]
  misc_feature (1)..(683): Homolog of NCBI NO: 31076857 NR Description: Programmed cell death 6 interacting protein transduction protein Xp95) >gi|4416376|gb|AAD20341.1| putative
  misc_feature (1)..(682): Homolog of NCBI NO: 20521926 NR Description: KIAA1471 protein [Homo sapiens]

SEQ ID NO: 94497 - DNA, 911 bp, Arabidopsis thaliana; identical to SEQ ID NO: 90741
  misc_feature (1)..(911): Ceres Seq. ID no. 12725072
  misc_feature: MA Experiment ID: 108433 Result: Up-regulated in Transcription
  misc_feature: MA Experiment 108433 PARAMETER Experiment Name: At_rhl_Mutant2_cDNA_P Parameter: Age (day) Value: 7
  misc_feature: MA Experiment 108433 PARAMETER Experiment Name: At_rhl_Mutant2_cDNA_P Parameter: Organism Value: A. thaliana
  misc_feature: MA Experiment 108433 PARAMETER Experiment Name: At_rhl_Mutant2_cDNA_P Parameter: Plant Line Value: rhl Mutant vs. wt landsburg
  misc_feature: MA Experiment 108433 PARAMETER Experiment Name: At_rhl_Mutant2_cDNA_P Parameter: Tissue Value: Roots
  misc_feature: MA Experiment ID: 108434 Result: Down-regulated in Transcription
  misc_feature: MA Experiment 108434 PARAMETER Experiment Name: At_Root_Tips_cDNA_P Parameter: Tissue Value: Root Tips
  misc_feature: MA Experiment ID: 108461 Result: Down-regulated in Transcription
  misc_feature: MA Experiment 108461 PARAMETER Experiment Name: At_Germinating_Seeds_cDNA_P Parameter: Age (day) Value: 1 vs. 0
  misc_feature: MA Experiment 108461 PARAMETER Experiment Name: At_Germinating_Seeds_cDNA_P Parameter: Tissue Value: Germinating Seeds
  misc_feature: MA Experiment ID: 108464 Result: Up-regulated in Transcription
  misc_feature: MA Experiment 108464 PARAMETER Experiment Name: At_Germinating_Seeds_cDNA_P Parameter: Age (day) Value: 4 vs. 0
  misc_feature: MA Experiment 108464 PARAMETER Experiment Name: At_Germinating_Seeds_cDNA_P Parameter: Tissue Value: Germinating Seeds
  misc_feature: MA Experiment ID: 108488 Result: Down-regulated in Transcription
  misc_feature: MA Experiment ID: 108489 Result: Up-regulated in Transcription
  misc_feature: MA Experiment ID: 108561 Result: Up-regulated in Transcription
  misc_feature: MA Experiment 108561 PARAMETER Experiment Name: At_100uM_ABA_cDNA_P Parameter: Timepoint (hr) Value: 6
  misc_feature: MA Experiment 108561 PARAMETER Experiment Name: At_100uM_ABA_cDNA_P Parameter: Tissue Value: Aerial
  misc_feature: MA Experiment 108561 PARAMETER Experiment Name: At_100uM_ABA_cDNA_P Parameter: Treatment Value: 100uM ABA vs. No Treatment
  misc_feature: MA Experiment ID: 108579 Result: Down-regulated in Transcription
  misc_feature: MA Experiment 108579 PARAMETER Experiment Name: At_4deg_Cold_cDNA_P Parameter: Temperature (deg C) Value: 4 vs. 22
  misc_feature: MA Experiment 108579 PARAMETER Experiment Name: At_4deg_Cold_cDNA_P Parameter: Timepoint (hr) Value: 6
  misc_feature: MA Experiment 108579 PARAMETER Experiment Name: At_4deg_Cold_cDNA_P Parameter: Tissue Value: Aerial
  misc_feature: MA Experiment ID: 108668 Result: Up-regulated in Transcription
  misc_feature: MA Experiment 108668 PARAMETER Experiment Name: At_2mM_SA_cDNA_P Parameter: Plant Line Value: WS
  misc_feature: MA Experiment 108668 PARAMETER Experiment Name: At_2mM_SA_cDNA_P Parameter: Timepoint (hr) Value: 6
  misc_feature: MA Experiment 108668 PARAMETER Experiment Name: At_2mM_SA_cDNA_P Parameter: Treatment Value: 2mM SA vs. No Treatment
  misc_feature: MA Experiment ID: 20000070 Result: Up-regulated in Transcription
  misc_feature: MA Experiment 20000070 PARAMETER Experiment Name: At_100uM_ABA_Mutants_cDNA_P Parameter: Plant Line Value: CS24
  misc_feature: MA Experiment 20000070 PARAMETER Experiment Name: At_100uM_ABA_Mutants_cDNA_P Parameter: Timepoint (hr) Value: 6
  misc_feature: MA Experiment 20000070 PARAMETER Experiment Name: At_100uM_ABA_Mutants_cDNA_P Parameter: Tissue Value: Aerial
  misc_feature: MA Experiment 20000070 PARAMETER Experiment Name: At_100uM_ABA_Mutants_cDNA_P Parameter: Treatment Value: 100uM ABA vs. No Treatment
  misc_feature: MA Experiment ID: 20000087 Result: Up-regulated in Transcription
  misc_feature: MA Experiment 20000087 PARAMETER Experiment Name: At_100uM_ABA_Mutants_cDNA_P Parameter: Plant Line Value: WS
  misc_feature: MA Experiment 20000087 PARAMETER Experiment Name: At_100uM_ABA_Mutants_cDNA_P Parameter: Timepoint (hr) Value: 6
  misc_feature: MA Experiment 20000087 PARAMETER Experiment Name: At_100uM_ABA_Mutants_cDNA_P Parameter: Tissue Value: Aerial
  misc_feature: MA Experiment 20000087 PARAMETER Experiment Name: At_100uM_ABA_Mutants_cDNA_P Parameter: Treatment Value: 100uM ABA vs. No Treatment
  misc_feature: MA Experiment ID: 20000117 Result: Up-regulated in Transcription
  misc_feature: MA Experiment 20000117 PARAMETER Experiment Name: At_100uM_ABA_Mutants_cDNA_P Parameter: Plant Line Value: Columbia
  misc_feature: MA Experiment 20000117 PARAMETER Experiment Name: At_100uM_ABA_Mutants_cDNA_P Parameter: Timepoint (hr) Value: 6
  misc_feature: MA Experiment 20000117 PARAMETER Experiment Name: At_100uM_ABA_Mutants_cDNA_P Parameter: Tissue Value: Aerial
  misc_feature: MA Experiment 20000117 PARAMETER Experiment Name: At_100uM_ABA_Mutants_cDNA_P Parameter: Treatment Value: 100uM ABA vs. No Treatment
  misc_feature: MA Experiment ID: 20000179 Result: Down-regulated in Transcription
  misc_feature: MA Experiment 20000179 PARAMETER Experiment Name: At_Germinating_Seeds_P Parameter: Age (hr) Value: 6 vs. 0
  misc_feature: MA Experiment 20000179 PARAMETER Experiment Name: At_Germinating_Seeds_P Parameter: Tissue Value: Germinating Seeds
  misc_feature: MA Experiment ID: 20000180 Result: Down-regulated in Transcription
  misc_feature: MA Experiment 20000180 PARAMETER Experiment Name: At_Germinating_Seeds_P Parameter: Age (hr) Value: 24 vs. 0
  misc_feature: MA Experiment 20000180 PARAMETER Experiment Name: At_Germinating_Seeds_P Parameter: Tissue Value: Germinating Seeds
  misc_feature: MA Experiment ID: 20000184 Result: Down-regulated in Transcription
  misc_feature: MA Experiment 20000184 PARAMETER Experiment Name: At_Shoots__P Parameter: Age (day) Value: 7
  misc_feature: MA Experiment 20000184 PARAMETER Experiment Name: At_Shoots__P Parameter: Tissue Value: Shoots vs. Whole Plant
  misc_feature: MA Experiment ID: 20000185 Result: Up-regulated in Transcription
  misc_feature: MA Experiment 20000185 PARAMETER Experiment Name: At_Roots__P Parameter: Age (day) Value: 7 vs. 21
  misc_feature: MA Experiment 20000185 PARAMETER Experiment Name: At_Roots__P Parameter: Organism Value: A. thaliana
  misc_feature: MA Experiment 20000185 PARAMETER Experiment Name: At_Roots__P Parameter: Tissue Value: Roots vs. Whole Plant
  misc_feature: MA Experiment ID: 20000224 Result: Down-regulated in Transcription
  misc_feature: MA Experiment ID: 20000227 Result: Down-regulated in Transcription
  misc_feature: MA Experiment 20000227 PARAMETER Experiment Name: At_Root-Tips-vs-Tops_P Parameter: Tissue Value: Root Tips vs. Root Tops
  misc_feature: MA Experiment ID: 20000234 Result: Down-regulated in Transcription
  misc_feature: MA Experiment 20000234 PARAMETER Experiment Name: At_Siliques_P Parameter: Age (day) Value: 21
  misc_feature: MA Experiment 20000234 PARAMETER Experiment Name: At_Siliques_P Parameter: Organism Value: A. thaliana
  misc_feature: MA Experiment 20000234 PARAMETER Experiment Name: At_Siliques_P Parameter: Plant Line Value: WS
  misc_feature: MA Experiment 20000234 PARAMETER Experiment Name: At_Siliques_P Parameter: Tissue Value: Less Than 5mm Siliques vs. Whole Plant
  misc_feature: MA Experiment ID: 20000235 Result: Down-regulated in Transcription
  misc_feature: MA Experiment 20000235 PARAMETER Experiment Name: At_Siliques_P Parameter: Age (day) Value: 21
  misc_feature: MA Experiment 20000235 PARAMETER Experiment Name: At_Siliques_P Parameter: Organism Value: A. thaliana
  misc_feature: MA Experiment 20000235 PARAMETER Experiment Name: At_Siliques_P Parameter: Plant Line Value: WS
  misc_feature: MA Experiment 20000235 PARAMETER Experiment Name: At_Siliques_P Parameter: Tissue Value: 5-10mm Siliques vs. Whole Plant
  misc_feature: MA Experiment ID: 20000264 Result: Down-regulated in Transcription
  misc_feature: MA Experiment 20000264 PARAMETER Experiment Name: At_Open_Flower_P Parameter: Age (day) Value: 21
  misc_feature: MA Experiment 20000264 PARAMETER Experiment Name: At_Open_Flower_P Parameter: Plant Line Value: WS
  misc_feature: MA Experiment 20000264 PARAMETER Experiment Name: At_Open_Flower_P Parameter: Tissue Value: Open Flower vs. Whole Plant
  misc_feature: MA Experiment ID: 20000265 Result: Down-regulated in Transcription
  misc_feature: MA Experiment 20000265 PARAMETER Experiment Name: At_Open_Flower_P Parameter: Age (day) Value: 21
  misc_feature: MA Experiment 20000265 PARAMETER Experiment Name: At_Open_Flower_P Parameter: Plant Line Value: WS
  misc_feature: MA Experiment 20000265 PARAMETER Experiment Name: At_Open_Flower_P Parameter: Tissue Value: Closed Flower vs. Whole Plant
  misc_feature: MA Experiment ID: 20000267 Result: Down-regulated in Transcription
  misc_feature: MA Experiment 20000267 PARAMETER Experiment Name: At_Drought_P Parameter: Age (day) Value: 7
  misc_feature: MA Experiment 20000267 PARAMETER Experiment Name: At_Drought_P Parameter: Organism Value: A. thaliana
  misc_feature: MA Experiment 20000267 PARAMETER Experiment Name: At_Drought_P Parameter: Plant Line Value: WS
  misc_feature: MA Experiment 20000267 PARAMETER Experiment Name: At_Drought_P Parameter: Timepoint (hr) Value: 6
  misc_feature: MA Experiment 20000267 PARAMETER Experiment Name: At_Drought_P Parameter: Tissue Value: Whole Plant
  misc_feature: MA Experiment 20000267 PARAMETER Experiment Name: At_Drought_P Parameter: Treatment Value: Drought vs. No Drought
  misc_feature: MA Experiment ID: 20000438 Result: Down-regulated in Transcription
  misc_feature: MA Experiment 20000438 PARAMETER Experiment Name: At_Shoots__P Parameter: Age (day) Value: 14
  misc_feature: MA Experiment 20000438 PARAMETER Experiment Name: At_Shoots__P Parameter: Tissue Value: Shoots vs. Whole Plant
  misc_feature: MA Experiment ID: 20000441 Result: Up-regulated in Transcription
  misc_feature: MA Experiment 20000441 PARAMETER Experiment Name: At_1uM_BR-BRZ__P Parameter: Tissue Value: Shoot Apices
  misc_feature: MA Experiment 20000441 PARAMETER Experiment Name: At_1uM_BR-BRZ__P Parameter: Treatment Value: 1uM BR vs. No Treatment
  misc_feature: MA Experiment ID: 20000443 Result: Up-regulated in Transcription
  misc_feature: MA Experiment 20000443 PARAMETER Experiment Name: At_1uM_BR-BRZ__P Parameter: Tissue Value: Shoot Apices
  misc_feature: MA Experiment 20000443 PARAMETER Experiment Name: At_1uM_BR-BRZ__P Parameter: Treatment Value: 1uM BRZ vs. No Treatment
  misc_feature: MA Experiment ID: 20000794 Result: Down-regulated in Transcription
  misc_feature: MA Experiment 20000794 PARAMETER Experiment Name: At_Petals_P Parameter: Age (day) Value: 23-25 days
  misc_feature: MA Experiment 20000794 PARAMETER Experiment Name: At_Petals_P Parameter: Plant Line Value: WS
  misc_feature: MA Experiment 20000794 PARAMETER Experiment Name: At_Petals_P Parameter: Tissue Value: Petals vs. Whole plant
  misc_feature: MA Experiment ID: 20001248 Result: Up-regulated in Transcription
  misc_feature: MA Experiment 20001248 PARAMETER Experiment Name: At_Far-red-induction_P Parameter: Age (day) Value: 7
  misc_feature: MA Experiment 20001248 PARAMETER Experiment Name: At_Far-red-induction_P Parameter: Light Value: Far-red vs. White
  misc_feature: MA Experiment 20001248 PARAMETER Experiment Name: At_Far-red-induction_P Parameter: Organism Value: A. thaliana
  misc_feature: MA Experiment 20001248 PARAMETER Experiment Name: At_Far-red-induction_P Parameter: Plant Line Value: Columbia
  misc_feature: MA Experiment 20001248 PARAMETER Experiment Name: At_Far-red-induction_P Parameter: Timepoint (hr) Value: 4
  misc_feature: MA Experiment 20001248 PARAMETER Experiment Name: At_Far-red-induction_P Parameter: Tissue Value: Whole Plant
  misc_feature: MA Experiment ID: 20001450 Result: Up-regulated in Transcription
  misc_feature: MA Experiment 20001450 PARAMETER Experiment Name: At_Far-red-induction_P Parameter: Age (day) Value: 7
  misc_feature: MA Experiment 20001450 PARAMETER Experiment Name: At_Far-red-induction_P Parameter: Light Value: Far-red vs. White
  misc_feature: MA Experiment 20001450 PARAMETER Experiment Name: At_Far-red-induction_P Parameter: Organism Value: A. thaliana
  misc_feature: MA Experiment 20001450 PARAMETER Experiment Name: At_Far-red-induction_P Parameter: Plant Line Value: Columbia
  misc_feature: MA Experiment 20001450 PARAMETER Experiment Name: At_Far-red-induction_P Parameter: Timepoint (hr) Value: 8
  misc_feature: MA Experiment 20001450 PARAMETER Experiment Name: At_Far-red-induction_P Parameter: Tissue Value: Whole Plant
  misc_feature: MA Experiment ID: 20001451 Result: Up-regulated in Transcription
  misc_feature: MA Experiment 20001451 PARAMETER Experiment Name: At_Far-red-induction_P Parameter: Age (day) Value: 7
  misc_feature: MA Experiment 20001451 PARAMETER Experiment Name: At_Far-red-induction_P Parameter: Light Value: Far-red vs. White
  misc_feature: MA Experiment 20001451 PARAMETER Experiment Name: At_Far-red-induction_P Parameter: Organism Value: A. thaliana
  misc_feature: MA Experiment 20001451 PARAMETER Experiment Name: At_Far-red-induction_P Parameter: Plant Line Value: Columbia
  misc_feature: MA Experiment 20001451 PARAMETER Experiment Name: At_Far-red-induction_P Parameter: Timepoint (hr) Value: 24
  misc_feature: MA Experiment 20001451 PARAMETER Experiment Name: At_Far-red-induction_P Parameter: Tissue Value: Whole Plant
  misc_feature: MA Experiment ID: 20001503 Result: Down-regulated in Transcription
  misc_feature: MA Experiment 20001503 PARAMETER Experiment Name: At_Far-red-enriched_P Parameter: Age (day) Value: 7
  misc_feature: MA Experiment 20001503 PARAMETER Experiment Name: At_Far-red-enriched_P Parameter: Light Value: Far-red enriched vs. White
  misc_feature: MA Experiment 20001503 PARAMETER Experiment Name: At_Far-red-enriched_P Parameter: Organism Value: A. thaliana
  misc_feature: MA Experiment 20001503 PARAMETER Experiment Name: At_Far-red-enriched_P Parameter: Plant Line Value: Columbia
  misc_feature: MA Experiment 20001503 PARAMETER Experiment Name: At_Far-red-enriched_P Parameter: Timepoint (day) Value: 3
  misc_feature: MA Experiment 20001503 PARAMETER Experiment Name: At_Far-red-enriched_P Parameter: Tissue Value: Whole Plant
  misc_feature: MA Experiment ID: 20001504 Result: Down-regulated in Transcription
  misc_feature: MA Experiment 20001504 PARAMETER Experiment Name: At_Far-red-enriched_P Parameter: Age (day) Value: 10
  misc_feature: MA Experiment 20001504 PARAMETER Experiment Name: At_Far-red-enriched_P Parameter: Light Value: Far-red enriched vs. White
  misc_feature: MA Experiment 20001504 PARAMETER Experiment Name: At_Far-red-enriched_P Parameter: Organism Value: A. thaliana
  misc_feature: MA Experiment 20001504 PARAMETER Experiment Name: At_Far-red-enriched_P Parameter: Plant Line Value: Columbia
  misc_feature: MA Experiment 20001504 PARAMETER Experiment Name: At_Far-red-enriched_P Parameter: Timepoint (day) Value: 6
  misc_feature: MA Experiment 20001504 PARAMETER Experiment Name: At_Far-red-enriched_P Parameter: Tissue Value: Whole Plant
  misc_feature: MA Experiment ID: 20001556 Result: Up-regulated in Transcription
  misc_feature: MA Experiment 20001556 PARAMETER Experiment Name: At_Drought_Soil_Dry_P Parameter: Age (day) Value: 26
  misc_feature: MA Experiment 20001556 PARAMETER Experiment Name: At_Drought_Soil_Dry_P Parameter: Organism Value: A. thaliana
  misc_feature: MA Experiment 20001556 PARAMETER Experiment Name: At_Drought_Soil_Dry_P Parameter: Plant Line Value: WS
  misc_feature: MA Experiment 20001556 PARAMETER Experiment Name: At_Drought_Soil_Dry_P Parameter: Post Timepoint (hr) Value: None
  misc_feature: MA Experiment 20001556 PARAMETER Experiment Name: At_Drought_Soil_Dry_P Parameter: Post-Treatment Value: None
  misc_feature: MA Experiment 20001556 PARAMETER Experiment Name: At_Drought_Soil_Dry_P Parameter: Timepoint (day) Value: 12
  misc_feature: MA Experiment 20001556 PARAMETER Experiment Name: At_Drought_Soil_Dry_P Parameter: Treatment Value: Drought vs. No Drought
  misc_feature: MA Experiment ID: 20001557 Result: Up-regulated in Transcription
  misc_feature: MA Experiment 20001557 PARAMETER Experiment Name: At_Drought_Soil_Dry_P Parameter: Age (day) Value: 27
  misc_feature: MA Experiment 20001557 PARAMETER Experiment Name: At_Drought_Soil_Dry_P Parameter: Organism Value: A. thaliana
  misc_feature: MA Experiment 20001557 PARAMETER Experiment Name: At_Drought_Soil_Dry_P Parameter: Plant Line Value: WS
  misc_feature: MA Experiment 20001557 PARAMETER Experiment Name: At_Drought_Soil_Dry_P Parameter: Post Timepoint (hr) Value: 3
  misc_feature: MA Experiment 20001557 PARAMETER Experiment Name: At_Drought_Soil_Dry_P Parameter: Post-Treatment Value: Re-Water vs. No Drought
  misc_feature: MA Experiment 20001557 PARAMETER Experiment Name: At_Drought_Soil_Dry_P Parameter: Timepoint (day) Value: 13
  misc_feature: MA Experiment 20001557 PARAMETER Experiment Name: At_Drought_Soil_Dry_P Parameter: Treatment Value: Drought vs. No Drought
  misc_feature: MA Experiment ID: 20001558 Result: Up-regulated in Transcription
  misc_feature: MA Experiment 20001558 PARAMETER Experiment Name: At_Drought_Soil_Dry_P Parameter: Age (day) Value: 27
  misc_feature: MA Experiment 20001558 PARAMETER Experiment Name: At_Drought_Soil_Dry_P Parameter: Organism Value: A. thaliana
  misc_feature: MA Experiment 20001558 PARAMETER Experiment Name: At_Drought_Soil_Dry_P Parameter: Plant Line Value: WS
  misc_feature: MA Experiment 20001558 PARAMETER Experiment Name: At_Drought_Soil_Dry_P Parameter: Post Timepoint (hr) Value: 6
  misc_feature: MA Experiment 20001558 PARAMETER Experiment Name: At_Drought_Soil_Dry_P Parameter: Post-Treatment Value: Re-Water vs. No Drought
  misc_feature: MA Experiment 20001558 PARAMETER Experiment Name: At_Drought_Soil_Dry_P Parameter: Timepoint (day) Value: 13
  misc_feature: MA Experiment 20001558 PARAMETER Experiment Name: At_Drought_Soil_Dry_P Parameter: Treatment Value: Drought vs. No Drought
  misc_feature: MA Experiment ID: 20001559 Result: Up-regulated in Transcription
  misc_feature: MA Experiment 20001559 PARAMETER Experiment Name: At_Drought_Soil_Dry_P Parameter: Age (day) Value: 28
  misc_feature: MA Experiment 20001559 PARAMETER Experiment Name: At_Drought_Soil_Dry_P Parameter: Organism Value: A. thaliana
  misc_feature: MA Experiment 20001559 PARAMETER Experiment Name: At_Drought_Soil_Dry_P Parameter: Plant Line Value: WS
  misc_feature: MA Experiment 20001559 PARAMETER Experiment Name: At_Drought_Soil_Dry_P Parameter: Post Timepoint (hr) Value: 29
  misc_feature: MA Experiment 20001559 PARAMETER Experiment Name: At_Drought_Soil_Dry_P Parameter: Post-Treatment Value: Re-Water vs. No Drought
  misc_feature: MA Experiment 20001559 PARAMETER Experiment Name: At_Drought_Soil_Dry_P Parameter: Timepoint (day) Value: 14
  misc_feature: MA Experiment 20001559 PARAMETER Experiment Name: At_Drought_Soil_Dry_P Parameter: Treatment Value: Drought vs. No Drought
  misc_feature: MA Experiment ID: 20001560 Result: Up-regulated in Transcription
  misc_feature: MA Experiment 20001560 PARAMETER Experiment Name: At_Drought_Soil_Dry_P Parameter: Age (day) Value: 28
  misc_feature: MA Experiment 20001560 PARAMETER Experiment Name: At_Drought_Soil_Dry_P Parameter: Organism Value: A. thaliana
  misc_feature: MA Experiment 20001560 PARAMETER Experiment Name: At_Drought_Soil_Dry_P Parameter: Plant Line Value: WS
  misc_feature: MA Experiment 20001560 PARAMETER Experiment Name: At_Drought_Soil_Dry_P Parameter: Post Timepoint (hr) Value: None
  misc_feature: MA Experiment 20001560 PARAMETER Experiment Name: At_Drought_Soil_Dry_P Parameter: Post-Treatment Value: None
  misc_feature: MA Experiment 20001560 PARAMETER Experiment Name: At_Drought_Soil_Dry_P Parameter: Timepoint (day) Value: 14
  misc_feature: MA Experiment 20001560 PARAMETER Experiment Name: At_Drought_Soil_Dry_P Parameter: Treatment Value: Drought vs. No Drought
  misc_feature: MA Experiment ID: 20001904 Result: Up-regulated in Transcription
  misc_feature: MA Experiment 20001904 PARAMETER Experiment Name: At_Drought_Reproduction_P Parameter: Age (day) Value: 37
  misc_feature: MA Experiment 20001904 PARAMETER Experiment Name: At_Drought_Reproduction_P Parameter: Organism Value: A. thaliana
  misc_feature: MA Experiment 20001904 PARAMETER Experiment Name: At_Drought_Reproduction_P Parameter: Plant Line Value: WS
  misc_feature: MA Experiment 20001904 PARAMETER Experiment Name: At_Drought_Reproduction_P Parameter: Timepoint (day) Value: 7
  misc_feature: MA Experiment 20001904 PARAMETER Experiment Name: At_Drought_Reproduction_P Parameter: Tissue Value: Rosettes
  misc_feature: MA Experiment 20001904 PARAMETER Experiment Name: At_Drought_Reproduction_P Parameter: Treatment Value: Drought vs. No Drought
  misc_feature: MA Experiment ID: 20001905 Result: Up-regulated in Transcription
  misc_feature: MA Experiment 20001905 PARAMETER Experiment Name: At_Drought_Reproduction_P Parameter: Age (day) Value: 40
  misc_feature: MA Experiment 20001905 PARAMETER Experiment Name: At_Drought_Reproduction_P Parameter: Organism Value: A. thaliana
  misc_feature: MA Experiment 20001905 PARAMETER Experiment Name: At_Drought_Reproduction_P Parameter: Plant Line Value: WS
  misc_feature: MA Experiment 20001905 PARAMETER Experiment Name: At_Drought_Reproduction_P Parameter: Timepoint (day) Value: 10
  misc_feature: MA Experiment 20001905 PARAMETER Experiment Name: At_Drought_Reproduction_P Parameter: Tissue Value: Rosettes
  misc_feature: MA Experiment 20001905 PARAMETER Experiment Name: At_Drought_Reproduction_P Parameter: Treatment Value: Drought vs. No Drought
  misc_feature: MA Experiment ID: 20001906 Result: Up-regulated in Transcription
  misc_feature: MA Experiment 20001906 PARAMETER Experiment Name: At_Drought_Reproduction_P Parameter: Age (day) Value: 35
  misc_feature: MA Experiment 20001906 PARAMETER Experiment Name: At_Drought_Reproduction_P Parameter: Organism Value: A. thaliana
  misc_feature: MA Experiment 20001906 PARAMETER Experiment Name: At_Drought_Reproduction_P Parameter: Plant Line Value: WS
  misc_feature: MA Experiment 20001906 PARAMETER Experiment Name: At_Drought_Reproduction_P Parameter: Timepoint (day) Value: 5
  misc_feature: MA Experiment 20001906 PARAMETER Experiment Name: At_Drought_Reproduction_P Parameter: Tissue Value: Siliques
  misc_feature: MA Experiment 20001906 PARAMETER Experiment Name: At_Drought_Reproduction_P Parameter: Treatment Value: Drought vs. No Drought
  misc_feature: MA Experiment ID: 20001908 Result: Up-regulated in Transcription
  misc_feature: MA Experiment 20001908 PARAMETER Experiment Name: At_Drought_Reproduction_P Parameter: Age (day) Value: 40
  misc_feature: MA Experiment 20001908 PARAMETER Experiment Name: At_Drought_Reproduction_P Parameter: Organism Value: A. thaliana
  misc_feature: MA Experiment 20001908 PARAMETER Experiment Name: At_Drought_Reproduction_P Parameter: Plant Line Value: WS
  misc_feature: MA Experiment 20001908 PARAMETER Experiment Name: At_Drought_Reproduction_P Parameter: Timepoint (day) Value: 10
  misc_feature: MA Experiment 20001908 PARAMETER Experiment Name: At_Drought_Reproduction_P Parameter: Tissue Value: Siliques
  misc_feature: MA Experiment 20001908 PARAMETER Experiment Name: At_Drought_Reproduction_P Parameter: Treatment Value: Drought vs. No Drought
  misc_feature: MA Experiment ID: 20001911 Result: Up-regulated in Transcription
  misc_feature: MA Experiment 20001911 PARAMETER Experiment Name: At_Drought_Reproduction_P Parameter: Age (day) Value: 40
  misc_feature: MA Experiment 20001911 PARAMETER Experiment Name: At_Drought_Reproduction_P Parameter: Organism Value: A. thaliana
  misc_feature: MA Experiment 20001911 PARAMETER Experiment Name: At_Drought_Reproduction_P Parameter: Plant Line Value: WS
  misc_feature: MA Experiment 20001911 PARAMETER Experiment Name: At_Drought_Reproduction_P Parameter: Timepoint (day) Value: 10
  misc_feature: MA Experiment 20001911 PARAMETER Experiment Name: At_Drought_Reproduction_P Parameter: Tissue Value: Flowers
  misc_feature: MA Experiment 20001911 PARAMETER Experiment Name: At_Drought_Reproduction_P Parameter: Treatment Value: Drought vs. No Drought

SEQ ID NO: 94498 - protein, 174 aa, Arabidopsis thaliana; identical to SEQ ID NO: 27087
  peptide (1)..(174): Ceres Seq. ID no. 12725073
  misc_feature (1)..(174): Homolog of NCBI NO: 18394235 NR Description: expressed protein; protein id: At1g15380.1, by cDNA: 5364., supported by cDNA: gi_18252884 [Arabidopsis
  misc_feature (1)..(169): Homolog of NCBI NO: 25406639 NR Description: hypothetical protein F18B13.24 [imported] - thaliana >gi|5902371|gb|AAD55473.1|AC009322_13 Hypothetical
  misc_feature (1)..(169): Homolog of NCBI NO: 18412683 NR Description: expressed protein; protein id: At1g80160.1, by cDNA: 21663. [Arabidopsis thaliana]
  misc_feature (6)..(150): Homolog of NCBI NO: 34910246 NR Description: OSJNBa0089K24.9 [Oryza sativa (japonica
  misc_feature (1)..(149): Homolog of NCBI NO: 34395261 NR Description: glyoxalase family-like protein [Oryza sativa
  misc_feature (1)..(149): Homolog of NCBI NO: 34899038 NR Description: hypothetical protein~similar to Arabidopsis
  misc_feature (11)..(142): Homolog of NCBI NO: 15529260 NR Description: At2g28420/T1B3.6 [Arabidopsis thaliana]
  misc_feature (11)..(142): Homolog of NCBI NO: 18401734 NR Description: expressed protein; protein id: At2g28420.1, by cDNA: gi_15529259, supported by cDNA: gi_16974406 [Arabidopsis >gi|25407983|pir||F84684 hypothetical protein At2g28420
  misc_feature (2)..(131): Homolog of NCBI NO: 33146737 NR Description: unknown protein [Oryza sativa (japonica
  misc_feature (11)..(131): Homolog of NCBI NO: 34899880 NR Description: OJ1714_H10.23 [Oryza sativa (japonica

SEQ ID NO: 94499 - protein, 147 aa, Arabidopsis thaliana; identical to SEQ ID NO: 27088
  peptide (1)..(147): Ceres Seq. ID no. 12725074
  misc_feature (1)..(147): Homolog of NCBI NO: 18394235 NR Description: expressed protein; protein id: At1g15380.1, by cDNA: 5364., supported by cDNA: gi_18252884 [Arabidopsis
  misc_feature (1)..(142): Homolog of NCBI NO: 25406639 NR Description: hypothetical protein F18B13.24 [imported] - thaliana >gi|5902371|gb|AAD55473.1|AC009322_13 Hypothetical
  misc_feature (1)..(142): Homolog of NCBI NO: 18412683 NR Description: expressed protein; protein id: At1g80160.1, by cDNA: 21663. [Arabidopsis thaliana]
  misc_feature (1)..(123): Homolog of NCBI NO: 34910246 NR Description: OSJNBa0089K24.9 [Oryza sativa (japonica
  misc_feature (1)..(122): Homolog of NCBI NO: 34395261 NR Description: glyoxalase family-like protein [Oryza sativa
  misc_feature (1)..(122): Homolog of NCBI NO: 34899038 NR Description: hypothetical protein~similar to Arabidopsis
  misc_feature (1)..(115): Homolog of NCBI NO: 15529260 NR Description: At2g28420/T1B3.6 [Arabidopsis thaliana]
  misc_feature (1)..(115): Homolog of NCBI NO: 18401734 NR Description: expressed protein; protein id: At2g28420.1, by cDNA: gi_15529259, supported by cDNA: gi_16974406 [Arabidopsis >gi|25407983|pir||F84684 hypothetical protein At2g28420
  misc_feature (1)..(104): Homolog of NCBI NO: 33146737 NR Description: unknown protein [Oryza sativa (japonica
  misc_feature (1)..(104): Homolog of NCBI NO: 34899880 NR Description: OJ1714_H10.23 [Oryza sativa (japonica

SEQ ID NO: 94500 - DNA, 1865 bp, Arabidopsis thaliana; identical to SEQ ID NO: 90744
  misc_feature (1)..(1865): Ceres Seq. ID no. 12725096
  misc_feature: MA Experiment ID: 20000182 Result: Down-regulated in Transcription
  misc_feature: MA Experiment 20000182 PARAMETER Experiment Name: At_2mM_SA_P Parameter: Age (day) Value: 14
  misc_feature: MA Experiment 20000182 PARAMETER Experiment Name: At_2mM_SA_P Parameter: Organism Value: A. thaliana
  misc_feature: MA Experiment 20000182 PARAMETER Experiment Name: At_2mM_SA_P Parameter: Plant Line Value: WS
  misc_feature: MA Experiment 20000182 PARAMETER Experiment Name: At_2mM_SA_P Parameter: Timepoint (hr) Value: 6
  misc_feature: MA Experiment 20000182 PARAMETER Experiment Name: At_2mM_SA_P Parameter: Tissue Value: Aerial
  misc_feature: MA Experiment 20000182 PARAMETER Experiment Name: At_2mM_SA_P Parameter: Treatment Value: 2mM SA vs. No Treatment
  misc_feature: MA Experiment ID: 20000185 Result: Down-regulated in Transcription
  misc_feature: MA Experiment 20000185 PARAMETER Experiment Name: At_Roots__P Parameter: Age (day) Value: 7 vs. 21
  misc_feature: MA Experiment 20000185 PARAMETER Experiment Name: At_Roots__P Parameter: Organism Value: A. thaliana
  misc_feature: MA Experiment 20000185 PARAMETER Experiment Name: At_Roots__P Parameter: Tissue Value: Roots vs. Whole Plant
  misc_feature: MA Experiment ID: 20000234 Result: Down-regulated in Transcription
  misc_feature: MA Experiment 20000234 PARAMETER Experiment Name: At_Siliques_P Parameter: Age (day) Value: 21
  misc_feature: MA Experiment 20000234 PARAMETER Experiment Name: At_Siliques_P Parameter: Organism Value: A. thaliana
  misc_feature: MA Experiment 20000234 PARAMETER Experiment Name: At_Siliques_P Parameter: Plant Line Value: WS
  misc_feature: MA Experiment 20000234 PARAMETER Experiment Name: At_Siliques_P Parameter: Tissue Value: Less Than 5mm Siliques vs. Whole Plant
  misc_feature: MA Experiment ID: 20000264 Result: Down-regulated in Transcription
  misc_feature: MA Experiment 20000264 PARAMETER Experiment Name: At_Open_Flower_P Parameter: Age (day) Value: 21
  misc_feature: MA Experiment 20000264 PARAMETER Experiment Name: At_Open_Flower_P Parameter: Plant Line Value: WS
  misc_feature: MA Experiment 20000264 PARAMETER Experiment Name: At_Open_Flower_P Parameter: Tissue Value: Open Flower vs. Whole Plant
  misc_feature: MA Experiment ID: 20000265 Result: Down-regulated in Transcription
  misc_feature: MA Experiment 20000265 PARAMETER Experiment Name: At_Open_Flower_P Parameter: Age (day) Value: 21
  misc_feature: MA Experiment 20000265 PARAMETER Experiment Name: At_Open_Flower_P Parameter: Plant Line Value: WS
  misc_feature: MA Experiment 20000265 PARAMETER Experiment Name: At_Open_Flower_P Parameter: Tissue Value: Closed Flower vs. Whole Plant
  misc_feature: MA Experiment ID: 20000286 Result: Down-regulated in Transcription
  misc_feature: MA Experiment 20000286 PARAMETER Experiment Name: At_Open_Flower_P Parameter: Age (day) Value: 21
  misc_feature: MA Experiment 20000286 PARAMETER Experiment Name: At_Open_Flower_P Parameter: Plant Line Value: WS
  misc_feature: MA Experiment 20000286 PARAMETER Experiment Name: At_Open_Flower_P Parameter: Tissue Value: Half Open vs. Whole Plant
  misc_feature: MA Experiment ID: 20000439 Result: Down-regulated in Transcription
  misc_feature: MA Experiment 20000439 PARAMETER Experiment Name: At_Roots__P Parameter: Age (day) Value: 14 vs. 21
  misc_feature: MA Experiment 20000439 PARAMETER Experiment Name: At_Roots__P Parameter: Organism Value: A. thaliana
  misc_feature: MA Experiment 20000439 PARAMETER Experiment Name: At_Roots__P Parameter: Tissue Value: Roots vs. Whole Plant
  misc_feature: MA Experiment ID: 20000495 Result: Up-regulated in Transcription
  misc_feature: MA Experiment 20000495 PARAMETER Experiment Name: At_Guard_Cells_P Parameter: Harvest Date Value: 8/2/2002
  misc_feature: MA Experiment 20000495 PARAMETER Experiment Name: At_Guard_Cells_P Parameter: Organism Value: A. thaliana
  misc_feature: MA Experiment 20000495 PARAMETER Experiment Name: At_Guard_Cells_P Parameter: Tissue Value: Guard Cells vs. Leaves
  misc_feature: MA Experiment ID: 20000527 Result: Up-regulated in Transcription
  misc_feature: MA Experiment 20000527 PARAMETER Experiment Name: At_10percent_PEG_P Parameter: Age (day) Value: 20
  misc_feature: MA Experiment 20000527 PARAMETER Experiment Name: At_10percent_PEG_P Parameter: Organism Value: A. thaliana
  misc_feature: MA Experiment 20000527 PARAMETER Experiment Name: At_10percent_PEG_P Parameter: Plant Line Value: WS
  misc_feature: MA Experiment 20000527 PARAMETER Experiment Name: At_10percent_PEG_P Parameter: Timepoint (day) Value: 20
  misc_feature: MA Experiment 20000527 PARAMETER Experiment Name: At_10percent_PEG_P Parameter: Tissue Value: Whole Plant
  misc_feature: MA Experiment 20000527 PARAMETER Experiment Name: At_10percent_PEG_P Parameter: Treatment Value: 10percent PEG vs. No Treatment
  misc_feature: MA Experiment ID: 20000794 Result: Down-regulated in Transcription
  misc_feature: MA Experiment 20000794 PARAMETER Experiment Name: At_Petals_P Parameter: Age (day) Value: 23-25 days
  misc_feature: MA Experiment 20000794 PARAMETER Experiment Name: At_Petals_P Parameter: Plant Line Value: WS
  misc_feature: MA Experiment 20000794 PARAMETER Experiment Name: At_Petals_P Parameter: Tissue Value: Petals vs. Whole plant
  misc_feature: MA Experiment ID: 20001247 Result: Down-regulated in Transcription
  misc_feature: MA Experiment 20001247 PARAMETER Experiment Name: At_Far-red-induction_P Parameter: Age (day) Value: 7
  misc_feature: MA Experiment 20001247 PARAMETER Experiment Name: At_Far-red-induction_P Parameter: Light Value: Far-red vs. White
  misc_feature: MA Experiment 20001247 PARAMETER Experiment Name: At_Far-red-induction_P Parameter: Organism Value: A. thaliana
  misc_feature: MA Experiment 20001247 PARAMETER Experiment Name: At_Far-red-induction_P Parameter: Plant Line Value: Columbia
  misc_feature: MA Experiment 20001247 PARAMETER Experiment Name: At_Far-red-induction_P Parameter: Timepoint (hr) Value: 1
  misc_feature: MA Experiment 20001247 PARAMETER Experiment Name: At_Far-red-induction_P Parameter: Tissue Value: Whole Plant
  misc_feature: MA Experiment ID: 20001248 Result: Down-regulated in Transcription
  misc_feature: MA Experiment 20001248 PARAMETER Experiment Name: At_Far-red-induction_P Parameter: Age (day) Value: 7
  misc_feature: MA Experiment 20001248 PARAMETER Experiment Name: At_Far-red-induction_P Parameter: Light Value: Far-red vs. White
  misc_feature: MA Experiment 20001248 PARAMETER Experiment Name: At_Far-red-induction_P Parameter: Organism Value: A. thaliana
  misc_feature: MA Experiment 20001248 PARAMETER Experiment Name: At_Far-red-induction_P Parameter: Plant Line Value: Columbia
  misc_feature: MA Experiment 20001248 PARAMETER Experiment Name: At_Far-red-induction_P Parameter: Timepoint (hr) Value: 4
  misc_feature: MA Experiment 20001248 PARAMETER Experiment Name: At_Far-red-induction_P Parameter: Tissue Value: Whole Plant
  misc_feature: MA Experiment ID: 20001450 Result: Down-regulated in Transcription
  misc_feature: MA Experiment 20001450 PARAMETER Experiment Name: At_Far-red-induction_P Parameter: Age (day) Value: 7
  misc_feature: MA Experiment 20001450 PARAMETER Experiment Name: At_Far-red-induction_P Parameter: Light Value: Far-red vs. White
  misc_feature: MA Experiment 20001450 PARAMETER Experiment Name: At_Far-red-induction_P Parameter: Organism Value: A. thaliana
  misc_feature: MA Experiment 20001450 PARAMETER Experiment Name: At_Far-red-induction_P Parameter: Plant Line Value: Columbia
  misc_feature: MA Experiment 20001450 PARAMETER Experiment Name: At_Far-red-induction_P Parameter: Timepoint (hr) Value: 8
  misc_feature: MA Experiment 20001450 PARAMETER Experiment Name: At_Far-red-induction_P Parameter: Tissue Value: Whole Plant
  misc_feature: MA Experiment ID: 20001451 Result: Down-regulated in Transcription
  misc_feature: MA Experiment 20001451 PARAMETER Experiment Name: At_Far-red-induction_P Parameter: Age (day) Value: 7
  misc_feature: MA Experiment 20001451 PARAMETER Experiment Name: At_Far-red-induction_P Parameter: Light Value: Far-red vs. White
  misc_feature: MA Experiment 20001451 PARAMETER Experiment Name: At_Far-red-induction_P Parameter: Organism Value: A. thaliana
  misc_feature: MA Experiment 20001451 PARAMETER Experiment Name: At_Far-red-induction_P Parameter: Plant Line Value: Columbia
  misc_feature: MA Experiment 20001451 PARAMETER Experiment Name: At_Far-red-induction_P Parameter: Timepoint (hr) Value: 24
  misc_feature: MA Experiment 20001451 PARAMETER Experiment Name: At_Far-red-induction_P Parameter: Tissue Value: Whole Plant
  misc_feature: MA Experiment ID: 20001457 Result: Down-regulated in Transcription
  misc_feature: MA Experiment 20001457 PARAMETER Experiment Name: At_50mM_NH4NO3_L-to-H_P Parameter: Age (day) Value: Undefined
  misc_feature: MA Experiment 20001457 PARAMETER Experiment Name: At_50mM_NH4NO3_L-to-H_P Parameter: Organism Value: Undefined
  misc_feature: MA Experiment 20001457 PARAMETER Experiment Name: At_50mM_NH4NO3_L-to-H_P Parameter: Plant Line Value: Undefined
  misc_feature: MA Experiment 20001457 PARAMETER Experiment Name: At_50mM_NH4NO3_L-to-H_P Parameter: Timepoint (hr) Value: 0.5
  misc_feature: MA Experiment 20001457 PARAMETER Experiment Name: At_50mM_NH4NO3_L-to-H_P Parameter: Tissue Value: Siliques
  misc_feature: MA Experiment 20001457 PARAMETER Experiment Name: At_50mM_NH4NO3_L-to-H_P Parameter: Treatment Value: 50mM NH4NO3 vs. 100mM Manitol
  misc_feature: MA Experiment ID: 20001756 Result: Up-regulated in Transcription
  misc_feature: MA Experiment 20001756 PARAMETER Experiment Name: At_50mM_NH4NO3_L-to-H_P Parameter: Timepoint (hr) Value: 4
  misc_feature: MA Experiment 20001756 PARAMETER Experiment Name: At_50mM_NH4NO3_L-to-H_P Parameter: Tissue Value: Leaf
  misc_feature: MA Experiment 20001756 PARAMETER Experiment Name: At_50mM_NH4NO3_L-to-H_P Parameter: Treatment Value: 50mM NH4NO3 vs 100mM Mannitol
  misc_feature: MA Experiment ID: 20001772 Result: Down-regulated in Transcription
  misc_feature: MA Experiment 20001772 PARAMETER Experiment Name: At_Far-red-enriched-adult_P Parameter: Age (day) Value: 29
  misc_feature: MA Experiment 20001772 PARAMETER Experiment Name: At_Far-red-enriched-adult_P Parameter: Light Value: Far-red enriched vs. White
  misc_feature: MA Experiment 20001772 PARAMETER Experiment Name: At_Far-red-enriched-adult_P Parameter: Organism Value: A. thaliana
  misc_feature: MA Experiment 20001772 PARAMETER Experiment Name: At_Far-red-enriched-adult_P Parameter: Plant Line Value: Columbia
  misc_feature: MA Experiment 20001772 PARAMETER Experiment Name: At_Far-red-enriched-adult_P Parameter: Timepoint (hr) Value: 24
  misc_feature: MA Experiment 20001772 PARAMETER Experiment Name: At_Far-red-enriched-adult_P Parameter: Tissue Value: Aerial
  misc_feature: MA Experiment ID: 20001908 Result: Up-regulated in Transcription
  misc_feature: MA Experiment 20001908 PARAMETER Experiment Name: At_Drought_Reproduction_P Parameter: Age (day) Value: 40
  misc_feature: MA Experiment 20001908 PARAMETER Experiment Name: At_Drought_Reproduction_P Parameter: Organism Value: A. thaliana
  misc_feature: MA Experiment 20001908 PARAMETER Experiment Name: At_Drought_Reproduction_P Parameter: Plant Line Value: WS
  misc_feature: MA Experiment 20001908 PARAMETER Experiment Name: At_Drought_Reproduction_P Parameter: Timepoint (day) Value: 10
  misc_feature: MA Experiment 20001908 PARAMETER Experiment Name: At_Drought_Reproduction_P Parameter: Tissue Value: Siliques
  misc_feature: MA Experiment 20001908 PARAMETER Experiment Name: At_Drought_Reproduction_P Parameter: Treatment Value: Drought vs. No Drought

SEQ ID NO: 94501 - protein, 556 aa, Arabidopsis thaliana; identical to SEQ ID NO: 90745
  peptide (1)..(556): Ceres Seq. ID no. 12725097
  misc_feature (64)..(542): Pfam Name: Cytochrome P450 Pfam Description: Cytochrome P450
  misc_feature (19)..(556): Homolog of NCBI NO: 30684842 NR Description: cytochrome P450, putative [Arabidopsis thaliana] putative cytochrome P450 protein [Arabidopsis thaliana]
  misc_feature (20)..(556): Homolog of NCBI NO: 25518479 NR Description: hypothetical protein F3O9.21 - Arabidopsis >gi|4966362|gb|AAD34693.1|AC006341_21 Similar to gb|AF069494 P450 from Sinapis alba and is a member of the PF|00067 Cytochrome
  misc_feature (30)..(556): Homolog of NCBI NO: 10946208 NR Description: cytochrome P450 CYP79F2 [Arabidopsis thaliana]
  misc_feature (30)..(556): Homolog of NCBI NO: 30684835 NR Description: cytochrome P450 family [Arabidopsis thaliana]
  misc_feature (30)..(556): Homolog of NCBI NO: 25518051 NR Description: F3O9.20 protein - Arabidopsis thaliana Similar to gb|AF069494 cytochrome P450 from Sinapis alba and is a
  misc_feature (36)..(555): Homolog of NCBI NO: 30696238 NR Description: cytochrome P450 family [Arabidopsis thaliana]
  misc_feature (30)..(553): Homolog of NCBI NO: 22330739 NR Description: cytochrome p450 family; protein id: At1g79370.1
  misc_feature (33)..(552): Homolog of NCBI NO: 5915822 NR Description: CYTOCHROME P450 79A1 (CYTOCHROME P450TYR)
  misc_feature (35)..(552): Homolog of NCBI NO: 6739527 NR Description: N-hydroxylating cytochrome P450 [Manihot
  misc_feature (4)..(552): Homolog of NCBI NO: 15236088 NR Description: cytochrome P450 - like protein; protein id: supported by cDNA: gi_15028134, supported by cDNA: gi_20259280

SEQ ID NO: 94502 - protein, 538 aa, Arabidopsis thaliana; identical to SEQ ID NO: 90746
  peptide (1)..(538): Ceres Seq. ID no. 12725098
  misc_feature (46)..(524): Pfam Name: Cytochrome P450 Pfam Description: Cytochrome P450
  misc_feature (1)..(538): Homolog of NCBI NO: 30684842 NR Description: cytochrome P450, putative [Arabidopsis thaliana] putative cytochrome P450 protein [Arabidopsis thaliana]
  misc_feature (2)..(538): Homolog of NCBI NO: 25518479 NR Description: hypothetical protein F3O9.21 - Arabidopsis >gi|4966362|gb|AAD34693.1|AC006341_21 Similar to gb|AF069494 P450 from Sinapis alba and is a member of the PF|00067 Cytochrome
  misc_feature (12)..(538): Homolog of NCBI NO: 10946208 NR Description: cytochrome P450 CYP79F2 [Arabidopsis thaliana]
  misc_feature (12)..(538): Homolog of NCBI NO: 30684835 NR Description: cytochrome P450 family [Arabidopsis thaliana]
  misc_feature (12)..(538): Homolog of NCBI NO: 25518051 NR Description: F3O9.20 protein - Arabidopsis thaliana Similar to gb|AF069494 cytochrome P450 from Sinapis alba and is a
  misc_feature (18)..(537): Homolog of NCBI NO: 30696238 NR Description: cytochrome P450 family [Arabidopsis thaliana]
  misc_feature (12)..(535): Homolog of NCBI NO: 22330739 NR Description: cytochrome p450 family; protein id: At1g79370.1
  misc_feature (15)..(534): Homolog of NCBI NO: 5915822 NR Description: CYTOCHROME P450 79A1 (CYTOCHROME P450TYR)
  misc_feature (17)..(534): Homolog of NCBI NO: 6739527 NR Description: N-hydroxylating cytochrome P450 [Manihot
  misc_feature (1)..(534): Homolog of NCBI NO: 15236088 NR Description: cytochrome P450 - like protein; protein id: supported by cDNA: gi_15028134, supported by cDNA: gi_20259280

SEQ ID NO: 94503 - protein, 537 aa, Arabidopsis thaliana; identical to SEQ ID NO: 90747
  peptide (1)..(537): Ceres Seq. ID no. 12725099
  misc_feature (45)..(523): Pfam Name: Cytochrome P450 Pfam Description: Cytochrome P450
  misc_feature (1)..(537): Homolog of NCBI NO: 30684842 NR Description: cytochrome P450, putative [Arabidopsis thaliana] putative cytochrome P450 protein [Arabidopsis thaliana]
  misc_feature (1)..(537): Homolog of NCBI NO: 25518479 NR Description: hypothetical protein F3O9.21 - Arabidopsis >gi|4966362|gb|AAD34693.1|AC006341_21 Similar to gb|AF069494 P450 from Sinapis alba and is a member of the PF|00067 Cytochrome
  misc_feature (11)..(537): Homolog of NCBI NO: 10946208 NR Description: cytochrome P450 CYP79F2 [Arabidopsis thaliana]
  misc_feature (11)..(537): Homolog of NCBI NO: 30684835 NR Description: cytochrome P450 family [Arabidopsis thaliana]
  misc_feature (11)..(537): Homolog of NCBI NO: 25518051 NR Description: F3O9.20 protein - Arabidopsis thaliana Similar to gb|AF069494 cytochrome P450 from Sinapis alba and is a
  misc_feature (17)..(536): Homolog of NCBI NO: 30696238 NR Description: cytochrome P450 family [Arabidopsis thaliana]
  misc_feature (11)..(534): Homolog of NCBI NO: 22330739 NR Description: cytochrome p450 family; protein id: At1g79370.1
  misc_feature (14)..(533): Homolog of NCBI NO: 5915822 NR Description: CYTOCHROME P450 79A1 (CYTOCHROME P450TYR)
  misc_feature (16)..(533): Homolog of NCBI NO: 6739527 NR Description: N-hydroxylating cytochrome P450 [Manihot
  misc_feature (1)..(533): Homolog of NCBI NO: 15236088 NR Description: cytochrome P450 - like protein; protein id: supported by cDNA: gi_15028134, supported by cDNA: gi_20259280

SEQ ID NO: 94504 - DNA, 2126 bp, Arabidopsis thaliana; identical to SEQ ID NO: 90748
  misc_feature (1)..(2126): Ceres Seq. ID no. 12725137
  misc_feature: MA Experiment ID: 20000307 Result: Up-regulated in Transcription
  misc_feature: MA Experiment 20000307 PARAMETER Experiment Name: At_Germinating_Seeds_Sub_P Parameter: Age (hr) Value: 24 vs. 0
  misc_feature: MA Experiment 20000307 PARAMETER Experiment Name: At_Germinating_Seeds_Sub_P Parameter: Organism Value: A. thaliana
  misc_feature: MA Experiment 20000307 PARAMETER Experiment Name: At_Germinating_Seeds_Sub_P Parameter: Plant Line Value: WS
  misc_feature: MA Experiment 20000307 PARAMETER Experiment Name: At_Germinating_Seeds_Sub_P Parameter: Tissue Value: Germinating Seeds
  misc_feature: MA Experiment ID: 20000315 Result: Down-regulated in Transcription
  misc_feature: MA Experiment 20000315 PARAMETER Experiment Name: At_14day_Shoots-Roots_Sub_P Parameter: Age (day) Value: 14
  misc_feature: MA Experiment 20000315 PARAMETER Experiment Name: At_14day_Shoots-Roots_Sub_P Parameter: Organism Value: A. thaliana
  misc_feature: MA Experiment 20000315 PARAMETER Experiment Name: At_14day_Shoots-Roots_Sub_P Parameter: Plant Line Value: WS
  misc_feature: MA Experiment 20000315 PARAMETER Experiment Name: At_14day_Shoots-Roots_Sub_P Parameter: Tissue Value: Shoots vs. Whole Plant
  misc_feature: MA Experiment ID: 20000327 Result: Up-regulated in Transcription
  misc_feature: MA Experiment 20000327 PARAMETER Experiment Name: At_42deg_Heat_Sub_P Parameter: Age (day) Value: 14
  misc_feature: MA Experiment 20000327 PARAMETER Experiment Name: At_42deg_Heat_Sub_P Parameter: Organism Value: A. thaliana
  misc_feature: MA Experiment 20000327 PARAMETER Experiment Name: At_42deg_Heat_Sub_P Parameter: Plant Line Value: WS
  misc_feature: MA Experiment 20000327 PARAMETER Experiment Name: At_42deg_Heat_Sub_P Parameter: Temperature (deg C) Value: 42 vs. 22
  misc_feature: MA Experiment 20000327 PARAMETER Experiment Name: At_42deg_Heat_Sub_P Parameter: Timepoint (hr) Value: 1
  misc_feature: MA Experiment 20000327 PARAMETER Experiment Name: At_42deg_Heat_Sub_P Parameter: Tissue Value: Aerial
  misc_feature: MA Experiment ID: 20000328 Result: Up-regulated in Transcription
  misc_feature: MA Experiment 20000328 PARAMETER Experiment Name: At_42deg_Heat_Sub_P Parameter: Age (day) Value: 14
  misc_feature: MA Experiment 20000328 PARAMETER Experiment Name: At_42deg_Heat_Sub_P Parameter: Organism Value: A. thaliana
  misc_feature: MA Experiment 20000328 PARAMETER Experiment Name: At_42deg_Heat_Sub_P Parameter: Plant Line Value: WS
  misc_feature: MA Experiment 20000328 PARAMETER Experiment Name: At_42deg_Heat_Sub_P Parameter: Temperature (deg C) Value: 42 vs. 22
  misc_feature: MA Experiment 20000328 PARAMETER Experiment Name: At_42deg_Heat_Sub_P Parameter: Timepoint (hr) Value: 6
  misc_feature: MA Experiment 20000328 PARAMETER Experiment Name: At_42deg_Heat_Sub_P Parameter: Tissue Value: Aerial
  misc_feature: MA Experiment ID: 20000329 Result: Down-regulated in Transcription
  misc_feature: MA Experiment 20000329 PARAMETER Experiment Name: At_4deg_Cold_Sub_P Parameter: Age (day) Value: 14
  misc_feature: MA Experiment 20000329 PARAMETER Experiment Name: At_4deg_Cold_Sub_P Parameter: Organism Value: A. thaliana
  misc_feature: MA Experiment 20000329 PARAMETER Experiment Name: At_4deg_Cold_Sub_P Parameter: Plant Line Value: WS
  misc_feature: MA Experiment 20000329 PARAMETER Experiment Name: At_4deg_Cold_Sub_P Parameter: Temperature (deg C) Value: 4 vs. 22
  misc_feature: MA Experiment 20000329 PARAMETER Experiment Name: At_4deg_Cold_Sub_P Parameter: Timepoint (hr) Value: 6
  misc_feature: MA Experiment 20000329 PARAMETER Experiment Name: At_4deg_Cold_Sub_P Parameter: Tissue Value: Aerial
  misc_feature: MA Experiment ID: 20000332 Result: Down-regulated in Transcription
  misc_feature: MA Experiment 20000332 PARAMETER Experiment Name: At_4deg_Cold_Sub_P Parameter: Age (day) Value: 14
  misc_feature: MA Experiment 20000332 PARAMETER Experiment Name: At_4deg_Cold_Sub_P Parameter: Organism Value: A. thaliana
  misc_feature: MA Experiment 20000332 PARAMETER Experiment Name: At_4deg_Cold_Sub_P Parameter: Plant Line Value: WS
  misc_feature: MA Experiment 20000332 PARAMETER Experiment Name: At_4deg_Cold_Sub_P Parameter: Temperature (deg C) Value: 4 vs. 22
  misc_feature: MA Experiment 20000332 PARAMETER Experiment Name: At_4deg_Cold_Sub_P Parameter: Timepoint (hr) Value: 2
  misc_feature: MA Experiment 20000332 PARAMETER Experiment Name: At_4deg_Cold_Sub_P Parameter: Tissue Value: Aerial
  misc_feature: MA Experiment ID: 20000355 Result: Down-regulated in Transcription
  misc_feature: MA Experiment 20000355 PARAMETER Experiment Name: At_Siliques_Sub_P Parameter: Age (day) Value: 21
  misc_feature: MA Experiment 20000355 PARAMETER Experiment Name: At_Siliques_Sub_P Parameter: Organism Value: A. thaliana
  misc_feature: MA Experiment 20000355 PARAMETER Experiment Name: At_Siliques_Sub_P Parameter: Plant Line Value: WS
  misc_feature: MA Experiment 20000355 PARAMETER Experiment Name: At_Siliques_Sub_P Parameter: Tissue Value: Less Than 5mm Siliques vs. Whole Plant
  misc_feature: MA Experiment ID: 20000440 Result: Down-regulated in Transcription
  misc_feature: MA Experiment 20000440 PARAMETER Experiment Name: At_Closed-Flower__Sub_P Parameter: Tissue Value: Closed Flower vs. Whole Plant

SEQ ID NO: 94505 - protein, 569 aa, Arabidopsis thaliana; identical to SEQ ID NO: 90749
  peptide (1)..(569): Ceres Seq. ID no. 12725138
  misc_feature (193)..(435): Pfam Name: NPH3 family Pfam Description: NPH3 family
  misc_feature (1)..(569): Homolog of NCBI NO: 22331730 NR Description: putative protein; protein id: At3g50840.1,
  misc_feature (1)..(569): Homolog of NCBI NO: 20453203 NR Description: AT3g50840/F18B3_120 [Arabidopsis thaliana]
  misc_feature (5)..(569): Homolog of NCBI NO: 7459616 NR Description: hypothetical protein F18B3.120 - Arabidopsis >gi|4835235|emb|CAB42913.1| putative protein [Arabidopsis
  misc_feature (42)..(359): Homolog of NCBI NO: 15240012 NR Description: photoreceptor-interacting protein-like; protein At5g66560.1, supported by cDNA: gi_15146317 [Arabidopsis
  misc_feature (464)..(566): Homolog of NCBI NO: 15240012 NR Description: photoreceptor-interacting protein-like; protein At5g66560.1, supported by cDNA: gi_15146317 [Arabidopsis
  misc_feature (1)..(51): Homolog of NCBI NO: 15240012 NR Description: photoreceptor-interacting protein-like; protein At5g66560.1, supported by cDNA: gi_15146317 [Arabidopsis
  misc_feature (42)..(359): Homolog of NCBI NO: 15146318 NR Description: AT5g66560/K1F13_23 [Arabidopsis thaliana]
  misc_feature (464)..(566): Homolog of NCBI NO: 15146318 NR Description: AT5g66560/K1F13_23 [Arabidopsis thaliana]
  misc_feature (1)..(51): Homolog of NCBI NO: 15146318 NR Description: AT5g66560/K1F13_23 [Arabidopsis thaliana]
  misc_feature (184)..(566): Homolog of NCBI NO: 10177537 NR Description: photoreceptor-interacting protein-like

SEQ ID NO: 94506 - protein, 533 aa, Arabidopsis thaliana; identical to SEQ ID NO: 90750
  peptide (1)..(533): Ceres Seq. ID no. 12725139
  misc_feature (157)..(399): Pfam Name: NPH3 family Pfam Description: NPH3 family
  misc_feature (1)..(533): Homolog of NCBI NO: 22331730 NR Description: putative protein; protein id: At3g50840.1,
  misc_feature (1)..(533): Homolog of NCBI NO: 20453203 NR Description: AT3g50840/F18B3_120 [Arabidopsis thaliana]
  misc_feature (1)..(533): Homolog of NCBI NO: 7459616 NR Description: hypothetical protein F18B3.120 - Arabidopsis >gi|4835235|emb|CAB42913.1| putative protein [Arabidopsis
  misc_feature (6)..(323): Homolog of NCBI NO: 15240012 NR Description: photoreceptor-interacting protein-like; protein At5g66560.1, supported by cDNA: gi_15146317 [Arabidopsis
  misc_feature (428)..(530): Homolog of NCBI NO: 15240012 NR Description: photoreceptor-interacting protein-like; protein At5g66560.1, supported by cDNA: gi_15146317 [Arabidopsis
  misc_feature (1)..(15): Homolog of NCBI NO: 15240012 NR Description: photoreceptor-interacting protein-like; protein At5g66560.1, supported by cDNA: gi_15146317 [Arabidopsis
  misc_feature (6)..(323): Homolog of NCBI NO: 15146318 NR Description: AT5g66560/K1F13_23 [Arabidopsis thaliana]
  misc_feature (428)..(530): Homolog of NCBI NO: 15146318 NR Description: AT5g66560/K1F13_23 [Arabidopsis thaliana]
  misc_feature (1)..(15): Homolog of NCBI NO: 15146318 NR Description: AT5g66560/K1F13_23 [Arabidopsis thaliana]
  misc_feature (148)..(530): Homolog of NCBI NO: 10177537 NR Description: photoreceptor-interacting protein-like

SEQ ID NO: 94507 - protein, 497 aa, Arabidopsis thaliana; identical to SEQ ID NO: 90751
  peptide (1)..(497): Ceres Seq. ID no. 12725140
  misc_feature (121)..(363): Pfam Name: NPH3 family Pfam Description: NPH3 family
  misc_feature (1)..(497): Homolog of NCBI NO: 22331730 NR Description: putative protein; protein id: At3g50840.1,
  misc_feature (1)..(497): Homolog of NCBI NO: 20453203 NR Description: AT3g50840/F18B3_120 [Arabidopsis thaliana]
  misc_feature (1)..(497): Homolog of NCBI NO: 7459616 NR Description: hypothetical protein F18B3.120 - Arabidopsis >gi|4835235|emb|CAB42913.1| putative protein [Arabidopsis
  misc_feature (1)..(287): Homolog of NCBI NO: 15240012 NR Description: photoreceptor-interacting protein-like; protein At5g66560.1, supported by cDNA: gi_15146317 [Arabidopsis
  misc_feature (392)..(494): Homolog of NCBI NO: 15240012 NR Description: photoreceptor-interacting protein-like; protein At5g66560.1, supported by cDNA: gi_15146317 [Arabidopsis
  misc_feature (1)..(287): Homolog of NCBI NO: 15146318 NR Description: AT5g66560/K1F13_23 [Arabidopsis thaliana]
  misc_feature (392)..(494): Homolog of NCBI NO: 15146318 NR Description: AT5g66560/K1F13_23 [Arabidopsis thaliana]
  misc_feature (112)..(494): Homolog of NCBI NO: 10177537 NR Description: photoreceptor-interacting protein-like
  misc_feature (1)..(287): Homolog of NCBI NO: 10177537 NR Description: photoreceptor-interacting protein-like
  misc_feature (112)..(490): Homolog of NCBI NO: 15240012 NR Description: photoreceptor-interacting protein-like; protein At5g66560.1, supported by cDNA: gi_15146317 [Arabidopsis

SEQ ID NO: 94508 - DNA, 1605 bp, Arabidopsis thaliana; identical to SEQ ID NO: 90752
  misc_feature (1)..(1605): Ceres Seq. ID no. 12725144
  misc_feature: MA Experiment ID: 108434 Result: Down-regulated in Transcription
  misc_feature: MA Experiment 108434 PARAMETER Experiment Name: At_Root_Tips_cDNA_P Parameter: Tissue Value: Root Tips
  misc_feature: MA Experiment ID: 108435 Result: Up-regulated in Transcription
  misc_feature: MA Experiment 108435 PARAMETER Experiment Name: At_stm_Mutants_cDNA_P Parameter: Plant Line Value: wt Landsburg vs stm
  misc_feature: MA Experiment 108435 PARAMETER Experiment Name: At_stm_Mutants_cDNA_P Parameter: Tissue Value: Shoot Apical Meristem Region
  misc_feature: MA Experiment ID: 108461 Result: Up-regulated in Transcription
  misc_feature: MA Experiment 108461 PARAMETER Experiment Name: At_Germinating_Seeds_cDNA_P Parameter: Age (day) Value: 1 vs. 0
  misc_feature: MA Experiment 108461 PARAMETER Experiment Name: At_Germinating_Seeds_cDNA_P Parameter: Tissue Value: Germinating Seeds
  misc_feature: MA Experiment ID: 108462 Result: Up-regulated in Transcription
  misc_feature: MA Experiment 108462 PARAMETER Experiment Name: At_Germinating_Seeds_cDNA_P Parameter: Age (day) Value: 2 vs. 0
  misc_feature: MA Experiment 108462 PARAMETER Experiment Name: At_Germinating_Seeds_cDNA_P Parameter: Tissue Value: Germinating Seeds
  misc_feature: MA Experiment ID: 108463 Result: Up-regulated in Transcription
  misc_feature: MA Experiment 108463 PARAMETER Experiment Name: At_Germinating_Seeds_cDNA_P Parameter: Age (day) Value: 3 vs. 0
  misc_feature: MA Experiment 108463 PARAMETER Experiment Name: At_Germinating_Seeds_cDNA_P Parameter: Tissue Value: Germinating Seeds
  misc_feature: MA Experiment ID: 108464 Result: Up-regulated in Transcription
  misc_feature: MA Experiment 108464 PARAMETER Experiment Name: At_Germinating_Seeds_cDNA_P Parameter: Age (day) Value: 4 vs. 0
  misc_feature: MA Experiment 108464 PARAMETER Experiment Name: At_Germinating_Seeds_cDNA_P Parameter: Tissue Value: Germinating Seeds
  misc_feature: MA Experiment ID: 108488 Result: Down-regulated in Transcription
  misc_feature: MA Experiment ID: 108585 Result: Up-regulated in Transcription
  misc_feature: MA Experiment 108585 PARAMETER Experiment Name: At_5mM_NaNP_cDNA_P Parameter: Timepoint (hr) Value: 6
  misc_feature: MA Experiment 108585 PARAMETER Experiment Name: At_5mM_NaNP_cDNA_P Parameter: Tissue Value: Aerial
  misc_feature: MA Experiment 108585 PARAMETER Experiment Name: At_5mM_NaNP_cDNA_P Parameter: Treatment Value: null
  misc_feature: MA Experiment ID: 108595 Result: Up-regulated in Transcription
  misc_feature: MA Experiment 108595 PARAMETER Experiment Name: At_Ler-pi_Ovule_cDNA_P Parameter: Plant Line Value: null
  misc_feature: MA Experiment ID: 20000070 Result: Up-regulated in Transcription
  misc_feature: MA Experiment 20000070 PARAMETER Experiment Name: At_100uM_ABA_Mutants_cDNA_P Parameter: Plant Line Value: CS24
  misc_feature: MA Experiment 20000070 PARAMETER Experiment Name: At_100uM_ABA_Mutants_cDNA_P Parameter: Timepoint (hr) Value: 6
  misc_feature: MA Experiment 20000070 PARAMETER Experiment Name: At_100uM_ABA_Mutants_cDNA_P Parameter: Tissue Value: Aerial
  misc_feature: MA Experiment 20000070 PARAMETER Experiment Name: At_100uM_ABA_Mutants_cDNA_P Parameter: Treatment Value: 100uM ABA vs. No Treatment
  misc_feature: MA Experiment ID: 20000071 Result: Up-regulated in Transcription
  misc_feature: MA Experiment 20000071 PARAMETER Experiment Name: At_100uM_ABA_Mutants_cDNA_P Parameter: Plant Line Value: CS8104
  misc_feature: MA Experiment 20000071 PARAMETER Experiment Name: At_100uM_ABA_Mutants_cDNA_P Parameter: Timepoint (hr) Value: 6
  misc_feature: MA Experiment 20000071 PARAMETER Experiment Name: At_100uM_ABA_Mutants_cDNA_P Parameter: Tissue Value: Aerial
  misc_feature: MA Experiment 20000071 PARAMETER Experiment Name: At_100uM_ABA_Mutants_cDNA_P Parameter: Treatment Value: 100uM ABA vs. No Treatment
  misc_feature: MA Experiment ID: 20000072 Result: Up-regulated in Transcription
  misc_feature: MA Experiment 20000072 PARAMETER Experiment Name: At_100uM_ABA_Mutants_cDNA_P Parameter: Plant Line Value: CS8105
  misc_feature: MA Experiment 20000072 PARAMETER Experiment Name: At_100uM_ABA_Mutants_cDNA_P Parameter: Timepoint (hr) Value: 6
  misc_feature: MA Experiment 20000072 PARAMETER Experiment Name: At_100uM_ABA_Mutants_cDNA_P Parameter: Tissue Value: Aerial
  misc_feature: MA Experiment 20000072 PARAMETER Experiment Name: At_100uM_ABA_Mutants_cDNA_P Parameter: Treatment Value: 100uM ABA vs. No Treatment
  misc_feature: MA Experiment ID: 20000086 Result: Up-regulated in Transcription
  misc_feature: MA Experiment 20000086 PARAMETER Experiment Name: At_100uM_ABA_Mutants_cDNA_P Parameter: Plant Line Value: CS22
  misc_feature: MA Experiment 20000086 PARAMETER Experiment Name: At_100uM_ABA_Mutants_cDNA_P Parameter: Timepoint (hr) Value: 6
  misc_feature: MA Experiment 20000086 PARAMETER Experiment Name: At_100uM_ABA_Mutants_cDNA_P Parameter: Tissue Value: Aerial
  misc_feature: MA Experiment 20000086 PARAMETER Experiment Name: At_100uM_ABA_Mutants_cDNA_P Parameter: Treatment Value: 100uM ABA vs. No Treatment
  misc_feature: MA Experiment ID: 20000087 Result: Up-regulated in Transcription
  misc_feature: MA Experiment 20000087 PARAMETER Experiment Name: At_100uM_ABA_Mutants_cDNA_P Parameter: Plant Line Value: WS
  misc_feature: MA Experiment 20000087 PARAMETER Experiment Name: At_100uM_ABA_Mutants_cDNA_P Parameter: Timepoint (hr) Value: 6
  misc_feature: MA Experiment 20000087 PARAMETER Experiment Name: At_100uM_ABA_Mutants_cDNA_P Parameter: Tissue Value: Aerial
  misc_feature: MA Experiment 20000087 PARAMETER Experiment Name: At_100uM_ABA_Mutants_cDNA_P Parameter: Treatment Value: 100uM ABA vs. No Treatment
  misc_feature: MA Experiment ID: 20000088 Result: Up-regulated in Transcription
  misc_feature: MA Experiment 20000088 PARAMETER Experiment Name: At_100uM_ABA_Mutants_cDNA_P Parameter: Plant Line Value: Landsberg
  misc_feature: MA Experiment 20000088 PARAMETER Experiment Name: At_100uM_ABA_Mutants_cDNA_P Parameter: Timepoint (hr) Value: 6
  misc_feature: MA Experiment 20000088 PARAMETER Experiment Name: At_100uM_ABA_Mutants_cDNA_P Parameter: Tissue Value: Aerial
  misc_feature: MA Experiment 20000088 PARAMETER Experiment Name: At_100uM_ABA_Mutants_cDNA_P Parameter: Treatment Value: 100uM ABA vs. No Treatment
  misc_feature: MA Experiment ID: 20000117 Result: Up-regulated in Transcription
  misc_feature: MA Experiment 20000117 PARAMETER Experiment Name: At_100uM_ABA_Mutants_cDNA_P Parameter: Plant Line Value: Columbia
  misc_feature: MA Experiment 20000117 PARAMETER Experiment Name: At_100uM_ABA_Mutants_cDNA_P Parameter: Timepoint (hr) Value: 6
  misc_feature: MA Experiment 20000117 PARAMETER Experiment Name: At_100uM_ABA_Mutants_cDNA_P Parameter: Tissue Value: Aerial
  misc_feature: MA Experiment 20000117 PARAMETER Experiment Name: At_100uM_ABA_Mutants_cDNA_P Parameter: Treatment Value: 100uM ABA vs. No Treatment

SEQ ID NO: 94509 - protein, 534 aa, Arabidopsis thaliana; identical to SEQ ID NO: 22006
  peptide (1)..(534): Ceres Seq. ID no. 12725145
  misc_feature (259)..(450): Pfam Name: ATPase family associated with various cellular Pfam Description: ATPase family associated with various cellular
  misc_feature (1)..(534): Homolog of NCBI NO: 7485703 NR Description: hypothetical protein F18B3.210 - Arabidopsis >gi|4835244|emb|CAB42922.1| putative mitochondrial protein thaliana] >gi|13877697|gb|AAK43926.1|AF370607_1 putative
  misc_feature (1)..(534): Homolog of NCBI NO: 30693378 NR Description: AAA-type ATPase family [Arabidopsis thaliana] AT3g50930/F18B3_210 [Arabidopsis thaliana]
  misc_feature (1)..(534): Homolog of NCBI NO: 21592769 NR Description: BCS1 protein-like protein [Arabidopsis thaliana]
  misc_feature (6)..(465): Homolog of NCBI NO: 30693380 NR Description: AAA-type ATPase family [Arabidopsis thaliana]
  misc_feature (488)..(526): Homolog of NCBI NO: 30693380 NR Description: AAA-type ATPase family [Arabidopsis thaliana]
  misc_feature (6)..(465): Homolog of NCBI NO: 39104562 NR Description: putative BCS1 protein [Arabidopsis thaliana]
  misc_feature (488)..(526): Homolog of NCBI NO: 39104562 NR Description: putative BCS1 protein [Arabidopsis thaliana]
  misc_feature (6)..(346): Homolog of NCBI NO: 7485704 NR Description: hypothetical protein F18B3.220 - Arabidopsis >gi|4835245|emb|CAB42923.1| putative mitochondrial protein
  misc_feature (345)..(465): Homolog of NCBI NO: 7485704 NR Description: hypothetical protein F18B3.220 - Arabidopsis >gi|4835245|emb|CAB42923.1| putative mitochondrial protein
  misc_feature (488)..(526): Homolog of NCBI NO: 7485704 NR Description: hypothetical protein F18B3.220 - Arabidopsis >gi|4835245|emb|CAB42923.1| putative mitochondrial protein

SEQ ID NO: 94510 - protein, 504 aa, Arabidopsis thaliana; identical to SEQ ID NO: 22007
  peptide (1)..(504): Ceres Seq. ID no. 12725146
  misc_feature (229)..(420): Pfam Name: ATPase family associated with various cellular Pfam Description: ATPase family associated with various cellular
  misc_feature (1)..(504): Homolog of NCBI NO: 7485703 NR Description: hypothetical protein F18B3.210 - Arabidopsis >gi|4835244|emb|CAB42922.1| putative mitochondrial protein thaliana] >gi|13877697|gb|AAK43926.1|AF370607_1 putative
  misc_feature (1)..(504): Homolog of NCBI NO: 30693378 NR Description: AAA-type ATPase family [Arabidopsis thaliana] AT3g50930/F18B3_210 [Arabidopsis thaliana]
  misc_feature (1)..(504): Homolog of NCBI NO: 21592769 NR Description: BCS1 protein-like protein [Arabidopsis thaliana]
  misc_feature (1)..(435): Homolog of NCBI NO: 30693380 NR Description: AAA-type ATPase family [Arabidopsis thaliana]
  misc_feature (458)..(496): Homolog of NCBI NO: 30693380 NR Description: AAA-type ATPase family [Arabidopsis thaliana]
  misc_feature (1)..(435): Homolog of NCBI NO: 39104562 NR Description: putative BCS1 protein [Arabidopsis thaliana]
  misc_feature (458)..(496): Homolog of NCBI NO: 39104562 NR Description: putative BCS1 protein [Arabidopsis thaliana]
  misc_feature (1)..(316): Homolog of NCBI NO: 7485704 NR Description: hypothetical protein F18B3.220 - Arabidopsis >gi|4835245|emb|CAB42923.1| putative mitochondrial protein
  misc_feature (315)..(435): Homolog of NCBI NO: 7485704 NR Description: hypothetical protein F18B3.220 - Arabidopsis >gi|4835245|emb|CAB42923.1| putative mitochondrial protein
  misc_feature (458)..(496): Homolog of NCBI NO: 7485704 NR Description: hypothetical protein F18B3.220 - Arabidopsis >gi|4835245|emb|CAB42923.1| putative mitochondrial protein

SEQ ID NO: 94511 - protein, 471 aa, Arabidopsis thaliana; identical to SEQ ID NO: 90755
  peptide (1)..(471): Ceres Seq. ID no. 12725147
  misc_feature (196)..(387): Pfam Name: ATPase family associated with various cellular Pfam Description: ATPase family associated with various cellular
  misc_feature (1)..(471): Homolog of NCBI NO: 7485703 NR Description: hypothetical protein F18B3.210 - Arabidopsis >gi|4835244|emb|CAB42922.1| putative mitochondrial protein thaliana] >gi|13877697|gb|AAK43926.1|AF370607_1 putative
  misc_feature (1)..(471): Homolog of NCBI NO: 30693378 NR Description: AAA-type ATPase family [Arabidopsis thaliana] AT3g50930/F18B3_210 [Arabidopsis thaliana]
  misc_feature (1)..(471): Homolog of NCBI NO: 21592769 NR Description: BCS1 protein-like protein [Arabidopsis thaliana]
  misc_feature (1)..(402): Homolog of NCBI NO: 30693380 NR Description: AAA-type ATPase family [Arabidopsis thaliana]
  misc_feature (425)..(463): Homolog of NCBI NO: 30693380 NR Description: AAA-type ATPase family [Arabidopsis thaliana]
  misc_feature (1)..(402): Homolog of NCBI NO: 39104562 NR Description: putative BCS1 protein [Arabidopsis thaliana]
  misc_feature (425)..(463): Homolog of NCBI NO: 39104562 NR Description: putative BCS1 protein [Arabidopsis thaliana]
  misc_feature (1)..(283): Homolog of NCBI NO: 7485704 NR Description: hypothetical protein F18B3.220 - Arabidopsis >gi|4835245|emb|CAB42923.1| putative mitochondrial protein
  misc_feature (282)..(402): Homolog of NCBI NO: 7485704 NR Description: hypothetical protein F18B3.220 - Arabidopsis >gi|4835245|emb|CAB42923.1| putative mitochondrial protein
  misc_feature (425)..(463): Homolog of NCBI NO: 7485704 NR Description: hypothetical protein F18B3.220 - Arabidopsis >gi|4835245|emb|CAB42923.1| putative mitochondrial protein

SEQ ID NO: 94512 - DNA, 1011 bp, Arabidopsis thaliana; identical to SEQ ID NO: 90756
  misc_feature (1)..(1011): Ceres Seq. ID no. 12725156
  misc_feature: MA Experiment ID: 20000171 Result: Up-regulated in Transcription
  misc_feature: MA Experiment 20000171 PARAMETER Experiment Name: At_42deg_Heat_P Parameter: Age (day) Value: 14
  misc_feature: MA Experiment 20000171 PARAMETER Experiment Name: At_42deg_Heat_P Parameter: Organism Value: A. thaliana
  misc_feature: MA Experiment 20000171 PARAMETER Experiment Name: At_42deg_Heat_P Parameter: Plant Line Value: WS
  misc_feature: MA Experiment 20000171 PARAMETER Experiment Name: At_42deg_Heat_P Parameter: Temperature (deg C) Value: 42 vs. 22
  misc_feature: MA Experiment 20000171 PARAMETER Experiment Name: At_42deg_Heat_P Parameter: Timepoint (hr) Value: 1
  misc_feature: MA Experiment 20000171 PARAMETER Experiment Name: At_42deg_Heat_P Parameter: Tissue Value: Aerial
  misc_feature: MA Experiment ID: 20000173 Result: Up-regulated in Transcription
  misc_feature: MA Experiment 20000173 PARAMETER Experiment Name: At_42deg_Heat_P Parameter: Age (day) Value: 14
  misc_feature: MA Experiment 20000173 PARAMETER Experiment Name: At_42deg_Heat_P Parameter: Organism Value: A. thaliana
  misc_feature: MA Experiment 20000173 PARAMETER Experiment Name: At_42deg_Heat_P Parameter: Plant Line Value: WS
  misc_feature: MA Experiment 20000173 PARAMETER Experiment Name: At_42deg_Heat_P Parameter: Temperature (deg C) Value: 42 vs. 22
  misc_feature: MA Experiment 20000173 PARAMETER Experiment Name: At_42deg_Heat_P Parameter: Timepoint (hr) Value: 6
  misc_feature: MA Experiment 20000173 PARAMETER Experiment Name: At_42deg_Heat_P Parameter: Tissue Value: Aerial
  misc_feature: MA Experiment ID: 20000235 Result: Down-regulated in Transcription
  misc_feature: MA Experiment 20000235 PARAMETER Experiment Name: At_Siliques_P Parameter: Age (day) Value: 21
  misc_feature: MA Experiment 20000235 PARAMETER Experiment Name: At_Siliques_P Parameter: Organism Value: A. thaliana
  misc_feature: MA Experiment 20000235 PARAMETER Experiment Name: At_Siliques_P Parameter: Plant Line Value: WS
  misc_feature: MA Experiment 20000235 PARAMETER Experiment Name: At_Siliques_P Parameter: Tissue Value: 5-10mm Siliques vs. Whole Plant

SEQ ID NO: 94513 - protein, 336 aa, Arabidopsis thaliana; identical to SEQ ID NO: 90757
  peptide (1)..(336): Ceres Seq. ID no. 12725157
  misc_feature (49)..(297): Pfam Name: Peroxidase Pfam Description: Peroxidase
  misc_feature (1)..(336): Homolog of NCBI NO: 15230365 NR Description: peroxidase, putative; protein id: At3g50990.1 thaliana] >gi|25453214|sp|Q9SD46|PE36_ARATH Peroxidase 36
  misc_feature (4)..(334): Homolog of NCBI NO: 15239370 NR Description: peroxidase, putative; protein id: At5g66390.1 thaliana] >gi|26397792|sp|Q9FJZ9|PE72_ARATH Peroxidase 72 (Atperox P72) (PRXR8) (ATP6a) >gi|10177520|dbj|BAB10915.1|
  misc_feature (4)..(334): Homolog of NCBI NO: 1402918 NR Description: peroxidase [Arabidopsis thaliana]
  misc_feature (32)..(334): Homolog of NCBI NO: 7658147 NR Description: peroxidase [Asparagus officinalis]
  misc_feature (11)..(335): Homolog of NCBI NO: 34913714 NR Description: putative peroxidase [Oryza sativa (japonica >gi|20146478|dbj|BAB89258.1| putative peroxidase [Oryza sativa
  misc_feature (9)..(333): Homolog of NCBI NO: 7453853 NR Description: peroxidase prx14 precursor [Spinacia oleracea]
  misc_feature (4)..(333): Homolog of NCBI NO: 7453855 NR Description: peroxidase prx15 precursor [Spinacia oleracea]
  misc_feature (3)..(334): Homolog of NCBI NO: 15224116 NR Description: peroxidase, putative; protein id: At2g18150.1, by cDNA: 126030., supported by cDNA: gi_19698902 [Arabidopsis >gi|25453215|sp|Q9SI16|PE15_ARATH Peroxidase 15 precursor
  misc_feature (11)..(334): Homolog of NCBI NO: 7453851 NR Description: peroxidase prx13 precursor [Spinacia oleracea]
  misc_feature (3)..(334): Homolog of NCBI NO: 21537275 NR Description: putative peroxidase [Arabidopsis thaliana]

SEQ ID NO: 94514 - protein, 274 aa, Arabidopsis thaliana; identical to SEQ ID NO: 90758
  peptide (1)..(274): Ceres Seq. ID no. 12725158
  misc_feature (1)..(235): Pfam Name: Peroxidase Pfam Description: Peroxidase
  misc_feature (1)..(274): Homolog of NCBI NO: 15230365 NR Description: peroxidase, putative; protein id: At3g50990.1 thaliana] >gi|25453214|sp|Q9SD46|PE36_ARATH Peroxidase 36
  misc_feature (1)..(272): Homolog of NCBI NO: 15239370 NR Description: peroxidase, putative; protein id: At5g66390.1 thaliana] >gi|26397792|sp|Q9FJZ9|PE72_ARATH Peroxidase 72 (Atperox P72) (PRXR8) (ATP6a) >gi|10177520|dbj|BAB10915.1|
  misc_feature (1)..(272): Homolog of NCBI NO: 1402918 NR Description: peroxidase [Arabidopsis thaliana]
  misc_feature (1)..(272): Homolog of NCBI NO: 7658147 NR Description: peroxidase [Asparagus officinalis]
  misc_feature (1)..(273): Homolog of NCBI NO: 34913714 NR Description: putative peroxidase [Oryza sativa (japonica >gi|20146478|dbj|BAB89258.1| putative peroxidase [Oryza sativa
  misc_feature (1)..(271): Homolog of NCBI NO: 7453853 NR Description: peroxidase prx14 precursor [Spinacia oleracea]
  misc_feature (1)..(271): Homolog of NCBI NO: 7453855 NR Description: peroxidase prx15 precursor [Spinacia oleracea]
  misc_feature (1)..(272): Homolog of NCBI NO: 15224116 NR Description: peroxidase, putative; protein id: At2g18150.1, by cDNA: 126030., supported by cDNA: gi_19698902 [Arabidopsis >gi|25453215|sp|Q9SI16|PE15_ARATH Peroxidase 15 precursor
  misc_feature (1)..(272): Homolog of NCBI NO: 7453851 NR Description: peroxidase prx13 precursor [Spinacia oleracea]
  misc_feature (1)..(272): Homolog of NCBI NO: 21537275 NR Description: putative peroxidase [Arabidopsis thaliana]

SEQ ID NO: 94515 - protein, 245 aa, Arabidopsis thaliana; identical to SEQ ID NO: 90759
  peptide (1)..(245): Ceres Seq. ID no. 12725159
  misc_feature (1)..(206): Pfam Name: Peroxidase Pfam Description: Peroxidase
  misc_feature (1)..(245): Homolog of NCBI NO: 15230365 NR Description: peroxidase, putative; protein id: At3g50990.1 thaliana] >gi|25453214|sp|Q9SD46|PE36_ARATH Peroxidase 36
  misc_feature (1)..(243): Homolog of NCBI NO: 15239370 NR Description: peroxidase, putative; protein id: At5g66390.1 thaliana] >gi|26397792|sp|Q9FJZ9|PE72_ARATH Peroxidase 72 (Atperox P72) (PRXR8) (ATP6a) >gi|10177520|dbj|BAB10915.1|
  misc_feature (1)..(243): Homolog of NCBI NO: 1402918 NR Description: peroxidase [Arabidopsis thaliana]
  misc_feature (1)..(243): Homolog of NCBI NO: 7658147 NR Description: peroxidase [Asparagus officinalis]
  misc_feature (1)..(244): Homolog of NCBI NO: 34913714 NR Description: putative peroxidase [Oryza sativa (japonica >gi|20146478|dbj|BAB89258.1| putative peroxidase [Oryza sativa
  misc_feature (1)..(242): Homolog of NCBI NO: 7453853 NR Description: peroxidase prx14 precursor [Spinacia oleracea]
  misc_feature (1)..(242): Homolog of NCBI NO: 7453855 NR Description: peroxidase prx15 precursor [Spinacia oleracea]
  misc_feature (1)..(243): Homolog of NCBI NO: 15224116 NR Description: peroxidase, putative; protein id: At2g18150.1, by cDNA: 126030., supported by cDNA: gi_19698902 [Arabidopsis >gi|25453215|sp|Q9SI16|PE15_ARATH Peroxidase 15 precursor
  misc_feature (1)..(243): Homolog of NCBI NO: 7453851 NR Description: peroxidase prx13 precursor [Spinacia oleracea]
  misc_feature (1)..(243): Homolog of NCBI NO: 21537275 NR Description: putative peroxidase [Arabidopsis thaliana]

SEQ ID NO: 94516 - DNA, 1128 bp, Arabidopsis thaliana; identical to SEQ ID NO: 90760
  misc_feature (1)..(1128): Ceres Seq. ID no. 12725164
  misc_feature: MA Experiment ID: 20000264 Result: Up-regulated in Transcription
  misc_feature: MA Experiment 20000264 PARAMETER Experiment Name: At_Open_Flower_P Parameter: Age (day) Value: 21
  misc_feature: MA Experiment 20000264 PARAMETER Experiment Name: At_Open_Flower_P Parameter: Plant Line Value: WS
  misc_feature: MA Experiment 20000264 PARAMETER Experiment Name: At_Open_Flower_P Parameter: Tissue Value: Open Flower vs. Whole Plant
  misc_feature: MA Experiment ID: 20000437 Result: Up-regulated in Transcription
  misc_feature: MA Experiment 20000437 PARAMETER Experiment Name: At_Drought_P Parameter: Age (day) Value: 8
  misc_feature: MA Experiment 20000437 PARAMETER Experiment Name: At_Drought_P Parameter: Organism Value: A. thaliana
  misc_feature: MA Experiment 20000437 PARAMETER Experiment Name: At_Drought_P Parameter: Plant Line Value: WS
  misc_feature: MA Experiment 20000437 PARAMETER Experiment Name: At_Drought_P Parameter: Timepoint (hr) Value: 24
  misc_feature: MA Experiment 20000437 PARAMETER Experiment Name: At_Drought_P Parameter: Tissue Value: Whole Plant
  misc_feature: MA Experiment 20000437 PARAMETER Experiment Name: At_Drought_P Parameter: Treatment Value: Drought vs. No Drought
  misc_feature: MA Experiment ID: 20000794 Result: Up-regulated in Transcription
  misc_feature: MA Experiment 20000794 PARAMETER Experiment Name: At_Petals_P Parameter: Age (day) Value: 23-25 days
  misc_feature: MA Experiment 20000794 PARAMETER Experiment Name: At_Petals_P Parameter: Plant Line Value: WS
  misc_feature: MA Experiment 20000794 PARAMETER Experiment Name: At_Petals_P Parameter: Tissue Value: Petals vs. Whole plant
  misc_feature: MA Experiment ID: 20001555 Result: Up-regulated in Transcription
  misc_feature: MA Experiment 20001555 PARAMETER Experiment Name: At_Drought_Soil_Dry_P Parameter: Age (day) Value: 24
  misc_feature: MA Experiment 20001555 PARAMETER Experiment Name: At_Drought_Soil_Dry_P Parameter: Organism Value: A. thaliana
  misc_feature: MA Experiment 20001555 PARAMETER Experiment Name: At_Drought_Soil_Dry_P Parameter: Plant Line Value: WS
  misc_feature: MA Experiment 20001555 PARAMETER Experiment Name: At_Drought_Soil_Dry_P Parameter: Post Timepoint (hr) Value: None
  misc_feature: MA Experiment 20001555 PARAMETER Experiment Name: At_Drought_Soil_Dry_P Parameter: Post-Treatment Value: None
  misc_feature: MA Experiment 20001555 PARAMETER Experiment Name: At_Drought_Soil_Dry_P Parameter: Timepoint (day) Value: 10
  misc_feature: MA Experiment 20001555 PARAMETER Experiment Name: At_Drought_Soil_Dry_P Parameter: Treatment Value: Drought vs. No Drought
  misc_feature: MA Experiment ID: 20001556 Result: Up-regulated in Transcription
  misc_feature: MA Experiment 20001556 PARAMETER Experiment Name: At_Drought_Soil_Dry_P Parameter: Age (day) Value: 26
  misc_feature: MA Experiment 20001556 PARAMETER Experiment Name: At_Drought_Soil_Dry_P Parameter: Organism Value: A. thaliana
  misc_feature: MA Experiment 20001556 PARAMETER Experiment Name: At_Drought_Soil_Dry_P Parameter: Plant Line Value: WS
  misc_feature: MA Experiment 20001556 PARAMETER Experiment Name: At_Drought_Soil_Dry_P Parameter: Post Timepoint (hr) Value: None
  misc_feature: MA Experiment 20001556 PARAMETER Experiment Name: At_Drought_Soil_Dry_P Parameter: Post-Treatment Value: None
  misc_feature: MA Experiment 20001556 PARAMETER Experiment Name: At_Drought_Soil_Dry_P Parameter: Timepoint (day) Value: 12
  misc_feature: MA Experiment 20001556 PARAMETER Experiment Name: At_Drought_Soil_Dry_P Parameter: Treatment Value: Drought vs. No Drought
  misc_feature: MA Experiment ID: 20001559 Result: Up-regulated in Transcription
  misc_feature: MA Experiment 20001559 PARAMETER Experiment Name: At_Drought_Soil_Dry_P Parameter: Age (day) Value: 28
  misc_feature: MA Experiment 20001559 PARAMETER Experiment Name: At_Drought_Soil_Dry_P Parameter: Organism Value: A. thaliana
  misc_feature: MA Experiment 20001559 PARAMETER Experiment Name: At_Drought_Soil_Dry_P Parameter: Plant Line Value: WS
  misc_feature: MA Experiment 20001559 PARAMETER Experiment Name: At_Drought_Soil_Dry_P Parameter: Post Timepoint (hr) Value: 29
  misc_feature: MA Experiment 20001559 PARAMETER Experiment Name: At_Drought_Soil_Dry_P Parameter: Post-Treatment Value: Re-Water vs. No Drought
  misc_feature: MA Experiment 20001559 PARAMETER Experiment Name: At_Drought_Soil_Dry_P Parameter: Timepoint (day) Value: 14
  misc_feature: MA Experiment 20001559 PARAMETER Experiment Name: At_Drought_Soil_Dry_P Parameter: Treatment Value: Drought vs. No Drought
  misc_feature: MA Experiment ID: 20001757 Result: Down-regulated in Transcription
  misc_feature: MA Experiment 20001757 PARAMETER Experiment Name: At_50mM_NH4NO3_L-to-H_P Parameter: Timepoint (hr) Value: 6
  misc_feature: MA Experiment 20001757 PARAMETER Experiment Name: At_50mM_NH4NO3_L-to-H_P Parameter: Tissue Value: Leaf
  misc_feature: MA Experiment 20001757 PARAMETER Experiment Name: At_50mM_NH4NO3_L-to-H_P Parameter: Treatment Value: 50mM NH4NO3 vs 100mM Mannitol
  misc_feature: MA Experiment ID: 20001904 Result: Up-regulated in Transcription
  misc_feature: MA Experiment 20001904 PARAMETER Experiment Name: At_Drought_Reproduction_P Parameter: Age (day) Value: 37
  misc_feature: MA Experiment 20001904 PARAMETER Experiment Name: At_Drought_Reproduction_P Parameter: Organism Value: A. thaliana
  misc_feature: MA Experiment 20001904 PARAMETER Experiment Name: At_Drought_Reproduction_P Parameter: Plant Line Value: WS
  misc_feature: MA Experiment 20001904 PARAMETER Experiment Name: At_Drought_Reproduction_P Parameter: Timepoint (day) Value: 7
  misc_feature: MA Experiment 20001904 PARAMETER Experiment Name: At_Drought_Reproduction_P Parameter: Tissue Value: Rosettes
  misc_feature: MA Experiment 20001904 PARAMETER Experiment Name: At_Drought_Reproduction_P Parameter: Treatment Value: Drought vs. No Drought
  misc_feature: MA Experiment ID: 20001905 Result: Up-regulated in Transcription
  misc_feature: MA Experiment 20001905 PARAMETER Experiment Name: At_Drought_Reproduction_P Parameter: Age (day) Value: 40
  misc_feature: MA Experiment 20001905 PARAMETER Experiment Name: At_Drought_Reproduction_P Parameter: Organism Value: A. thaliana
  misc_feature: MA Experiment 20001905 PARAMETER Experiment Name: At_Drought_Reproduction_P Parameter: Plant Line Value: WS
  misc_feature: MA Experiment 20001905 PARAMETER Experiment Name: At_Drought_Reproduction_P Parameter: Timepoint (day) Value: 10
  misc_feature: MA Experiment 20001905 PARAMETER Experiment Name: At_Drought_Reproduction_P Parameter: Tissue Value: Rosettes
  misc_feature: MA Experiment 20001905 PARAMETER Experiment Name: At_Drought_Reproduction_P Parameter: Treatment Value: Drought vs. No Drought

SEQ ID NO: 94517 - protein, 307 aa, Arabidopsis thaliana; identical to SEQ ID NO: 90761
  peptide (1)..(307): Ceres Seq. ID no. 12725165
  misc_feature (10)..(307): Homolog of NCBI NO: 18409266 NR Description: putative protein; protein id: At3g51090.1, by cDNA: gi_14423521, supported by cDNA: gi_20148346 [Arabidopsis >gi|14423522|gb|AAK62443.1|AF386998_1 putative protein
  misc_feature (57)..(307): Homolog of NCBI NO: 11357624 NR Description: hypothetical protein F24M12.130 - Arabidopsis >gi|6562261|emb|CAB62631.1| putative protein [Arabidopsis
  misc_feature (111)..(307): Homolog of NCBI NO: 18398123 NR Description: expressed protein; protein id: At2g16460.1, by cDNA: 105900., supported by cDNA: gi_17529263 [Arabidopsis >gi|17529264|gb|AAL38859.1| unknown protein [Arabidopsis
  misc_feature (111)..(200): Homolog of NCBI NO: 25411710 NR Description: hypothetical protein At2g16460 [imported] -
  misc_feature (150)..(306): Homolog of NCBI NO: 14318473 NR Description: Hypothetical ORF; Yfl046wp [Saccharomyces
  misc_feature (127)..(307): Homolog of NCBI NO: 40743676 NR Description: hypothetical protein AN5773.2 [Aspergillus
  misc_feature (107)..(307): Homolog of NCBI NO: 19115424 NR Description: hypothetical conserved protein
  misc_feature (124)..(280): Homolog of NCBI NO: 8218057 NR Description: dJ500L14.1 (novel protein) [Homo sapiens]
  misc_feature (127)..(269): Homolog of NCBI NO: 10197624 NR Description: MDS025 [Homo sapiens] MDS011 [Homo sapiens] >gi|18088483|gb|AAH20783.1|AAH20783
  misc_feature (127)..(269): Homolog of NCBI NO: 20149663 NR Description: hypothetical protein MDS025 [Homo sapiens] CUA003 [Homo sapiens] >gi|12053095|emb|CAB66725.1| hypothetical [Homo sapiens] >gi|15778994|gb|AAH14573.1|AAH14573 hypothetical

SEQ ID NO: 94518 - protein, 298 aa, Arabidopsis thaliana; identical to SEQ ID NO: 90762
  peptide (1)..(298): Ceres Seq. ID no. 12725166
  misc_feature (1)..(298): Homolog of NCBI NO: 18409266 NR Description: putative protein; protein id: At3g51090.1, by cDNA: gi_14423521, supported by cDNA: gi_20148346 [Arabidopsis >gi|14423522|gb|AAK62443.1|AF386998_1 putative protein
  misc_feature (48)..(298): Homolog of NCBI NO: 11357624 NR Description: hypothetical protein F24M12.130 - Arabidopsis >gi|6562261|emb|CAB62631.1| putative protein [Arabidopsis
  misc_feature (102)..(298): Homolog of NCBI NO: 18398123 NR Description: expressed protein; protein id: At2g16460.1, by cDNA: 105900., supported by cDNA: gi_17529263 [Arabidopsis >gi|17529264|gb|AAL38859.1| unknown protein [Arabidopsis
  misc_feature (102)..(191): Homolog of NCBI NO: 25411710 NR Description: hypothetical protein At2g16460 [imported] -
  misc_feature (141)..(297): Homolog of NCBI NO: 14318473 NR Description: Hypothetical ORF; Yfl046wp [Saccharomyces
  misc_feature (118)..(298): Homolog of NCBI NO: 40743676 NR Description: hypothetical protein AN5773.2 [Aspergillus
  misc_feature (98)..(298): Homolog of NCBI NO: 19115424 NR Description: hypothetical conserved protein
  misc_feature (115)..(271): Homolog of NCBI NO: 8218057 NR Description: dJ500L14.1 (novel protein) [Homo sapiens]
  misc_feature (118)..(260): Homolog of NCBI NO: 10197624 NR Description: MDS025 [Homo sapiens] MDS011 [Homo sapiens] >gi|18088483|gb|AAH20783.1|AAH20783
  misc_feature (118)..(260): Homolog of NCBI NO: 20149663 NR Description: hypothetical protein MDS025 [Homo sapiens] CUA003 [Homo sapiens] >gi|12053095|emb|CAB66725.1| hypothetical [Homo sapiens] >gi|15778994|gb|AAH14573.1|AAH14573 hypothetical

SEQ ID NO: 94519 - protein, 251 aa, Arabidopsis thaliana; identical to SEQ ID NO: 90763
  peptide (1)..(251): Ceres Seq. ID no. 12725167
  misc_feature (1)..(251): Homolog of NCBI NO: 18409266 NR Description: putative protein; protein id: At3g51090.1, by cDNA: gi_14423521, supported by cDNA: gi_20148346 [Arabidopsis >gi|14423522|gb|AAK62443.1|AF386998_1 putative protein
  misc_feature (1)..(251): Homolog of NCBI NO: 11357624 NR Description: hypothetical protein F24M12.130 - Arabidopsis >gi|6562261|emb|CAB62631.1| putative protein [Arabidopsis
  misc_feature (55)..(251): Homolog of NCBI NO: 18398123 NR Description: expressed protein; protein id: At2g16460.1, by cDNA: 105900., supported by cDNA: gi_17529263 [Arabidopsis >gi|17529264|gb|AAL38859.1| unknown protein [Arabidopsis
  misc_feature (55)..(144): Homolog of NCBI NO: 25411710 NR Description: hypothetical protein At2g16460 [imported] -
  misc_feature (94)..(250): Homolog of NCBI NO: 14318473 NR Description: Hypothetical ORF; Yfl046wp [Saccharomyces
  misc_feature (71)..(251): Homolog of NCBI NO: 40743676 NR Description: hypothetical protein AN5773.2 [Aspergillus
  misc_feature (51)..(251): Homolog of NCBI NO: 19115424 NR Description: hypothetical conserved protein
  misc_feature (68)..(224): Homolog of NCBI NO: 8218057 NR Description: dJ500L14.1 (novel protein) [Homo sapiens]
  misc_feature (71)..(213): Homolog of NCBI NO: 10197624 NR Description: MDS025 [Homo sapiens] MDS011 [Homo sapiens] >gi|18088483|gb|AAH20783.1|AAH20783
  misc_feature (71)..(213): Homolog of NCBI NO: 20149663 NR Description: hypothetical protein MDS025 [Homo sapiens] CUA003 [Homo sapiens] >gi|12053095|emb|CAB66725.1| hypothetical [Homo sapiens] >gi|15778994|gb|AAH14573.1|AAH14573 hypothetical

SEQ ID NO: 94520 - DNA, 1250 bp, Arabidopsis thaliana; identical to SEQ ID NO: 90764
  misc_feature (1)..(1250): Ceres Seq. ID no. 12725202
  misc_feature: MA Experiment ID: 20000180 Result: Up-regulated in Transcription
  misc_feature: MA Experiment 20000180 PARAMETER Experiment Name: At_Germinating_Seeds_P Parameter: Age (hr) Value: 24 vs. 0
  misc_feature: MA Experiment 20000180 PARAMETER Experiment Name: At_Germinating_Seeds_P Parameter: Tissue Value: Germinating Seeds
  misc_feature: MA Experiment ID: 20000182 Result: Up-regulated in Transcription
  misc_feature: MA Experiment 20000182 PARAMETER Experiment Name: At_2mM_SA_P Parameter: Age (day) Value: 14
  misc_feature: MA Experiment 20000182 PARAMETER Experiment Name: At_2mM_SA_P Parameter: Organism Value: A. thaliana
  misc_feature: MA Experiment 20000182 PARAMETER Experiment Name: At_2mM_SA_P Parameter: Plant Line Value: WS
  misc_feature: MA Experiment 20000182 PARAMETER Experiment Name: At_2mM_SA_P Parameter: Timepoint (hr) Value: 6
  misc_feature: MA Experiment 20000182 PARAMETER Experiment Name: At_2mM_SA_P Parameter: Tissue Value: Aerial
  misc_feature: MA Experiment 20000182 PARAMETER Experiment Name: At_2mM_SA_P Parameter: Treatment Value: 2mM SA vs. No Treatment
  misc_feature: MA Experiment ID: 20000211 Result: Up-regulated in Transcription
  misc_feature: MA Experiment 20000211 PARAMETER Experiment Name: At_0.001percent_MeJA__P Parameter: Age (day) Value: 14
  misc_feature: MA Experiment 20000211 PARAMETER Experiment Name: At_0.001percent_MeJA__P Parameter: Organism Value: A. thaliana
  misc_feature: MA Experiment 20000211 PARAMETER Experiment Name: At_0.001percent_MeJA__P Parameter: Plant Line Value: WS
  misc_feature: MA Experiment 20000211 PARAMETER Experiment Name: At_0.001percent_MeJA__P Parameter: Timepoint (hr) Value: 1
  misc_feature: MA Experiment 20000211 PARAMETER Experiment Name: At_0.001percent_MeJA__P Parameter: Tissue Value: Aerial
  misc_feature: MA Experiment 20000211 PARAMETER Experiment Name: At_0.001percent_MeJA__P Parameter: Treatment Value: 0.001percent MeJA vs. No Treatment
  misc_feature: MA Experiment ID: 20000234 Result: Down-regulated in Transcription
  misc_feature: MA Experiment 20000234 PARAMETER Experiment Name: At_Siliques_P Parameter: Age (day) Value: 21
  misc_feature: MA Experiment 20000234 PARAMETER Experiment Name: At_Siliques_P Parameter: Organism Value: A. thaliana
  misc_feature: MA Experiment 20000234 PARAMETER Experiment Name: At_Siliques_P Parameter: Plant Line Value: WS
  misc_feature: MA Experiment 20000234 PARAMETER Experiment Name: At_Siliques_P Parameter: Tissue Value: Less Than 5mm Siliques vs. Whole Plant
  misc_feature: MA Experiment ID: 20000235 Result: Down-regulated in Transcription
  misc_feature: MA Experiment 20000235 PARAMETER Experiment Name: At_Siliques_P Parameter: Age (day) Value: 21
  misc_feature: MA Experiment 20000235 PARAMETER Experiment Name: At_Siliques_P Parameter: Organism Value: A. thaliana
  misc_feature: MA Experiment 20000235 PARAMETER Experiment Name: At_Siliques_P Parameter: Plant Line Value: WS
  misc_feature: MA Experiment 20000235 PARAMETER Experiment Name: At_Siliques_P Parameter: Tissue Value: 5-10mm Siliques vs. Whole Plant
  misc_feature: MA Experiment ID: 20000264 Result: Down-regulated in Transcription
  misc_feature: MA Experiment 20000264 PARAMETER Experiment Name: At_Open_Flower_P Parameter: Age (day) Value: 21
  misc_feature: MA Experiment 20000264 PARAMETER Experiment Name: At_Open_Flower_P Parameter: Plant Line Value: WS
  misc_feature: MA Experiment 20000264 PARAMETER Experiment Name: At_Open_Flower_P Parameter: Tissue Value: Open Flower vs. Whole Plant
  misc_feature: MA Experiment ID: 20000794 Result: Down-regulated in Transcription
  misc_feature: MA Experiment 20000794 PARAMETER Experiment Name: At_Petals_P Parameter: Age (day) Value: 23-25 days
  misc_feature: MA Experiment 20000794 PARAMETER Experiment Name: At_Petals_P Parameter: Plant Line Value: WS
  misc_feature: MA Experiment 20000794 PARAMETER Experiment Name: At_Petals_P Parameter: Tissue Value: Petals vs. Whole plant

SEQ ID NO: 94521 - protein, 382 aa, Arabidopsis thaliana; identical to SEQ ID NO: 90765
  peptide (1)..(382): Ceres Seq. ID no. 12725203
  misc_feature (19)..(367): Pfam Name: Strictosidine synthase Pfam Description: Strictosidine synthase
  misc_feature (12)..(382): Homolog of NCBI NO: 15230488 NR Description: strictosidine synthase-related; protein id: supported by cDNA: gi_13430723 [Arabidopsis thaliana]
  misc_feature (12)..(382): Homolog of NCBI NO: 18409339 NR Description: strictosidine synthase-related; protein id: supported by cDNA: 34197., supported by cDNA: gi_13122281,
  misc_feature (12)..(382): Homolog of NCBI NO: 11358518 NR Description: mucin-like protein - Arabidopsis thaliana
  misc_feature (12)..(382): Homolog of NCBI NO: 15230490 NR Description: strictosidine synthase-related; protein id: supported by cDNA: 38956., supported by cDNA: gi_18700142
  misc_feature (12)..(380): Homolog of NCBI NO: 15230477 NR Description: strictosidine synthase-related; protein id:
  misc_feature (29)..(378): Homolog of NCBI NO: 37536558 NR Description: mucin-like protein [Oryza sativa (japonica
  misc_feature (25)..(370): Homolog of NCBI NO: 15596490 NR Description: hypothetical protein [Pseudomonas aeruginosa PA01]
  misc_feature (62)..(376): Homolog of NCBI NO: 40063117 NR Description: strictosidine synthase family protein [uncultured
  misc_feature (21)..(374): Homolog of NCBI NO: 23237921 NR Description: contains ESTs
  misc_feature (19)..(372): Homolog of NCBI NO: 23059369 NR Description: hypothetical protein [Pseudomonas fluorescens

SEQ ID NO: 94522 - protein, 371 aa, Arabidopsis thaliana; identical to SEQ ID NO: 90766
  peptide (1)..(371): Ceres Seq. ID no. 12725204
  misc_feature (8)..(356): Pfam Name: Strictosidine synthase Pfam Description: Strictosidine synthase
  misc_feature (1)..(371): Homolog of NCBI NO: 15230488 NR Description: strictosidine synthase-related; protein id: supported by cDNA: gi_13430723 [Arabidopsis thaliana]
  misc_feature (1)..(371): Homolog of NCBI NO: 18409339 NR Description: strictosidine synthase-related; protein id: supported by cDNA: 34197., supported by cDNA: gi_13122281,
  misc_feature (1)..(371): Homolog of NCBI NO: 11358518 NR Description: mucin-like protein - Arabidopsis thaliana
  misc_feature (1)..(371): Homolog of NCBI NO: 15230490 NR Description: strictosidine synthase-related; protein id: supported by cDNA: 38956., supported by cDNA: gi_18700142
  misc_feature (1)..(369): Homolog of NCBI NO: 15230477 NR Description: strictosidine synthase-related; protein id:
  misc_feature (18)..(367): Homolog of NCBI NO: 37536558 NR Description: mucin-like protein [Oryza sativa (japonica
  misc_feature (14)..(359): Homolog of NCBI NO: 15596490 NR Description: hypothetical protein [Pseudomonas aeruginosa PA01]
  misc_feature (51)..(365): Homolog of NCBI NO: 40063117 NR Description: strictosidine synthase family protein [uncultured
  misc_feature (10)..(363): Homolog of NCBI NO: 23237921 NR Description: contains ESTs
  misc_feature (8)..(361): Homolog of NCBI NO: 23059369 NR Description: hypothetical protein [Pseudomonas fluorescens

SEQ ID NO: 94523 - DNA, 1086 bp, Arabidopsis thaliana; identical to SEQ ID NO: 90767
  misc_feature (1)..(1086): Ceres Seq. ID no. 12725205
  misc_feature: MA Experiment ID: 20000180 Result: Up-regulated in Transcription
  misc_feature: MA Experiment 20000180 PARAMETER Experiment Name: At_Germinating_Seeds_P Parameter: Age (hr) Value: 24 vs. 0
  misc_feature: MA Experiment 20000180 PARAMETER Experiment Name: At_Germinating_Seeds_P Parameter: Tissue Value: Germinating Seeds
  misc_feature: MA Experiment ID: 20000227 Result: Up-regulated in Transcription
  misc_feature: MA Experiment 20000227 PARAMETER Experiment Name: At_Root-Tips-vs-Tops_P Parameter: Tissue Value: Root Tips vs. Root Tops
  misc_feature: MA Experiment ID: 20000265 Result: Up-regulated in Transcription
  misc_feature: MA Experiment 20000265 PARAMETER Experiment Name: At_Open_Flower_P Parameter: Age (day) Value: 21
  misc_feature: MA Experiment 20000265 PARAMETER Experiment Name: At_Open_Flower_P Parameter: Plant Line Value: WS
  misc_feature: MA Experiment 20000265 PARAMETER Experiment Name: At_Open_Flower_P Parameter: Tissue Value: Closed Flower vs. Whole Plant
  misc_feature: MA Experiment ID: 20000437 Result: Down-regulated in Transcription
  misc_feature: MA Experiment 20000437 PARAMETER Experiment Name: At_Drought_P Parameter: Age (day) Value: 8
  misc_feature: MA Experiment 20000437 PARAMETER Experiment Name: At_Drought_P Parameter: Organism Value: A. thaliana
  misc_feature: MA Experiment 20000437 PARAMETER Experiment Name: At_Drought_P Parameter: Plant Line Value: WS
  misc_feature: MA Experiment 20000437 PARAMETER Experiment Name: At_Drought_P Parameter: Timepoint (hr) Value: 24
  misc_feature: MA Experiment 20000437 PARAMETER Experiment Name: At_Drought_P Parameter: Tissue Value: Whole Plant
  misc_feature: MA Experiment 20000437 PARAMETER Experiment Name: At_Drought_P Parameter: Treatment Value: Drought vs. No Drought
  misc_feature: MA Experiment ID: 20001554 Result: Down-regulated in Transcription
  misc_feature: MA Experiment 20001554 PARAMETER Experiment Name: At_Drought_Soil_Dry_P Parameter: Age (day) Value: 21
  misc_feature: MA Experiment 20001554 PARAMETER Experiment Name: At_Drought_Soil_Dry_P Parameter: Organism Value: A. thaliana
  misc_feature: MA Experiment 20001554 PARAMETER Experiment Name: At_Drought_Soil_Dry_P Parameter: Plant Line Value: WS
  misc_feature: MA Experiment 20001554 PARAMETER Experiment Name: At_Drought_Soil_Dry_P Parameter: Post Timepoint (hr) Value: None
  misc_feature: MA Experiment 20001554 PARAMETER Experiment Name: At_Drought_Soil_Dry_P Parameter: Post-Treatment Value: None
  misc_feature: MA Experiment 20001554 PARAMETER Experiment Name: At_Drought_Soil_Dry_P Parameter: Timepoint (day) Value: 7
  misc_feature: MA Experiment 20001554 PARAMETER Experiment Name: At_Drought_Soil_Dry_P Parameter: Treatment Value: Drought vs. No Drought
  misc_feature: MA Experiment ID: 20001560 Result: Up-regulated in Transcription
  misc_feature: MA Experiment 20001560 PARAMETER Experiment Name: At_Drought_Soil_Dry_P Parameter: Age (day) Value: 28
  misc_feature: MA Experiment 20001560 PARAMETER Experiment Name: At_Drought_Soil_Dry_P Parameter: Organism Value: A. thaliana
  misc_feature: MA Experiment 20001560 PARAMETER Experiment Name: At_Drought_Soil_Dry_P Parameter: Plant Line Value: WS
  misc_feature: MA Experiment 20001560 PARAMETER Experiment Name: At_Drought_Soil_Dry_P Parameter: Post Timepoint (hr) Value: None
  misc_feature: MA Experiment 20001560 PARAMETER Experiment Name: At_Drought_Soil_Dry_P Parameter: Post-Treatment Value: None
  misc_feature: MA Experiment 20001560 PARAMETER Experiment Name: At_Drought_Soil_Dry_P Parameter: Timepoint (day) Value: 14
  misc_feature: MA Experiment 20001560 PARAMETER Experiment Name: At_Drought_Soil_Dry_P Parameter: Treatment Value: Drought vs. No Drought
  misc_feature: MA Experiment ID: 20001911 Result: Down-regulated in Transcription
  misc_feature: MA Experiment 20001911 PARAMETER Experiment Name: At_Drought_Reproduction_P Parameter: Age (day) Value: 40
  misc_feature: MA Experiment 20001911 PARAMETER Experiment Name: At_Drought_Reproduction_P Parameter: Organism Value: A. thaliana
  misc_feature: MA Experiment 20001911 PARAMETER Experiment Name: At_Drought_Reproduction_P Parameter: Plant Line Value: WS
  misc_feature: MA Experiment 20001911 PARAMETER Experiment Name: At_Drought_Reproduction_P Parameter: Timepoint (day) Value: 10
  misc_feature: MA Experiment 20001911 PARAMETER Experiment Name: At_Drought_Reproduction_P Parameter: Tissue Value: Flowers
  misc_feature: MA Experiment 20001911 PARAMETER Experiment Name: At_Drought_Reproduction_P Parameter: Treatment Value: Drought vs. No Drought

SEQ ID NO: 94524 - protein, 361 aa, Arabidopsis thaliana; identical to SEQ ID NO: 90768
  peptide (1)..(361): Ceres Seq. ID no. 12725206
  misc_feature (71)..(320): Pfam Name: Protein phosphatase 2C Pfam Description: Protein phosphatase 2C
  misc_feature (1)..(361): Homolog of NCBI NO: 15230495 NR Description: protein phosphatase 2C (PP2C); protein id:
  misc_feature (28)..(359): Homolog of NCBI NO: 37536524 NR Description: putative protein phosphatase-2C [Oryza sativa
  misc_feature (5)..(359): Homolog of NCBI NO: 15226152 NR Description: protein phosphatase 2C (PP2C); protein id: supported by cDNA: gi_17979441, supported by cDNA: gi_20259092
  misc_feature (59)..(359): Homolog of NCBI NO: 10140768 NR Description: putative protein phosphatase-2C [Oryza sativa]
  misc_feature (65)..(361): Homolog of NCBI NO: 20146108 NR Description: protein phosphatase 2C [Mesembryanthemum
  misc_feature (30)..(361): Homolog of NCBI NO: 15224766 NR Description: protein phosphatase 2C (PP2C); protein id: supported by cDNA: gi_12642917, supported by cDNA: gi_14517519, by cDNA: gi_16323271 [Arabidopsis thaliana]
  misc_feature (11)..(359): Homolog of NCBI NO: 21693562 NR Description: DNA-binding protein phosphatase 2C [Nicotiana
  misc_feature (67)..(358): Homolog of NCBI NO: 25352221 NR Description: phosphoprotein phosphatase (EC 3.1.3.16) 2C
  misc_feature (64)..(358): Homolog of NCBI NO: 24413992 NR Description: putative DNA-binding protein phosphatase 2C
  misc_feature (67)..(355): Homolog of NCBI NO: 34894410 NR Description: putative protein phosphatase [Oryza sativa

SEQ ID NO: 94525 - protein, 352 aa, Arabidopsis thaliana; identical to SEQ ID NO: 90769
  peptide (1)..(352): Ceres Seq. ID no. 12725207
  misc_feature (62)..(311): Pfam Name: Protein phosphatase 2C Pfam Description: Protein phosphatase 2C
  misc_feature (1)..(352): Homolog of NCBI NO: 15230495 NR Description: protein phosphatase 2C (PP2C); protein id:
  misc_feature (19)..(350): Homolog of NCBI NO: 37536524 NR Description: putative protein phosphatase-2C [Oryza sativa
  misc_feature (1)..(350): Homolog of NCBI NO: 15226152 NR Description: protein phosphatase 2C (PP2C); protein id: supported by cDNA: gi_17979441, supported by cDNA: gi_20259092
  misc_feature (50)..(350): Homolog of NCBI NO: 10140768 NR Description: putative protein phosphatase-2C [Oryza sativa]
  misc_feature (56)..(352): Homolog of NCBI NO: 20146108 NR Description: protein phosphatase 2C [Mesembryanthemum
  misc_feature (21)..(352): Homolog of NCBI NO: 15224766 NR Description: protein phosphatase 2C (PP2C); protein id: supported by cDNA: gi_12642917, supported by cDNA: gi_14517519, by cDNA: gi_16323271 [Arabidopsis thaliana]
  misc_feature (2)..(350): Homolog of NCBI NO: 21693562 NR Description: DNA-binding protein phosphatase 2C [Nicotiana
  misc_feature (58)..(349): Homolog of NCBI NO: 25352221 NR Description: phosphoprotein phosphatase (EC 3.1.3.16) 2C
  misc_feature (55)..(349): Homolog of NCBI NO: 24413992 NR Description: putative DNA-binding protein phosphatase 2C
  misc_feature (58)..(346): Homolog of NCBI NO: 34894410 NR Description: putative protein phosphatase [Oryza sativa

SEQ ID NO: 94526 - protein, 341 aa, Arabidopsis thaliana; identical to SEQ ID NO: 90770
  peptide (1)..(341): Ceres Seq. ID no. 12725208
  misc_feature (51)..(300): Pfam Name: Protein phosphatase 2C Pfam Description: Protein phosphatase 2C
  misc_feature (1)..(341): Homolog of NCBI NO: 15230495 NR Description: protein phosphatase 2C (PP2C); protein id:
  misc_feature (8)..(339): Homolog of NCBI NO: 37536524 NR Description: putative protein phosphatase-2C [Oryza sativa
  misc_feature (1)..(339): Homolog of NCBI NO: 15226152 NR Description: protein phosphatase 2C (PP2C); protein id: supported by cDNA: gi_17979441, supported by cDNA: gi_20259092
  misc_feature (39)..(339): Homolog of NCBI NO: 10140768 NR Description: putative protein phosphatase-2C [Oryza sativa]
  misc_feature (45)..(341): Homolog of NCBI NO: 20146108 NR Description: protein phosphatase 2C [Mesembryanthemum
  misc_feature (10)..(341): Homolog of NCBI NO: 15224766 NR Description: protein phosphatase 2C (PP2C); protein id: supported by cDNA: gi_12642917, supported by cDNA: gi_14517519, by cDNA: gi_16323271 [Arabidopsis thaliana]
  misc_feature (1)..(339): Homolog of NCBI NO: 21693562 NR Description: DNA-binding protein phosphatase 2C [Nicotiana
  misc_feature (47)..(338): Homolog of NCBI NO: 25352221 NR Description: phosphoprotein phosphatase (EC 3.1.3.16) 2C
  misc_feature (44)..(338): Homolog of NCBI NO: 24413992 NR Description: putative DNA-binding protein phosphatase 2C
  misc_feature (47)..(335): Homolog of NCBI NO: 34894410 NR Description: putative protein phosphatase [Oryza sativa

SEQ ID NO: 94527 - DNA, 3066 bp, Arabidopsis thaliana; identical to SEQ ID NO: 90771
  misc_feature (1)..(3066): Ceres Seq. ID no. 12725211
  misc_feature: MA Experiment ID: 20001247 Result: Up-regulated in Transcription
  misc_feature: MA Experiment 20001247 PARAMETER Experiment Name: At_Far-red-induction_P Parameter: Age (day) Value: 7
  misc_feature: MA Experiment 20001247 PARAMETER Experiment Name: At_Far-red-induction_P Parameter: Light Value: Far-red vs. White
  misc_feature: MA Experiment 20001247 PARAMETER Experiment Name: At_Far-red-induction_P Parameter: Organism Value: A. thaliana
  misc_feature: MA Experiment 20001247 PARAMETER Experiment Name: At_Far-red-induction_P Parameter: Plant Line Value: Columbia
  misc_feature: MA Experiment 20001247 PARAMETER Experiment Name: At_Far-red-induction_P Parameter: Timepoint (hr) Value: 1
  misc_feature: MA Experiment 20001247 PARAMETER Experiment Name: At_Far-red-induction_P Parameter: Tissue Value: Whole Plant

SEQ ID NO: 94528 - protein, 895 aa, Arabidopsis thaliana; identical to SEQ ID NO: 90772
  peptide (1)..(895): Ceres Seq. ID no. 12725212
  misc_feature (22)..(895): Homolog of NCBI NO: 34909896 NR Description: putative receptor-protein kinase [Oryza sativa
  misc_feature (244)..(895): Homolog of NCBI NO: 17887381 NR Description: receptor protein kinase-like protein [Capsicum
  misc_feature (14)..(818): Homolog of NCBI NO: 15229329 NR Description: putative protein kinase; protein id: At3g04690.1 thaliana] >gi|6175184|gb|AAF04910.1|AC011437_25 putative protein
  misc_feature (9)..(818): Homolog of NCBI NO: 15241880 NR Description: receptor-like protein kinase precursor - like;
  misc_feature (13)..(895): Homolog of NCBI NO: 34902826 NR Description: unnamed protein product [Oryza sativa (japonica group)] >gi|6498463|dbj|BAA87852.1| unnamed protein product
  misc_feature (9)..(895): Homolog of NCBI NO: 15241606 NR Description: protein kinase - like protein; protein id:
  misc_feature (12)..(895): Homolog of NCBI NO: 15241605 NR Description: protein kinase - like protein; protein id:
  misc_feature (12)..(895): Homolog of NCBI NO: 20147233 NR Description: AT5g38990/K15E6_170 [Arabidopsis thaliana]
  misc_feature (398)..(829): Homolog of NCBI NO: 34898020 NR Description: Similar to putative receptor-like protein kinase
  misc_feature (43)..(461): Homolog of NCBI NO: 34898020 NR Description: Similar to putative receptor-like protein kinase

SEQ ID NO: 94529 - protein, 807 aa, Arabidopsis thaliana; identical to SEQ ID NO: 90773
  peptide (1)..(807): Ceres Seq. ID no. 12725213
  misc_feature (1)..(807): Homolog of NCBI NO: 34909896 NR Description: putative receptor-protein kinase [Oryza sativa
  misc_feature (156)..(807): Homolog of NCBI NO: 17887381 NR Description: receptor protein kinase-like protein [Capsicum
  misc_feature (1)..(730): Homolog of NCBI NO: 15229329 NR Description: putative protein kinase; protein id: At3g04690.1 thaliana] >gi|6175184|gb|AAF04910.1|AC011437_25 putative protein
  misc_feature (1)..(730): Homolog of NCBI NO: 15241880 NR Description: receptor-like protein kinase precursor - like;
  misc_feature (1)..(807): Homolog of NCBI NO: 34902826 NR Description: unnamed protein product [Oryza sativa (japonica group)] >gi|6498463|dbj|BAA87852.1| unnamed protein product
  misc_feature (1)..(807): Homolog of NCBI NO: 15241606 NR Description: protein kinase - like protein; protein id:
  misc_feature (1)..(807): Homolog of NCBI NO: 15241605 NR Description: protein kinase - like protein; protein id:
  misc_feature (1)..(807): Homolog of NCBI NO: 20147233 NR Description: AT5g38990/K15E6_170 [Arabidopsis thaliana]
  misc_feature (310)..(741): Homolog of NCBI NO: 34898020 NR Description: Similar to putative receptor-like protein kinase
  misc_feature (1)..(373): Homolog of NCBI NO: 34898020 NR Description: Similar to putative receptor-like protein kinase

SEQ ID NO: 94530 - protein, 724 aa, Arabidopsis thaliana; identical to SEQ ID NO: 90774
  peptide (1)..(724): Ceres Seq. ID no. 12725214
  misc_feature (1)..(724): Homolog of NCBI NO: 34909896 NR Description: putative receptor-protein kinase [Oryza sativa
  misc_feature (73)..(724): Homolog of NCBI NO: 17887381 NR Description: receptor protein kinase-like protein [Capsicum
  misc_feature (1)..(647): Homolog of NCBI NO: 15229329 NR Description: putative protein kinase; protein id: At3g04690.1 thaliana] >gi|6175184|gb|AAF04910.1|AC011437_25 putative protein
  misc_feature (1)..(647): Homolog of NCBI NO: 15241880 NR Description: receptor-like protein kinase precursor - like;
  misc_feature (1)..(724): Homolog of NCBI NO: 34902826 NR Description: unnamed protein product [Oryza sativa (japonica group)] >gi|6498463|dbj|BAA87852.1| unnamed protein product
  misc_feature (1)..(724): Homolog of NCBI NO: 15241606 NR Description: protein kinase - like protein; protein id:
  misc_feature (1)..(724): Homolog of NCBI NO: 15241605 NR Description: protein kinase - like protein; protein id:
  misc_feature (1)..(724): Homolog of NCBI NO: 20147233 NR Description: AT5g38990/K15E6_170 [Arabidopsis thaliana]
  misc_feature (227)..(658): Homolog of NCBI NO: 34898020 NR Description: Similar to putative receptor-like protein kinase
  misc_feature (1)..(290): Homolog of NCBI NO: 34898020 NR Description: Similar to putative receptor-like protein kinase

SEQ ID NO: 94531 - DNA, 990 bp, Arabidopsis thaliana; identical to SEQ ID NO: 90775
  misc_feature (1)..(990): Ceres Seq. ID no. 12725215
  misc_feature: MA Experiment ID: 20000173 Result: Down-regulated in Transcription
  misc_feature: MA Experiment 20000173 PARAMETER Experiment Name: At_42deg_Heat_P Parameter: Age (day) Value: 14
  misc_feature: MA Experiment 20000173 PARAMETER Experiment Name: At_42deg_Heat_P Parameter: Organism Value: A. thaliana
  misc_feature: MA Experiment 20000173 PARAMETER Experiment Name: At_42deg_Heat_P Parameter: Plant Line Value: WS
  misc_feature: MA Experiment 20000173 PARAMETER Experiment Name: At_42deg_Heat_P Parameter: Temperature (deg C) Value: 42 vs. 22
  misc_feature: MA Experiment 20000173 PARAMETER Experiment Name: At_42deg_Heat_P Parameter: Timepoint (hr) Value: 6
  misc_feature: MA Experiment 20000173 PARAMETER Experiment Name: At_42deg_Heat_P Parameter: Tissue Value: Aerial
  misc_feature: MA Experiment ID: 20000180 Result: Down-regulated in Transcription
  misc_feature: MA Experiment 20000180 PARAMETER Experiment Name: At_Germinating_Seeds_P Parameter: Age (hr) Value: 24 vs. 0
  misc_feature: MA Experiment 20000180 PARAMETER Experiment Name: At_Germinating_Seeds_P Parameter: Tissue Value: Germinating Seeds
  misc_feature: MA Experiment ID: 20000437 Result: Up-regulated in Transcription
  misc_feature: MA Experiment 20000437 PARAMETER Experiment Name: At_Drought_P Parameter: Age (day) Value: 8
  misc_feature: MA Experiment 20000437 PARAMETER Experiment Name: At_Drought_P Parameter: Organism Value: A. thaliana
  misc_feature: MA Experiment 20000437 PARAMETER Experiment Name: At_Drought_P Parameter: Plant Line Value: WS
  misc_feature: MA Experiment 20000437 PARAMETER Experiment Name: At_Drought_P Parameter: Timepoint (hr) Value: 24
  misc_feature: MA Experiment 20000437 PARAMETER Experiment Name: At_Drought_P Parameter: Tissue Value: Whole Plant
  misc_feature: MA Experiment 20000437 PARAMETER Experiment Name: At_Drought_P Parameter: Treatment Value: Drought vs. No Drought

SEQ ID NO: 94532 - protein, 237 aa, Arabidopsis thaliana; identical to SEQ ID NO: 90776
  peptide (1)..(237): Ceres Seq. ID no. 12725216
  misc_feature (118)..(205): Pfam Name: tRNA intron endonuclease, catalytic C-terminal domain Pfam Description: tRNA intron endonuclease, catalytic C-terminal
  misc_feature (1)..(237): Homolog of NCBI NO: 15231186 NR Description: putative protein; protein id: At3g45590.1, by cDNA: gi_6635255 [Arabidopsis thaliana]
  misc_feature (1)..(237): Homolog of NCBI NO: 6635256 NR Description: tRNA intron endonuclease [Arabidopsis thaliana]
  misc_feature (1)..(237): Homolog of NCBI NO: 15238643 NR Description: tRNA intron endonuclease - like protein; protein At5g60230.1 [Arabidopsis thaliana] >gi|8885574|dbj|BAA97504.1| intron endonuclease [Arabidopsis thaliana]
  misc_feature (74)..(234): Homolog of NCBI NO: 39841065 NR Description: similar to hypothetical protein MGC2776 [Mus
  misc_feature (74)..(234): Homolog of NCBI NO: 39644952 NR Description: MGC2776 protein [Homo sapiens]
  misc_feature (74)..(234): Homolog of NCBI NO: 13376882 NR Description: hypothetical protein MGC2776 [Homo sapiens] Unknown (protein for MGC:2776) [Homo sapiens] Unknown (protein for MGC:4440) [Homo sapiens]
  misc_feature (80)..(234): Homolog of NCBI NO: 22760473 NR Description: unnamed protein product [Homo sapiens]
  misc_feature (80)..(226): Homolog of NCBI NO: 24584677 NR Description: CG31812-PA [Drosophila melanogaster]
  misc_feature (124)..(232): Homolog of NCBI NO: 19571750 NR Description: putative tRNA splicing endonuclease subunit
  misc_feature (19)..(232): Homolog of NCBI NO: 6323134 NR Description: tRNA splicing endonuclease subunit; Sen2p

SEQ ID NO: 94533 - protein, 127 aa, Arabidopsis thaliana; identical to SEQ ID NO: 90777
  peptide (1)..(127): Ceres Seq. ID no. 12725217
  misc_feature (8)..(95): Pfam Name: tRNA intron endonuclease, catalytic C-terminal domain Pfam Description: tRNA intron endonuclease, catalytic C-terminal
  misc_feature (1)..(127): Homolog of NCBI NO: 15231186 NR Description: putative protein; protein id: At3g45590.1, by cDNA: gi_6635255 [Arabidopsis thaliana]
  misc_feature (1)..(127): Homolog of NCBI NO: 6635256 NR Description: tRNA intron endonuclease [Arabidopsis thaliana]
  misc_feature (1)..(127): Homolog of NCBI NO: 15238643 NR Description: tRNA intron endonuclease - like protein; protein At5g60230.1 [Arabidopsis thaliana] >gi|8885574|dbj|BAA97504.1| intron endonuclease [Arabidopsis thaliana]
  misc_feature (1)..(124): Homolog of NCBI NO: 39841065 NR Description: similar to hypothetical protein MGC2776 [Mus
  misc_feature (1)..(124): Homolog of NCBI NO: 39644952 NR Description: MGC2776 protein [Homo sapiens]
  misc_feature (1)..(124): Homolog of NCBI NO: 13376882 NR Description: hypothetical protein MGC2776 [Homo sapiens] Unknown (protein for MGC:2776) [Homo sapiens] Unknown (protein for MGC:4440) [Homo sapiens]
  misc_feature (1)..(124): Homolog of NCBI NO: 22760473 NR Description: unnamed protein product [Homo sapiens]
  misc_feature (1)..(116): Homolog of NCBI NO: 24584677 NR Description: CG31812-PA [Drosophila melanogaster]
  misc_feature (14)..(122): Homolog of NCBI NO: 19571750 NR Description: putative tRNA splicing endonuclease subunit
  misc_feature (1)..(122): Homolog of NCBI NO: 6323134 NR Description: tRNA splicing endonuclease subunit; Sen2p

SEQ ID NO: 94534 - DNA, 3177 bp, Arabidopsis thaliana; identical to SEQ ID NO: 90778
  misc_feature (1)..(3177): Ceres Seq. ID no. 12725257
  misc_feature: MA Experiment ID: 20000173 Result: Down-regulated in Transcription
  misc_feature: MA Experiment 20000173 PARAMETER Experiment Name: At_42deg_Heat_P Parameter: Age (day) Value: 14
  misc_feature: MA Experiment 20000173 PARAMETER Experiment Name: At_42deg_Heat_P Parameter: Organism Value: A. thaliana
  misc_feature: MA Experiment 20000173 PARAMETER Experiment Name: At_42deg_Heat_P Parameter: Plant Line Value: WS
  misc_feature: MA Experiment 20000173 PARAMETER Experiment Name: At_42deg_Heat_P Parameter: Temperature (deg C) Value: 42 vs. 22
  misc_feature: MA Experiment 20000173 PARAMETER Experiment Name: At_42deg_Heat_P Parameter: Timepoint (hr) Value: 6
  misc_feature: MA Experiment 20000173 PARAMETER Experiment Name: At_42deg_Heat_P Parameter: Tissue Value: Aerial
  misc_feature: MA Experiment ID: 20000179 Result: Up-regulated in Transcription
  misc_feature: MA Experiment 20000179 PARAMETER Experiment Name: At_Germinating_Seeds_P Parameter: Age (hr) Value: 6 vs. 0
  misc_feature: MA Experiment 20000179 PARAMETER Experiment Name: At_Germinating_Seeds_P Parameter: Tissue Value: Germinating Seeds
  misc_feature: MA Experiment ID: 20000180 Result: Up-regulated in Transcription
  misc_feature: MA Experiment 20000180 PARAMETER Experiment Name: At_Germinating_Seeds_P Parameter: Age (hr) Value: 24 vs. 0
  misc_feature: MA Experiment 20000180 PARAMETER Experiment Name: At_Germinating_Seeds_P Parameter: Tissue Value: Germinating Seeds
  misc_feature: MA Experiment ID: 20000234 Result: Up-regulated in Transcription
  misc_feature: MA Experiment 20000234 PARAMETER Experiment Name: At_Siliques_P Parameter: Age (day) Value: 21
  misc_feature: MA Experiment 20000234 PARAMETER Experiment Name: At_Siliques_P Parameter: Organism Value: A. thaliana
  misc_feature: MA Experiment 20000234 PARAMETER Experiment Name: At_Siliques_P Parameter: Plant Line Value: WS
  misc_feature: MA Experiment 20000234 PARAMETER Experiment Name: At_Siliques_P Parameter: Tissue Value: Less Than 5mm Siliques vs. Whole Plant
  misc_feature: MA Experiment ID: 20000235 Result: Up-regulated in Transcription
  misc_feature: MA Experiment 20000235 PARAMETER Experiment Name: At_Siliques_P Parameter: Age (day) Value: 21
  misc_feature: MA Experiment 20000235 PARAMETER Experiment Name: At_Siliques_P Parameter: Organism Value: A. thaliana
  misc_feature: MA Experiment 20000235 PARAMETER Experiment Name: At_Siliques_P Parameter: Plant Line Value: WS
  misc_feature: MA Experiment 20000235 PARAMETER Experiment Name: At_Siliques_P Parameter: Tissue Value: 5-10mm Siliques vs. Whole Plant
  misc_feature: MA Experiment ID: 20000265 Result: Up-regulated in Transcription
  misc_feature: MA Experiment 20000265 PARAMETER Experiment Name: At_Open_Flower_P Parameter: Age (day) Value: 21
  misc_feature: MA Experiment 20000265 PARAMETER Experiment Name: At_Open_Flower_P Parameter: Plant Line Value: WS
  misc_feature: MA Experiment 20000265 PARAMETER Experiment Name: At_Open_Flower_P Parameter: Tissue Value: Closed Flower vs. Whole Plant
  misc_feature: MA Experiment ID: 20000286 Result: Up-regulated in Transcription
  misc_feature: MA Experiment 20000286 PARAMETER Experiment Name: At_Open_Flower_P Parameter: Age (day) Value: 21
  misc_feature: MA Experiment 20000286 PARAMETER Experiment Name: At_Open_Flower_P Parameter: Plant Line Value: WS
  misc_feature: MA Experiment 20000286 PARAMETER Experiment Name: At_Open_Flower_P Parameter: Tissue Value: Half Open vs. Whole Plant
  misc_feature: MA Experiment ID: 20000437 Result: Down-regulated in Transcription
  misc_feature: MA Experiment 20000437 PARAMETER Experiment Name: At_Drought_P Parameter: Age (day) Value: 8
  misc_feature: MA Experiment 20000437 PARAMETER Experiment Name: At_Drought_P Parameter: Organism Value: A. thaliana
  misc_feature: MA Experiment 20000437 PARAMETER Experiment Name: At_Drought_P Parameter: Plant Line Value: WS
  misc_feature: MA Experiment 20000437 PARAMETER Experiment Name: At_Drought_P Parameter: Timepoint (hr) Value: 24
  misc_feature: MA Experiment 20000437 PARAMETER Experiment Name: At_Drought_P Parameter: Tissue Value: Whole Plant
  misc_feature: MA Experiment 20000437 PARAMETER Experiment Name: At_Drought_P Parameter: Treatment Value: Drought vs. No Drought
  misc_feature: MA Experiment ID: 20000794 Result: Down-regulated in Transcription
  misc_feature: MA Experiment 20000794 PARAMETER Experiment Name: At_Petals_P Parameter: Age (day) Value: 23-25 days
  misc_feature: MA Experiment 20000794 PARAMETER Experiment Name: At_Petals_P Parameter: Plant Line Value: WS
  misc_feature: MA Experiment 20000794 PARAMETER Experiment Name: At_Petals_P Parameter: Tissue Value: Petals vs. Whole plant
  misc_feature: MA Experiment ID: 20001451 Result: Down-regulated in Transcription
  misc_feature: MA Experiment 20001451 PARAMETER Experiment Name: At_Far-red-induction_P Parameter: Age (day) Value: 7
  misc_feature: MA Experiment 20001451 PARAMETER Experiment Name: At_Far-red-induction_P Parameter: Light Value: Far-red vs. White
  misc_feature: MA Experiment 20001451 PARAMETER Experiment Name: At_Far-red-induction_P Parameter: Organism Value: A. thaliana
  misc_feature: MA Experiment 20001451 PARAMETER Experiment Name: At_Far-red-induction_P Parameter: Plant Line Value: Columbia
  misc_feature: MA Experiment 20001451 PARAMETER Experiment Name: At_Far-red-induction_P Parameter: Timepoint (hr) Value: 24
  misc_feature: MA Experiment 20001451 PARAMETER Experiment Name: At_Far-red-induction_P Parameter: Tissue Value: Whole Plant
  misc_feature: MA Experiment ID: 20001555 Result: Down-regulated in Transcription
  misc_feature: MA Experiment 20001555 PARAMETER Experiment Name: At_Drought_Soil_Dry_P Parameter: Age (day) Value: 24
  misc_feature: MA Experiment 20001555 PARAMETER Experiment Name: At_Drought_Soil_Dry_P Parameter: Organism Value: A. thaliana
  misc_feature: MA Experiment 20001555 PARAMETER Experiment Name: At_Drought_Soil_Dry_P Parameter: Plant Line Value: WS
  misc_feature: MA Experiment 20001555 PARAMETER Experiment Name: At_Drought_Soil_Dry_P Parameter: Post Timepoint (hr) Value: None
  misc_feature: MA Experiment 20001555 PARAMETER Experiment Name: At_Drought_Soil_Dry_P Parameter: Post-Treatment Value: None
  misc_feature: MA Experiment 20001555 PARAMETER Experiment Name: At_Drought_Soil_Dry_P Parameter: Timepoint (day) Value: 10
  misc_feature: MA Experiment 20001555 PARAMETER Experiment Name: At_Drought_Soil_Dry_P Parameter: Treatment Value: Drought vs. No Drought
  misc_feature: MA Experiment ID: 20001911 Result: Down-regulated in Transcription
  misc_feature: MA Experiment 20001911 PARAMETER Experiment Name: At_Drought_Reproduction_P Parameter: Age (day) Value: 40
  misc_feature: MA Experiment 20001911 PARAMETER Experiment Name: At_Drought_Reproduction_P Parameter: Organism Value: A. thaliana
  misc_feature: MA Experiment 20001911 PARAMETER Experiment Name: At_Drought_Reproduction_P Parameter: Plant Line Value: WS
  misc_feature: MA Experiment 20001911 PARAMETER Experiment Name: At_Drought_Reproduction_P Parameter: Timepoint (day) Value: 10
  misc_feature: MA Experiment 20001911 PARAMETER Experiment Name: At_Drought_Reproduction_P Parameter: Tissue Value: Flowers
  misc_feature: MA Experiment 20001911 PARAMETER Experiment Name: At_Drought_Reproduction_P Parameter: Treatment Value: Drought vs. No Drought

SEQ ID NO: 94535 - protein, 1058 aa, Arabidopsis thaliana; identical to SEQ ID NO: 90779
  peptide (1)..(1058): Ceres Seq. ID no. 12725258
  misc_feature (208)..(1054): Pfam Name: Myosin tail Pfam Description: Myosin tail
  misc_feature (41)..(1014): Homolog of NCBI NO: 11132775 NR Description: 125 kDa kinesin-related protein
  misc_feature (4)..(1028): Homolog of NCBI NO: 30687132 NR Description: kinesin-related protein [Arabidopsis thaliana]
  misc_feature (38)..(1054): Homolog of NCBI NO: 15227596 NR Description: kinesin-related protein; protein id: At2g36200.1
  misc_feature (38)..(956): Homolog of NCBI NO: 15208453 NR Description: kinesin heavy chain [Zea mays]
  misc_feature (275)..(1029): Homolog of NCBI NO: 15208459 NR Description: kinesin heavy chain [Zea mays]
  misc_feature (38)..(268): Homolog of NCBI NO: 15208459 NR Description: kinesin heavy chain [Zea mays]
  misc_feature (4)..(727): Homolog of NCBI NO: 25408550 NR Description: probable kinesin heavy chain [imported] - thaliana >gi|4056495|gb|AAC98061.1| putative kinesin heavy chain
  misc_feature (48)..(1022): Homolog of NCBI NO: 10567777 NR Description: KRP170 [Strongylocentrotus purpuratus]
  misc_feature (48)..(1015): Homolog of NCBI NO: 12055369 NR Description: kinesin-like boursin [Paracentrotus lividus]
  misc_feature (33)..(883): Homolog of NCBI NO: 539445 NR Description: kinesin-related protein KLP61F - fruit fly

SEQ ID NO: 94536 - protein, 915 aa, Arabidopsis thaliana; identical to SEQ ID NO: 90780
  peptide (1)..(915): Ceres Seq. ID no. 12725259
  misc_feature (65)..(911): Pfam Name: Myosin tail Pfam Description: Myosin tail
  misc_feature (1)..(871): Homolog of NCBI NO: 11132775 NR Description: 125 kDa kinesin-related protein
  misc_feature (1)..(885): Homolog of NCBI NO: 30687132 NR Description: kinesin-related protein [Arabidopsis thaliana]
  misc_feature (1)..(911): Homolog of NCBI NO: 15227596 NR Description: kinesin-related protein; protein id: At2g36200.1
  misc_feature (1)..(813): Homolog of NCBI NO: 15208453 NR Description: kinesin heavy chain [Zea mays]
  misc_feature (132)..(886): Homolog of NCBI NO: 15208459 NR Description: kinesin heavy chain [Zea mays]
  misc_feature (1)..(125): Homolog of NCBI NO: 15208459 NR Description: kinesin heavy chain [Zea mays]
  misc_feature (1)..(584): Homolog of NCBI NO: 25408550 NR Description: probable kinesin heavy chain [imported] - thaliana >gi|4056495|gb|AAC98061.1| putative kinesin heavy chain
  misc_feature (1)..(879): Homolog of NCBI NO: 10567777 NR Description: KRP170 [Strongylocentrotus purpuratus]
  misc_feature (1)..(872): Homolog of NCBI NO: 12055369 NR Description: kinesin-like boursin [Paracentrotus lividus]
  misc_feature (1)..(740): Homolog of NCBI NO: 539445 NR Description: kinesin-related protein KLP61F - fruit fly

SEQ ID NO: 94537 - protein, 877 aa, Arabidopsis thaliana; identical to SEQ ID NO: 90781
  peptide (1)..(877): Ceres Seq. ID no. 12725260
  misc_feature (27)..(873): Pfam Name: Myosin tail Pfam Description: Myosin tail
  misc_feature (1)..(833): Homolog of NCBI NO: 11132775 NR Description: 125 kDa kinesin-related protein
  misc_feature (1)..(847): Homolog of NCBI NO: 30687132 NR Description: kinesin-related protein [Arabidopsis thaliana]
  misc_feature (1)..(873): Homolog of NCBI NO: 15227596 NR Description: kinesin-related protein; protein id: At2g36200.1
  misc_feature (1)..(775): Homolog of NCBI NO: 15208453 NR Description: kinesin heavy chain [Zea mays]
  misc_feature (94)..(848): Homolog of NCBI NO: 15208459 NR Description: kinesin heavy chain [Zea mays]
  misc_feature (1)..(87): Homolog of NCBI NO: 15208459 NR Description: kinesin heavy chain [Zea mays]
  misc_feature (1)..(546): Homolog of NCBI NO: 25408550 NR Description: probable kinesin heavy chain [imported] - thaliana >gi|4056495|gb|AAC98061.1| putative kinesin heavy chain
  misc_feature (1)..(841): Homolog of NCBI NO: 10567777 NR Description: KRP170 [Strongylocentrotus purpuratus]
  misc_feature (1)..(834): Homolog of NCBI NO: 12055369 NR Description: kinesin-like boursin [Paracentrotus lividus]
  misc_feature (1)..(702): Homolog of NCBI NO: 539445 NR Description: kinesin-related protein KLP61F - fruit fly

SEQ ID NO: 94538 - DNA, 792 bp, Arabidopsis thaliana; identical to SEQ ID NO: 90782
  misc_feature (1)..(792): Ceres Seq. ID no. 12725263
  misc_feature: MA Experiment ID: 20000314 Result: Down-regulated in Transcription
  misc_feature: MA Experiment 20000314 PARAMETER Experiment Name: At_14day_Shoots-Roots_Sub_P Parameter: Age (day) Value: 14
  misc_feature: MA Experiment 20000314 PARAMETER Experiment Name: At_14day_Shoots-Roots_Sub_P Parameter: Organism Value: A. thaliana
  misc_feature: MA Experiment 20000314 PARAMETER Experiment Name: At_14day_Shoots-Roots_Sub_P Parameter: Plant Line Value: WS
  misc_feature: MA Experiment 20000314 PARAMETER Experiment Name: At_14day_Shoots-Roots_Sub_P Parameter: Tissue Value: Roots vs. Whole Plant
  misc_feature: MA Experiment ID: 20000315 Result: Down-regulated in Transcription
  misc_feature: MA Experiment 20000315 PARAMETER Experiment Name: At_14day_Shoots-Roots_Sub_P Parameter: Age (day) Value: 14
  misc_feature: MA Experiment 20000315 PARAMETER Experiment Name: At_14day_Shoots-Roots_Sub_P Parameter: Organism Value: A. thaliana
  misc_feature: MA Experiment 20000315 PARAMETER Experiment Name: At_14day_Shoots-Roots_Sub_P Parameter: Plant Line Value: WS
  misc_feature: MA Experiment 20000315 PARAMETER Experiment Name: At_14day_Shoots-Roots_Sub_P Parameter: Tissue Value: Shoots vs. Whole Plant
  misc_feature: MA Experiment ID: 20000352 Result: Up-regulated in Transcription
  misc_feature: MA Experiment 20000352 PARAMETER Experiment Name: At_Drought_Sub_P Parameter: Age (day) Value: 7
  misc_feature: MA Experiment 20000352 PARAMETER Experiment Name: At_Drought_Sub_P Parameter: Organism Value: A. thaliana
  misc_feature: MA Experiment 20000352 PARAMETER Experiment Name: At_Drought_Sub_P Parameter: Plant Line Value: WS
  misc_feature: MA Experiment 20000352 PARAMETER Experiment Name: At_Drought_Sub_P Parameter: Timepoint (hr) Value: 6
  misc_feature: MA Experiment 20000352 PARAMETER Experiment Name: At_Drought_Sub_P Parameter: Tissue Value: Whole Plant
  misc_feature: MA Experiment 20000352 PARAMETER Experiment Name: At_Drought_Sub_P Parameter: Treatment Value: Drought vs. No Drought
  misc_feature: MA Experiment ID: 20000355 Result: Down-regulated in Transcription
  misc_feature: MA Experiment 20000355 PARAMETER Experiment Name: At_Siliques_Sub_P Parameter: Age (day) Value: 21
  misc_feature: MA Experiment 20000355 PARAMETER Experiment Name: At_Siliques_Sub_P Parameter: Organism Value: A. thaliana
  misc_feature: MA Experiment 20000355 PARAMETER Experiment Name: At_Siliques_Sub_P Parameter: Plant Line Value: WS
  misc_feature: MA Experiment 20000355 PARAMETER Experiment Name: At_Siliques_Sub_P Parameter: Tissue Value: Less Than 5mm Siliques vs. Whole Plant
  misc_feature: MA Experiment ID: 20000440 Result: Down-regulated in Transcription
  misc_feature: MA Experiment 20000440 PARAMETER Experiment Name: At_Closed-Flower__Sub_P Parameter: Tissue Value: Closed Flower vs. Whole Plant
  misc_feature: MA Experiment ID: 20000634 Result: Up-regulated in Transcription
  misc_feature: MA Experiment 20000634 PARAMETER Experiment Name: At_10percent_PEG_Sub_P Parameter: Age (day) Value: 12
  misc_feature: MA Experiment 20000634 PARAMETER Experiment Name: At_10percent_PEG_Sub_P Parameter: Organism Value: A. thaliana
  misc_feature: MA Experiment 20000634 PARAMETER Experiment Name: At_10percent_PEG_Sub_P Parameter: Plant Line Value: WS
  misc_feature: MA Experiment 20000634 PARAMETER Experiment Name: At_10percent_PEG_Sub_P Parameter: Timepoint (day) Value: 12
  misc_feature: MA Experiment 20000634 PARAMETER Experiment Name: At_10percent_PEG_Sub_P Parameter: Tissue Value: Whole Plant
  misc_feature: MA Experiment 20000634 PARAMETER Experiment Name: At_10percent_PEG_Sub_P Parameter: Treatment Value: 10% PEG vs. No Treatment

SEQ ID NO: 94539 - protein, 263 aa, Arabidopsis thaliana; identical to SEQ ID NO: 90783
  peptide (1)..(263): Ceres Seq. ID no. 12725264
  misc_feature (149)..(232): Pfam Name: Pollen allergen Pfam Description: Pollen allergen
  misc_feature (1)..(263): Homolog of NCBI NO: 20138389 NR Description: Expansin-like 3 precursor (At-EXPL3)
  misc_feature (1)..(263): Homolog of NCBI NO: 21555265 NR Description: Expansin-like 1 precursor (At-EXPL1)
  misc_feature (1)..(263): Homolog of NCBI NO: 15231303 NR Description: putative protein; protein id: At3g45970.1, by cDNA: 27534., supported by cDNA: gi_14190436, supported by
  misc_feature (49)..(263): Homolog of NCBI NO: 30692657 NR Description: expansin protein family (EXPL3) [Arabidopsis >gi|26449323|dbj|BAC41789.1| unknown protein [Arabidopsis
  misc_feature (1)..(263): Homolog of NCBI NO: 15233841 NR Description: putative pollen allergen; protein id: supported by cDNA: gi_14190354, supported by cDNA: gi_15215878
  misc_feature (3)..(258): Homolog of NCBI NO: 33111959 NR Description: expansin-like protein [Quercus robur]
  misc_feature (3)..(258): Homolog of NCBI NO: 37536544 NR Description: putative pollen allergen [Oryza sativa (japonica group)] >gi|10140765|gb|AAG13596.1| putative pollen allergen sativa] >gi|31433332|gb|AAP54861.1| putative pollen allergen
  misc_feature (5)..(262): Homolog of NCBI NO: 21654743 NR Description: expansin-like protein 1 [Oryza sativa]
  misc_feature (5)..(262): Homolog of NCBI NO: 20502989 NR Description: Putative pollen allergen [Oryza sativa (japonica
  misc_feature (3)..(262): Homolog of NCBI NO: 34901594 NR Description: P0571D04.11 [Oryza sativa (japonica

SEQ ID NO: 94540 - protein, 215 aa, Arabidopsis thaliana; identical to SEQ ID NO: 90784
  peptide (1)..(215): Ceres Seq. ID no. 12725265
  misc_feature (101)..(184): Pfam Name: Pollen allergen Pfam Description: Pollen allergen
  misc_feature (1)..(215): Homolog of NCBI NO: 20138389 NR Description: Expansin-like 3 precursor (At-EXPL3)
  misc_feature (1)..(215): Homolog of NCBI NO: 21555265 NR Description: Expansin-like 1 precursor (At-EXPL1)
  misc_feature (1)..(215): Homolog of NCBI NO: 15231303 NR Description: putative protein; protein id: At3g45970.1, by cDNA: 27534., supported by cDNA: gi_14190436, supported by
  misc_feature (1)..(215): Homolog of NCBI NO: 30692657 NR Description: expansin protein family (EXPL3) [Arabidopsis >gi|26449323|dbj|BAC41789.1| unknown protein [Arabidopsis
  misc_feature (1)..(215): Homolog of NCBI NO: 15233841 NR Description: putative pollen allergen; protein id: supported by cDNA: gi_14190354, supported by cDNA: gi_15215878
  misc_feature (1)..(210): Homolog of NCBI NO: 33111959 NR Description: expansin-like protein [Quercus robur]
  misc_feature (1)..(210): Homolog of NCBI NO: 37536544 NR Description: putative pollen allergen [Oryza sativa (japonica group)] >gi|10140765|gb|AAG13596.1| putative pollen allergen sativa] >gi|31433332|gb|AAP54861.1| putative pollen allergen
  misc_feature (1)..(214): Homolog of NCBI NO: 21654743 NR Description: expansin-like protein 1 [Oryza sativa]
  misc_feature (1)..(214): Homolog of NCBI NO: 20502989 NR Description: Putative pollen allergen [Oryza sativa (japonica
  misc_feature (1)..(214): Homolog of NCBI NO: 34901594 NR Description: P0571D04.11 [Oryza sativa (japonica

SEQ ID NO: 94541 - protein, 170 aa, Arabidopsis thaliana; identical to SEQ ID NO: 90785
  peptide (1)..(170): Ceres Seq. ID no. 12725266
  misc_feature (56)..(139): Pfam Name: Pollen allergen Pfam Description: Pollen allergen
  misc_feature (1)..(170): Homolog of NCBI NO: 20138389 NR Description: Expansin-like 3 precursor (At-EXPL3)
  misc_feature (1)..(170): Homolog of NCBI NO: 21555265 NR Description: Expansin-like 1 precursor (At-EXPL1)
  misc_feature (1)..(170): Homolog of NCBI NO: 15231303 NR Description: putative protein; protein id: At3g45970.1, by cDNA: 27534., supported by cDNA: gi_14190436, supported by
  misc_feature (1)..(170): Homolog of NCBI NO: 30692657 NR Description: expansin protein family (EXPL3) [Arabidopsis >gi|26449323|dbj|BAC41789.1| unknown protein [Arabidopsis
  misc_feature (1)..(170): Homolog of NCBI NO: 15233841 NR Description: putative pollen allergen; protein id: supported by cDNA: gi_14190354, supported by cDNA: gi_15215878
  misc_feature (1)..(165): Homolog of NCBI NO: 33111959 NR Description: expansin-like protein [Quercus robur]
  misc_feature (1)..(165): Homolog of NCBI NO: 37536544 NR Description: putative pollen allergen [Oryza sativa (japonica group)] >gi|10140765|gb|AAG13596.1| putative pollen allergen sativa] >gi|31433332|gb|AAP54861.1| putative pollen allergen
  misc_feature (1)..(169): Homolog of NCBI NO: 21654743 NR Description: expansin-like protein 1 [Oryza sativa]
  misc_feature (1)..(169): Homolog of NCBI NO: 20502989 NR Description: Putative pollen allergen [Oryza sativa (japonica
  misc_feature (1)..(169): Homolog of NCBI NO: 34901594 NR Description: P0571D04.11 [Oryza sativa (japonica

SEQ ID NO: 94542 - DNA, 402 bp, Arabidopsis thaliana; identical to SEQ ID NO: 90786
  misc_feature (1)..(402): Ceres Seq. ID no. 12725267
  misc_feature: MA Experiment ID: 20000328 Result: Down-regulated in Transcription
  misc_feature: MA Experiment 20000328 PARAMETER Experiment Name: At_42deg_Heat_Sub_P Parameter: Age (day) Value: 14
  misc_feature: MA Experiment 20000328 PARAMETER Experiment Name: At_42deg_Heat_Sub_P Parameter: Organism Value: A. thaliana
  misc_feature: MA Experiment 20000328 PARAMETER Experiment Name: At_42deg_Heat_Sub_P Parameter: Plant Line Value: WS
  misc_feature: MA Experiment 20000328 PARAMETER Experiment Name: At_42deg_Heat_Sub_P Parameter: Temperature (deg C) Value: 42 vs. 22
  misc_feature: MA Experiment 20000328 PARAMETER Experiment Name: At_42deg_Heat_Sub_P Parameter: Timepoint (hr) Value: 6
  misc_feature: MA Experiment 20000328 PARAMETER Experiment Name: At_42deg_Heat_Sub_P Parameter: Tissue Value: Aerial

SEQ ID NO: 94543 - protein, 133 aa, Arabidopsis thaliana; identical to SEQ ID NO: 90787
  peptide (1)..(133): Ceres Seq. ID no. 12725268
  misc_feature (5)..(133): Pfam Name: Cofilin/tropomyosin-type actin-binding protein Pfam Description: Cofilin/tropomyosin-type actin-binding protein
  misc_feature (1)..(133): Homolog of NCBI NO: 15231305 NR Description: actin depolymerising like protein; protein id: [Arabidopsis thaliana] >gi|11276986|pir||T47539 actin
  misc_feature (1)..(133): Homolog of NCBI NO: 11276987 NR Description: actin depolymerizing factor 2 - Arabidopsis >gi|7339501|emb|CAB82824.1| actin depolymerizing factor 2 (ADF2)
  misc_feature (1)..(133): Homolog of NCBI NO: 18408116 NR Description: actin depolymerizing factor 2 (ADF2); protein id: supported by cDNA: 99657., supported by cDNA: gi_13877562, by cDNA: gi_1408472, supported by cDNA: gi_14423375 [Arabidopsis
  misc_feature (1)..(133): Homolog of NCBI NO: 30697300 NR Description: actin depolymerizing factor 4 - like protein
  misc_feature (1)..(133): Homolog of NCBI NO: 30697303 NR Description: actin depolymerizing factor 4 - like protein thaliana] >gi|15215859|gb|AAK91473.1| AT5g59890/mmn10_110 thaliana] >gi|19699262|gb|AAL90997.1| At1g05180/YUP8H12_21
  misc_feature (1)..(133): Homolog of NCBI NO: 15231309 NR Description: actin depolymerizing factor 1 (ADF1); protein id: supported by cDNA: 1907., supported by cDNA: gi_1408470, by cDNA: gi_14334961 [Arabidopsis thaliana]
  misc_feature (1)..(131): Homolog of NCBI NO: 17366765 NR Description: Actin-depolymerizing factor 2 (ADF 2)
  misc_feature (1)..(133): Homolog of NCBI NO: 30697295 NR Description: actin depolymerizing factor 3 - like protein
  misc_feature (1)..(133): Homolog of NCBI NO: 4185511 NR Description: actin depolymerizing factor 4 [Arabidopsis
  misc_feature (1)..(133): Homolog of NCBI NO: 17366768 NR Description: Actin-depolymerizing factor 1 (ADF 1)

SEQ ID NO: 94544 - protein, 103 aa, Arabidopsis thaliana; identical to SEQ ID NO: 90788
  peptide (1)..(103): Ceres Seq. ID no. 12725269
  misc_feature (1)..(103): Pfam Name: Cofilin/tropomyosin-type actin-binding protein Pfam Description: Cofilin/tropomyosin-type actin-binding protein
  misc_feature (1)..(103): Homolog of NCBI NO: 15231305 NR Description: actin depolymerising like protein; protein id: [Arabidopsis thaliana] >gi|11276986|pir||T47539 actin
  misc_feature (1)..(103): Homolog of NCBI NO: 11276987 NR Description: actin depolymerizing factor 2 - Arabidopsis >gi|7339501|emb|CAB82824.1| actin depolymerizing factor 2 (ADF2)
  misc_feature (1)..(103): Homolog of NCBI NO: 18408116 NR Description: actin depolymerizing factor 2 (ADF2); protein id: supported by cDNA: 99657., supported by cDNA: gi_13877562, by cDNA: gi_1408472, supported by cDNA: gi_14423375 [Arabidopsis
  misc_feature (1)..(103): Homolog of NCBI NO: 30697300 NR Description: actin depolymerizing factor 4 - like protein
  misc_feature (1)..(103): Homolog of NCBI NO: 30697303 NR Description: actin depolymerizing factor 4 - like protein thaliana] >gi|15215859|gb|AAK91473.1| AT5g59890/mmn10_110 thaliana] >gi|19699262|gb|AAL90997.1| At1g05180/YUP8H12_21
  misc_feature (1)..(103): Homolog of NCBI NO: 15231309 NR Description: actin depolymerizing factor 1 (ADF1); protein id: supported by cDNA: 1907., supported by cDNA: gi_1408470, by cDNA: gi_14334961 [Arabidopsis thaliana]
  misc_feature (1)..(101): Homolog of NCBI NO: 17366765 NR Description: Actin-depolymerizing factor 2 (ADF 2)
  misc_feature (1)..(103): Homolog of NCBI NO: 30697295 NR Description: actin depolymerizing factor 3 - like protein
  misc_feature (1)..(103): Homolog of NCBI NO: 4185511 NR Description: actin depolymerizing factor 4 [Arabidopsis
  misc_feature (1)..(103): Homolog of NCBI NO: 17366768 NR Description: Actin-depolymerizing factor 1 (ADF 1)

SEQ ID NO: 94545 - protein, 91 aa, Arabidopsis thaliana; identical to SEQ ID NO: 90789
  peptide (1)..(91): Ceres Seq. ID no. 12725270
  misc_feature (1)..(91): Pfam Name: Cofilin/tropomyosin-type actin-binding protein Pfam Description: Cofilin/tropomyosin-type actin-binding protein
  misc_feature (1)..(91): Homolog of NCBI NO: 15231305 NR Description: actin depolymerising like protein; protein id: [Arabidopsis thaliana] >gi|11276986|pir||T47539 actin
  misc_feature (1)..(91): Homolog of NCBI NO: 11276987 NR Description: actin depolymerizing factor 2 - Arabidopsis >gi|7339501|emb|CAB82824.1| actin depolymerizing factor 2 (ADF2)
  misc_feature (1)..(91): Homolog of NCBI NO: 18408116 NR Description: actin depolymerizing factor 2 (ADF2); protein id: supported by cDNA: 99657., supported by cDNA: gi_13877562, by cDNA: gi_1408472, supported by cDNA: gi_14423375 [Arabidopsis
  misc_feature (1)..(91): Homolog of NCBI NO: 30697300 NR Description: actin depolymerizing factor 4 - like protein
  misc_feature (1)..(91): Homolog of NCBI NO: 30697303 NR Description: actin depolymerizing factor 4 - like protein thaliana] >gi|15215859|gb|AAK91473.1| AT5g59890/mmn10_110 thaliana] >gi|19699262|gb|AAL90997.1| At1g05180/YUP8H12_21
  misc_feature (1)..(91): Homolog of NCBI NO: 15231309 NR Description: actin depolymerizing factor 1 (ADF1); protein id: supported by cDNA: 1907., supported by cDNA: gi_1408470, by cDNA: gi_14334961 [Arabidopsis thaliana]
  misc_feature (1)..(89): Homolog of NCBI NO: 17366765 NR Description: Actin-depolymerizing factor 2 (ADF 2)
  misc_feature (1)..(91): Homolog of NCBI NO: 30697295 NR Description: actin depolymerizing factor 3 - like protein
  misc_feature (1)..(91): Homolog of NCBI NO: 4185511 NR Description: actin depolymerizing factor 4 [Arabidopsis
  misc_feature (1)..(91): Homolog of NCBI NO: 17366768 NR Description: Actin-depolymerizing factor 1 (ADF 1)

SEQ ID NO: 94546 - DNA, 867 bp, Arabidopsis thaliana; identical to SEQ ID NO: 90790
  misc_feature (1)..(867): Ceres Seq. ID no. 12725283
  misc_feature: MA Experiment ID: 108461 Result: Up-regulated in Transcription
  misc_feature: MA Experiment 108461 PARAMETER Experiment Name: At_Germinating_Seeds_cDNA_P Parameter: Age (day) Value: 1 vs. 0
  misc_feature: MA Experiment 108461 PARAMETER Experiment Name: At_Germinating_Seeds_cDNA_P Parameter: Tissue Value: Germinating Seeds
  misc_feature: MA Experiment ID: 108462 Result: Up-regulated in Transcription
  misc_feature: MA Experiment 108462 PARAMETER Experiment Name: At_Germinating_Seeds_cDNA_P Parameter: Age (day) Value: 2 vs. 0
  misc_feature: MA Experiment 108462 PARAMETER Experiment Name: At_Germinating_Seeds_cDNA_P Parameter: Tissue Value: Germinating Seeds
  misc_feature: MA Experiment ID: 108463 Result: Up-regulated in Transcription
  misc_feature: MA Experiment 108463 PARAMETER Experiment Name: At_Germinating_Seeds_cDNA_P Parameter: Age (day) Value: 3 vs. 0
  misc_feature: MA Experiment 108463 PARAMETER Experiment Name: At_Germinating_Seeds_cDNA_P Parameter: Tissue Value: Germinating Seeds
  misc_feature: MA Experiment ID: 108464 Result: Up-regulated in Transcription
  misc_feature: MA Experiment 108464 PARAMETER Experiment Name: At_Germinating_Seeds_cDNA_P Parameter: Age (day) Value: 4 vs. 0
  misc_feature: MA Experiment 108464 PARAMETER Experiment Name: At_Germinating_Seeds_cDNA_P Parameter: Tissue Value: Germinating Seeds
  misc_feature: MA Experiment ID: 108569 Result: Up-regulated in Transcription
  misc_feature: MA Experiment 108569 PARAMETER Experiment Name: At_0.001%_MeJA__cDNA_P Parameter: Timepoint (hr) Value: 6
  misc_feature: MA Experiment 108569 PARAMETER Experiment Name: At_0.001%_MeJA__cDNA_P Parameter: Tissue Value: Aerial
  misc_feature: MA Experiment 108569 PARAMETER Experiment Name: At_0.001%_MeJA__cDNA_P Parameter: Treatment Value: 0.001% MeJA vs. No Treatment
  misc_feature: MA Experiment ID: 108572 Result: Up-regulated in Transcription
  misc_feature: MA Experiment 108572 PARAMETER Experiment Name: At_Drought_cDNA_P Parameter: Timepoint (hr) Value: 1
  misc_feature: MA Experiment 108572 PARAMETER Experiment Name: At_Drought_cDNA_P Parameter: Tissue Value: Aerial
  misc_feature: MA Experiment 108572 PARAMETER Experiment Name: At_Drought_cDNA_P Parameter: Treatment Value: Drought vs. No Drought
  misc_feature: MA Experiment ID: 108605 Result: Up-regulated in Transcription
  misc_feature: MA Experiment 108605 PARAMETER Experiment Name: At_100uM_ABA_cDNA_P Parameter: Timepoint (hr) Value: 6
  misc_feature: MA Experiment 108605 PARAMETER Experiment Name: At_100uM_ABA_cDNA_P Parameter: Tissue Value: Aerial
  misc_feature: MA Experiment 108605 PARAMETER Experiment Name: At_100uM_ABA_cDNA_P Parameter: Treatment Value: 100uM ABA vs. No Treatment
  misc_feature: MA Experiment ID: 108607 Result: Up-regulated in Transcription
  misc_feature: MA Experiment 108607 PARAMETER Experiment Name: At_100uM_ABA_cDNA_P Parameter: Timepoint (hr) Value: 4
  misc_feature: MA Experiment 108607 PARAMETER Experiment Name: At_100uM_ABA_cDNA_P Parameter: Tissue Value: Aerial
  misc_feature: MA Experiment 108607 PARAMETER Experiment Name: At_100uM_ABA_cDNA_P Parameter: Treatment Value: 100uM ABA vs. No Treatment
  misc_feature: MA Experiment ID: 108609 Result: Up-regulated in Transcription
  misc_feature: MA Experiment 108609 PARAMETER Experiment Name: At_100uM_ABA_cDNA_P Parameter: Timepoint (hr) Value: 24
  misc_feature: MA Experiment 108609 PARAMETER Experiment Name: At_100uM_ABA_cDNA_P Parameter: Tissue Value: Aerial
  misc_feature: MA Experiment 108609 PARAMETER Experiment Name: At_100uM_ABA_cDNA_P Parameter: Treatment Value: 100uM ABA vs. No Treatment
  misc_feature: MA Experiment ID: 20000069 Result: Up-regulated in Transcription
  misc_feature: MA Experiment 20000069 PARAMETER Experiment Name: At_100uM_ABA_Mutants_cDNA_P Parameter: Plant Line Value: CS23
  misc_feature: MA Experiment 20000069 PARAMETER Experiment Name: At_100uM_ABA_Mutants_cDNA_P Parameter: Timepoint (hr) Value: 6
  misc_feature: MA Experiment 20000069 PARAMETER Experiment Name: At_100uM_ABA_Mutants_cDNA_P Parameter: Tissue Value: Aerial
  misc_feature: MA Experiment 20000069 PARAMETER Experiment Name: At_100uM_ABA_Mutants_cDNA_P Parameter: Treatment Value: 100uM ABA vs. No Treatment
  misc_feature: MA Experiment ID: 20000070 Result: Up-regulated in Transcription
  misc_feature: MA Experiment 20000070 PARAMETER Experiment Name: At_100uM_ABA_Mutants_cDNA_P Parameter: Plant Line Value: CS24
  misc_feature: MA Experiment 20000070 PARAMETER Experiment Name: At_100uM_ABA_Mutants_cDNA_P Parameter: Timepoint (hr) Value: 6
  misc_feature: MA Experiment 20000070 PARAMETER Experiment Name: At_100uM_ABA_Mutants_cDNA_P Parameter: Tissue Value: Aerial
  misc_feature: MA Experiment 20000070 PARAMETER Experiment Name: At_100uM_ABA_Mutants_cDNA_P Parameter: Treatment Value: 100uM ABA vs. No Treatment
  misc_feature: MA Experiment ID: 20000071 Result: Up-regulated in Transcription
  misc_feature: MA Experiment 20000071 PARAMETER Experiment Name: At_100uM_ABA_Mutants_cDNA_P Parameter: Plant Line Value: CS8104
  misc_feature: MA Experiment 20000071 PARAMETER Experiment Name: At_100uM_ABA_Mutants_cDNA_P Parameter: Timepoint (hr) Value: 6
  misc_feature: MA Experiment 20000071 PARAMETER Experiment Name: At_100uM_ABA_Mutants_cDNA_P Parameter: Tissue Value: Aerial
  misc_feature: MA Experiment 20000071 PARAMETER Experiment Name: At_100uM_ABA_Mutants_cDNA_P Parameter: Treatment Value: 100uM ABA vs. No Treatment
  misc_feature: MA Experiment ID: 20000072 Result: Up-regulated in Transcription
  misc_feature: MA Experiment 20000072 PARAMETER Experiment Name: At_100uM_ABA_Mutants_cDNA_P Parameter: Plant Line Value: CS8105
  misc_feature: MA Experiment 20000072 PARAMETER Experiment Name: At_100uM_ABA_Mutants_cDNA_P Parameter: Timepoint (hr) Value: 6
  misc_feature: MA Experiment 20000072 PARAMETER Experiment Name: At_100uM_ABA_Mutants_cDNA_P Parameter: Tissue Value: Aerial
  misc_feature: MA Experiment 20000072 PARAMETER Experiment Name: At_100uM_ABA_Mutants_cDNA_P Parameter: Treatment Value: 100uM ABA vs. No Treatment
  misc_feature: MA Experiment ID: 20000087 Result: Up-regulated in Transcription
  misc_feature: MA Experiment 20000087 PARAMETER Experiment Name: At_100uM_ABA_Mutants_cDNA_P Parameter: Plant Line Value: WS
  misc_feature: MA Experiment 20000087 PARAMETER Experiment Name: At_100uM_ABA_Mutants_cDNA_P Parameter: Timepoint (hr) Value: 6
  misc_feature: MA Experiment 20000087 PARAMETER Experiment Name: At_100uM_ABA_Mutants_cDNA_P Parameter: Tissue Value: Aerial
  misc_feature: MA Experiment 20000087 PARAMETER Experiment Name: At_100uM_ABA_Mutants_cDNA_P Parameter: Treatment Value: 100uM ABA vs. No Treatment
  misc_feature: MA Experiment ID: 20000088 Result: Up-regulated in Transcription
  misc_feature: MA Experiment 20000088 PARAMETER Experiment Name: At_100uM_ABA_Mutants_cDNA_P Parameter: Plant Line Value: Landsberg
  misc_feature: MA Experiment 20000088 PARAMETER Experiment Name: At_100uM_ABA_Mutants_cDNA_P Parameter: Timepoint (hr) Value: 6
  misc_feature: MA Experiment 20000088 PARAMETER Experiment Name: At_100uM_ABA_Mutants_cDNA_P Parameter: Tissue Value: Aerial
  misc_feature: MA Experiment 20000088 PARAMETER Experiment Name: At_100uM_ABA_Mutants_cDNA_P Parameter: Treatment Value: 100uM ABA vs. No Treatment

SEQ ID NO: 94547 - protein, 288 aa, Arabidopsis thaliana; identical to SEQ ID NO: 90791
  peptide (1)..(288): Ceres Seq. ID no. 12725284
  misc_feature (1)..(288): Homolog of NCBI NO: 15231362 NR Description: dehydrogenase -like protein; protein id:
  misc_feature (1)..(288): Homolog of NCBI NO: 18410245 NR Description: oxidoreductase -like protein; protein id: supported by cDNA: gi_15028304, supported by cDNA: gi_19310684 thaliana] >gi|15028305|gb|AAK76629.1| putative oxidoreductase
  misc_feature (16)..(288): Homolog of NCBI NO: 11250516 NR Description: oxidoreductase-like protein - Arabidopsis thaliana
  misc_feature (16)..(288): Homolog of NCBI NO: 15233243 NR Description: beta-ketoacyl-ACP reductase - like protein;
  misc_feature (9)..(288): Homolog of NCBI NO: 15221517 NR Description: similar to glucose 1-dehydrogenase (AB000617);
  misc_feature (9)..(288): Homolog of NCBI NO: 15222406 NR Description: reductase, putative; protein id: At1g63380.1
  misc_feature (1)..(288): Homolog of NCBI NO: 18398539 NR Description: similar to oxidoreductase -like protein; protein
  misc_feature (17)..(288): Homolog of NCBI NO: 13549123 NR Description: putative short-chain type alcohol dehydrogenase
  misc_feature (17)..(288): Homolog of NCBI NO: 23451057 NR Description: putative short-chain type alcohol dehydrogenase
  misc_feature (14)..(288): Homolog of NCBI NO: 28411870 NR Description: putative 3-ketoacyl-acyl carrier protein

SEQ ID NO: 94548 - DNA, 1339 bp, Arabidopsis thaliana; identical to SEQ ID NO: 90792
  misc_feature (1)..(1339): Ceres Seq. ID no. 12725320
  misc_feature: MA Experiment ID: 108573 Result: Up-regulated in Transcription
  misc_feature: MA Experiment 108573 PARAMETER Experiment Name: At_Drought_cDNA_P Parameter: Timepoint (hr) Value: 6
  misc_feature: MA Experiment 108573 PARAMETER Experiment Name: At_Drought_cDNA_P Parameter: Tissue Value: Aerial
  misc_feature: MA Experiment 108573 PARAMETER Experiment Name: At_Drought_cDNA_P Parameter: Treatment Value: Drought vs. No Drought
  misc_feature: MA Experiment ID: 20000069 Result: Up-regulated in Transcription
  misc_feature: MA Experiment 20000069 PARAMETER Experiment Name: At_100uM_ABA_Mutants_cDNA_P Parameter: Plant Line Value: CS23
  misc_feature: MA Experiment 20000069 PARAMETER Experiment Name: At_100uM_ABA_Mutants_cDNA_P Parameter: Timepoint (hr) Value: 6
  misc_feature: MA Experiment 20000069 PARAMETER Experiment Name: At_100uM_ABA_Mutants_cDNA_P Parameter: Tissue Value: Aerial
  misc_feature: MA Experiment 20000069 PARAMETER Experiment Name: At_100uM_ABA_Mutants_cDNA_P Parameter: Treatment Value: 100uM ABA vs. No Treatment
  misc_feature: MA Experiment ID: 20000070 Result: Up-regulated in Transcription
  misc_feature: MA Experiment 20000070 PARAMETER Experiment Name: At_100uM_ABA_Mutants_cDNA_P Parameter: Plant Line Value: CS24
  misc_feature: MA Experiment 20000070 PARAMETER Experiment Name: At_100uM_ABA_Mutants_cDNA_P Parameter: Timepoint (hr) Value: 6
  misc_feature: MA Experiment 20000070 PARAMETER Experiment Name: At_100uM_ABA_Mutants_cDNA_P Parameter: Tissue Value: Aerial
  misc_feature: MA Experiment 20000070 PARAMETER Experiment Name: At_100uM_ABA_Mutants_cDNA_P Parameter: Treatment Value: 100uM ABA vs. No Treatment
  misc_feature: MA Experiment ID: 20000071 Result: Up-regulated in Transcription
  misc_feature: MA Experiment 20000071 PARAMETER Experiment Name: At_100uM_ABA_Mutants_cDNA_P Parameter: Plant Line Value: CS8104
  misc_feature: MA Experiment 20000071 PARAMETER Experiment Name: At_100uM_ABA_Mutants_cDNA_P Parameter: Timepoint (hr) Value: 6
  misc_feature: MA Experiment 20000071 PARAMETER Experiment Name: At_100uM_ABA_Mutants_cDNA_P Parameter: Tissue Value: Aerial
  misc_feature: MA Experiment 20000071 PARAMETER Experiment Name: At_100uM_ABA_Mutants_cDNA_P Parameter: Treatment Value: 100uM ABA vs. No Treatment
  misc_feature: MA Experiment ID: 20000090 Result: Up-regulated in Transcription
  misc_feature: MA Experiment ID: 20000113 Result: Down-regulated in Transcription
  misc_feature: MA Experiment 20000113 PARAMETER Experiment Name: At_42deg_Heat_cDNA_P Parameter: Temperature (deg C) Value: 42 vs. 22
  misc_feature: MA Experiment 20000113 PARAMETER Experiment Name: At_42deg_Heat_cDNA_P Parameter: Timepoint (hr) Value: 8
  misc_feature: MA Experiment 20000113 PARAMETER Experiment Name: At_42deg_Heat_cDNA_P Parameter: Tissue Value: Aerial
  misc_feature: MA Experiment ID: 20000117 Result: Up-regulated in Transcription
  misc_feature: MA Experiment 20000117 PARAMETER Experiment Name: At_100uM_ABA_Mutants_cDNA_P Parameter: Plant Line Value: Columbia
  misc_feature: MA Experiment 20000117 PARAMETER Experiment Name: At_100uM_ABA_Mutants_cDNA_P Parameter: Timepoint (hr) Value: 6
  misc_feature: MA Experiment 20000117 PARAMETER Experiment Name: At_100uM_ABA_Mutants_cDNA_P Parameter: Tissue Value: Aerial
  misc_feature: MA Experiment 20000117 PARAMETER Experiment Name: At_100uM_ABA_Mutants_cDNA_P Parameter: Treatment Value: 100uM ABA vs. No Treatment
  misc_feature: MA Experiment ID: 20000179 Result: Up-regulated in Transcription
  misc_feature: MA Experiment 20000179 PARAMETER Experiment Name: At_Germinating_Seeds_P Parameter: Age (hr) Value: 6 vs. 0
  misc_feature: MA Experiment 20000179 PARAMETER Experiment Name: At_Germinating_Seeds_P Parameter: Tissue Value: Germinating Seeds
  misc_feature: MA Experiment ID: 20000184 Result: Down-regulated in Transcription
  misc_feature: MA Experiment 20000184 PARAMETER Experiment Name: At_Shoots__P Parameter: Age (day) Value: 7
  misc_feature: MA Experiment 20000184 PARAMETER Experiment Name: At_Shoots__P Parameter: Tissue Value: Shoots vs. Whole Plant
  misc_feature: MA Experiment ID: 20000264 Result: Down-regulated in Transcription
  misc_feature: MA Experiment 20000264 PARAMETER Experiment Name: At_Open_Flower_P Parameter: Age (day) Value: 21
  misc_feature: MA Experiment 20000264 PARAMETER Experiment Name: At_Open_Flower_P Parameter: Plant Line Value: WS
  misc_feature: MA Experiment 20000264 PARAMETER Experiment Name: At_Open_Flower_P Parameter: Tissue Value: Open Flower vs. Whole Plant
  misc_feature: MA Experiment ID: 20000265 Result: Down-regulated in Transcription
  misc_feature: MA Experiment 20000265 PARAMETER Experiment Name: At_Open_Flower_P Parameter: Age (day) Value: 21
  misc_feature: MA Experiment 20000265 PARAMETER Experiment Name: At_Open_Flower_P Parameter: Plant Line Value: WS
  misc_feature: MA Experiment 20000265 PARAMETER Experiment Name: At_Open_Flower_P Parameter: Tissue Value: Closed Flower vs. Whole Plant
  misc_feature: MA Experiment ID: 20000286 Result: Down-regulated in Transcription
  misc_feature: MA Experiment 20000286 PARAMETER Experiment Name: At_Open_Flower_P Parameter: Age (day) Value: 21
  misc_feature: MA Experiment 20000286 PARAMETER Experiment Name: At_Open_Flower_P Parameter: Plant Line Value: WS
  misc_feature: MA Experiment 20000286 PARAMETER Experiment Name: At_Open_Flower_P Parameter: Tissue Value: Half Open vs. Whole Plant
  misc_feature: MA Experiment ID: 20000438 Result: Down-regulated in Transcription
  misc_feature: MA Experiment 20000438 PARAMETER Experiment Name: At_Shoots__P Parameter: Age (day) Value: 14
  misc_feature: MA Experiment 20000438 PARAMETER Experiment Name: At_Shoots__P Parameter: Tissue Value: Shoots vs. Whole Plant
  misc_feature: MA Experiment ID: 20000794 Result: Down-regulated in Transcription
  misc_feature: MA Experiment 20000794 PARAMETER Experiment Name: At_Petals_P Parameter: Age (day) Value: 23-25 days
  misc_feature: MA Experiment 20000794 PARAMETER Experiment Name: At_Petals_P Parameter: Plant Line Value: WS
  misc_feature: MA Experiment 20000794 PARAMETER Experiment Name: At_Petals_P Parameter: Tissue Value: Petals vs. Whole plant
  misc_feature: MA Experiment ID: 20001451 Result: Down-regulated in Transcription
  misc_feature: MA Experiment 20001451 PARAMETER Experiment Name: At_Far-red-induction_P Parameter: Age (day) Value: 7
  misc_feature: MA Experiment 20001451 PARAMETER Experiment Name: At_Far-red-induction_P Parameter: Light Value: Far-red vs. White
  misc_feature: MA Experiment 20001451 PARAMETER Experiment Name: At_Far-red-induction_P Parameter: Organism Value: A. thaliana
  misc_feature: MA Experiment 20001451 PARAMETER Experiment Name: At_Far-red-induction_P Parameter: Plant Line Value: Columbia
  misc_feature: MA Experiment 20001451 PARAMETER Experiment Name: At_Far-red-induction_P Parameter: Timepoint (hr) Value: 24
  misc_feature: MA Experiment 20001451 PARAMETER Experiment Name: At_Far-red-induction_P Parameter: Tissue Value: Whole Plant
  misc_feature: MA Experiment ID: 20001905 Result: Up-regulated in Transcription
  misc_feature: MA Experiment 20001905 PARAMETER Experiment Name: At_Drought_Reproduction_P Parameter: Age (day) Value: 40
  misc_feature: MA Experiment 20001905 PARAMETER Experiment Name: At_Drought_Reproduction_P Parameter: Organism Value: A. thaliana
  misc_feature: MA Experiment 20001905 PARAMETER Experiment Name: At_Drought_Reproduction_P Parameter: Plant Line Value: WS
  misc_feature: MA Experiment 20001905 PARAMETER Experiment Name: At_Drought_Reproduction_P Parameter: Timepoint (day) Value: 10
  misc_feature: MA Experiment 20001905 PARAMETER Experiment Name: At_Drought_Reproduction_P Parameter: Tissue Value: Rosettes
  misc_feature: MA Experiment 20001905 PARAMETER Experiment Name: At_Drought_Reproduction_P Parameter: Treatment Value: Drought vs. No Drought

SEQ ID NO: 94549 - protein, 341 aa, Arabidopsis thaliana; identical to SEQ ID NO: 21850
  peptide (1)..(341): Ceres Seq. ID no. 12725321
  misc_feature (31)..(337): Pfam Name: NAD dependent epimerase/dehydratase family Pfam Description: NAD dependent epimerase/dehydratase family
  misc_feature (1)..(341): Homolog of NCBI NO: 15231432 NR Description: dTDP-glucose 4-6-dehydratases-like protein; id: At3g46440.1, supported by cDNA: 31901., supported by cDNA:
  misc_feature (2)..(341): Homolog of NCBI NO: 15237853 NR Description: dTDP-glucose 4-6-dehydratase - like protein; id: At5g59290.1, supported by cDNA: 6701., supported by cDNA: supported by cDNA: gi_14595665, supported by cDNA: gi_20334715
  misc_feature (2)..(341): Homolog of NCBI NO: 14030703 NR Description: AT5g59290/mnc17_180 [Arabidopsis thaliana]
  misc_feature (3)..(340): Homolog of NCBI NO: 15226950 NR Description: putative nucleotide-sugar dehydratase; protein At2g28760.1, supported by cDNA: gi_20466473 [Arabidopsis
  misc_feature (1)..(341): Homolog of NCBI NO: 13591616 NR Description: UDP-D-glucuronate carboxy-lyase [Pisum sativum]
  misc_feature (1)..(340): Homolog of NCBI NO: 11270075 NR Description: dTDPglucose 4,6-dehydratase (EC 4.2.1.46)
  misc_feature (3)..(340): Homolog of NCBI NO: 18447934 NR Description: UDP-glucuronic acid decarboxylase [Oryza sativa
  misc_feature (3)..(340): Homolog of NCBI NO: 11121508 NR Description: d-TDP-glucose dehydratase [Phragmites australis]
  misc_feature (78)..(341): Homolog of NCBI NO: 2351580 NR Description: thymidine diphospho-glucose 4-6-dehydratase
  misc_feature (29)..(341): Homolog of NCBI NO: 15227109 NR Description: putative dTDP-glucose 4-6-dehydratase; protein id:

SEQ ID NO: 94550 - protein, 313 aa, Arabidopsis thaliana; identical to SEQ ID NO: 21851
  peptide (1)..(313): Ceres Seq. ID no. 12725322
  misc_feature (3)..(309): Pfam Name: NAD dependent epimerase/dehydratase family Pfam Description: NAD dependent epimerase/dehydratase family
  misc_feature (1)..(313): Homolog of NCBI NO: 15231432 NR Description: dTDP-glucose 4-6-dehydratases-like protein; id: At3g46440.1, supported by cDNA: 31901., supported by cDNA:
  misc_feature (1)..(313): Homolog of NCBI NO: 15237853 NR Description: dTDP-glucose 4-6-dehydratase - like protein; id: At5g59290.1, supported by cDNA: 6701., supported by cDNA: supported by cDNA: gi_14595665, supported by cDNA: gi_20334715
  misc_feature (1)..(313): Homolog of NCBI NO: 14030703 NR Description: AT5g59290/mnc17_180 [Arabidopsis thaliana]
  misc_feature (1)..(312): Homolog of NCBI NO: 15226950 NR Description: putative nucleotide-sugar dehydratase; protein At2g28760.1, supported by cDNA: gi_20466473 [Arabidopsis
  misc_feature (1)..(313): Homolog of NCBI NO: 13591616 NR Description: UDP-D-glucuronate carboxy-lyase [Pisum sativum]
  misc_feature (1)..(312): Homolog of NCBI NO: 11270075 NR Description: dTDPglucose 4,6-dehydratase (EC 4.2.1.46)
  misc_feature (1)..(312): Homolog of NCBI NO: 18447934 NR Description: UDP-glucuronic acid decarboxylase [Oryza sativa
  misc_feature (1)..(312): Homolog of NCBI NO: 11121508 NR Description: d-TDP-glucose dehydratase [Phragmites australis]
  misc_feature (50)..(313): Homolog of NCBI NO: 2351580 NR Description: thymidine diphospho-glucose 4-6-dehydratase
  misc_feature (1)..(313): Homolog of NCBI NO: 15227109 NR Description: putative dTDP-glucose 4-6-dehydratase; protein id:

SEQ ID NO: 94551 - protein, 293 aa, Arabidopsis thaliana; identical to SEQ ID NO: 21852
  peptide (1)..(293): Ceres Seq. ID no. 12725323
  misc_feature (1)..(289): Pfam Name: NAD dependent epimerase/dehydratase family Pfam Description: NAD dependent epimerase/dehydratase family
  misc_feature (1)..(293): Homolog of NCBI NO: 15231432 NR Description: dTDP-glucose 4-6-dehydratases-like protein; id: At3g46440.1, supported by cDNA: 31901., supported by cDNA:
  misc_feature (1)..(293): Homolog of NCBI NO: 15237853 NR Description: dTDP-glucose 4-6-dehydratase - like protein; id: At5g59290.1, supported by cDNA: 6701., supported by cDNA: supported by cDNA: gi_14595665, supported by cDNA: gi_20334715
  misc_feature (1)..(293): Homolog of NCBI NO: 14030703 NR Description: AT5g59290/mnc17_180 [Arabidopsis thaliana]
  misc_feature (1)..(292): Homolog of NCBI NO: 15226950 NR Description: putative nucleotide-sugar dehydratase; protein At2g28760.1, supported by cDNA: gi_20466473 [Arabidopsis
  misc_feature (1)..(293): Homolog of NCBI NO: 13591616 NR Description: UDP-D-glucuronate carboxy-lyase [Pisum sativum]
  misc_feature (1)..(292): Homolog of NCBI NO: 11270075 NR Description: dTDPglucose 4,6-dehydratase (EC 4.2.1.46)
  misc_feature (1)..(292): Homolog of NCBI NO: 18447934 NR Description: UDP-glucuronic acid decarboxylase [Oryza sativa
  misc_feature (1)..(292): Homolog of NCBI NO: 11121508 NR Description: d-TDP-glucose dehydratase [Phragmites australis]
  misc_feature (30)..(293): Homolog of NCBI NO: 2351580 NR Description: thymidine diphospho-glucose 4-6-dehydratase
  misc_feature (1)..(293): Homolog of NCBI NO: 15227109 NR Description: putative dTDP-glucose 4-6-dehydratase; protein id:

SEQ ID NO: 94552 - DNA, 894 bp, Arabidopsis thaliana; identical to SEQ ID NO: 90796
  misc_feature (1)..(894): Ceres Seq. ID no. 12725328
  misc_feature: MA Experiment ID: 20000227 Result: Down-regulated in Transcription
  misc_feature: MA Experiment 20000227 PARAMETER Experiment Name: At_Root-Tips-vs-Tops_P Parameter: Tissue Value: Root Tips vs. Root Tops
  misc_feature: MA Experiment ID: 20000451 Result: Down-regulated in Transcription
  misc_feature: MA Experiment 20000451 PARAMETER Experiment Name: At_CS6879_Shoots-Roots_P Parameter: Age (day) Value: 14
  misc_feature: MA Experiment 20000451 PARAMETER Experiment Name: At_CS6879_Shoots-Roots_P Parameter: Organism Value: A. thaliana
  misc_feature: MA Experiment 20000451 PARAMETER Experiment Name: At_CS6879_Shoots-Roots_P Parameter: Plant Line Value: CS6879 vs. WS
  misc_feature: MA Experiment 20000451 PARAMETER Experiment Name: At_CS6879_Shoots-Roots_P Parameter: Tissue Value: Roots

SEQ ID NO: 94553 - protein, 297 aa, Arabidopsis thaliana; identical to SEQ ID NO: 90797
  peptide (1)..(297): Ceres Seq. ID no. 12725329
  misc_feature (149)..(250): Pfam Name: 2OG-Fe(II) oxygenase superfamily Pfam Description: 2OG-Fe(II) oxygenase superfamily
  misc_feature (1)..(297): Homolog of NCBI NO: 15231441 NR Description: putative protein; protein id: At3g46480.1
  misc_feature (103)..(296): Homolog of NCBI NO: 15219523 NR Description: hyoscyamine 6-dioxygenase hydroxylase, putative; id: At1g35190.1, supported by cDNA: 2551., supported by cDNA:
  misc_feature (7)..(101): Homolog of NCBI NO: 15219523 NR Description: hyoscyamine 6-dioxygenase hydroxylase, putative; id: At1g35190.1, supported by cDNA: 2551., supported by cDNA:
  misc_feature (103)..(270): Homolog of NCBI NO: 15231442 NR Description: putative protein; protein id: At3g46490.1
  misc_feature (1)..(100): Homolog of NCBI NO: 15231442 NR Description: putative protein; protein id: At3g46490.1
  misc_feature (37)..(294): Homolog of NCBI NO: 34906368 NR Description: unnamed protein product [Oryza sativa (japonica group)] >gi|9558506|dbj|BAB03425.1| unnamed protein product
  misc_feature (40)..(270): Homolog of NCBI NO: 15231443 NR Description: putative protein; protein id: At3g46500.1
  misc_feature (89)..(292): Homolog of NCBI NO: 8919875 NR Description: hypothetical protein [Capsella rubella]
  misc_feature (14)..(96): Homolog of NCBI NO: 8919875 NR Description: hypothetical protein [Capsella rubella]
  misc_feature (89)..(292): Homolog of NCBI NO: 7594582 NR Description: hypothetical protein [Arabidopsis thaliana] AT4g16770 [Arabidopsis thaliana] >gi|14596207|gb|AAK68831.1| protein [Arabidopsis thaliana] >gi|20148323|gb|AAM10052.1|

SEQ ID NO: 94554 - protein, 223 aa, Arabidopsis thaliana; identical to SEQ ID NO: 90798
  peptide (1)..(223): Ceres Seq. ID no. 12725330
  misc_feature (75)..(176): Pfam Name: 2OG-Fe(II) oxygenase superfamily Pfam Description: 2OG-Fe(II) oxygenase superfamily
  misc_feature (1)..(223): Homolog of NCBI NO: 15231441 NR Description: putative protein; protein id: At3g46480.1
  misc_feature (29)..(222): Homolog of NCBI NO: 15219523 NR Description: hyoscyamine 6-dioxygenase hydroxylase, putative; id: At1g35190.1, supported by cDNA: 2551., supported by cDNA:
  misc_feature (1)..(27): Homolog of NCBI NO: 15219523 NR Description: hyoscyamine 6-dioxygenase hydroxylase, putative; id: At1g35190.1, supported by cDNA: 2551., supported by cDNA:
  misc_feature (29)..(196): Homolog of NCBI NO: 15231442 NR Description: putative protein; protein id: At3g46490.1
  misc_feature (1)..(26): Homolog of NCBI NO: 15231442 NR Description: putative protein; protein id: At3g46490.1
  misc_feature (1)..(220): Homolog of NCBI NO: 34906368 NR Description: unnamed protein product [Oryza sativa (japonica group)] >gi|9558506|dbj|BAB03425.1| unnamed protein product
  misc_feature (1)..(196): Homolog of NCBI NO: 15231443 NR Description: putative protein; protein id: At3g46500.1
  misc_feature (15)..(218): Homolog of NCBI NO: 8919875 NR Description: hypothetical protein [Capsella rubella]
  misc_feature (1)..(22): Homolog of NCBI NO: 8919875 NR Description: hypothetical protein [Capsella rubella]
  misc_feature (15)..(218): Homolog of NCBI NO: 7594582 NR Description: hypothetical protein [Arabidopsis thaliana] AT4g16770 [Arabidopsis thaliana] >gi|14596207|gb|AAK68831.1| protein [Arabidopsis thaliana] >gi|20148323|gb|AAM10052.1|

SEQ ID NO: 94555 - protein, 187 aa, Arabidopsis thaliana; identical to SEQ ID NO: 90799
  peptide (1)..(187): Ceres Seq. ID no. 12725331
  misc_feature (39)..(140): Pfam Name: 2OG-Fe(II) oxygenase superfamily Pfam Description: 2OG-Fe(II) oxygenase superfamily
  misc_feature (1)..(187): Homolog of NCBI NO: 15231441 NR Description: putative protein; protein id: At3g46480.1
  misc_feature (1)..(186): Homolog of NCBI NO: 15219523 NR Description: hyoscyamine 6-dioxygenase hydroxylase, putative; id: At1g35190.1, supported by cDNA: 2551., supported by cDNA:
  misc_feature (1)..(160): Homolog of NCBI NO: 15231442 NR Description: putative protein; protein id: At3g46490.1
  misc_feature (1)..(184): Homolog of NCBI NO: 34906368 NR Description: unnamed protein product [Oryza sativa (japonica group)] >gi|9558506|dbj|BAB03425.1| unnamed protein product
  misc_feature (1)..(160): Homolog of NCBI NO: 15231443 NR Description: putative protein; protein id: At3g46500.1
  misc_feature (1)..(182): Homolog of NCBI NO: 8919875 NR Description: hypothetical protein [Capsella rubella]
  misc_feature (1)..(182): Homolog of NCBI NO: 7594582 NR Description: hypothetical protein [Arabidopsis thaliana] AT4g16770 [Arabidopsis thaliana] >gi|14596207|gb|AAK68831.1| protein [Arabidopsis thaliana] >gi|20148323|gb|AAM10052.1|
  misc_feature (1)..(182): Homolog of NCBI NO: 18414746 NR Description: gibberellin oxidase-like protein; protein id:
  misc_feature (1)..(182): Homolog of NCBI NO: 8919874 NR Description: hypothetical protein [Capsella rubella]
  misc_feature (1)..(178): Homolog of NCBI NO: 37536198 NR Description: putative gibberellin oxidase [Oryza sativa

SEQ ID NO: 94556 - DNA, 1317 bp, Arabidopsis thaliana; identical to SEQ ID NO: 90800
  misc_feature (1)..(1317): Ceres Seq. ID no. 12725349
  misc_feature: MA Experiment ID: 20000314 Result: Up-regulated in Transcription
  misc_feature: MA Experiment 20000314 PARAMETER Experiment Name: At_14day_Shoots-Roots_Sub_P Parameter: Age (day) Value: 14
  misc_feature: MA Experiment 20000314 PARAMETER Experiment Name: At_14day_Shoots-Roots_Sub_P Parameter: Organism Value: A. thaliana
  misc_feature: MA Experiment 20000314 PARAMETER Experiment Name: At_14day_Shoots-Roots_Sub_P Parameter: Plant Line Value: WS
  misc_feature: MA Experiment 20000314 PARAMETER Experiment Name: At_14day_Shoots-Roots_Sub_P Parameter: Tissue Value: Roots vs. Whole Plant
  misc_feature: MA Experiment ID: 20000347 Result: Up-regulated in Transcription
  misc_feature: MA Experiment 20000347 PARAMETER Experiment Name: At_2mM_SA_Sub_P Parameter: Age (day) Value: 14
  misc_feature: MA Experiment 20000347 PARAMETER Experiment Name: At_2mM_SA_Sub_P Parameter: Organism Value: A. thaliana
  misc_feature: MA Experiment 20000347 PARAMETER Experiment Name: At_2mM_SA_Sub_P Parameter: Plant Line Value: WS
  misc_feature: MA Experiment 20000347 PARAMETER Experiment Name: At_2mM_SA_Sub_P Parameter: Timepoint (hr) Value: 6
  misc_feature: MA Experiment 20000347 PARAMETER Experiment Name: At_2mM_SA_Sub_P Parameter: Tissue Value: Aerial
  misc_feature: MA Experiment 20000347 PARAMETER Experiment Name: At_2mM_SA_Sub_P Parameter: Treatment Value: 2mM SA vs. No Treatment

SEQ ID NO: 94557 - protein, 438 aa, Arabidopsis thaliana; identical to SEQ ID NO: 90801
  peptide (1)..(438): Ceres Seq. ID no. 12725350
  misc_feature (10)..(435): Pfam Name: UDP-glucoronosyl and UDP-glucosyl transferase Pfam Description: UDP-glucoronosyl and UDP-glucosyl transferase
  misc_feature (1)..(438): Homolog of NCBI NO: 15232598 NR Description: glucosyltransferase-like protein; protein id:
  misc_feature (146)..(432): Homolog of NCBI NO: 15232619 NR Description: glucosyltransferase-like protein; protein id: [Arabidopsis thaliana] >gi|11258173|pir||T45605
  misc_feature (3)..(144): Homolog of NCBI NO: 15232619 NR Description: glucosyltransferase-like protein; protein id: [Arabidopsis thaliana] >gi|11258173|pir||T45605
  misc_feature (133)..(435): Homolog of NCBI NO: 15232620 NR Description: glucuronosyl transferase-like protein; protein At3g46690.1 [Arabidopsis thaliana] >gi|7433909|pir||T12981
  misc_feature (133)..(435): Homolog of NCBI NO: 26449469 NR Description: putative glucuronosyl transferase [Arabidopsis
  misc_feature (1)..(178): Homolog of NCBI NO: 15232620 NR Description: glucuronosyl transferase-like protein; protein At3g46690.1 [Arabidopsis thaliana] >gi|7433909|pir||T12981
  misc_feature (1)..(178): Homolog of NCBI NO: 26449469 NR Description: putative glucuronosyl transferase [Arabidopsis
  misc_feature (119)..(434): Homolog of NCBI NO: 11258169 NR Description: glucosyltransferase-like protein - Arabidopsis
  misc_feature (119)..(434): Homolog of NCBI NO: 18408251 NR Description: glucosyltransferase-like protein; protein id: supported by cDNA: gi_15081808 [Arabidopsis thaliana]
  misc_feature (1)..(155): Homolog of NCBI NO: 11258169 NR Description: glucosyltransferase-like protein - Arabidopsis

SEQ ID NO: 94558 - protein, 434 aa, Arabidopsis thaliana; identical to SEQ ID NO: 90802
  peptide (1)..(434): Ceres Seq. ID no. 12725351
  misc_feature (6)..(431): Pfam Name: UDP-glucoronosyl and UDP-glucosyl transferase Pfam Description: UDP-glucoronosyl and UDP-glucosyl transferase
  misc_feature (1)..(434): Homolog of NCBI NO: 15232598 NR Description: glucosyltransferase-like protein; protein id:
  misc_feature (142)..(428): Homolog of NCBI NO: 15232619 NR Description: glucosyltransferase-like protein; protein id: [Arabidopsis thaliana] >gi|11258173|pir||T45605
  misc_feature (1)..(140): Homolog of NCBI NO: 15232619 NR Description: glucosyltransferase-like protein; protein id: [Arabidopsis thaliana] >gi|11258173|pir||T45605
  misc_feature (129)..(431): Homolog of NCBI NO: 15232620 NR Description: glucuronosyl transferase-like protein; protein At3g46690.1 [Arabidopsis thaliana] >gi|7433909|pir||T12981
  misc_feature (129)..(431): Homolog of NCBI NO: 26449469 NR Description: putative glucuronosyl transferase [Arabidopsis
  misc_feature (1)..(174): Homolog of NCBI NO: 15232620 NR Description: glucuronosyl transferase-like protein; protein At3g46690.1 [Arabidopsis thaliana] >gi|7433909|pir||T12981
  misc_feature (1)..(174): Homolog of NCBI NO: 26449469 NR Description: putative glucuronosyl transferase [Arabidopsis
  misc_feature (115)..(430): Homolog of NCBI NO: 11258169 NR Description: glucosyltransferase-like protein - Arabidopsis
  misc_feature (115)..(430): Homolog of NCBI NO: 18408251 NR Description: glucosyltransferase-like protein; protein id: supported by cDNA: gi_15081808 [Arabidopsis thaliana]
  misc_feature (1)..(151): Homolog of NCBI NO: 11258169 NR Description: glucosyltransferase-like protein - Arabidopsis

SEQ ID NO: 94559 - protein, 413 aa, Arabidopsis thaliana; identical to SEQ ID NO: 90803
  peptide (1)..(413): Ceres Seq. ID no. 12725352
  misc_feature (1)..(410): Pfam Name: UDP-glucoronosyl and UDP-glucosyl transferase Pfam Description: UDP-glucoronosyl and UDP-glucosyl transferase
  misc_feature (1)..(413): Homolog of NCBI NO: 15232598 NR Description: glucosyltransferase-like protein; protein id:
  misc_feature (121)..(407): Homolog of NCBI NO: 15232619 NR Description: glucosyltransferase-like protein; protein id: [Arabidopsis thaliana] >gi|11258173|pir||T45605
  misc_feature (1)..(119): Homolog of NCBI NO: 15232619 NR Description: glucosyltransferase-like protein; protein id: [Arabidopsis thaliana] >gi|11258173|pir||T45605
  misc_feature (108)..(410): Homolog of NCBI NO: 15232620 NR Description: glucuronosyl transferase-like protein; protein At3g46690.1 [Arabidopsis thaliana] >gi|7433909|pir||T12981
  misc_feature (108)..(410): Homolog of NCBI NO: 26449469 NR Description: putative glucuronosyl transferase [Arabidopsis
  misc_feature (1)..(153): Homolog of NCBI NO: 15232620 NR Description: glucuronosyl transferase-like protein; protein At3g46690.1 [Arabidopsis thaliana] >gi|7433909|pir||T12981
  misc_feature (1)..(153): Homolog of NCBI NO: 26449469 NR Description: putative glucuronosyl transferase [Arabidopsis
  misc_feature (94)..(409): Homolog of NCBI NO: 11258169 NR Description: glucosyltransferase-like protein - Arabidopsis
  misc_feature (94)..(409): Homolog of NCBI NO: 18408251 NR Description: glucosyltransferase-like protein; protein id: supported by cDNA: gi_15081808 [Arabidopsis thaliana]
  misc_feature (1)..(130): Homolog of NCBI NO: 11258169 NR Description: glucosyltransferase-like protein - Arabidopsis

SEQ ID NO: 94560 - DNA, 1662 bp, Arabidopsis thaliana; identical to SEQ ID NO: 90804
  misc_feature (1)..(1662): Ceres Seq. ID no. 12725353
  misc_feature: MA Experiment ID: 20000347 Result: Up-regulated in Transcription
  misc_feature: MA Experiment 20000347 PARAMETER Experiment Name: At_2mM_SA_Sub_P Parameter: Age (day) Value: 14
  misc_feature: MA Experiment 20000347 PARAMETER Experiment Name: At_2mM_SA_Sub_P Parameter: Organism Value: A. thaliana
  misc_feature: MA Experiment 20000347 PARAMETER Experiment Name: At_2mM_SA_Sub_P Parameter: Plant Line Value: WS
  misc_feature: MA Experiment 20000347 PARAMETER Experiment Name: At_2mM_SA_Sub_P Parameter: Timepoint (hr) Value: 6
  misc_feature: MA Experiment 20000347 PARAMETER Experiment Name: At_2mM_SA_Sub_P Parameter: Tissue Value: Aerial
  misc_feature: MA Experiment 20000347 PARAMETER Experiment Name: At_2mM_SA_Sub_P Parameter: Treatment Value: 2mM SA vs. No Treatment
  misc_feature: MA Experiment ID: 20000348 Result: Up-regulated in Transcription
  misc_feature: MA Experiment 20000348 PARAMETER Experiment Name: At_100uM_ABA_Sub_P Parameter: Age (day) Value: 14
  misc_feature: MA Experiment 20000348 PARAMETER Experiment Name: At_100uM_ABA_Sub_P Parameter: Organism Value: A. thaliana
  misc_feature: MA Experiment 20000348 PARAMETER Experiment Name: At_100uM_ABA_Sub_P Parameter: Plant Line Value: WS
  misc_feature: MA Experiment 20000348 PARAMETER Experiment Name: At_100uM_ABA_Sub_P Parameter: Timepoint (hr) Value: 1
  misc_feature: MA Experiment 20000348 PARAMETER Experiment Name: At_100uM_ABA_Sub_P Parameter: Tissue Value: Aerial
  misc_feature: MA Experiment 20000348 PARAMETER Experiment Name: At_100uM_ABA_Sub_P Parameter: Treatment Value: 100uM ABA vs. No Treatment
  misc_feature: MA Experiment ID: 20000355 Result: Up-regulated in Transcription
  misc_feature: MA Experiment 20000355 PARAMETER Experiment Name: At_Siliques_Sub_P Parameter: Age (day) Value: 21
  misc_feature: MA Experiment 20000355 PARAMETER Experiment Name: At_Siliques_Sub_P Parameter: Organism Value: A. thaliana
  misc_feature: MA Experiment 20000355 PARAMETER Experiment Name: At_Siliques_Sub_P Parameter: Plant Line Value: WS
  misc_feature: MA Experiment 20000355 PARAMETER Experiment Name: At_Siliques_Sub_P Parameter: Tissue Value: Less Than 5mm Siliques vs. Whole Plant
  misc_feature: MA Experiment ID: 20000440 Result: Up-regulated in Transcription
  misc_feature: MA Experiment 20000440 PARAMETER Experiment Name: At_Closed-Flower__Sub_P Parameter: Tissue Value: Closed Flower vs. Whole Plant

SEQ ID NO: 94561 - protein, 458 aa, Arabidopsis thaliana; identical to SEQ ID NO: 90805
  peptide (1)..(458): Ceres Seq. ID no. 12725354
  misc_feature (14)..(458): Pfam Name: UDP-glucoronosyl and UDP-glucosyl transferase Pfam Description: UDP-glucoronosyl and UDP-glucosyl transferase
  misc_feature (1)..(458): Homolog of NCBI NO: 18408251 NR Description: glucosyltransferase-like protein; protein id: supported by cDNA: gi_15081808 [Arabidopsis thaliana]
  misc_feature (6)..(458): Homolog of NCBI NO: 11258169 NR Description: glucosyltransferase-like protein - Arabidopsis
  misc_feature (6)..(458): Homolog of NCBI NO: 15232618 NR Description: glucosyltransferase-like protein; protein id: supported by cDNA: 120105. [Arabidopsis thaliana]
  misc_feature (6)..(458): Homolog of NCBI NO: 21537102 NR Description: glucosyltransferase-like protein [Arabidopsis
  misc_feature (6)..(452): Homolog of NCBI NO: 15240822 NR Description: glucosyltransferase-like protein; protein id:
  misc_feature (6)..(452): Homolog of NCBI NO: 15240825 NR Description: glucosyltransferase-like protein; protein id:
  misc_feature (6)..(453): Homolog of NCBI NO: 15238467 NR Description: glucuronosyl transferase - like protein; protein
  misc_feature (6)..(457): Homolog of NCBI NO: 15232620 NR Description: glucuronosyl transferase-like protein; protein At3g46690.1 [Arabidopsis thaliana] >gi|7433909|pir||T12981
  misc_feature (138)..(458): Homolog of NCBI NO: 15232598 NR Description: glucosyltransferase-like protein; protein id:
  misc_feature (6)..(158): Homolog of NCBI NO: 15232598 NR Description: glucosyltransferase-like protein; protein id:

SEQ ID NO: 94562 - protein, 453 aa, Arabidopsis thaliana; identical to SEQ ID NO: 90806
  peptide (1)..(453): Ceres Seq. ID no. 12725355
  misc_feature (9)..(453): Pfam Name: UDP-glucoronosyl and UDP-glucosyl transferase Pfam Description: UDP-glucoronosyl and UDP-glucosyl transferase
  misc_feature (1)..(453): Homolog of NCBI NO: 18408251 NR Description: glucosyltransferase-like protein; protein id: supported by cDNA: gi_15081808 [Arabidopsis thaliana]
  misc_feature (1)..(453): Homolog of NCBI NO: 11258169 NR Description: glucosyltransferase-like protein - Arabidopsis
  misc_feature (1)..(453): Homolog of NCBI NO: 15232618 NR Description: glucosyltransferase-like protein; protein id: supported by cDNA: 120105. [Arabidopsis thaliana]
  misc_feature (1)..(453): Homolog of NCBI NO: 21537102 NR Description: glucosyltransferase-like protein [Arabidopsis
  misc_feature (1)..(447): Homolog of NCBI NO: 15240822 NR Description: glucosyltransferase-like protein; protein id:
  misc_feature (1)..(447): Homolog of NCBI NO: 15240825 NR Description: glucosyltransferase-like protein; protein id:
  misc_feature (1)..(448): Homolog of NCBI NO: 15238467 NR Description: glucuronosyl transferase - like protein; protein
  misc_feature (1)..(452): Homolog of NCBI NO: 15232620 NR Description: glucuronosyl transferase-like protein; protein At3g46690.1 [Arabidopsis thaliana] >gi|7433909|pir||T12981
  misc_feature (133)..(453): Homolog of NCBI NO: 15232598 NR Description: glucosyltransferase-like protein; protein id:
  misc_feature (1)..(153): Homolog of NCBI NO: 15232598 NR Description: glucosyltransferase-like protein; protein id:

SEQ ID NO: 94563 - protein, 430 aa, Arabidopsis thaliana; identical to SEQ ID NO: 90807
  peptide (1)..(430): Ceres Seq. ID no. 12725356
  misc_feature (1)..(430): Pfam Name: UDP-glucoronosyl and UDP-glucosyl transferase Pfam Description: UDP-glucoronosyl and UDP-glucosyl transferase
  misc_feature (1)..(430): Homolog of NCBI NO: 18408251 NR Description: glucosyltransferase-like protein; protein id: supported by cDNA: gi_15081808 [Arabidopsis thaliana]
  misc_feature (1)..(430): Homolog of NCBI NO: 11258169 NR Description: glucosyltransferase-like protein - Arabidopsis
  misc_feature (1)..(430): Homolog of NCBI NO: 15232618 NR Description: glucosyltransferase-like protein; protein id: supported by cDNA: 120105. [Arabidopsis thaliana]
  misc_feature (1)..(430): Homolog of NCBI NO: 21537102 NR Description: glucosyltransferase-like protein [Arabidopsis
  misc_feature (1)..(424): Homolog of NCBI NO: 15240822 NR Description: glucosyltransferase-like protein; protein id:
  misc_feature (1)..(424): Homolog of NCBI NO: 15240825 NR Description: glucosyltransferase-like protein; protein id:
  misc_feature (1)..(425): Homolog of NCBI NO: 15238467 NR Description: glucuronosyl transferase - like protein; protein
  misc_feature (1)..(429): Homolog of NCBI NO: 15232620 NR Description: glucuronosyl transferase-like protein; protein At3g46690.1 [Arabidopsis thaliana] >gi|7433909|pir||T12981
  misc_feature (110)..(430): Homolog of NCBI NO: 15232598 NR Description: glucosyltransferase-like protein; protein id:
  misc_feature (1)..(130): Homolog of NCBI NO: 15232598 NR Description: glucosyltransferase-like protein; protein id:

SEQ ID NO: 94564 - DNA, 1344 bp, Arabidopsis thaliana; identical to SEQ ID NO: 90808
  misc_feature (1)..(1344): Ceres Seq. ID no. 12725365
  misc_feature: MA Experiment ID: 20000439 Result: Up-regulated in Transcription
  misc_feature: MA Experiment 20000439 PARAMETER Experiment Name: At_Roots__P Parameter: Age (day) Value: 14 vs. 21
  misc_feature: MA Experiment 20000439 PARAMETER Experiment Name: At_Roots__P Parameter: Organism Value: A. thaliana
  misc_feature: MA Experiment 20000439 PARAMETER Experiment Name: At_Roots__P Parameter: Tissue Value: Roots vs. Whole Plant
  misc_feature: MA Experiment ID: 20000451 Result: Up-regulated in Transcription
  misc_feature: MA Experiment 20000451 PARAMETER Experiment Name: At_CS6879_Shoots-Roots_P Parameter: Age (day) Value: 14
  misc_feature: MA Experiment 20000451 PARAMETER Experiment Name: At_CS6879_Shoots-Roots_P Parameter: Organism Value: A. thaliana
  misc_feature: MA Experiment 20000451 PARAMETER Experiment Name: At_CS6879_Shoots-Roots_P Parameter: Plant Line Value: CS6879 vs. WS
  misc_feature: MA Experiment 20000451 PARAMETER Experiment Name: At_CS6879_Shoots-Roots_P Parameter: Tissue Value: Roots

SEQ ID NO: 94565 - protein, 447 aa, Arabidopsis thaliana; identical to SEQ ID NO: 90809
  peptide (1)..(447): Ceres Seq. ID no. 12725366
  misc_feature (11)..(444): Pfam Name: UDP-glucoronosyl and UDP-glucosyl transferase Pfam Description: UDP-glucoronosyl and UDP-glucosyl transferase
  misc_feature (1)..(447): Homolog of NCBI NO: 15232623 NR Description: glucuronosyl transferase-like protein; protein At3g46720.1 [Arabidopsis thaliana] >gi|7433908|pir||T12978
  misc_feature (1)..(443): Homolog of NCBI NO: 15232620 NR Description: glucuronosyl transferase-like protein; protein At3g46690.1 [Arabidopsis thaliana] >gi|7433909|pir||T12981
  misc_feature (1)..(443): Homolog of NCBI NO: 26449469 NR Description: putative glucuronosyl transferase [Arabidopsis
  misc_feature (1)..(440): Homolog of NCBI NO: 15232619 NR Description: glucosyltransferase-like protein; protein id: [Arabidopsis thaliana] >gi|11258173|pir||T45605
  misc_feature (1)..(441): Homolog of NCBI NO: 30697251 NR Description: glycosyltransferase family [Arabidopsis thaliana]
  misc_feature (2)..(438): Homolog of NCBI NO: 15238467 NR Description: glucuronosyl transferase - like protein; protein
  misc_feature (1)..(440): Homolog of NCBI NO: 15232618 NR Description: glucosyltransferase-like protein; protein id: supported by cDNA: 120105. [Arabidopsis thaliana]
  misc_feature (1)..(440): Homolog of NCBI NO: 21537102 NR Description: glucosyltransferase-like protein [Arabidopsis
  misc_feature (1)..(440): Homolog of NCBI NO: 18408251 NR Description: glucosyltransferase-like protein; protein id: supported by cDNA: gi_15081808 [Arabidopsis thaliana]
  misc_feature (7)..(440): Homolog of NCBI NO: 34897378 NR Description: putative UDP-glucosyltransferase [Oryza sativa

SEQ ID NO: 94566 - protein, 424 aa, Arabidopsis thaliana; identical to SEQ ID NO: 90810
  peptide (1)..(424): Ceres Seq. ID no. 12725367
  misc_feature (1)..(421): Pfam Name: UDP-glucoronosyl and UDP-glucosyl transferase Pfam Description: UDP-glucoronosyl and UDP-glucosyl transferase
  misc_feature (1)..(424): Homolog of NCBI NO: 15232623 NR Description: glucuronosyl transferase-like protein; protein At3g46720.1 [Arabidopsis thaliana] >gi|7433908|pir||T12978
  misc_feature (1)..(420): Homolog of NCBI NO: 15232620 NR Description: glucuronosyl transferase-like protein; protein At3g46690.1 [Arabidopsis thaliana] >gi|7433909|pir||T12981
  misc_feature (1)..(420): Homolog of NCBI NO: 26449469 NR Description: putative glucuronosyl transferase [Arabidopsis
  misc_feature (1)..(417): Homolog of NCBI NO: 15232619 NR Description: glucosyltransferase-like protein; protein id: [Arabidopsis thaliana] >gi|11258173|pir||T45605
  misc_feature (1)..(418): Homolog of NCBI NO: 30697251 NR Description: glycosyltransferase family [Arabidopsis thaliana]
  misc_feature (1)..(415): Homolog of NCBI NO: 15238467 NR Description: glucuronosyl transferase - like protein; protein
  misc_feature (1)..(417): Homolog of NCBI NO: 15232618 NR Description: glucosyltransferase-like protein; protein id: supported by cDNA: 120105. [Arabidopsis thaliana]
  misc_feature (1)..(417): Homolog of NCBI NO: 21537102 NR Description: glucosyltransferase-like protein [Arabidopsis
  misc_feature (1)..(417): Homolog of NCBI NO: 18408251 NR Description: glucosyltransferase-like protein; protein id: supported by cDNA: gi_15081808 [Arabidopsis thaliana]
  misc_feature (1)..(417): Homolog of NCBI NO: 34897378 NR Description: putative UDP-glucosyltransferase [Oryza sativa

SEQ ID NO: 94567 - protein, 423 aa, Arabidopsis thaliana; identical to SEQ ID NO: 90811
  peptide (1)..(423): Ceres Seq. ID no. 12725368
  misc_feature (1)..(420): Pfam Name: UDP-glucoronosyl and UDP-glucosyl transferase Pfam Description: UDP-glucoronosyl and UDP-glucosyl transferase
  misc_feature (1)..(423): Homolog of NCBI NO: 15232623 NR Description: glucuronosyl transferase-like protein; protein At3g46720.1 [Arabidopsis thaliana] >gi|7433908|pir||T12978
  misc_feature (1)..(419): Homolog of NCBI NO: 15232620 NR Description: glucuronosyl transferase-like protein; protein At3g46690.1 [Arabidopsis thaliana] >gi|7433909|pir||T12981
  misc_feature (1)..(419): Homolog of NCBI NO: 26449469 NR Description: putative glucuronosyl transferase [Arabidopsis
  misc_feature (1)..(416): Homolog of NCBI NO: 15232619 NR Description: glucosyltransferase-like protein; protein id: [Arabidopsis thaliana] >gi|11258173|pir||T45605
  misc_feature (1)..(417): Homolog of NCBI NO: 30697251 NR Description: glycosyltransferase family [Arabidopsis thaliana]
  misc_feature (1)..(414): Homolog of NCBI NO: 15238467 NR Description: glucuronosyl transferase - like protein; protein
  misc_feature (1)..(416): Homolog of NCBI NO: 15232618 NR Description: glucosyltransferase-like protein; protein id: supported by cDNA: 120105. [Arabidopsis thaliana]
  misc_feature (1)..(416): Homolog of NCBI NO: 21537102 NR Description: glucosyltransferase-like protein [Arabidopsis
  misc_feature (1)..(416): Homolog of NCBI NO: 18408251 NR Description: glucosyltransferase-like protein; protein id: supported by cDNA: gi_15081808 [Arabidopsis thaliana]
  misc_feature (1)..(416): Homolog of NCBI NO: 34897378 NR Description: putative UDP-glucosyltransferase [Oryza sativa

SEQ ID NO: 94568 - DNA, 1760 bp, Arabidopsis thaliana; identical to SEQ ID NO: 90812
  misc_feature (1)..(1760): Ceres Seq. ID no. 12725373
  misc_feature: MA Experiment ID: 20000180 Result: Up-regulated in Transcription
  misc_feature: MA Experiment 20000180 PARAMETER Experiment Name: At_Germinating_Seeds_P Parameter: Age (hr) Value: 24 vs. 0
  misc_feature: MA Experiment 20000180 PARAMETER Experiment Name: At_Germinating_Seeds_P Parameter: Tissue Value: Germinating Seeds
  misc_feature: MA Experiment ID: 20000185 Result: Down-regulated in Transcription
  misc_feature: MA Experiment 20000185 PARAMETER Experiment Name: At_Roots__P Parameter: Age (day) Value: 7 vs. 21
  misc_feature: MA Experiment 20000185 PARAMETER Experiment Name: At_Roots__P Parameter: Organism Value: A. thaliana
  misc_feature: MA Experiment 20000185 PARAMETER Experiment Name: At_Roots__P Parameter: Tissue Value: Roots vs. Whole Plant
  misc_feature: MA Experiment ID: 20000264 Result: Down-regulated in Transcription
  misc_feature: MA Experiment 20000264 PARAMETER Experiment Name: At_Open_Flower_P Parameter: Age (day) Value: 21
  misc_feature: MA Experiment 20000264 PARAMETER Experiment Name: At_Open_Flower_P Parameter: Plant Line Value: WS
  misc_feature: MA Experiment 20000264 PARAMETER Experiment Name: At_Open_Flower_P Parameter: Tissue Value: Open Flower vs. Whole Plant
  misc_feature: MA Experiment ID: 20000286 Result: Down-regulated in Transcription
  misc_feature: MA Experiment 20000286 PARAMETER Experiment Name: At_Open_Flower_P Parameter: Age (day) Value: 21
  misc_feature: MA Experiment 20000286 PARAMETER Experiment Name: At_Open_Flower_P Parameter: Plant Line Value: WS
  misc_feature: MA Experiment 20000286 PARAMETER Experiment Name: At_Open_Flower_P Parameter: Tissue Value: Half Open vs. Whole Plant
  misc_feature: MA Experiment ID: 20000437 Result: Down-regulated in Transcription
  misc_feature: MA Experiment 20000437 PARAMETER Experiment Name: At_Drought_P Parameter: Age (day) Value: 8
  misc_feature: MA Experiment 20000437 PARAMETER Experiment Name: At_Drought_P Parameter: Organism Value: A. thaliana
  misc_feature: MA Experiment 20000437 PARAMETER Experiment Name: At_Drought_P Parameter: Plant Line Value: WS
  misc_feature: MA Experiment 20000437 PARAMETER Experiment Name: At_Drought_P Parameter: Timepoint (hr) Value: 24
  misc_feature: MA Experiment 20000437 PARAMETER Experiment Name: At_Drought_P Parameter: Tissue Value: Whole Plant
  misc_feature: MA Experiment 20000437 PARAMETER Experiment Name: At_Drought_P Parameter: Treatment Value: Drought vs. No Drought
  misc_feature: MA Experiment ID: 20000438 Result: Up-regulated in Transcription
  misc_feature: MA Experiment 20000438 PARAMETER Experiment Name: At_Shoots__P Parameter: Age (day) Value: 14
  misc_feature: MA Experiment 20000438 PARAMETER Experiment Name: At_Shoots__P Parameter: Tissue Value: Shoots vs. Whole Plant
  misc_feature: MA Experiment ID: 20000439 Result: Down-regulated in Transcription
  misc_feature: MA Experiment 20000439 PARAMETER Experiment Name: At_Roots__P Parameter: Age (day) Value: 14 vs. 21
  misc_feature: MA Experiment 20000439 PARAMETER Experiment Name: At_Roots__P Parameter: Organism Value: A. thaliana
  misc_feature: MA Experiment 20000439 PARAMETER Experiment Name: At_Roots__P Parameter: Tissue Value: Roots vs. Whole Plant
  misc_feature: MA Experiment ID: 20000573 Result: Down-regulated in Transcription
  misc_feature: MA Experiment 20000573 PARAMETER Experiment Name: At_100uM_ABA_Mutants__P Parameter: Organism Value: A. thaliana
  misc_feature: MA Experiment 20000573 PARAMETER Experiment Name: At_100uM_ABA_Mutants__P Parameter: Plant Line Value: CS22 vs. Ler wt
  misc_feature: MA Experiment 20000573 PARAMETER Experiment Name: At_100uM_ABA_Mutants__P Parameter: Timepoint (hr) Value: N/A
  misc_feature: MA Experiment 20000573 PARAMETER Experiment Name: At_100uM_ABA_Mutants__P Parameter: Tissue Value: Whole Plant
  misc_feature: MA Experiment 20000573 PARAMETER Experiment Name: At_100uM_ABA_Mutants__P Parameter: Treatment Value: None
  misc_feature: MA Experiment ID: 20000794 Result: Down-regulated in Transcription
  misc_feature: MA Experiment 20000794 PARAMETER Experiment Name: At_Petals_P Parameter: Age (day) Value: 23-25 days
  misc_feature: MA Experiment 20000794 PARAMETER Experiment Name: At_Petals_P Parameter: Plant Line Value: WS
  misc_feature: MA Experiment 20000794 PARAMETER Experiment Name: At_Petals_P Parameter: Tissue Value: Petals vs. Whole plant
  misc_feature: MA Experiment ID: 20001555 Result: Down-regulated in Transcription
  misc_feature: MA Experiment 20001555 PARAMETER Experiment Name: At_Drought_Soil_Dry_P Parameter: Age (day) Value: 24
  misc_feature: MA Experiment 20001555 PARAMETER Experiment Name: At_Drought_Soil_Dry_P Parameter: Organism Value: A. thaliana
  misc_feature: MA Experiment 20001555 PARAMETER Experiment Name: At_Drought_Soil_Dry_P Parameter: Plant Line Value: WS
  misc_feature: MA Experiment 20001555 PARAMETER Experiment Name: At_Drought_Soil_Dry_P Parameter: Post Timepoint (hr) Value: None
  misc_feature: MA Experiment 20001555 PARAMETER Experiment Name: At_Drought_Soil_Dry_P Parameter: Post-Treatment Value: None
  misc_feature: MA Experiment 20001555 PARAMETER Experiment Name: At_Drought_Soil_Dry_P Parameter: Timepoint (day) Value: 10
  misc_feature: MA Experiment 20001555 PARAMETER Experiment Name: At_Drought_Soil_Dry_P Parameter: Treatment Value: Drought vs. No Drought
  misc_feature: MA Experiment ID: 20001556 Result: Down-regulated in Transcription
  misc_feature: MA Experiment 20001556 PARAMETER Experiment Name: At_Drought_Soil_Dry_P Parameter: Age (day) Value: 26
  misc_feature: MA Experiment 20001556 PARAMETER Experiment Name: At_Drought_Soil_Dry_P Parameter: Organism Value: A. thaliana
  misc_feature: MA Experiment 20001556 PARAMETER Experiment Name: At_Drought_Soil_Dry_P Parameter: Plant Line Value: WS
  misc_feature: MA Experiment 20001556 PARAMETER Experiment Name: At_Drought_Soil_Dry_P Parameter: Post Timepoint (hr) Value: None
  misc_feature: MA Experiment 20001556 PARAMETER Experiment Name: At_Drought_Soil_Dry_P Parameter: Post-Treatment Value: None
  misc_feature: MA Experiment 20001556 PARAMETER Experiment Name: At_Drought_Soil_Dry_P Parameter: Timepoint (day) Value: 12
  misc_feature: MA Experiment 20001556 PARAMETER Experiment Name: At_Drought_Soil_Dry_P Parameter: Treatment Value: Drought vs. No Drought
  misc_feature: MA Experiment ID: 20001557 Result: Down-regulated in Transcription
  misc_feature: MA Experiment 20001557 PARAMETER Experiment Name: At_Drought_Soil_Dry_P Parameter: Age (day) Value: 27
  misc_feature: MA Experiment 20001557 PARAMETER Experiment Name: At_Drought_Soil_Dry_P Parameter: Organism Value: A. thaliana
  misc_feature: MA Experiment 20001557 PARAMETER Experiment Name: At_Drought_Soil_Dry_P Parameter: Plant Line Value: WS
  misc_feature: MA Experiment 20001557 PARAMETER Experiment Name: At_Drought_Soil_Dry_P Parameter: Post Timepoint (hr) Value: 3
  misc_feature: MA Experiment 20001557 PARAMETER Experiment Name: At_Drought_Soil_Dry_P Parameter: Post-Treatment Value: Re-Water vs. No Drought
  misc_feature: MA Experiment 20001557 PARAMETER Experiment Name: At_Drought_Soil_Dry_P Parameter: Timepoint (day) Value: 13
  misc_feature: MA Experiment 20001557 PARAMETER Experiment Name: At_Drought_Soil_Dry_P Parameter: Treatment Value: Drought vs. No Drought
  misc_feature: MA Experiment ID: 20001558 Result: Down-regulated in Transcription
  misc_feature: MA Experiment 20001558 PARAMETER Experiment Name: At_Drought_Soil_Dry_P Parameter: Age (day) Value: 27
  misc_feature: MA Experiment 20001558 PARAMETER Experiment Name: At_Drought_Soil_Dry_P Parameter: Organism Value: A. thaliana
  misc_feature: MA Experiment 20001558 PARAMETER Experiment Name: At_Drought_Soil_Dry_P Parameter: Plant Line Value: WS
  misc_feature: MA Experiment 20001558 PARAMETER Experiment Name: At_Drought_Soil_Dry_P Parameter: Post Timepoint (hr) Value: 6
  misc_feature: MA Experiment 20001558 PARAMETER Experiment Name: At_Drought_Soil_Dry_P Parameter: Post-Treatment Value: Re-Water vs. No Drought
  misc_feature: MA Experiment 20001558 PARAMETER Experiment Name: At_Drought_Soil_Dry_P Parameter: Timepoint (day) Value: 13
  misc_feature: MA Experiment 20001558 PARAMETER Experiment Name: At_Drought_Soil_Dry_P Parameter: Treatment Value: Drought vs. No Drought
  misc_feature: MA Experiment ID: 20001559 Result: Down-regulated in Transcription
  misc_feature: MA Experiment 20001559 PARAMETER Experiment Name: At_Drought_Soil_Dry_P Parameter: Age (day) Value: 28
  misc_feature: MA Experiment 20001559 PARAMETER Experiment Name: At_Drought_Soil_Dry_P Parameter: Organism Value: A. thaliana
  misc_feature: MA Experiment 20001559 PARAMETER Experiment Name: At_Drought_Soil_Dry_P Parameter: Plant Line Value: WS
  misc_feature: MA Experiment 20001559 PARAMETER Experiment Name: At_Drought_Soil_Dry_P Parameter: Post Timepoint (hr) Value: 29
  misc_feature: MA Experiment 20001559 PARAMETER Experiment Name: At_Drought_Soil_Dry_P Parameter: Post-Treatment Value: Re-Water vs. No Drought
  misc_feature: MA Experiment 20001559 PARAMETER Experiment Name: At_Drought_Soil_Dry_P Parameter: Timepoint (day) Value: 14
  misc_feature: MA Experiment 20001559 PARAMETER Experiment Name: At_Drought_Soil_Dry_P Parameter: Treatment Value: Drought vs. No Drought
  misc_feature: MA Experiment ID: 20001757 Result: Up-regulated in Transcription
  misc_feature: MA Experiment 20001757 PARAMETER Experiment Name: At_50mM_NH4NO3_L-to-H_P Parameter: Timepoint (hr) Value: 6
  misc_feature: MA Experiment 20001757 PARAMETER Experiment Name: At_50mM_NH4NO3_L-to-H_P Parameter: Tissue Value: Leaf
  misc_feature: MA Experiment 20001757 PARAMETER Experiment Name: At_50mM_NH4NO3_L-to-H_P Parameter: Treatment Value: 50mM NH4NO3 vs 100mM Mannitol
  misc_feature: MA Experiment ID: 20001904 Result: Down-regulated in Transcription
  misc_feature: MA Experiment 20001904 PARAMETER Experiment Name: At_Drought_Reproduction_P Parameter: Age (day) Value: 37
  misc_feature: MA Experiment 20001904 PARAMETER Experiment Name: At_Drought_Reproduction_P Parameter: Organism Value: A. thaliana
  misc_feature: MA Experiment 20001904 PARAMETER Experiment Name: At_Drought_Reproduction_P Parameter: Plant Line Value: WS
  misc_feature: MA Experiment 20001904 PARAMETER Experiment Name: At_Drought_Reproduction_P Parameter: Timepoint (day) Value: 7
  misc_feature: MA Experiment 20001904 PARAMETER Experiment Name: At_Drought_Reproduction_P Parameter: Tissue Value: Rosettes
  misc_feature: MA Experiment 20001904 PARAMETER Experiment Name: At_Drought_Reproduction_P Parameter: Treatment Value: Drought vs. No Drought
  misc_feature: MA Experiment ID: 20001905 Result: Down-regulated in Transcription
  misc_feature: MA Experiment 20001905 PARAMETER Experiment Name: At_Drought_Reproduction_P Parameter: Age (day) Value: 40
  misc_feature: MA Experiment 20001905 PARAMETER Experiment Name: At_Drought_Reproduction_P Parameter: Organism Value: A. thaliana
  misc_feature: MA Experiment 20001905 PARAMETER Experiment Name: At_Drought_Reproduction_P Parameter: Plant Line Value: WS
  misc_feature: MA Experiment 20001905 PARAMETER Experiment Name: At_Drought_Reproduction_P Parameter: Timepoint (day) Value: 10
  misc_feature: MA Experiment 20001905 PARAMETER Experiment Name: At_Drought_Reproduction_P Parameter: Tissue Value: Rosettes
  misc_feature: MA Experiment 20001905 PARAMETER Experiment Name: At_Drought_Reproduction_P Parameter: Treatment Value: Drought vs. No Drought
  misc_feature: MA Experiment ID: 20001906 Result: Down-regulated in Transcription
  misc_feature: MA Experiment 20001906 PARAMETER Experiment Name: At_Drought_Reproduction_P Parameter: Age (day) Value: 35
  misc_feature: MA Experiment 20001906 PARAMETER Experiment Name: At_Drought_Reproduction_P Parameter: Organism Value: A. thaliana
  misc_feature: MA Experiment 20001906 PARAMETER Experiment Name: At_Drought_Reproduction_P Parameter: Plant Line Value: WS
  misc_feature: MA Experiment 20001906 PARAMETER Experiment Name: At_Drought_Reproduction_P Parameter: Timepoint (day) Value: 5
  misc_feature: MA Experiment 20001906 PARAMETER Experiment Name: At_Drought_Reproduction_P Parameter: Tissue Value: Siliques
  misc_feature: MA Experiment 20001906 PARAMETER Experiment Name: At_Drought_Reproduction_P Parameter: Treatment Value: Drought vs. No Drought
  misc_feature: MA Experiment ID: 20001908 Result: Down-regulated in Transcription
  misc_feature: MA Experiment 20001908 PARAMETER Experiment Name: At_Drought_Reproduction_P Parameter: Age (day) Value: 40
  misc_feature: MA Experiment 20001908 PARAMETER Experiment Name: At_Drought_Reproduction_P Parameter: Organism Value: A. thaliana
  misc_feature: MA Experiment 20001908 PARAMETER Experiment Name: At_Drought_Reproduction_P Parameter: Plant Line Value: WS
  misc_feature: MA Experiment 20001908 PARAMETER Experiment Name: At_Drought_Reproduction_P Parameter: Timepoint (day) Value: 10
  misc_feature: MA Experiment 20001908 PARAMETER Experiment Name: At_Drought_Reproduction_P Parameter: Tissue Value: Siliques
  misc_feature: MA Experiment 20001908 PARAMETER Experiment Name: At_Drought_Reproduction_P Parameter: Treatment Value: Drought vs. No Drought

SEQ ID NO: 94569 - protein, 297 aa, Arabidopsis thaliana; identical to SEQ ID NO: 90813
  peptide (1)..(297): Ceres Seq. ID no. 12725374
  misc_feature (1)..(296): Homolog of NCBI NO: 7487756 NR Description: hypothetical protein T6H20.190 - Arabidopsis >gi|5541681|emb|CAB51187.1| putative protein [Arabidopsis
  misc_feature (1)..(297): Homolog of NCBI NO: 18408279 NR Description: putative protein; protein id: At3g46780.1, by cDNA: gi_13605913 [Arabidopsis thaliana] AT3g46780/T6H20_190 [Arabidopsis thaliana]
  misc_feature (73)..(180): Homolog of NCBI NO: 30685117 NR Description: expressed protein [Arabidopsis thaliana] Unknown protein [Arabidopsis thaliana]
  misc_feature (73)..(180): Homolog of NCBI NO: 9294698 NR Description: gb|AAC26697.1~gene_id:MCB22.6~similar to unknown
  misc_feature (89)..(297): Homolog of NCBI NO: 21616072 NR Description: Tic62 protein [Pisum sativum]
  misc_feature (89)..(297): Homolog of NCBI NO: 37530302 NR Description: putative dehydrogenase [Oryza sativa (japonica group)] >gi|18481961|gb|AAL73559.1| Unknown protein [Oryza >gi|19920208|gb|AAM08640.1| Putative dehydrogenase [Oryza sativa]

SEQ ID NO: 94570 - protein, 231 aa, Arabidopsis thaliana; identical to SEQ ID NO: 90814
  peptide (1)..(231): Ceres Seq. ID no. 12725375
  misc_feature (1)..(230): Homolog of NCBI NO: 7487756 NR Description: hypothetical protein T6H20.190 - Arabidopsis >gi|5541681|emb|CAB51187.1| putative protein [Arabidopsis
  misc_feature (1)..(231): Homolog of NCBI NO: 18408279 NR Description: putative protein; protein id: At3g46780.1, by cDNA: gi_13605913 [Arabidopsis thaliana] AT3g46780/T6H20_190 [Arabidopsis thaliana]
  misc_feature (7)..(114): Homolog of NCBI NO: 30685117 NR Description: expressed protein [Arabidopsis thaliana] Unknown protein [Arabidopsis thaliana]
  misc_feature (7)..(114): Homolog of NCBI NO: 9294698 NR Description: gb|AAC26697.1~gene_id:MCB22.6~similar to unknown
  misc_feature (23)..(231): Homolog of NCBI NO: 21616072 NR Description: Tic62 protein [Pisum sativum]
  misc_feature (23)..(231): Homolog of NCBI NO: 37530302 NR Description: putative dehydrogenase [Oryza sativa (japonica group)] >gi|18481961|gb|AAL73559.1| Unknown protein [Oryza >gi|19920208|gb|AAM08640.1| Putative dehydrogenase [Oryza sativa]

SEQ ID NO: 94571 - DNA, 615 bp, Arabidopsis thaliana; identical to SEQ ID NO: 90815
  misc_feature (1)..(615): Ceres Seq. ID no. 12725395

SEQ ID NO: 94572 - protein, 204 aa, Arabidopsis thaliana; identical to SEQ ID NO: 90816
  peptide (1)..(204): Ceres Seq. ID no. 12725396
  misc_feature (1)..(204): Homolog of NCBI NO: 15232676 NR Description: putative protein; protein id: At3g46890.1
  misc_feature (18)..(202): Homolog of NCBI NO: 15239293 NR Description: putative protein; protein id: At5g05950.1, by cDNA: 252000. [Arabidopsis thaliana] gene_id:K18J17.12~pir||T12959~similar to unknown protein
  misc_feature (19)..(202): Homolog of NCBI NO: 34395171 NR Description: unknown protein [Oryza sativa (japonica
  misc_feature (19)..(202): Homolog of NCBI NO: 34900646 NR Description: hypothetical protein~similar to Arabidopsis
  misc_feature (30)..(202): Homolog of NCBI NO: 6041846 NR Description: unknown protein [Arabidopsis thaliana]
  misc_feature (30)..(202): Homolog of NCBI NO: 18397969 NR Description: expressed protein; protein id: At3g07510.1, by cDNA: gi_13877548, supported by cDNA: gi_20148734 [Arabidopsis >gi|13877549|gb|AAK43852.1|AF370475_1 Unknown protein
  misc_feature (77)..(202): Homolog of NCBI NO: 15226312 NR Description: hypothetical protein; protein id: At2g01580.1
  misc_feature (72)..(204): Homolog of NCBI NO: 37531676 NR Description: hypothetical protein [Oryza sativa (japonica group)] >gi|21671930|gb|AAM74292.1| Hypothetical protein [Oryza
  misc_feature (21)..(204): Homolog of NCBI NO: 38345578 NR Description: OSJNBa0027H06.14 [Oryza sativa (japonica
  misc_feature (16)..(196): Homolog of NCBI NO: 6041846 NR Description: unknown protein [Arabidopsis thaliana]

SEQ ID NO: 94573 - protein, 107 aa, Arabidopsis thaliana; identical to SEQ ID NO: 90817
  peptide (1)..(107): Ceres Seq. ID no. 12725397
  misc_feature (1)..(107): Homolog of NCBI NO: 15232676 NR Description: putative protein; protein id: At3g46890.1
  misc_feature (1)..(105): Homolog of NCBI NO: 15239293 NR Description: putative protein; protein id: At5g05950.1, by cDNA: 252000. [Arabidopsis thaliana] gene_id:K18J17.12~pir||T12959~similar to unknown protein
  misc_feature (1)..(105): Homolog of NCBI NO: 34395171 NR Description: unknown protein [Oryza sativa (japonica
  misc_feature (1)..(105): Homolog of NCBI NO: 34900646 NR Description: hypothetical protein~similar to Arabidopsis
  misc_feature (1)..(105): Homolog of NCBI NO: 6041846 NR Description: unknown protein [Arabidopsis thaliana]
  misc_feature (1)..(105): Homolog of NCBI NO: 18397969 NR Description: expressed protein; protein id: At3g07510.1, by cDNA: gi_13877548, supported by cDNA: gi_20148734 [Arabidopsis >gi|13877549|gb|AAK43852.1|AF370475_1 Unknown protein
  misc_feature (1)..(105): Homolog of NCBI NO: 15226312 NR Description: hypothetical protein; protein id: At2g01580.1
  misc_feature (1)..(107): Homolog of NCBI NO: 37531676 NR Description: hypothetical protein [Oryza sativa (japonica group)] >gi|21671930|gb|AAM74292.1| Hypothetical protein [Oryza
  misc_feature (1)..(107): Homolog of NCBI NO: 38345578 NR Description: OSJNBa0027H06.14 [Oryza sativa (japonica
  misc_feature (1)..(99): Homolog of NCBI NO: 6041846 NR Description: unknown protein [Arabidopsis thaliana]

SEQ ID NO: 94574 - DNA, 1593 bp, Arabidopsis thaliana; identical to SEQ ID NO: 90818
  misc_feature (1)..(1593): Ceres Seq. ID no. 12725402
  misc_feature: MA Experiment ID: 108461 Result: Down-regulated in Transcription
  misc_feature: MA Experiment 108461 PARAMETER Experiment Name: At_Germinating_Seeds_cDNA_P Parameter: Age (day) Value: 1 vs. 0
  misc_feature: MA Experiment 108461 PARAMETER Experiment Name: At_Germinating_Seeds_cDNA_P Parameter: Tissue Value: Germinating Seeds
  misc_feature: MA Experiment ID: 108462 Result: Down-regulated in Transcription
  misc_feature: MA Experiment 108462 PARAMETER Experiment Name: At_Germinating_Seeds_cDNA_P Parameter: Age (day) Value: 2 vs. 0
  misc_feature: MA Experiment 108462 PARAMETER Experiment Name: At_Germinating_Seeds_cDNA_P Parameter: Tissue Value: Germinating Seeds
  misc_feature: MA Experiment ID: 108463 Result: Down-regulated in Transcription
  misc_feature: MA Experiment 108463 PARAMETER Experiment Name: At_Germinating_Seeds_cDNA_P Parameter: Age (day) Value: 3 vs. 0
  misc_feature: MA Experiment 108463 PARAMETER Experiment Name: At_Germinating_Seeds_cDNA_P Parameter: Tissue Value: Germinating Seeds
  misc_feature: MA Experiment ID: 108464 Result: Down-regulated in Transcription
  misc_feature: MA Experiment 108464 PARAMETER Experiment Name: At_Germinating_Seeds_cDNA_P Parameter: Age (day) Value: 4 vs. 0
  misc_feature: MA Experiment 108464 PARAMETER Experiment Name: At_Germinating_Seeds_cDNA_P Parameter: Tissue Value: Germinating Seeds
  misc_feature: MA Experiment ID: 20000171 Result: Down-regulated in Transcription
  misc_feature: MA Experiment 20000171 PARAMETER Experiment Name: At_42deg_Heat_P Parameter: Age (day) Value: 14
  misc_feature: MA Experiment 20000171 PARAMETER Experiment Name: At_42deg_Heat_P Parameter: Organism Value: A. thaliana
  misc_feature: MA Experiment 20000171 PARAMETER Experiment Name: At_42deg_Heat_P Parameter: Plant Line Value: WS
  misc_feature: MA Experiment 20000171 PARAMETER Experiment Name: At_42deg_Heat_P Parameter: Temperature (deg C) Value: 42 vs. 22
  misc_feature: MA Experiment 20000171 PARAMETER Experiment Name: At_42deg_Heat_P Parameter: Timepoint (hr) Value: 1
  misc_feature: MA Experiment 20000171 PARAMETER Experiment Name: At_42deg_Heat_P Parameter: Tissue Value: Aerial
  misc_feature: MA Experiment ID: 20000180 Result: Down-regulated in Transcription
  misc_feature: MA Experiment 20000180 PARAMETER Experiment Name: At_Germinating_Seeds_P Parameter: Age (hr) Value: 24 vs. 0
  misc_feature: MA Experiment 20000180 PARAMETER Experiment Name: At_Germinating_Seeds_P Parameter: Tissue Value: Germinating Seeds
  misc_feature: MA Experiment ID: 20000224 Result: Down-regulated in Transcription
  misc_feature: MA Experiment ID: 20000265 Result: Up-regulated in Transcription
  misc_feature: MA Experiment 20000265 PARAMETER Experiment Name: At_Open_Flower_P Parameter: Age (day) Value: 21
  misc_feature: MA Experiment 20000265 PARAMETER Experiment Name: At_Open_Flower_P Parameter: Plant Line Value: WS
  misc_feature: MA Experiment 20000265 PARAMETER Experiment Name: At_Open_Flower_P Parameter: Tissue Value: Closed Flower vs. Whole Plant
  misc_feature: MA Experiment ID: 20001247 Result: Down-regulated in Transcription
  misc_feature: MA Experiment 20001247 PARAMETER Experiment Name: At_Far-red-induction_P Parameter: Age (day) Value: 7
  misc_feature: MA Experiment 20001247 PARAMETER Experiment Name: At_Far-red-induction_P Parameter: Light Value: Far-red vs. White
  misc_feature: MA Experiment 20001247 PARAMETER Experiment Name: At_Far-red-induction_P Parameter: Organism Value: A. thaliana
  misc_feature: MA Experiment 20001247 PARAMETER Experiment Name: At_Far-red-induction_P Parameter: Plant Line Value: Columbia
  misc_feature: MA Experiment 20001247 PARAMETER Experiment Name: At_Far-red-induction_P Parameter: Timepoint (hr) Value: 1
  misc_feature: MA Experiment 20001247 PARAMETER Experiment Name: At_Far-red-induction_P Parameter: Tissue Value: Whole Plant
  misc_feature: MA Experiment ID: 20001558 Result: Up-regulated in Transcription
  misc_feature: MA Experiment 20001558 PARAMETER Experiment Name: At_Drought_Soil_Dry_P Parameter: Age (day) Value: 27
  misc_feature: MA Experiment 20001558 PARAMETER Experiment Name: At_Drought_Soil_Dry_P Parameter: Organism Value: A. thaliana
  misc_feature: MA Experiment 20001558 PARAMETER Experiment Name: At_Drought_Soil_Dry_P Parameter: Plant Line Value: WS
  misc_feature: MA Experiment 20001558 PARAMETER Experiment Name: At_Drought_Soil_Dry_P Parameter: Post Timepoint (hr) Value: 6
  misc_feature: MA Experiment 20001558 PARAMETER Experiment Name: At_Drought_Soil_Dry_P Parameter: Post-Treatment Value: Re-Water vs. No Drought
  misc_feature: MA Experiment 20001558 PARAMETER Experiment Name: At_Drought_Soil_Dry_P Parameter: Timepoint (day) Value: 13
  misc_feature: MA Experiment 20001558 PARAMETER Experiment Name: At_Drought_Soil_Dry_P Parameter: Treatment Value: Drought vs. No Drought
  misc_feature: MA Experiment ID: 20001757 Result: Up-regulated in Transcription
  misc_feature: MA Experiment 20001757 PARAMETER Experiment Name: At_50mM_NH4NO3_L-to-H_P Parameter: Timepoint (hr) Value: 6
  misc_feature: MA Experiment 20001757 PARAMETER Experiment Name: At_50mM_NH4NO3_L-to-H_P Parameter: Tissue Value: Leaf
  misc_feature: MA Experiment 20001757 PARAMETER Experiment Name: At_50mM_NH4NO3_L-to-H_P Parameter: Treatment Value: 50mM NH4NO3 vs 100mM Mannitol

SEQ ID NO: 94575 - protein, 450 aa, Arabidopsis thaliana; identical to SEQ ID NO: 90819
  peptide (1)..(450): Ceres Seq. ID no. 12725403
  misc_feature (88)..(427): Pfam Name: mTERF Pfam Description: mTERF
  misc_feature (1)..(450): Homolog of NCBI NO: 15232683 NR Description: putative protein; protein id: At3g46950.1, by cDNA: gi_15028090 [Arabidopsis thaliana]
  misc_feature (1)..(444): Homolog of NCBI NO: 15220660 NR Description: hypothetical protein; protein id: At1g61960.1
  misc_feature (1)..(444): Homolog of NCBI NO: 26450011 NR Description: unknown protein [Arabidopsis thaliana]
  misc_feature (1)..(450): Homolog of NCBI NO: 25345734 NR Description: hypothetical protein F19K23.4 [imported] - thaliana >gi|2160136|gb|AAB60758.1| F19K23.4 gene product
  misc_feature (1)..(450): Homolog of NCBI NO: 30696656 NR Description: expressed protein [Arabidopsis thaliana] unknown protein [Arabidopsis thaliana]
  misc_feature (22)..(450): Homolog of NCBI NO: 15220696 NR Description: hypothetical protein; protein id: At1g62090.1
  misc_feature (3)..(450): Homolog of NCBI NO: 15220717 NR Description: hypothetical protein; protein id: At1g62150.1 thaliana] >gi|26452931|dbj|BAC43542.1| unknown protein thaliana] >gi|28973555|gb|AAO64102.1| unknown protein
  misc_feature (3)..(450): Homolog of NCBI NO: 25345736 NR Description: hypothetical protein F19K23.9 [imported] - thaliana >gi|2160140|gb|AAB60762.1| F19K23.9 gene product
  misc_feature (1)..(444): Homolog of NCBI NO: 15237856 NR Description: putative protein; protein id: At5g23930.1 thaliana] >gi|10176860|dbj|BAB10066.1|
  misc_feature (124)..(300): Homolog of NCBI NO: 15221482 NR Description: hypothetical protein; protein id: At1g62490.1

SEQ ID NO: 94576 - protein, 284 aa, Arabidopsis thaliana; identical to SEQ ID NO: 90820
  peptide (1)..(284): Ceres Seq. ID no. 12725404
  misc_feature (1)..(261): Pfam Name: mTERF Pfam Description: mTERF
  misc_feature (1)..(284): Homolog of NCBI NO: 15232683 NR Description: putative protein; protein id: At3g46950.1, by cDNA: gi_15028090 [Arabidopsis thaliana]
  misc_feature (1)..(278): Homolog of NCBI NO: 15220660 NR Description: hypothetical protein; protein id: At1g61960.1
  misc_feature (1)..(278): Homolog of NCBI NO: 26450011 NR Description: unknown protein [Arabidopsis thaliana]
  misc_feature (1)..(284): Homolog of NCBI NO: 25345734 NR Description: hypothetical protein F19K23.4 [imported] - thaliana >gi|2160136|gb|AAB60758.1| F19K23.4 gene product
  misc_feature (1)..(284): Homolog of NCBI NO: 30696656 NR Description: expressed protein [Arabidopsis thaliana] unknown protein [Arabidopsis thaliana]
  misc_feature (1)..(284): Homolog of NCBI NO: 15220696 NR Description: hypothetical protein; protein id: At1g62090.1
  misc_feature (1)..(284): Homolog of NCBI NO: 15220717 NR Description: hypothetical protein; protein id: At1g62150.1 thaliana] >gi|26452931|dbj|BAC43542.1| unknown protein thaliana] >gi|28973555|gb|AAO64102.1| unknown protein
  misc_feature (1)..(284): Homolog of NCBI NO: 25345736 NR Description: hypothetical protein F19K23.9 [imported] - thaliana >gi|2160140|gb|AAB60762.1| F19K23.9 gene product
  misc_feature (1)..(278): Homolog of NCBI NO: 15237856 NR Description: putative protein; protein id: At5g23930.1 thaliana] >gi|10176860|dbj|BAB10066.1|
  misc_feature (1)..(134): Homolog of NCBI NO: 15221482 NR Description: hypothetical protein; protein id: At1g62490.1

SEQ ID NO: 94577 - DNA, 2775 bp, Arabidopsis thaliana; identical to SEQ ID NO: 90821
  misc_feature (1)..(2775): Ceres Seq. ID no. 12725424
  misc_feature: MA Experiment ID: 20000315 Result: Down-regulated in Transcription
  misc_feature: MA Experiment 20000315 PARAMETER Experiment Name: At_14day_Shoots-Roots_Sub_P Parameter: Age (day) Value: 14
  misc_feature: MA Experiment 20000315 PARAMETER Experiment Name: At_14day_Shoots-Roots_Sub_P Parameter: Organism Value: A. thaliana
  misc_feature: MA Experiment 20000315 PARAMETER Experiment Name: At_14day_Shoots-Roots_Sub_P Parameter: Plant Line Value: WS
  misc_feature: MA Experiment 20000315 PARAMETER Experiment Name: At_14day_Shoots-Roots_Sub_P Parameter: Tissue Value: Shoots vs. Whole Plant
  misc_feature: MA Experiment ID: 20000327 Result: Down-regulated in Transcription
  misc_feature: MA Experiment 20000327 PARAMETER Experiment Name: At_42deg_Heat_Sub_P Parameter: Age (day) Value: 14
  misc_feature: MA Experiment 20000327 PARAMETER Experiment Name: At_42deg_Heat_Sub_P Parameter: Organism Value: A. thaliana
  misc_feature: MA Experiment 20000327 PARAMETER Experiment Name: At_42deg_Heat_Sub_P Parameter: Plant Line Value: WS
  misc_feature: MA Experiment 20000327 PARAMETER Experiment Name: At_42deg_Heat_Sub_P Parameter: Temperature (deg C) Value: 42 vs. 22
  misc_feature: MA Experiment 20000327 PARAMETER Experiment Name: At_42deg_Heat_Sub_P Parameter: Timepoint (hr) Value: 1
  misc_feature: MA Experiment 20000327 PARAMETER Experiment Name: At_42deg_Heat_Sub_P Parameter: Tissue Value: Aerial
  misc_feature: MA Experiment ID: 20000328 Result: Down-regulated in Transcription
  misc_feature: MA Experiment 20000328 PARAMETER Experiment Name: At_42deg_Heat_Sub_P Parameter: Age (day) Value: 14
  misc_feature: MA Experiment 20000328 PARAMETER Experiment Name: At_42deg_Heat_Sub_P Parameter: Organism Value: A. thaliana
  misc_feature: MA Experiment 20000328 PARAMETER Experiment Name: At_42deg_Heat_Sub_P Parameter: Plant Line Value: WS
  misc_feature: MA Experiment 20000328 PARAMETER Experiment Name: At_42deg_Heat_Sub_P Parameter: Temperature (deg C) Value: 42 vs. 22
  misc_feature: MA Experiment 20000328 PARAMETER Experiment Name: At_42deg_Heat_Sub_P Parameter: Timepoint (hr) Value: 6
  misc_feature: MA Experiment 20000328 PARAMETER Experiment Name: At_42deg_Heat_Sub_P Parameter: Tissue Value: Aerial

SEQ ID NO: 94578 - protein, 806 aa, Arabidopsis thaliana; identical to SEQ ID NO: 90822
  peptide (1)..(806): Ceres Seq. ID no. 12725425
  misc_feature (560)..(777): Pfam Name: Peptidase family M41 Pfam Description: Peptidase family M41
  misc_feature (231)..(794): Homolog of NCBI NO: 17232428 NR Description: cell division protein [Nostoc sp. PCC 7120]
  misc_feature (216)..(781): Homolog of NCBI NO: 23124397 NR Description: hypothetical protein [Nostoc punctiforme]
  misc_feature (216)..(784): Homolog of NCBI NO: 22298071 NR Description: cell division protein [Thermosynechococcus BP-1] >gi|22294249|dbj|BAC08080.1| cell division protein
  misc_feature (241)..(788): Homolog of NCBI NO: 33866121 NR Description: cell division protein FtsH3 [Synechococcus sp. WH >gi|33639096|emb|CAE08102.1| cell division protein FtsH3
  misc_feature (241)..(784): Homolog of NCBI NO: 33861820 NR Description: cell division protein FtsH3 [Prochlorococcus subsp. pastoris str. CCMP1378] >gi|33640188|emb|CAE19723.1| cell protein FtsH3 [Prochlorococcus marinus subsp. pastoris str.
  misc_feature (217)..(786): Homolog of NCBI NO: 33240787 NR Description: Cell division protein FtsH [Prochlorococcus subsp. marinus str. CCMP1375] >gi|33238316|gb|AAQ00382.1| Cell protein FtsH [Prochlorococcus marinus subsp. marinus str.
  misc_feature (181)..(789): Homolog of NCBI NO: 16330069 NR Description: cell division protein; FtsH [Synechocystis sp.
  misc_feature (243)..(789): Homolog of NCBI NO: 33862651 NR Description: cell division protein FtsH3 [Prochlorococcus str. MIT 9313] >gi|33634567|emb|CAE20553.1| cell division protein
  misc_feature (322)..(783): Homolog of NCBI NO: 37522710 NR Description: cell division protein [Gloeobacter violaceus]
  misc_feature (255)..(784): Homolog of NCBI NO: 23043520 NR Description: hypothetical protein [Trichodesmium erythraeum

SEQ ID NO: 94579 - protein, 802 aa, Arabidopsis thaliana; identical to SEQ ID NO: 90823
  peptide (1)..(802): Ceres Seq. ID no. 12725426
  misc_feature (556)..(773): Pfam Name: Peptidase family M41 Pfam Description: Peptidase family M41
  misc_feature (227)..(790): Homolog of NCBI NO: 17232428 NR Description: cell division protein [Nostoc sp. PCC 7120]
  misc_feature (212)..(777): Homolog of NCBI NO: 23124397 NR Description: hypothetical protein [Nostoc punctiforme]
  misc_feature (212)..(780): Homolog of NCBI NO: 22298071 NR Description: cell division protein [Thermosynechococcus BP-1] >gi|22294249|dbj|BAC08080.1| cell division protein
  misc_feature (237)..(784): Homolog of NCBI NO: 33866121 NR Description: cell division protein FtsH3 [Synechococcus sp. WH >gi|33639096|emb|CAE08102.1| cell division protein FtsH3
  misc_feature (237)..(780): Homolog of NCBI NO: 33861820 NR Description: cell division protein FtsH3 [Prochlorococcus subsp. pastoris str. CCMP1378] >gi|33640188|emb|CAE19723.1| cell protein FtsH3 [Prochlorococcus marinus subsp. pastoris str.
  misc_feature (213)..(782): Homolog of NCBI NO: 33240787 NR Description: Cell division protein FtsH [Prochlorococcus subsp. marinus str. CCMP1375] >gi|33238316|gb|AAQ00382.1| Cell protein FtsH [Prochlorococcus marinus subsp. marinus str.
  misc_feature (177)..(785): Homolog of NCBI NO: 16330069 NR Description: cell division protein; FtsH [Synechocystis sp.
  misc_feature (239)..(785): Homolog of NCBI NO: 33862651 NR Description: cell division protein FtsH3 [Prochlorococcus str. MIT 9313] >gi|33634567|emb|CAE20553.1| cell division protein
  misc_feature (318)..(779): Homolog of NCBI NO: 37522710 NR Description: cell division protein [Gloeobacter violaceus]
  misc_feature (251)..(780): Homolog of NCBI NO: 23043520 NR Description: hypothetical protein [Trichodesmium erythraeum

SEQ ID NO: 94580 - protein, 652 aa, Arabidopsis thaliana; identical to SEQ ID NO: 90824
  peptide (1)..(652): Ceres Seq. ID no. 12725427
  misc_feature (406)..(623): Pfam Name: Peptidase family M41 Pfam Description: Peptidase family M41
  misc_feature (77)..(640): Homolog of NCBI NO: 17232428 NR Description: cell division protein [Nostoc sp. PCC 7120]
  misc_feature (62)..(627): Homolog of NCBI NO: 23124397 NR Description: hypothetical protein [Nostoc punctiforme]
  misc_feature (62)..(630): Homolog of NCBI NO: 22298071 NR Description: cell division protein [Thermosynechococcus BP-1] >gi|22294249|dbj|BAC08080.1| cell division protein
  misc_feature (87)..(634): Homolog of NCBI NO: 33866121 NR Description: cell division protein FtsH3 [Synechococcus sp. WH >gi|33639096|emb|CAE08102.1| cell division protein FtsH3
  misc_feature (87)..(630): Homolog of NCBI NO: 33861820 NR Description: cell division protein FtsH3 [Prochlorococcus subsp. pastoris str. CCMP1378] >gi|33640188|emb|CAE19723.1| cell protein FtsH3 [Prochlorococcus marinus subsp. pastoris str.
  misc_feature (63)..(632): Homolog of NCBI NO: 33240787 NR Description: Cell division protein FtsH [Prochlorococcus subsp. marinus str. CCMP1375] >gi|33238316|gb|AAQ00382.1| Cell protein FtsH [Prochlorococcus marinus subsp. marinus str.
  misc_feature (27)..(635): Homolog of NCBI NO: 16330069 NR Description: cell division protein; FtsH [Synechocystis sp.
  misc_feature (89)..(635): Homolog of NCBI NO: 33862651 NR Description: cell division protein FtsH3 [Prochlorococcus str. MIT 9313] >gi|33634567|emb|CAE20553.1| cell division protein
  misc_feature (168)..(629): Homolog of NCBI NO: 37522710 NR Description: cell division protein [Gloeobacter violaceus]
  misc_feature (101)..(630): Homolog of NCBI NO: 23043520 NR Description: hypothetical protein [Trichodesmium erythraeum

SEQ ID NO: 94581 - DNA, 3030 bp, Arabidopsis thaliana; identical to SEQ ID NO: 90825
  misc_feature (1)..(3030): Ceres Seq. ID no. 12725428
  misc_feature: MA Experiment ID: 20000347 Result: Up-regulated in Transcription
  misc_feature: MA Experiment 20000347 PARAMETER Experiment Name: At_2mM_SA_Sub_P Parameter: Age (day) Value: 14
  misc_feature: MA Experiment 20000347 PARAMETER Experiment Name: At_2mM_SA_Sub_P Parameter: Organism Value: A. thaliana
  misc_feature: MA Experiment 20000347 PARAMETER Experiment Name: At_2mM_SA_Sub_P Parameter: Plant Line Value: WS
  misc_feature: MA Experiment 20000347 PARAMETER Experiment Name: At_2mM_SA_Sub_P Parameter: Timepoint (hr) Value: 6
  misc_feature: MA Experiment 20000347 PARAMETER Experiment Name: At_2mM_SA_Sub_P Parameter: Tissue Value: Aerial
  misc_feature: MA Experiment 20000347 PARAMETER Experiment Name: At_2mM_SA_Sub_P Parameter: Treatment Value: 2mM SA vs. No Treatment
  misc_feature: MA Experiment ID: 20000348 Result: Down-regulated in Transcription
  misc_feature: MA Experiment 20000348 PARAMETER Experiment Name: At_100uM_ABA_Sub_P Parameter: Age (day) Value: 14
  misc_feature: MA Experiment 20000348 PARAMETER Experiment Name: At_100uM_ABA_Sub_P Parameter: Organism Value: A. thaliana
  misc_feature: MA Experiment 20000348 PARAMETER Experiment Name: At_100uM_ABA_Sub_P Parameter: Plant Line Value: WS
  misc_feature: MA Experiment 20000348 PARAMETER Experiment Name: At_100uM_ABA_Sub_P Parameter: Timepoint (hr) Value: 1
  misc_feature: MA Experiment 20000348 PARAMETER Experiment Name: At_100uM_ABA_Sub_P Parameter: Tissue Value: Aerial
  misc_feature: MA Experiment 20000348 PARAMETER Experiment Name: At_100uM_ABA_Sub_P Parameter: Treatment Value: 100uM ABA vs. No Treatment

SEQ ID NO: 94582 - protein, 1009 aa, Arabidopsis thaliana; identical to SEQ ID NO: 90826
  peptide (1)..(1009): Ceres Seq. ID no. 12725429
  misc_feature (1)..(1006): Homolog of NCBI NO: 15241369 NR Description: leucine-rich repeat transmembrane protein kinase, protein id: At5g20480.1, supported by cDNA: gi_18700170
  misc_feature (1)..(1006): Homolog of NCBI NO: 18700171 NR Description: AT5g20480/F7C8_70 [Arabidopsis thaliana]
  misc_feature (21)..(1006): Homolog of NCBI NO: 15232728 NR Description: leucine-rich repeat transmembrane protein kinase, protein id: At3g47110.1 [Arabidopsis thaliana]
  misc_feature (3)..(998): Homolog of NCBI NO: 2130082 NR Description: protein kinase Xa21 (EC 2.7.1.-), receptor type
  misc_feature (25)..(998): Homolog of NCBI NO: 30421165 NR Description: putative receptor kinase [Hordeum vulgare]
  misc_feature (67)..(996): Homolog of NCBI NO: 37533650 NR Description: putative Receptor-like protein kinase [Oryza
  misc_feature (71)..(1000): Homolog of NCBI NO: 34904254 NR Description: Oryza sativa leucine rich repeat containing
  misc_feature (68)..(923): Homolog of NCBI NO: 37530616 NR Description: putative protein kinase [Oryza sativa (japonica group)] >gi|16924042|gb|AAL31654.1| Putative protein kinase sativa] >gi|20042880|gb|AAM08708.1| Putative protein kinase
  misc_feature (64)..(919): Homolog of NCBI NO: 18086327 NR Description: AT4g08850/T32A17_160 [Arabidopsis thaliana]
  misc_feature (64)..(919): Homolog of NCBI NO: 25407456 NR Description: receptor protein kinase-like protein [imported] -

SEQ ID NO: 94583 - protein, 997 aa, Arabidopsis thaliana; identical to SEQ ID NO: 90827
  peptide (1)..(997): Ceres Seq. ID no. 12725430
  misc_feature (1)..(994): Homolog of NCBI NO: 15241369 NR Description: leucine-rich repeat transmembrane protein kinase, protein id: At5g20480.1, supported by cDNA: gi_18700170
  misc_feature (1)..(994): Homolog of NCBI NO: 18700171 NR Description: AT5g20480/F7C8_70 [Arabidopsis thaliana]
  misc_feature (9)..(994): Homolog of NCBI NO: 15232728 NR Description: leucine-rich repeat transmembrane protein kinase, protein id: At3g47110.1 [Arabidopsis thaliana]
  misc_feature (1)..(986): Homolog of NCBI NO: 2130082 NR Description: protein kinase Xa21 (EC 2.7.1.-), receptor type
  misc_feature (13)..(986): Homolog of NCBI NO: 30421165 NR Description: putative receptor kinase [Hordeum vulgare]
  misc_feature (55)..(984): Homolog of NCBI NO: 37533650 NR Description: putative Receptor-like protein kinase [Oryza
  misc_feature (59)..(988): Homolog of NCBI NO: 34904254 NR Description: Oryza sativa leucine rich repeat containing
  misc_feature (56)..(911): Homolog of NCBI NO: 37530616 NR Description: putative protein kinase [Oryza sativa (japonica group)] >gi|16924042|gb|AAL31654.1| Putative protein kinase sativa] >gi|20042880|gb|AAM08708.1| Putative protein kinase
  misc_feature (52)..(907): Homolog of NCBI NO: 18086327 NR Description: AT4g08850/T32A17_160 [Arabidopsis thaliana]
  misc_feature (52)..(907): Homolog of NCBI NO: 25407456 NR Description: receptor protein kinase-like protein [imported] -

SEQ ID NO: 94584 - protein, 900 aa, Arabidopsis thaliana; identical to SEQ ID NO: 90828
  peptide (1)..(900): Ceres Seq. ID no. 12725431
  misc_feature (1)..(897): Homolog of NCBI NO: 15241369 NR Description: leucine-rich repeat transmembrane protein kinase, protein id: At5g20480.1, supported by cDNA: gi_18700170
  misc_feature (1)..(897): Homolog of NCBI NO: 18700171 NR Description: AT5g20480/F7C8_70 [Arabidopsis thaliana]
  misc_feature (1)..(897): Homolog of NCBI NO: 15232728 NR Description: leucine-rich repeat transmembrane protein kinase, protein id: At3g47110.1 [Arabidopsis thaliana]
  misc_feature (1)..(889): Homolog of NCBI NO: 2130082 NR Description: protein kinase Xa21 (EC 2.7.1.-), receptor type
  misc_feature (1)..(889): Homolog of NCBI NO: 30421165 NR Description: putative receptor kinase [Hordeum vulgare]
  misc_feature (1)..(887): Homolog of NCBI NO: 37533650 NR Description: putative Receptor-like protein kinase [Oryza
  misc_feature (1)..(891): Homolog of NCBI NO: 34904254 NR Description: Oryza sativa leucine rich repeat containing
  misc_feature (1)..(814): Homolog of NCBI NO: 37530616 NR Description: putative protein kinase [Oryza sativa (japonica group)] >gi|16924042|gb|AAL31654.1| Putative protein kinase sativa] >gi|20042880|gb|AAM08708.1| Putative protein kinase
  misc_feature (1)..(810): Homolog of NCBI NO: 18086327 NR Description: AT4g08850/T32A17_160 [Arabidopsis thaliana]
  misc_feature (1)..(810): Homolog of NCBI NO: 25407456 NR Description: receptor protein kinase-like protein [imported] -

SEQ ID NO: 94585 - DNA, 3078 bp, Arabidopsis thaliana; identical to SEQ ID NO: 90829
  misc_feature (1)..(3078): Ceres Seq. ID no. 12725432
  misc_feature: MA Experiment ID: 20000180 Result: Down-regulated in Transcription
  misc_feature: MA Experiment 20000180 PARAMETER Experiment Name: At_Germinating_Seeds_P Parameter: Age (hr) Value: 24 vs. 0
  misc_feature: MA Experiment 20000180 PARAMETER Experiment Name: At_Germinating_Seeds_P Parameter: Tissue Value: Germinating Seeds
  misc_feature: MA Experiment ID: 20000439 Result: Up-regulated in Transcription
  misc_feature: MA Experiment 20000439 PARAMETER Experiment Name: At_Roots__P Parameter: Age (day) Value: 14 vs. 21
  misc_feature: MA Experiment 20000439 PARAMETER Experiment Name: At_Roots__P Parameter: Organism Value: A. thaliana
  misc_feature: MA Experiment 20000439 PARAMETER Experiment Name: At_Roots__P Parameter: Tissue Value: Roots vs. Whole Plant

SEQ ID NO: 94586 - protein, 1025 aa, Arabidopsis thaliana; identical to SEQ ID NO: 90830
  peptide (1)..(1025): Ceres Seq. ID no. 12725433
  misc_feature (36)..(1025): Homolog of NCBI NO: 15228201 NR Description: leucine-rich repeat transmembrane protein kinase, protein id: At3g47580.1, supported by cDNA: gi_16604568
  misc_feature (36)..(1025): Homolog of NCBI NO: 15232726 NR Description: leucine-rich repeat transmembrane protein kinase, protein id: At3g47090.1 [Arabidopsis thaliana]
  misc_feature (22)..(1025): Homolog of NCBI NO: 17381114 NR Description: putative receptor kinase [Arabidopsis thaliana]
  misc_feature (22)..(1025): Homolog of NCBI NO: 18408454 NR Description: leucine-rich repeat transmembrane protein kinase, protein id: At3g47570.1, supported by cDNA: gi_15810450,
  misc_feature (22)..(971): Homolog of NCBI NO: 11260272 NR Description: receptor-kinase like protein - Arabidopsis
  misc_feature (923)..(1025): Homolog of NCBI NO: 11260272 NR Description: receptor-kinase like protein - Arabidopsis
  misc_feature (7)..(1017): Homolog of NCBI NO: 30421165 NR Description: putative receptor kinase [Hordeum vulgare]
  misc_feature (6)..(1018): Homolog of NCBI NO: 2130082 NR Description: protein kinase Xa21 (EC 2.7.1.-), receptor type
  misc_feature (81)..(823): Homolog of NCBI NO: 38424017 NR Description: putative protein kinase Xa21 [Oryza sativa
  misc_feature (38)..(640): Homolog of NCBI NO: 34915202 NR Description: putative receptor-like protein kinase 1 [Oryza

SEQ ID NO: 94587 - protein, 1018 aa, Arabidopsis thaliana; identical to SEQ ID NO: 90831
  peptide (1)..(1018): Ceres Seq. ID no. 12725434
  misc_feature (29)..(1018): Homolog of NCBI NO: 15228201 NR Description: leucine-rich repeat transmembrane protein kinase, protein id: At3g47580.1, supported by cDNA: gi_16604568
  misc_feature (29)..(1018): Homolog of NCBI NO: 15232726 NR Description: leucine-rich repeat transmembrane protein kinase, protein id: At3g47090.1 [Arabidopsis thaliana]
  misc_feature (15)..(1018): Homolog of NCBI NO: 17381114 NR Description: putative receptor kinase [Arabidopsis thaliana]
  misc_feature (15)..(1018): Homolog of NCBI NO: 18408454 NR Description: leucine-rich repeat transmembrane protein kinase, protein id: At3g47570.1, supported by cDNA: gi_15810450,
  misc_feature (15)..(964): Homolog of NCBI NO: 11260272 NR Description: receptor-kinase like protein - Arabidopsis
  misc_feature (916)..(1018): Homolog of NCBI NO: 11260272 NR Description: receptor-kinase like protein - Arabidopsis
  misc_feature (1)..(1010): Homolog of NCBI NO: 30421165 NR Description: putative receptor kinase [Hordeum vulgare]
  misc_feature (1)..(1011): Homolog of NCBI NO: 2130082 NR Description: protein kinase Xa21 (EC 2.7.1.-), receptor type
  misc_feature (74)..(816): Homolog of NCBI NO: 38424017 NR Description: putative protein kinase Xa21 [Oryza sativa
  misc_feature (31)..(633): Homolog of NCBI NO: 34915202 NR Description: putative receptor-like protein kinase 1 [Oryza

SEQ ID NO: 94588 - protein, 999 aa, Arabidopsis thaliana; identical to SEQ ID NO: 90832
  peptide (1)..(999): Ceres Seq. ID no. 12725435
  misc_feature (10)..(999): Homolog of NCBI NO: 15228201 NR Description: leucine-rich repeat transmembrane protein kinase, protein id: At3g47580.1, supported by cDNA: gi_16604568
  misc_feature (10)..(999): Homolog of NCBI NO: 15232726 NR Description: leucine-rich repeat transmembrane protein kinase, protein id: At3g47090.1 [Arabidopsis thaliana]
  misc_feature (1)..(999): Homolog of NCBI NO: 17381114 NR Description: putative receptor kinase [Arabidopsis thaliana]
  misc_feature (1)..(999): Homolog of NCBI NO: 18408454 NR Description: leucine-rich repeat transmembrane protein kinase, protein id: At3g47570.1, supported by cDNA: gi_15810450,
  misc_feature (1)..(945): Homolog of NCBI NO: 11260272 NR Description: receptor-kinase like protein - Arabidopsis
  misc_feature (897)..(999): Homolog of NCBI NO: 11260272 NR Description: receptor-kinase like protein - Arabidopsis
  misc_feature (1)..(991): Homolog of NCBI NO: 30421165 NR Description: putative receptor kinase [Hordeum vulgare]
  misc_feature (1)..(992): Homolog of NCBI NO: 2130082 NR Description: protein kinase Xa21 (EC 2.7.1.-), receptor type
  misc_feature (55)..(797): Homolog of NCBI NO: 38424017 NR Description: putative protein kinase Xa21 [Oryza sativa
  misc_feature (12)..(614): Homolog of NCBI NO: 34915202 NR Description: putative receptor-like protein kinase 1 [Oryza

SEQ ID NO: 94589 - DNA, 1747 bp, Arabidopsis thaliana; identical to SEQ ID NO: 90833
  misc_feature (1)..(1747): Ceres Seq. ID no. 12725463
  misc_feature: MA Experiment ID: 20000314 Result: Down-regulated in Transcription
  misc_feature: MA Experiment 20000314 PARAMETER Experiment Name: At_14day_Shoots-Roots_Sub_P Parameter: Age (day) Value: 14
  misc_feature: MA Experiment 20000314 PARAMETER Experiment Name: At_14day_Shoots-Roots_Sub_P Parameter: Organism Value: A. thaliana
  misc_feature: MA Experiment 20000314 PARAMETER Experiment Name: At_14day_Shoots-Roots_Sub_P Parameter: Plant Line Value: WS
  misc_feature: MA Experiment 20000314 PARAMETER Experiment Name: At_14day_Shoots-Roots_Sub_P Parameter: Tissue Value: Roots vs. Whole Plant
  misc_feature: MA Experiment ID: 20000355 Result: Down-regulated in Transcription
  misc_feature: MA Experiment 20000355 PARAMETER Experiment Name: At_Siliques_Sub_P Parameter: Age (day) Value: 21
  misc_feature: MA Experiment 20000355 PARAMETER Experiment Name: At_Siliques_Sub_P Parameter: Organism Value: A. thaliana
  misc_feature: MA Experiment 20000355 PARAMETER Experiment Name: At_Siliques_Sub_P Parameter: Plant Line Value: WS
  misc_feature: MA Experiment 20000355 PARAMETER Experiment Name: At_Siliques_Sub_P Parameter: Tissue Value: Less Than 5mm Siliques vs. Whole Plant
  misc_feature: MA Experiment ID: 20000440 Result: Down-regulated in Transcription
  misc_feature: MA Experiment 20000440 PARAMETER Experiment Name: At_Closed-Flower__Sub_P Parameter: Tissue Value: Closed Flower vs. Whole Plant

SEQ ID NO: 94590 - protein, 480 aa, Arabidopsis thaliana; identical to SEQ ID NO: 77000
  peptide (1)..(480): Ceres Seq. ID no. 12725464
  misc_feature (56)..(465): Pfam Name: Plant protein of unknown function Pfam Description: Plant protein of unknown function
  misc_feature (1)..(480): Homolog of NCBI NO: 15232754 NR Description: putative protein; protein id: At3g47250.1, by cDNA: gi_17528937, supported by cDNA: gi_20465944 [Arabidopsis >gi|6706134|emb|CAB61971.2| putative protein [Arabidopsis
  misc_feature (1)..(480): Homolog of NCBI NO: 22655194 NR Description: unknown protein [Arabidopsis thaliana]
  misc_feature (1)..(480): Homolog of NCBI NO: 11291796 NR Description: hypothetical protein F13I12.300 - Arabidopsis
  misc_feature (41)..(480): Homolog of NCBI NO: 15232748 NR Description: putative protein; protein id: At3g47200.1
  misc_feature (23)..(434): Homolog of NCBI NO: 15232749 NR Description: putative protein; protein id: At3g47210.1, by cDNA: gi_17978925 [Arabidopsis thaliana]
  misc_feature (35)..(476): Homolog of NCBI NO: 15242911 NR Description: putative protein; protein id: At5g22540.1 thaliana] >gi|9758660|dbj|BAB09126.1|
  misc_feature (245)..(477): Homolog of NCBI NO: 15230487 NR Description: putative protein; protein id: At3g44710.1
  misc_feature (44)..(263): Homolog of NCBI NO: 15230487 NR Description: putative protein; protein id: At3g44710.1
  misc_feature (264)..(476): Homolog of NCBI NO: 9758661 NR Description: emb|CAB72473.1~gene_id:MQJ16.9~strong similarity
  misc_feature (49)..(262): Homolog of NCBI NO: 9758661 NR Description: emb|CAB72473.1~gene_id:MQJ16.9~strong similarity

SEQ ID NO: 94591 - protein, 384 aa, Arabidopsis thaliana; identical to SEQ ID NO: 77001
  peptide (1)..(384): Ceres Seq. ID no. 12725465
  misc_feature (1)..(369): Pfam Name: Plant protein of unknown function Pfam Description: Plant protein of unknown function
  misc_feature (1)..(384): Homolog of NCBI NO: 15232754 NR Description: putative protein; protein id: At3g47250.1, by cDNA: gi_17528937, supported by cDNA: gi_20465944 [Arabidopsis >gi|6706134|emb|CAB61971.2| putative protein [Arabidopsis
  misc_feature (1)..(384): Homolog of NCBI NO: 22655194 NR Description: unknown protein [Arabidopsis thaliana]
  misc_feature (1)..(384): Homolog of NCBI NO: 11291796 NR Description: hypothetical protein F13I12.300 - Arabidopsis
  misc_feature (1)..(384): Homolog of NCBI NO: 15232748 NR Description: putative protein; protein id: At3g47200.1
  misc_feature (1)..(338): Homolog of NCBI NO: 15232749 NR Description: putative protein; protein id: At3g47210.1, by cDNA: gi_17978925 [Arabidopsis thaliana]
  misc_feature (1)..(380): Homolog of NCBI NO: 15242911 NR Description: putative protein; protein id: At5g22540.1 thaliana] >gi|9758660|dbj|BAB09126.1|
  misc_feature (149)..(381): Homolog of NCBI NO: 15230487 NR Description: putative protein; protein id: At3g44710.1
  misc_feature (1)..(167): Homolog of NCBI NO: 15230487 NR Description: putative protein; protein id: At3g44710.1
  misc_feature (168)..(380): Homolog of NCBI NO: 9758661 NR Description: emb|CAB72473.1~gene_id:MQJ16.9~strong similarity
  misc_feature (1)..(166): Homolog of NCBI NO: 9758661 NR Description: emb|CAB72473.1~gene_id:MQJ16.9~strong similarity

SEQ ID NO: 94592 - protein, 363 aa, Arabidopsis thaliana; identical to SEQ ID NO: 77002
  peptide (1)..(363): Ceres Seq. ID no. 12725466
  misc_feature (1)..(348): Pfam Name: Plant protein of unknown function Pfam Description: Plant protein of unknown function
  misc_feature (1)..(363): Homolog of NCBI NO: 15232754 NR Description: putative protein; protein id: At3g47250.1, by cDNA: gi_17528937, supported by cDNA: gi_20465944 [Arabidopsis >gi|6706134|emb|CAB61971.2| putative protein [Arabidopsis
  misc_feature (1)..(363): Homolog of NCBI NO: 22655194 NR Description: unknown protein [Arabidopsis thaliana]
  misc_feature (1)..(363): Homolog of NCBI NO: 11291796 NR Description: hypothetical protein F13I12.300 - Arabidopsis
  misc_feature (1)..(363): Homolog of NCBI NO: 15232748 NR Description: putative protein; protein id: At3g47200.1
  misc_feature (1)..(317): Homolog of NCBI NO: 15232749 NR Description: putative protein; protein id: At3g47210.1, by cDNA: gi_17978925 [Arabidopsis thaliana]
  misc_feature (1)..(359): Homolog of NCBI NO: 15242911 NR Description: putative protein; protein id: At5g22540.1 thaliana] >gi|9758660|dbj|BAB09126.1|
  misc_feature (128)..(360): Homolog of NCBI NO: 15230487 NR Description: putative protein; protein id: At3g44710.1
  misc_feature (1)..(146): Homolog of NCBI NO: 15230487 NR Description: putative protein; protein id: At3g44710.1
  misc_feature (147)..(359): Homolog of NCBI NO: 9758661 NR Description: emb|CAB72473.1~gene_id:MQJ16.9~strong similarity
  misc_feature (1)..(145): Homolog of NCBI NO: 9758661 NR Description: emb|CAB72473.1~gene_id:MQJ16.9~strong similarity

SEQ ID NO: 94593 - DNA, 930 bp, Arabidopsis thaliana; identical to SEQ ID NO: 90837
  misc_feature (1)..(930): Ceres Seq. ID no. 12725478
  misc_feature: MA Experiment ID: 20000185 Result: Up-regulated in Transcription
  misc_feature: MA Experiment 20000185 PARAMETER Experiment Name: At_Roots__P Parameter: Age (day) Value: 7 vs. 21
  misc_feature: MA Experiment 20000185 PARAMETER Experiment Name: At_Roots__P Parameter: Organism Value: A. thaliana
  misc_feature: MA Experiment 20000185 PARAMETER Experiment Name: At_Roots__P Parameter: Tissue Value: Roots vs. Whole Plant
  misc_feature: MA Experiment ID: 20000265 Result: Up-regulated in Transcription
  misc_feature: MA Experiment 20000265 PARAMETER Experiment Name: At_Open_Flower_P Parameter: Age (day) Value: 21
  misc_feature: MA Experiment 20000265 PARAMETER Experiment Name: At_Open_Flower_P Parameter: Plant Line Value: WS
  misc_feature: MA Experiment 20000265 PARAMETER Experiment Name: At_Open_Flower_P Parameter: Tissue Value: Closed Flower vs. Whole Plant
  misc_feature: MA Experiment ID: 20000437 Result: Up-regulated in Transcription
  misc_feature: MA Experiment 20000437 PARAMETER Experiment Name: At_Drought_P Parameter: Age (day) Value: 8
  misc_feature: MA Experiment 20000437 PARAMETER Experiment Name: At_Drought_P Parameter: Organism Value: A. thaliana
  misc_feature: MA Experiment 20000437 PARAMETER Experiment Name: At_Drought_P Parameter: Plant Line Value: WS
  misc_feature: MA Experiment 20000437 PARAMETER Experiment Name: At_Drought_P Parameter: Timepoint (hr) Value: 24
  misc_feature: MA Experiment 20000437 PARAMETER Experiment Name: At_Drought_P Parameter: Tissue Value: Whole Plant
  misc_feature: MA Experiment 20000437 PARAMETER Experiment Name: At_Drought_P Parameter: Treatment Value: Drought vs. No Drought
  misc_feature: MA Experiment ID: 20000439 Result: Up-regulated in Transcription
  misc_feature: MA Experiment 20000439 PARAMETER Experiment Name: At_Roots__P Parameter: Age (day) Value: 14 vs. 21
  misc_feature: MA Experiment 20000439 PARAMETER Experiment Name: At_Roots__P Parameter: Organism Value: A. thaliana
  misc_feature: MA Experiment 20000439 PARAMETER Experiment Name: At_Roots__P Parameter: Tissue Value: Roots vs. Whole Plant
  misc_feature: MA Experiment ID: 20000443 Result: Down-regulated in Transcription
  misc_feature: MA Experiment 20000443 PARAMETER Experiment Name: At_1uM_BR-BRZ__P Parameter: Tissue Value: Shoot Apices
  misc_feature: MA Experiment 20000443 PARAMETER Experiment Name: At_1uM_BR-BRZ__P Parameter: Treatment Value: 1uM BRZ vs. No Treatment
  misc_feature: MA Experiment ID: 20000495 Result: Up-regulated in Transcription
  misc_feature: MA Experiment 20000495 PARAMETER Experiment Name: At_Guard_Cells_P Parameter: Harvest Date Value: 8/2/2002
  misc_feature: MA Experiment 20000495 PARAMETER Experiment Name: At_Guard_Cells_P Parameter: Organism Value: A. thaliana
  misc_feature: MA Experiment 20000495 PARAMETER Experiment Name: At_Guard_Cells_P Parameter: Tissue Value: Guard Cells vs. Leaves
  misc_feature: MA Experiment ID: 20000573 Result: Down-regulated in Transcription
  misc_feature: MA Experiment 20000573 PARAMETER Experiment Name: At_100uM_ABA_Mutants__P Parameter: Organism Value: A. thaliana
  misc_feature: MA Experiment 20000573 PARAMETER Experiment Name: At_100uM_ABA_Mutants__P Parameter: Plant Line Value: CS22 vs. Ler wt
  misc_feature: MA Experiment 20000573 PARAMETER Experiment Name: At_100uM_ABA_Mutants__P Parameter: Timepoint (hr) Value: N/A
  misc_feature: MA Experiment 20000573 PARAMETER Experiment Name: At_100uM_ABA_Mutants__P Parameter: Tissue Value: Whole Plant
  misc_feature: MA Experiment 20000573 PARAMETER Experiment Name: At_100uM_ABA_Mutants__P Parameter: Treatment Value: None
  misc_feature: MA Experiment ID: 20000574 Result: Down-regulated in Transcription
  misc_feature: MA Experiment 20000574 PARAMETER Experiment Name: At_100uM_ABA_Mutants__P Parameter: Organism Value: A. thaliana
  misc_feature: MA Experiment 20000574 PARAMETER Experiment Name: At_100uM_ABA_Mutants__P Parameter: Plant Line Value: CS23 vs. Ler wt
  misc_feature: MA Experiment 20000574 PARAMETER Experiment Name: At_100uM_ABA_Mutants__P Parameter: Timepoint (hr) Value: N/A
  misc_feature: MA Experiment 20000574 PARAMETER Experiment Name: At_100uM_ABA_Mutants__P Parameter: Tissue Value: Whole Plant
  misc_feature: MA Experiment 20000574 PARAMETER Experiment Name: At_100uM_ABA_Mutants__P Parameter: Treatment Value: None

SEQ ID NO: 94594 - protein, 309 aa, Arabidopsis thaliana; identical to SEQ ID NO: 90838
  peptide (1)..(309): Ceres Seq. ID no. 12725479
  misc_feature (1)..(309): Homolog of NCBI NO: 15232779 NR Description: putative protein; protein id: At3g47360.1
  misc_feature (1)..(309): Homolog of NCBI NO: 15232777 NR Description: putative protein; protein id: At3g47350.1
  misc_feature (1)..(290): Homolog of NCBI NO: 15241203 NR Description: 11-beta-hydroxysteroid dehydrogenase-like;
  misc_feature (1)..(290): Homolog of NCBI NO: 8777392 NR Description: 11-beta-hydroxysteroid dehydrogenase-like
  misc_feature (1)..(300): Homolog of NCBI NO: 18423187 NR Description: 11-beta-hydroxysteroid dehydrogenase-like; id: At5g50600.1, supported by cDNA: gi_15450584, supported by gi_17065383, supported by cDNA: gi_17386149, supported by cDNA:
  misc_feature (1)..(300): Homolog of NCBI NO: 15824408 NR Description: steroleosin [Sesamum indicum]
  misc_feature (1)..(306): Homolog of NCBI NO: 15241261 NR Description: putative protein; protein id: At5g50770.1 thaliana] >gi|8777400|dbj|BAA96990.1| contains similarity to
  misc_feature (1)..(300): Homolog of NCBI NO: 21311775 NR Description: steroleosin-B [Sesamum indicum]
  misc_feature (1)..(297): Homolog of NCBI NO: 15234888 NR Description: putative oxidoreductase; protein id: At4g10020.1
  misc_feature (43)..(229): Homolog of NCBI NO: 24372033 NR Description: oxidoreductase, short chain

SEQ ID NO: 94595 - protein, 156 aa, Arabidopsis thaliana; identical to SEQ ID NO: 84779
  peptide (1)..(156): Ceres Seq. ID no. 12725480
  misc_feature (1)..(156): Homolog of NCBI NO: 15232779 NR Description: putative protein; protein id: At3g47360.1
  misc_feature (1)..(156): Homolog of NCBI NO: 15232777 NR Description: putative protein; protein id: At3g47350.1
  misc_feature (1)..(137): Homolog of NCBI NO: 15241203 NR Description: 11-beta-hydroxysteroid dehydrogenase-like;
  misc_feature (1)..(137): Homolog of NCBI NO: 8777392 NR Description: 11-beta-hydroxysteroid dehydrogenase-like
  misc_feature (1)..(147): Homolog of NCBI NO: 18423187 NR Description: 11-beta-hydroxysteroid dehydrogenase-like; id: At5g50600.1, supported by cDNA: gi_15450584, supported by gi_17065383, supported by cDNA: gi_17386149, supported by cDNA:
  misc_feature (1)..(147): Homolog of NCBI NO: 15824408 NR Description: steroleosin [Sesamum indicum]
  misc_feature (1)..(153): Homolog of NCBI NO: 15241261 NR Description: putative protein; protein id: At5g50770.1 thaliana] >gi|8777400|dbj|BAA96990.1| contains similarity to
  misc_feature (1)..(147): Homolog of NCBI NO: 21311775 NR Description: steroleosin-B [Sesamum indicum]
  misc_feature (1)..(144): Homolog of NCBI NO: 15234888 NR Description: putative oxidoreductase; protein id: At4g10020.1
  misc_feature (1)..(76): Homolog of NCBI NO: 24372033 NR Description: oxidoreductase, short chain

SEQ ID NO: 94596 - DNA, 776 bp, Arabidopsis thaliana; identical to SEQ ID NO: 90840
  misc_feature (1)..(776): Ceres Seq. ID no. 12725481
  misc_feature: MA Experiment ID: 20000169 Result: Down-regulated in Transcription
  misc_feature: MA Experiment 20000169 PARAMETER Experiment Name: At_100uM_ABA_P Parameter: Age (day) Value: 14
  misc_feature: MA Experiment 20000169 PARAMETER Experiment Name: At_100uM_ABA_P Parameter: Organism Value: A. thaliana
  misc_feature: MA Experiment 20000169 PARAMETER Experiment Name: At_100uM_ABA_P Parameter: Plant Line Value: WS
  misc_feature: MA Experiment 20000169 PARAMETER Experiment Name: At_100uM_ABA_P Parameter: Timepoint (hr) Value: 6
  misc_feature: MA Experiment 20000169 PARAMETER Experiment Name: At_100uM_ABA_P Parameter: Tissue Value: Aerial
  misc_feature: MA Experiment 20000169 PARAMETER Experiment Name: At_100uM_ABA_P Parameter: Treatment Value: 100uM ABA vs. No Treatment
  misc_feature: MA Experiment ID: 20000182 Result: Up-regulated in Transcription
  misc_feature: MA Experiment 20000182 PARAMETER Experiment Name: At_2mM_SA_P Parameter: Age (day) Value: 14
  misc_feature: MA Experiment 20000182 PARAMETER Experiment Name: At_2mM_SA_P Parameter: Organism Value: A. thaliana
  misc_feature: MA Experiment 20000182 PARAMETER Experiment Name: At_2mM_SA_P Parameter: Plant Line Value: WS
  misc_feature: MA Experiment 20000182 PARAMETER Experiment Name: At_2mM_SA_P Parameter: Timepoint (hr) Value: 6
  misc_feature: MA Experiment 20000182 PARAMETER Experiment Name: At_2mM_SA_P Parameter: Tissue Value: Aerial
  misc_feature: MA Experiment 20000182 PARAMETER Experiment Name: At_2mM_SA_P Parameter: Treatment Value: 2mM SA vs. No Treatment
  misc_feature: MA Experiment ID: 20000264 Result: Down-regulated in Transcription
  misc_feature: MA Experiment 20000264 PARAMETER Experiment Name: At_Open_Flower_P Parameter: Age (day) Value: 21
  misc_feature: MA Experiment 20000264 PARAMETER Experiment Name: At_Open_Flower_P Parameter: Plant Line Value: WS
  misc_feature: MA Experiment 20000264 PARAMETER Experiment Name: At_Open_Flower_P Parameter: Tissue Value: Open Flower vs. Whole Plant
  misc_feature: MA Experiment ID: 20000265 Result: Down-regulated in Transcription
  misc_feature: MA Experiment 20000265 PARAMETER Experiment Name: At_Open_Flower_P Parameter: Age (day) Value: 21
  misc_feature: MA Experiment 20000265 PARAMETER Experiment Name: At_Open_Flower_P Parameter: Plant Line Value: WS
  misc_feature: MA Experiment 20000265 PARAMETER Experiment Name: At_Open_Flower_P Parameter: Tissue Value: Closed Flower vs. Whole Plant
  misc_feature: MA Experiment ID: 20000267 Result: Down-regulated in Transcription
  misc_feature: MA Experiment 20000267 PARAMETER Experiment Name: At_Drought_P Parameter: Age (day) Value: 7
  misc_feature: MA Experiment 20000267 PARAMETER Experiment Name: At_Drought_P Parameter: Organism Value: A. thaliana
  misc_feature: MA Experiment 20000267 PARAMETER Experiment Name: At_Drought_P Parameter: Plant Line Value: WS
  misc_feature: MA Experiment 20000267 PARAMETER Experiment Name: At_Drought_P Parameter: Timepoint (hr) Value: 6
  misc_feature: MA Experiment 20000267 PARAMETER Experiment Name: At_Drought_P Parameter: Tissue Value: Whole Plant
  misc_feature: MA Experiment 20000267 PARAMETER Experiment Name: At_Drought_P Parameter: Treatment Value: Drought vs. No Drought
  misc_feature: MA Experiment ID: 20000286 Result: Down-regulated in Transcription
  misc_feature: MA Experiment 20000286 PARAMETER Experiment Name: At_Open_Flower_P Parameter: Age (day) Value: 21
  misc_feature: MA Experiment 20000286 PARAMETER Experiment Name: At_Open_Flower_P Parameter: Plant Line Value: WS
  misc_feature: MA Experiment 20000286 PARAMETER Experiment Name: At_Open_Flower_P Parameter: Tissue Value: Half Open vs. Whole Plant
  misc_feature: MA Experiment ID: 20000436 Result: Down-regulated in Transcription
  misc_feature: MA Experiment 20000436 PARAMETER Experiment Name: At_Drought_P Parameter: Age (day) Value: 7
  misc_feature: MA Experiment 20000436 PARAMETER Experiment Name: At_Drought_P Parameter: Organism Value: A. thaliana
  misc_feature: MA Experiment 20000436 PARAMETER Experiment Name: At_Drought_P Parameter: Plant Line Value: WS
  misc_feature: MA Experiment 20000436 PARAMETER Experiment Name: At_Drought_P Parameter: Timepoint (hr) Value: 12
  misc_feature: MA Experiment 20000436 PARAMETER Experiment Name: At_Drought_P Parameter: Tissue Value: Whole Plant
  misc_feature: MA Experiment 20000436 PARAMETER Experiment Name: At_Drought_P Parameter: Treatment Value: Drought vs. No Drought
  misc_feature: MA Experiment ID: 20000437 Result: Down-regulated in Transcription
  misc_feature: MA Experiment 20000437 PARAMETER Experiment Name: At_Drought_P Parameter: Age (day) Value: 8
  misc_feature: MA Experiment 20000437 PARAMETER Experiment Name: At_Drought_P Parameter: Organism Value: A. thaliana
  misc_feature: MA Experiment 20000437 PARAMETER Experiment Name: At_Drought_P Parameter: Plant Line Value: WS
  misc_feature: MA Experiment 20000437 PARAMETER Experiment Name: At_Drought_P Parameter: Timepoint (hr) Value: 24
  misc_feature: MA Experiment 20000437 PARAMETER Experiment Name: At_Drought_P Parameter: Tissue Value: Whole Plant
  misc_feature: MA Experiment 20000437 PARAMETER Experiment Name: At_Drought_P Parameter: Treatment Value: Drought vs. No Drought
  misc_feature: MA Experiment ID: 20000445 Result: Down-regulated in Transcription
  misc_feature: MA Experiment 20000445 PARAMETER Experiment Name: At_100uM_NAA__P Parameter: Age (day) Value: 14
  misc_feature: MA Experiment 20000445 PARAMETER Experiment Name: At_100uM_NAA__P Parameter: Organism Value: A. thaliana
  misc_feature: MA Experiment 20000445 PARAMETER Experiment Name: At_100uM_NAA__P Parameter: Plant Line Value: WS
  misc_feature: MA Experiment 20000445 PARAMETER Experiment Name: At_100uM_NAA__P Parameter: Timepoint (hr) Value: 6
  misc_feature: MA Experiment 20000445 PARAMETER Experiment Name: At_100uM_NAA__P Parameter: Tissue Value: Aerial
  misc_feature: MA Experiment 20000445 PARAMETER Experiment Name: At_100uM_NAA__P Parameter: Treatment Value: 100uM NAA vs. No Treatment
  misc_feature: MA Experiment ID: 20000451 Result: Up-regulated in Transcription
  misc_feature: MA Experiment 20000451 PARAMETER Experiment Name: At_CS6879_Shoots-Roots_P Parameter: Age (day) Value: 14
  misc_feature: MA Experiment 20000451 PARAMETER Experiment Name: At_CS6879_Shoots-Roots_P Parameter: Organism Value: A. thaliana
  misc_feature: MA Experiment 20000451 PARAMETER Experiment Name: At_CS6879_Shoots-Roots_P Parameter: Plant Line Value: CS6879 vs. WS
  misc_feature: MA Experiment 20000451 PARAMETER Experiment Name: At_CS6879_Shoots-Roots_P Parameter: Tissue Value: Roots
  misc_feature: MA Experiment ID: 20000496 Result: Up-regulated in Transcription
  misc_feature: MA Experiment 20000496 PARAMETER Experiment Name: At_Guard_Cells_P Parameter: Harvest Date Value: 7/19/2002
  misc_feature: MA Experiment 20000496 PARAMETER Experiment Name: At_Guard_Cells_P Parameter: Organism Value: Canola
  misc_feature: MA Experiment 20000496 PARAMETER Experiment Name: At_Guard_Cells_P Parameter: Tissue Value: Guard Cells vs. Leaves
  misc_feature: MA Experiment ID: 20000794 Result: Down-regulated in Transcription
  misc_feature: MA Experiment 20000794 PARAMETER Experiment Name: At_Petals_P Parameter: Age (day) Value: 23-25 days
  misc_feature: MA Experiment 20000794 PARAMETER Experiment Name: At_Petals_P Parameter: Plant Line Value: WS
  misc_feature: MA Experiment 20000794 PARAMETER Experiment Name: At_Petals_P Parameter: Tissue Value: Petals vs. Whole plant
  misc_feature: MA Experiment ID: 20001248 Result: Down-regulated in Transcription
  misc_feature: MA Experiment 20001248 PARAMETER Experiment Name: At_Far-red-induction_P Parameter: Age (day) Value: 7
  misc_feature: MA Experiment 20001248 PARAMETER Experiment Name: At_Far-red-induction_P Parameter: Light Value: Far-red vs. White
  misc_feature: MA Experiment 20001248 PARAMETER Experiment Name: At_Far-red-induction_P Parameter: Organism Value: A. thaliana
  misc_feature: MA Experiment 20001248 PARAMETER Experiment Name: At_Far-red-induction_P Parameter: Plant Line Value: Columbia
  misc_feature: MA Experiment 20001248 PARAMETER Experiment Name: At_Far-red-induction_P Parameter: Timepoint (hr) Value: 4
  misc_feature: MA Experiment 20001248 PARAMETER Experiment Name: At_Far-red-induction_P Parameter: Tissue Value: Whole Plant
  misc_feature: MA Experiment ID: 20001450 Result: Down-regulated in Transcription
  misc_feature: MA Experiment 20001450 PARAMETER Experiment Name: At_Far-red-induction_P Parameter: Age (day) Value: 7
  misc_feature: MA Experiment 20001450 PARAMETER Experiment Name: At_Far-red-induction_P Parameter: Light Value: Far-red vs. White
  misc_feature: MA Experiment 20001450 PARAMETER Experiment Name: At_Far-red-induction_P Parameter: Organism Value: A. thaliana
  misc_feature: MA Experiment 20001450 PARAMETER Experiment Name: At_Far-red-induction_P Parameter: Plant Line Value: Columbia
  misc_feature: MA Experiment 20001450 PARAMETER Experiment Name: At_Far-red-induction_P Parameter: Timepoint (hr) Value: 8
  misc_feature: MA Experiment 20001450 PARAMETER Experiment Name: At_Far-red-induction_P Parameter: Tissue Value: Whole Plant
  misc_feature: MA Experiment ID: 20001451 Result: Down-regulated in Transcription
  misc_feature: MA Experiment 20001451 PARAMETER Experiment Name: At_Far-red-induction_P Parameter: Age (day) Value: 7
  misc_feature: MA Experiment 20001451 PARAMETER Experiment Name: At_Far-red-induction_P Parameter: Light Value: Far-red vs. White
  misc_feature: MA Experiment 20001451 PARAMETER Experiment Name: At_Far-red-induction_P Parameter: Organism Value: A. thaliana
  misc_feature: MA Experiment 20001451 PARAMETER Experiment Name: At_Far-red-induction_P Parameter: Plant Line Value: Columbia
  misc_feature: MA Experiment 20001451 PARAMETER Experiment Name: At_Far-red-induction_P Parameter: Timepoint (hr) Value: 24
  misc_feature: MA Experiment 20001451 PARAMETER Experiment Name: At_Far-red-induction_P Parameter: Tissue Value: Whole Plant
  misc_feature: MA Experiment ID: 20001554 Result: Down-regulated in Transcription
  misc_feature: MA Experiment 20001554 PARAMETER Experiment Name: At_Drought_Soil_Dry_P Parameter: Age (day) Value: 21
  misc_feature: MA Experiment 20001554 PARAMETER Experiment Name: At_Drought_Soil_Dry_P Parameter: Organism Value: A. thaliana
  misc_feature: MA Experiment 20001554 PARAMETER Experiment Name: At_Drought_Soil_Dry_P Parameter: Plant Line Value: WS
  misc_feature: MA Experiment 20001554 PARAMETER Experiment Name: At_Drought_Soil_Dry_P Parameter: Post Timepoint (hr) Value: None
  misc_feature: MA Experiment 20001554 PARAMETER Experiment Name: At_Drought_Soil_Dry_P Parameter: Post-Treatment Value: None
  misc_feature: MA Experiment 20001554 PARAMETER Experiment Name: At_Drought_Soil_Dry_P Parameter: Timepoint (day) Value: 7
  misc_feature: MA Experiment 20001554 PARAMETER Experiment Name: At_Drought_Soil_Dry_P Parameter: Treatment Value: Drought vs. No Drought
  misc_feature: MA Experiment ID: 20001560 Result: Up-regulated in Transcription
  misc_feature: MA Experiment 20001560 PARAMETER Experiment Name: At_Drought_Soil_Dry_P Parameter: Age (day) Value: 28
  misc_feature: MA Experiment 20001560 PARAMETER Experiment Name: At_Drought_Soil_Dry_P Parameter: Organism Value: A. thaliana
  misc_feature: MA Experiment 20001560 PARAMETER Experiment Name: At_Drought_Soil_Dry_P Parameter: Plant Line Value: WS
  misc_feature: MA Experiment 20001560 PARAMETER Experiment Name: At_Drought_Soil_Dry_P Parameter: Post Timepoint (hr) Value: None
  misc_feature: MA Experiment 20001560 PARAMETER Experiment Name: At_Drought_Soil_Dry_P Parameter: Post-Treatment Value: None
  misc_feature: MA Experiment 20001560 PARAMETER Experiment Name: At_Drought_Soil_Dry_P Parameter: Timepoint (day) Value: 14
  misc_feature: MA Experiment 20001560 PARAMETER Experiment Name: At_Drought_Soil_Dry_P Parameter: Treatment Value: Drought vs. No Drought
  misc_feature: MA Experiment ID: 20001768 Result: Down-regulated in Transcription
  misc_feature: MA Experiment 20001768 PARAMETER Experiment Name: At_Far-red-enriched-adult_P Parameter: Age (day) Value: 28
  misc_feature: MA Experiment 20001768 PARAMETER Experiment Name: At_Far-red-enriched-adult_P Parameter: Light Value: Far-red enriched vs. White
  misc_feature: MA Experiment 20001768 PARAMETER Experiment Name: At_Far-red-enriched-adult_P Parameter: Organism Value: A. thaliana
  misc_feature: MA Experiment 20001768 PARAMETER Experiment Name: At_Far-red-enriched-adult_P Parameter: Plant Line Value: Columbia
  misc_feature: MA Experiment 20001768 PARAMETER Experiment Name: At_Far-red-enriched-adult_P Parameter: Timepoint (hr) Value: 1
  misc_feature: MA Experiment 20001768 PARAMETER Experiment Name: At_Far-red-enriched-adult_P Parameter: Tissue Value: Aerial
  misc_feature: MA Experiment ID: 20001771 Result: Down-regulated in Transcription
  misc_feature: MA Experiment 20001771 PARAMETER Experiment Name: At_Far-red-enriched-adult_P Parameter: Age (day) Value: 28
  misc_feature: MA Experiment 20001771 PARAMETER Experiment Name: At_Far-red-enriched-adult_P Parameter: Light Value: Far-red enriched vs. White
  misc_feature: MA Experiment 20001771 PARAMETER Experiment Name: At_Far-red-enriched-adult_P Parameter: Organism Value: A. thaliana
  misc_feature: MA Experiment 20001771 PARAMETER Experiment Name: At_Far-red-enriched-adult_P Parameter: Plant Line Value: Columbia
  misc_feature: MA Experiment 20001771 PARAMETER Experiment Name: At_Far-red-enriched-adult_P Parameter: Timepoint (hr) Value: 16
  misc_feature: MA Experiment 20001771 PARAMETER Experiment Name: At_Far-red-enriched-adult_P Parameter: Tissue Value: Aerial

SEQ ID NO: 94597 - protein, 202 aa, Arabidopsis thaliana; identical to SEQ ID NO: 90841
  peptide (1)..(202): Ceres Seq. ID no. 12725482
  misc_feature (1)..(202): Homolog of NCBI NO: 15232790 NR Description: putative protein; protein id: At3g47380.1
  misc_feature (1)..(202): Homolog of NCBI NO: 15241799 NR Description: ripening-related protein - like; protein id: supported by cDNA: 9669., supported by cDNA: gi_14423453,
  misc_feature (1)..(202): Homolog of NCBI NO: 21618088 NR Description: ripening-related protein-like [Arabidopsis
  misc_feature (51)..(202): Homolog of NCBI NO: 11127599 NR Description: DC 1.2 homolog [Arabidopsis thaliana]
  misc_feature (8)..(201): Homolog of NCBI NO: 7406663 NR Description: putative ripening-related protein [Vitis vinifera]
  misc_feature (11)..(202): Homolog of NCBI NO: 112717 NR Description: 21 KD PROTEIN PRECURSOR (1.2 PROTEIN)
  misc_feature (7)..(202): Homolog of NCBI NO: 7488727 NR Description: 21K protein precursor - alfalfa
  misc_feature (9)..(202): Homolog of NCBI NO: 15234547 NR Description: putative protein; protein id: At4g12390.1, by cDNA: 27615., supported by cDNA: gi_15450853, supported by
  misc_feature (7)..(202): Homolog of NCBI NO: 21555297 NR Description: unknown [Arabidopsis thaliana]
  misc_feature (1)..(202): Homolog of NCBI NO: 15234982 NR Description: putative protein; protein id: At4g25260.1, by cDNA: gi_16604469, supported by cDNA: gi_18958029 [Arabidopsis

SEQ ID NO: 94598 - DNA, 1785 bp, Arabidopsis thaliana; identical to SEQ ID NO: 90842
  misc_feature (1)..(1785): Ceres Seq. ID no. 12725483
  misc_feature: MA Experiment ID: 20000307 Result: Up-regulated in Transcription
  misc_feature: MA Experiment 20000307 PARAMETER Experiment Name: At_Germinating_Seeds_Sub_P Parameter: Age (hr) Value: 24 vs. 0
  misc_feature: MA Experiment 20000307 PARAMETER Experiment Name: At_Germinating_Seeds_Sub_P Parameter: Organism Value: A. thaliana
  misc_feature: MA Experiment 20000307 PARAMETER Experiment Name: At_Germinating_Seeds_Sub_P Parameter: Plant Line Value: WS
  misc_feature: MA Experiment 20000307 PARAMETER Experiment Name: At_Germinating_Seeds_Sub_P Parameter: Tissue Value: Germinating Seeds
  misc_feature: MA Experiment ID: 20000355 Result: Up-regulated in Transcription
  misc_feature: MA Experiment 20000355 PARAMETER Experiment Name: At_Siliques_Sub_P Parameter: Age (day) Value: 21
  misc_feature: MA Experiment 20000355 PARAMETER Experiment Name: At_Siliques_Sub_P Parameter: Organism Value: A. thaliana
  misc_feature: MA Experiment 20000355 PARAMETER Experiment Name: At_Siliques_Sub_P Parameter: Plant Line Value: WS
  misc_feature: MA Experiment 20000355 PARAMETER Experiment Name: At_Siliques_Sub_P Parameter: Tissue Value: Less Than 5mm Siliques vs. Whole Plant
  misc_feature: MA Experiment ID: 20000440 Result: Up-regulated in Transcription
  misc_feature: MA Experiment 20000440 PARAMETER Experiment Name: At_Closed-Flower__Sub_P Parameter: Tissue Value: Closed Flower vs. Whole Plant

SEQ ID NO: 94599 - protein, 594 aa, Arabidopsis thaliana; identical to SEQ ID NO: 90843
  peptide (1)..(594): Ceres Seq. ID no. 12725484
  misc_feature (280)..(581): Pfam Name: Pectinesterase Pfam Description: Pectinesterase
  misc_feature (85)..(594): Homolog of NCBI NO: 15242109 NR Description: pectinesterase family; protein id: At5g51490.1 thaliana] >gi|9758191|dbj|BAB08665.1| pectinesterase [Arabidopsis
  misc_feature (68)..(594): Homolog of NCBI NO: 15242110 NR Description: pectinesterase family; protein id: At5g51500.1 thaliana] >gi|9758192|dbj|BAB08666.1| pectinesterase [Arabidopsis
  misc_feature (172)..(594): Homolog of NCBI NO: 6174914 NR Description: Pectinesterase 2.1 precursor (Pectin
  misc_feature (172)..(594): Homolog of NCBI NO: 7447381 NR Description: pectinesterase (EC 3.1.1.11) PECS-c2 - sweet
  misc_feature (162)..(594): Homolog of NCBI NO: 18406733 NR Description: pectinesterase family; protein id: At2g45220.1, by cDNA: gi_13605695 [Arabidopsis thaliana] At2g45220/F4L23.27 [Arabidopsis thaliana]
  misc_feature (162)..(594): Homolog of NCBI NO: 25313433 NR Description: probable pectinesterase [imported] - Arabidopsis
  misc_feature (150)..(594): Homolog of NCBI NO: 8671350 NR Description: pectin methylesterase [Nicotiana tabacum]
  misc_feature (150)..(594): Homolog of NCBI NO: 6174912 NR Description: Pectinesterase 1.1 precursor (Pectin
  misc_feature (150)..(594): Homolog of NCBI NO: 2098711 NR Description: pectinesterase [Citrus sinensis]
  misc_feature (88)..(594): Homolog of NCBI NO: 6689892 NR Description: pectin methyl esterase [Solanum tuberosum]

SEQ ID NO: 94600 - protein, 511 aa, Arabidopsis thaliana; identical to SEQ ID NO: 90844
  peptide (1)..(511): Ceres Seq. ID no. 12725485
  misc_feature (197)..(498): Pfam Name: Pectinesterase Pfam Description: Pectinesterase
  misc_feature (2)..(511): Homolog of NCBI NO: 15242109 NR Description: pectinesterase family; protein id: At5g51490.1 thaliana] >gi|9758191|dbj|BAB08665.1| pectinesterase [Arabidopsis
  misc_feature (1)..(511): Homolog of NCBI NO: 15242110 NR Description: pectinesterase family; protein id: At5g51500.1 thaliana] >gi|9758192|dbj|BAB08666.1| pectinesterase [Arabidopsis
  misc_feature (89)..(511): Homolog of NCBI NO: 6174914 NR Description: Pectinesterase 2.1 precursor (Pectin
  misc_feature (89)..(511): Homolog of NCBI NO: 7447381 NR Description: pectinesterase (EC 3.1.1.11) PECS-c2 - sweet
  misc_feature (79)..(511): Homolog of NCBI NO: 18406733 NR Description: pectinesterase family; protein id: At2g45220.1, by cDNA: gi_13605695 [Arabidopsis thaliana] At2g45220/F4L23.27 [Arabidopsis thaliana]
  misc_feature (79)..(511): Homolog of NCBI NO: 25313433 NR Description: probable pectinesterase [imported] - Arabidopsis
  misc_feature (67)..(511): Homolog of NCBI NO: 8671350 NR Description: pectin methylesterase [Nicotiana tabacum]
  misc_feature (67)..(511): Homolog of NCBI NO: 6174912 NR Description: Pectinesterase 1.1 precursor (Pectin
  misc_feature (67)..(511): Homolog of NCBI NO: 2098711 NR Description: pectinesterase [Citrus sinensis]
  misc_feature (5)..(511): Homolog of NCBI NO: 6689892 NR Description: pectin methyl esterase [Solanum tuberosum]

SEQ ID NO: 94601 - protein, 472 aa, Arabidopsis thaliana; identical to SEQ ID NO: 90845
  peptide (1)..(472): Ceres Seq. ID no. 12725486
  misc_feature (158)..(459): Pfam Name: Pectinesterase Pfam Description: Pectinesterase
  misc_feature (1)..(472): Homolog of NCBI NO: 15242109 NR Description: pectinesterase family; protein id: At5g51490.1 thaliana] >gi|9758191|dbj|BAB08665.1| pectinesterase [Arabidopsis
  misc_feature (1)..(472): Homolog of NCBI NO: 15242110 NR Description: pectinesterase family; protein id: At5g51500.1 thaliana] >gi|9758192|dbj|BAB08666.1| pectinesterase [Arabidopsis
  misc_feature (50)..(472): Homolog of NCBI NO: 6174914 NR Description: Pectinesterase 2.1 precursor (Pectin
  misc_feature (50)..(472): Homolog of NCBI NO: 7447381 NR Description: pectinesterase (EC 3.1.1.11) PECS-c2 - sweet
  misc_feature (40)..(472): Homolog of NCBI NO: 18406733 NR Description: pectinesterase family; protein id: At2g45220.1, by cDNA: gi_13605695 [Arabidopsis thaliana] At2g45220/F4L23.27 [Arabidopsis thaliana]
  misc_feature (40)..(472): Homolog of NCBI NO: 25313433 NR Description: probable pectinesterase [imported] - Arabidopsis
  misc_feature (28)..(472): Homolog of NCBI NO: 8671350 NR Description: pectin methylesterase [Nicotiana tabacum]
  misc_feature (28)..(472): Homolog of NCBI NO: 6174912 NR Description: Pectinesterase 1.1 precursor (Pectin
  misc_feature (28)..(472): Homolog of NCBI NO: 2098711 NR Description: pectinesterase [Citrus sinensis]
  misc_feature (1)..(472): Homolog of NCBI NO: 6689892 NR Description: pectin methyl esterase [Solanum tuberosum]

SEQ ID NO: 94602 - DNA, 1604 bp, Arabidopsis thaliana; identical to SEQ ID NO: 90846
  misc_feature (1)..(1604): Ceres Seq. ID no. 12725502
  misc_feature: MA Experiment ID: 108434 Result: Up-regulated in Transcription
  misc_feature: MA Experiment 108434 PARAMETER Experiment Name: At_Root_Tips_cDNA_P Parameter: Tissue Value: Root Tips
  misc_feature: MA Experiment ID: 108463 Result: Down-regulated in Transcription
  misc_feature: MA Experiment 108463 PARAMETER Experiment Name: At_Germinating_Seeds_cDNA_P Parameter: Age (day) Value: 3 vs. 0
  misc_feature: MA Experiment 108463 PARAMETER Experiment Name: At_Germinating_Seeds_cDNA_P Parameter: Tissue Value: Germinating Seeds
  misc_feature: MA Experiment ID: 108464 Result: Down-regulated in Transcription
  misc_feature: MA Experiment 108464 PARAMETER Experiment Name: At_Germinating_Seeds_cDNA_P Parameter: Age (day) Value: 4 vs. 0
  misc_feature: MA Experiment 108464 PARAMETER Experiment Name: At_Germinating_Seeds_cDNA_P Parameter: Tissue Value: Germinating Seeds
  misc_feature: MA Experiment ID: 108488 Result: Up-regulated in Transcription
  misc_feature: MA Experiment ID: 108489 Result: Up-regulated in Transcription
  misc_feature: MA Experiment ID: 108595 Result: Down-regulated in Transcription
  misc_feature: MA Experiment 108595 PARAMETER Experiment Name: At_Ler-pi_Ovule_cDNA_P Parameter: Plant Line Value: null
  misc_feature: MA Experiment ID: 20000794 Result: Down-regulated in Transcription
  misc_feature: MA Experiment 20000794 PARAMETER Experiment Name: At_Petals_P Parameter: Age (day) Value: 23-25 days
  misc_feature: MA Experiment 20000794 PARAMETER Experiment Name: At_Petals_P Parameter: Plant Line Value: WS
  misc_feature: MA Experiment 20000794 PARAMETER Experiment Name: At_Petals_P Parameter: Tissue Value: Petals vs. Whole plant
  misc_feature: MA Experiment ID: 20001451 Result: Down-regulated in Transcription
  misc_feature: MA Experiment 20001451 PARAMETER Experiment Name: At_Far-red-induction_P Parameter: Age (day) Value: 7
  misc_feature: MA Experiment 20001451 PARAMETER Experiment Name: At_Far-red-induction_P Parameter: Light Value: Far-red vs. White
  misc_feature: MA Experiment 20001451 PARAMETER Experiment Name: At_Far-red-induction_P Parameter: Organism Value: A. thaliana
  misc_feature: MA Experiment 20001451 PARAMETER Experiment Name: At_Far-red-induction_P Parameter: Plant Line Value: Columbia
  misc_feature: MA Experiment 20001451 PARAMETER Experiment Name: At_Far-red-induction_P Parameter: Timepoint (hr) Value: 24
  misc_feature: MA Experiment 20001451 PARAMETER Experiment Name: At_Far-red-induction_P Parameter: Tissue Value: Whole Plant
  misc_feature: MA Experiment ID: 20001557 Result: Up-regulated in Transcription
  misc_feature: MA Experiment 20001557 PARAMETER Experiment Name: At_Drought_Soil_Dry_P Parameter: Age (day) Value: 27
  misc_feature: MA Experiment 20001557 PARAMETER Experiment Name: At_Drought_Soil_Dry_P Parameter: Organism Value: A. thaliana
  misc_feature: MA Experiment 20001557 PARAMETER Experiment Name: At_Drought_Soil_Dry_P Parameter: Plant Line Value: WS
  misc_feature: MA Experiment 20001557 PARAMETER Experiment Name: At_Drought_Soil_Dry_P Parameter: Post Timepoint (hr) Value: 3
  misc_feature: MA Experiment 20001557 PARAMETER Experiment Name: At_Drought_Soil_Dry_P Parameter: Post-Treatment Value: Re-Water vs. No Drought
  misc_feature: MA Experiment 20001557 PARAMETER Experiment Name: At_Drought_Soil_Dry_P Parameter: Timepoint (day) Value: 13
  misc_feature: MA Experiment 20001557 PARAMETER Experiment Name: At_Drought_Soil_Dry_P Parameter: Treatment Value: Drought vs. No Drought
  misc_feature: MA Experiment ID: 20001560 Result: Up-regulated in Transcription
  misc_feature: MA Experiment 20001560 PARAMETER Experiment Name: At_Drought_Soil_Dry_P Parameter: Age (day) Value: 28
  misc_feature: MA Experiment 20001560 PARAMETER Experiment Name: At_Drought_Soil_Dry_P Parameter: Organism Value: A. thaliana
  misc_feature: MA Experiment 20001560 PARAMETER Experiment Name: At_Drought_Soil_Dry_P Parameter: Plant Line Value: WS
  misc_feature: MA Experiment 20001560 PARAMETER Experiment Name: At_Drought_Soil_Dry_P Parameter: Post Timepoint (hr) Value: None
  misc_feature: MA Experiment 20001560 PARAMETER Experiment Name: At_Drought_Soil_Dry_P Parameter: Post-Treatment Value: None
  misc_feature: MA Experiment 20001560 PARAMETER Experiment Name: At_Drought_Soil_Dry_P Parameter: Timepoint (day) Value: 14
  misc_feature: MA Experiment 20001560 PARAMETER Experiment Name: At_Drought_Soil_Dry_P Parameter: Treatment Value: Drought vs. No Drought
  misc_feature: MA Experiment ID: 20001757 Result: Up-regulated in Transcription
  misc_feature: MA Experiment 20001757 PARAMETER Experiment Name: At_50mM_NH4NO3_L-to-H_P Parameter: Timepoint (hr) Value: 6
  misc_feature: MA Experiment 20001757 PARAMETER Experiment Name: At_50mM_NH4NO3_L-to-H_P Parameter: Tissue Value: Leaf
  misc_feature: MA Experiment 20001757 PARAMETER Experiment Name: At_50mM_NH4NO3_L-to-H_P Parameter: Treatment Value: 50mM NH4NO3 vs 100mM Mannitol

SEQ ID NO: 94603 - protein, 403 aa, Arabidopsis thaliana; identical to SEQ ID NO: 90847
  peptide (1)..(403): Ceres Seq. ID no. 12725503
  misc_feature (228)..(394): Pfam Name: lactate/malate dehydrogenase, alpha/beta Pfam Description: lactate/malate dehydrogenase, alpha/beta
  misc_feature (1)..(403): Homolog of NCBI NO: 15232820 NR Description: chloroplast NAD-dependent malate dehydrogenase; id: At3g47520.1, supported by cDNA: gi_3256065 [Arabidopsis
  misc_feature (1)..(403): Homolog of NCBI NO: 25283601 NR Description: malate dehydrogenase (EC 1.1.1.37), chloroplast
  misc_feature (4)..(400): Homolog of NCBI NO: 5123836 NR Description: NAD-malate dehydrogenase [Nicotiana tabacum]

SEQ ID NO: 94604 - protein, 300 aa, Arabidopsis thaliana; identical to SEQ ID NO: 22021
  peptide (1)..(300): Ceres Seq. ID no. 12725504
  misc_feature (125)..(291): Pfam Name: lactate/malate dehydrogenase, alpha/beta Pfam Description: lactate/malate dehydrogenase, alpha/beta
  misc_feature (1)..(300): Homolog of NCBI NO: 15232820 NR Description: chloroplast NAD-dependent malate dehydrogenase; id: At3g47520.1, supported by cDNA: gi_3256065 [Arabidopsis
  misc_feature (1)..(300): Homolog of NCBI NO: 25283601 NR Description: malate dehydrogenase (EC 1.1.1.37), chloroplast
  misc_feature (1)..(297): Homolog of NCBI NO: 5123836 NR Description: NAD-malate dehydrogenase [Nicotiana tabacum]

SEQ ID NO: 94605 - protein, 238 aa, Arabidopsis thaliana; identical to SEQ ID NO: 22022
  peptide (1)..(238): Ceres Seq. ID no. 12725505
  misc_feature (63)..(229): Pfam Name: lactate/malate dehydrogenase, alpha/beta Pfam Description: lactate/malate dehydrogenase, alpha/beta
  misc_feature (1)..(238): Homolog of NCBI NO: 15232820 NR Description: chloroplast NAD-dependent malate dehydrogenase; id: At3g47520.1, supported by cDNA: gi_3256065 [Arabidopsis
  misc_feature (1)..(238): Homolog of NCBI NO: 25283601 NR Description: malate dehydrogenase (EC 1.1.1.37), chloroplast
  misc_feature (1)..(235): Homolog of NCBI NO: 5123836 NR Description: NAD-malate dehydrogenase [Nicotiana tabacum]

SEQ ID NO: 94606 - DNA, 1158 bp, Arabidopsis thaliana; identical to SEQ ID NO: 90850
  misc_feature (1)..(1158): Ceres Seq. ID no. 12725540
  misc_feature: MA Experiment ID: 20000307 Result: Up-regulated in Transcription
  misc_feature: MA Experiment 20000307 PARAMETER Experiment Name: At_Germinating_Seeds_Sub_P Parameter: Age (hr) Value: 24 vs. 0
  misc_feature: MA Experiment 20000307 PARAMETER Experiment Name: At_Germinating_Seeds_Sub_P Parameter: Organism Value: A. thaliana
  misc_feature: MA Experiment 20000307 PARAMETER Experiment Name: At_Germinating_Seeds_Sub_P Parameter: Plant Line Value: WS
  misc_feature: MA Experiment 20000307 PARAMETER Experiment Name: At_Germinating_Seeds_Sub_P Parameter: Tissue Value: Germinating Seeds
  misc_feature: MA Experiment ID: 20000315 Result: Down-regulated in Transcription
  misc_feature: MA Experiment 20000315 PARAMETER Experiment Name: At_14day_Shoots-Roots_Sub_P Parameter: Age (day) Value: 14
  misc_feature: MA Experiment 20000315 PARAMETER Experiment Name: At_14day_Shoots-Roots_Sub_P Parameter: Organism Value: A. thaliana
  misc_feature: MA Experiment 20000315 PARAMETER Experiment Name: At_14day_Shoots-Roots_Sub_P Parameter: Plant Line Value: WS
  misc_feature: MA Experiment 20000315 PARAMETER Experiment Name: At_14day_Shoots-Roots_Sub_P Parameter: Tissue Value: Shoots vs. Whole Plant
  misc_feature: MA Experiment ID: 20000352 Result: Down-regulated in Transcription
  misc_feature: MA Experiment 20000352 PARAMETER Experiment Name: At_Drought_Sub_P Parameter: Age (day) Value: 7
  misc_feature: MA Experiment 20000352 PARAMETER Experiment Name: At_Drought_Sub_P Parameter: Organism Value: A. thaliana
  misc_feature: MA Experiment 20000352 PARAMETER Experiment Name: At_Drought_Sub_P Parameter: Plant Line Value: WS
  misc_feature: MA Experiment 20000352 PARAMETER Experiment Name: At_Drought_Sub_P Parameter: Timepoint (hr) Value: 6
  misc_feature: MA Experiment 20000352 PARAMETER Experiment Name: At_Drought_Sub_P Parameter: Tissue Value: Whole Plant
  misc_feature: MA Experiment 20000352 PARAMETER Experiment Name: At_Drought_Sub_P Parameter: Treatment Value: Drought vs. No Drought
  misc_feature: MA Experiment ID: 20000355 Result: Up-regulated in Transcription
  misc_feature: MA Experiment 20000355 PARAMETER Experiment Name: At_Siliques_Sub_P Parameter: Age (day) Value: 21
  misc_feature: MA Experiment 20000355 PARAMETER Experiment Name: At_Siliques_Sub_P Parameter: Organism Value: A. thaliana
  misc_feature: MA Experiment 20000355 PARAMETER Experiment Name: At_Siliques_Sub_P Parameter: Plant Line Value: WS
  misc_feature: MA Experiment 20000355 PARAMETER Experiment Name: At_Siliques_Sub_P Parameter: Tissue Value: Less Than 5mm Siliques vs. Whole Plant
  misc_feature: MA Experiment ID: 20000440 Result: Up-regulated in Transcription
  misc_feature: MA Experiment 20000440 PARAMETER Experiment Name: At_Closed-Flower__Sub_P Parameter: Tissue Value: Closed Flower vs. Whole Plant

SEQ ID NO: 94607 - protein, 385 aa, Arabidopsis thaliana; identical to SEQ ID NO: 90851
  peptide (1)..(385): Ceres Seq. ID no. 12725541
  misc_feature (1)..(385): Homolog of NCBI NO: 15223769 NR Description: hypothetical protein; protein id: At1g76870.1
  misc_feature (32)..(381): Homolog of NCBI NO: 18394964 NR Description: expressed protein; protein id: At1g21200.1, by cDNA: gi_15027986, supported by cDNA: gi_20259202 [Arabidopsis

SEQ ID NO: 94608 - protein, 369 aa, Arabidopsis thaliana; identical to SEQ ID NO: 90852
  peptide (1)..(369): Ceres Seq. ID no. 12725542
  misc_feature (1)..(369): Homolog of NCBI NO: 15223769 NR Description: hypothetical protein; protein id: At1g76870.1
  misc_feature (16)..(365): Homolog of NCBI NO: 18394964 NR Description: expressed protein; protein id: At1g21200.1, by cDNA: gi_15027986, supported by cDNA: gi_20259202 [Arabidopsis

SEQ ID NO: 94609 - protein, 340 aa, Arabidopsis thaliana; identical to SEQ ID NO: 90853
  peptide (1)..(340): Ceres Seq. ID no. 12725543
  misc_feature (1)..(340): Homolog of NCBI NO: 15223769 NR Description: hypothetical protein; protein id: At1g76870.1
  misc_feature (1)..(336): Homolog of NCBI NO: 18394964 NR Description: expressed protein; protein id: At1g21200.1, by cDNA: gi_15027986, supported by cDNA: gi_20259202 [Arabidopsis

SEQ ID NO: 94610 - DNA, 735 bp, Arabidopsis thaliana; identical to SEQ ID NO: 90854
  misc_feature (1)..(735): Ceres Seq. ID no. 12725578
  misc_feature: MA Experiment ID: 20000184 Result: Up-regulated in Transcription
  misc_feature: MA Experiment 20000184 PARAMETER Experiment Name: At_Shoots__P Parameter: Age (day) Value: 7
  misc_feature: MA Experiment 20000184 PARAMETER Experiment Name: At_Shoots__P Parameter: Tissue Value: Shoots vs. Whole Plant
  misc_feature: MA Experiment ID: 20000286 Result: Up-regulated in Transcription
  misc_feature: MA Experiment 20000286 PARAMETER Experiment Name: At_Open_Flower_P Parameter: Age (day) Value: 21
  misc_feature: MA Experiment 20000286 PARAMETER Experiment Name: At_Open_Flower_P Parameter: Plant Line Value: WS
  misc_feature: MA Experiment 20000286 PARAMETER Experiment Name: At_Open_Flower_P Parameter: Tissue Value: Half Open vs. Whole Plant
  misc_feature: MA Experiment ID: 20000438 Result: Up-regulated in Transcription
  misc_feature: MA Experiment 20000438 PARAMETER Experiment Name: At_Shoots__P Parameter: Age (day) Value: 14
  misc_feature: MA Experiment 20000438 PARAMETER Experiment Name: At_Shoots__P Parameter: Tissue Value: Shoots vs. Whole Plant
  misc_feature: MA Experiment ID: 20000794 Result: Up-regulated in Transcription
  misc_feature: MA Experiment 20000794 PARAMETER Experiment Name: At_Petals_P Parameter: Age (day) Value: 23-25 days
  misc_feature: MA Experiment 20000794 PARAMETER Experiment Name: At_Petals_P Parameter: Plant Line Value: WS
  misc_feature: MA Experiment 20000794 PARAMETER Experiment Name: At_Petals_P Parameter: Tissue Value: Petals vs. Whole plant
  misc_feature: MA Experiment ID: 20001248 Result: Up-regulated in Transcription
  misc_feature: MA Experiment 20001248 PARAMETER Experiment Name: At_Far-red-induction_P Parameter: Age (day) Value: 7
  misc_feature: MA Experiment 20001248 PARAMETER Experiment Name: At_Far-red-induction_P Parameter: Light Value: Far-red vs. White
  misc_feature: MA Experiment 20001248 PARAMETER Experiment Name: At_Far-red-induction_P Parameter: Organism Value: A. thaliana
  misc_feature: MA Experiment 20001248 PARAMETER Experiment Name: At_Far-red-induction_P Parameter: Plant Line Value: Columbia
  misc_feature: MA Experiment 20001248 PARAMETER Experiment Name: At_Far-red-induction_P Parameter: Timepoint (hr) Value: 4
  misc_feature: MA Experiment 20001248 PARAMETER Experiment Name: At_Far-red-induction_P Parameter: Tissue Value: Whole Plant
  misc_feature: MA Experiment ID: 20001450 Result: Up-regulated in Transcription
  misc_feature: MA Experiment 20001450 PARAMETER Experiment Name: At_Far-red-induction_P Parameter: Age (day) Value: 7
  misc_feature: MA Experiment 20001450 PARAMETER Experiment Name: At_Far-red-induction_P Parameter: Light Value: Far-red vs. White
  misc_feature: MA Experiment 20001450 PARAMETER Experiment Name: At_Far-red-induction_P Parameter: Organism Value: A. thaliana
  misc_feature: MA Experiment 20001450 PARAMETER Experiment Name: At_Far-red-induction_P Parameter: Plant Line Value: Columbia
  misc_feature: MA Experiment 20001450 PARAMETER Experiment Name: At_Far-red-induction_P Parameter: Timepoint (hr) Value: 8
  misc_feature: MA Experiment 20001450 PARAMETER Experiment Name: At_Far-red-induction_P Parameter: Tissue Value: Whole Plant
  misc_feature: MA Experiment ID: 20001910 Result: Up-regulated in Transcription
  misc_feature: MA Experiment 20001910 PARAMETER Experiment Name: At_Drought_Reproduction_P Parameter: Age (day) Value: 37
  misc_feature: MA Experiment 20001910 PARAMETER Experiment Name: At_Drought_Reproduction_P Parameter: Organism Value: A. thaliana
  misc_feature: MA Experiment 20001910 PARAMETER Experiment Name: At_Drought_Reproduction_P Parameter: Plant Line Value: WS
  misc_feature: MA Experiment 20001910 PARAMETER Experiment Name: At_Drought_Reproduction_P Parameter: Timepoint (day) Value: 7
  misc_feature: MA Experiment 20001910 PARAMETER Experiment Name: At_Drought_Reproduction_P Parameter: Tissue Value: Flowers
  misc_feature: MA Experiment 20001910 PARAMETER Experiment Name: At_Drought_Reproduction_P Parameter: Treatment Value: Drought vs. No Drought

SEQ ID NO: 94611 - protein, 244 aa, Arabidopsis thaliana; identical to SEQ ID NO: 90855
  peptide (1)..(244): Ceres Seq. ID no. 12725579
  misc_feature (40)..(104): Pfam Name: AP2 domain Pfam Description: AP2 domain
  misc_feature (1)..(244): Homolog of NCBI NO: 15223860 NR Description: transcription factor TINY, putative; protein id:
  misc_feature (27)..(236): Homolog of NCBI NO: 15233928 NR Description: transcription factor TINY, putative; protein id:
  misc_feature (20)..(211): Homolog of NCBI NO: 15239113 NR Description: transcription factor TINY, putative; protein id: [Arabidopsis thaliana] >gi|11282310|pir||T48518 transcription
  misc_feature (24)..(224): Homolog of NCBI NO: 25352180 NR Description: TINY-like AP2 domain transcription factor
  misc_feature (34)..(207): Homolog of NCBI NO: 15239501 NR Description: transcription factor TINY; protein id: At5g25810.1
  misc_feature (15)..(229): Homolog of NCBI NO: 25992102 NR Description: dehydration responsive element binding protein
  misc_feature (17)..(187): Homolog of NCBI NO: 37536842 NR Description: putative DNA binding protein [Oryza sativa
  misc_feature (13)..(140): Homolog of NCBI NO: 15235858 NR Description: AP2 domain TINY-related protein; protein id: [Arabidopsis thaliana] >gi|25350649|pir||F85186 apetala2 domain
  misc_feature (12)..(205): Homolog of NCBI NO: 21592664 NR Description: putative AP2 domain transcription factor
  misc_feature (2)..(212): Homolog of NCBI NO: 15228171 NR Description: transcription factor TINY, putative; protein id: [Arabidopsis thaliana] >gi|2062174|gb|AAB63648.1| transcription

SEQ ID NO: 94612 - protein, 197 aa, Arabidopsis thaliana; identical to SEQ ID NO: 90856
  peptide (1)..(197): Ceres Seq. ID no. 12725580
  misc_feature (1)..(57): Pfam Name: AP2 domain Pfam Description: AP2 domain
  misc_feature (1)..(197): Homolog of NCBI NO: 15223860 NR Description: transcription factor TINY, putative; protein id:
  misc_feature (1)..(189): Homolog of NCBI NO: 15233928 NR Description: transcription factor TINY, putative; protein id:
  misc_feature (1)..(164): Homolog of NCBI NO: 15239113 NR Description: transcription factor TINY, putative; protein id: [Arabidopsis thaliana] >gi|11282310|pir||T48518 transcription
  misc_feature (1)..(177): Homolog of NCBI NO: 25352180 NR Description: TINY-like AP2 domain transcription factor
  misc_feature (1)..(160): Homolog of NCBI NO: 15239501 NR Description: transcription factor TINY; protein id: At5g25810.1
  misc_feature (1)..(182): Homolog of NCBI NO: 25992102 NR Description: dehydration responsive element binding protein
  misc_feature (1)..(140): Homolog of NCBI NO: 37536842 NR Description: putative DNA binding protein [Oryza sativa
  misc_feature (1)..(93): Homolog of NCBI NO: 15235858 NR Description: AP2 domain TINY-related protein; protein id: [Arabidopsis thaliana] >gi|25350649|pir||F85186 apetala2 domain
  misc_feature (1)..(158): Homolog of NCBI NO: 21592664 NR Description: putative AP2 domain transcription factor
  misc_feature (1)..(165): Homolog of NCBI NO: 15228171 NR Description: transcription factor TINY, putative; protein id: [Arabidopsis thaliana] >gi|2062174|gb|AAB63648.1| transcription

SEQ ID NO: 94613 - protein, 168 aa, Arabidopsis thaliana; identical to SEQ ID NO: 90857
  peptide (1)..(168): Ceres Seq. ID no. 12725581
  misc_feature (1)..(168): Homolog of NCBI NO: 15223860 NR Description: transcription factor TINY, putative; protein id:
  misc_feature (1)..(160): Homolog of NCBI NO: 15233928 NR Description: transcription factor TINY, putative; protein id:
  misc_feature (1)..(135): Homolog of NCBI NO: 15239113 NR Description: transcription factor TINY, putative; protein id: [Arabidopsis thaliana] >gi|11282310|pir||T48518 transcription
  misc_feature (1)..(148): Homolog of NCBI NO: 25352180 NR Description: TINY-like AP2 domain transcription factor
  misc_feature (1)..(131): Homolog of NCBI NO: 15239501 NR Description: transcription factor TINY; protein id: At5g25810.1
  misc_feature (1)..(153): Homolog of NCBI NO: 25992102 NR Description: dehydration responsive element binding protein
  misc_feature (1)..(111): Homolog of NCBI NO: 37536842 NR Description: putative DNA binding protein [Oryza sativa
  misc_feature (1)..(64): Homolog of NCBI NO: 15235858 NR Description: AP2 domain TINY-related protein; protein id: [Arabidopsis thaliana] >gi|25350649|pir||F85186 apetala2 domain
  misc_feature (1)..(129): Homolog of NCBI NO: 21592664 NR Description: putative AP2 domain transcription factor
  misc_feature (1)..(136): Homolog of NCBI NO: 15228171 NR Description: transcription factor TINY, putative; protein id: [Arabidopsis thaliana] >gi|2062174|gb|AAB63648.1| transcription

SEQ ID NO: 94614 - DNA, 1968 bp, Arabidopsis thaliana; identical to SEQ ID NO: 90858
  misc_feature (1)..(1968): Ceres Seq. ID no. 12725586
  misc_feature: MA Experiment ID: 20000184 Result: Down-regulated in Transcription
  misc_feature: MA Experiment 20000184 PARAMETER Experiment Name: At_Shoots__P Parameter: Age (day) Value: 7
  misc_feature: MA Experiment 20000184 PARAMETER Experiment Name: At_Shoots__P Parameter: Tissue Value: Shoots vs. Whole Plant
  misc_feature: MA Experiment ID: 20000437 Result: Up-regulated in Transcription
  misc_feature: MA Experiment 20000437 PARAMETER Experiment Name: At_Drought_P Parameter: Age (day) Value: 8
  misc_feature: MA Experiment 20000437 PARAMETER Experiment Name: At_Drought_P Parameter: Organism Value: A. thaliana
  misc_feature: MA Experiment 20000437 PARAMETER Experiment Name: At_Drought_P Parameter: Plant Line Value: WS
  misc_feature: MA Experiment 20000437 PARAMETER Experiment Name: At_Drought_P Parameter: Timepoint (hr) Value: 24
  misc_feature: MA Experiment 20000437 PARAMETER Experiment Name: At_Drought_P Parameter: Tissue Value: Whole Plant
  misc_feature: MA Experiment 20000437 PARAMETER Experiment Name: At_Drought_P Parameter: Treatment Value: Drought vs. No Drought

SEQ ID NO: 94615 - protein, 484 aa, Arabidopsis thaliana; identical to SEQ ID NO: 90859
  peptide (1)..(484): Ceres Seq. ID no. 12725587
  misc_feature (39)..(331): Pfam Name: Domain of unknown function Pfam Description: Domain of unknown function
  misc_feature (1)..(484): Homolog of NCBI NO: 18411404 NR Description: expressed protein; protein id: At1g77220.1, by cDNA: gi_14334723, supported by cDNA: gi_21280884 [Arabidopsis >gi|14334724|gb|AAK59540.1| unknown protein [Arabidopsis
  misc_feature (1)..(484): Homolog of NCBI NO: 7487004 NR Description: hypothetical protein T14N5.8 - Arabidopsis
  misc_feature (87)..(477): Homolog of NCBI NO: 7485951 NR Description: hypothetical protein F22I13.130 - Arabidopsis >gi|4539344|emb|CAB37492.1| putative protein [Arabidopsis >gi|7270820|emb|CAB80501.1| putative protein [Arabidopsis
  misc_feature (41)..(72): Homolog of NCBI NO: 7485951 NR Description: hypothetical protein F22I13.130 - Arabidopsis >gi|4539344|emb|CAB37492.1| putative protein [Arabidopsis >gi|7270820|emb|CAB80501.1| putative protein [Arabidopsis
  misc_feature (40)..(473): Homolog of NCBI NO: 38345931 NR Description: OSJNBb0078D11.6 [Oryza sativa (japonica
  misc_feature (41)..(304): Homolog of NCBI NO: 18420224 NR Description: putative protein; protein id: At4g38360.1, by cDNA: gi_15028110, supported by cDNA: gi_19310766 [Arabidopsis >gi|15028111|gb|AAK76679.1| unknown protein [Arabidopsis
  misc_feature (77)..(415): Homolog of NCBI NO: 15220013 NR Description: hypothetical protein; protein id: At1g23070.1
  misc_feature (46)..(386): Homolog of NCBI NO: 21704198 NR Description: similar to CG5850 gene product [Mus musculus]
  misc_feature (46)..(386): Homolog of NCBI NO: 26329069 NR Description: unnamed protein product [Mus musculus]
  misc_feature (46)..(374): Homolog of NCBI NO: 8922707 NR Description: hypothetical protein FLJ10846 [Homo sapiens]

SEQ ID NO: 94616 - protein, 459 aa, Arabidopsis thaliana; identical to SEQ ID NO: 90860
  peptide (1)..(459): Ceres Seq. ID no. 12725588
  misc_feature (14)..(306): Pfam Name: Domain of unknown function Pfam Description: Domain of unknown function
  misc_feature (1)..(459): Homolog of NCBI NO: 18411404 NR Description: expressed protein; protein id: At1g77220.1, by cDNA: gi_14334723, supported by cDNA: gi_21280884 [Arabidopsis >gi|14334724|gb|AAK59540.1| unknown protein [Arabidopsis
  misc_feature (1)..(459): Homolog of NCBI NO: 7487004 NR Description: hypothetical protein T14N5.8 - Arabidopsis
  misc_feature (62)..(452): Homolog of NCBI NO: 7485951 NR Description: hypothetical protein F22I13.130 - Arabidopsis >gi|4539344|emb|CAB37492.1| putative protein [Arabidopsis >gi|7270820|emb|CAB80501.1| putative protein [Arabidopsis
  misc_feature (16)..(47): Homolog of NCBI NO: 7485951 NR Description: hypothetical protein F22I13.130 - Arabidopsis >gi|4539344|emb|CAB37492.1| putative protein [Arabidopsis >gi|7270820|emb|CAB80501.1| putative protein [Arabidopsis
  misc_feature (15)..(448): Homolog of NCBI NO: 38345931 NR Description: OSJNBb0078D11.6 [Oryza sativa (japonica
  misc_feature (16)..(279): Homolog of NCBI NO: 18420224 NR Description: putative protein; protein id: At4g38360.1, by cDNA: gi_15028110, supported by cDNA: gi_19310766 [Arabidopsis >gi|15028111|gb|AAK76679.1| unknown protein [Arabidopsis
  misc_feature (52)..(390): Homolog of NCBI NO: 15220013 NR Description: hypothetical protein; protein id: At1g23070.1
  misc_feature (21)..(361): Homolog of NCBI NO: 21704198 NR Description: similar to CG5850 gene product [Mus musculus]
  misc_feature (21)..(361): Homolog of NCBI NO: 26329069 NR Description: unnamed protein product [Mus musculus]
  misc_feature (21)..(349): Homolog of NCBI NO: 8922707 NR Description: hypothetical protein FLJ10846 [Homo sapiens]

SEQ ID NO: 94617 - protein, 427 aa, Arabidopsis thaliana; identical to SEQ ID NO: 90861
  peptide (1)..(427): Ceres Seq. ID no. 12725589
  misc_feature (1)..(274): Pfam Name: Domain of unknown function Pfam Description: Domain of unknown function
  misc_feature (1)..(427): Homolog of NCBI NO: 18411404 NR Description: expressed protein; protein id: At1g77220.1, by cDNA: gi_14334723, supported by cDNA: gi_21280884 [Arabidopsis >gi|14334724|gb|AAK59540.1| unknown protein [Arabidopsis
  misc_feature (1)..(427): Homolog of NCBI NO: 7487004 NR Description: hypothetical protein T14N5.8 - Arabidopsis
  misc_feature (30)..(420): Homolog of NCBI NO: 7485951 NR Description: hypothetical protein F22I13.130 - Arabidopsis >gi|4539344|emb|CAB37492.1| putative protein [Arabidopsis >gi|7270820|emb|CAB80501.1| putative protein [Arabidopsis
  misc_feature (1)..(15): Homolog of NCBI NO: 7485951 NR Description: hypothetical protein F22I13.130 - Arabidopsis >gi|4539344|emb|CAB37492.1| putative protein [Arabidopsis >gi|7270820|emb|CAB80501.1| putative protein [Arabidopsis
  misc_feature (1)..(416): Homolog of NCBI NO: 38345931 NR Description: OSJNBb0078D11.6 [Oryza sativa (japonica
  misc_feature (1)..(247): Homolog of NCBI NO: 18420224 NR Description: putative protein; protein id: At4g38360.1, by cDNA: gi_15028110, supported by cDNA: gi_19310766 [Arabidopsis >gi|15028111|gb|AAK76679.1| unknown protein [Arabidopsis
  misc_feature (20)..(358): Homolog of NCBI NO: 15220013 NR Description: hypothetical protein; protein id: At1g23070.1
  misc_feature (1)..(329): Homolog of NCBI NO: 21704198 NR Description: similar to CG5850 gene product [Mus musculus]
  misc_feature (1)..(329): Homolog of NCBI NO: 26329069 NR Description: unnamed protein product [Mus musculus]
  misc_feature (1)..(317): Homolog of NCBI NO: 8922707 NR Description: hypothetical protein FLJ10846 [Homo sapiens]

SEQ ID NO: 94618 - DNA, 2415 bp, Arabidopsis thaliana; identical to SEQ ID NO: 90862
  misc_feature (1)..(2415): Ceres Seq. ID no. 12725594
  misc_feature: MA Experiment ID: 20000171 Result: Down-regulated in Transcription
  misc_feature: MA Experiment 20000171 PARAMETER Experiment Name: At_42deg_Heat_P Parameter: Age (day) Value: 14
  misc_feature: MA Experiment 20000171 PARAMETER Experiment Name: At_42deg_Heat_P Parameter: Organism Value: A. thaliana
  misc_feature: MA Experiment 20000171 PARAMETER Experiment Name: At_42deg_Heat_P Parameter: Plant Line Value: WS
  misc_feature: MA Experiment 20000171 PARAMETER Experiment Name: At_42deg_Heat_P Parameter: Temperature (deg C) Value: 42 vs. 22
  misc_feature: MA Experiment 20000171 PARAMETER Experiment Name: At_42deg_Heat_P Parameter: Timepoint (hr) Value: 1
  misc_feature: MA Experiment 20000171 PARAMETER Experiment Name: At_42deg_Heat_P Parameter: Tissue Value: Aerial
  misc_feature: MA Experiment ID: 20000173 Result: Down-regulated in Transcription
  misc_feature: MA Experiment 20000173 PARAMETER Experiment Name: At_42deg_Heat_P Parameter: Age (day) Value: 14
  misc_feature: MA Experiment 20000173 PARAMETER Experiment Name: At_42deg_Heat_P Parameter: Organism Value: A. thaliana
  misc_feature: MA Experiment 20000173 PARAMETER Experiment Name: At_42deg_Heat_P Parameter: Plant Line Value: WS
  misc_feature: MA Experiment 20000173 PARAMETER Experiment Name: At_42deg_Heat_P Parameter: Temperature (deg C) Value: 42 vs. 22
  misc_feature: MA Experiment 20000173 PARAMETER Experiment Name: At_42deg_Heat_P Parameter: Timepoint (hr) Value: 6
  misc_feature: MA Experiment 20000173 PARAMETER Experiment Name: At_42deg_Heat_P Parameter: Tissue Value: Aerial
  misc_feature: MA Experiment ID: 20000180 Result: Up-regulated in Transcription
  misc_feature: MA Experiment 20000180 PARAMETER Experiment Name: At_Germinating_Seeds_P Parameter: Age (hr) Value: 24 vs. 0
  misc_feature: MA Experiment 20000180 PARAMETER Experiment Name: At_Germinating_Seeds_P Parameter: Tissue Value: Germinating Seeds
  misc_feature: MA Experiment ID: 20000185 Result: Up-regulated in Transcription
  misc_feature: MA Experiment 20000185 PARAMETER Experiment Name: At_Roots__P Parameter: Age (day) Value: 7 vs. 21
  misc_feature: MA Experiment 20000185 PARAMETER Experiment Name: At_Roots__P Parameter: Organism Value: A. thaliana
  misc_feature: MA Experiment 20000185 PARAMETER Experiment Name: At_Roots__P Parameter: Tissue Value: Roots vs. Whole Plant
  misc_feature: MA Experiment ID: 20000227 Result: Up-regulated in Transcription
  misc_feature: MA Experiment 20000227 PARAMETER Experiment Name: At_Root-Tips-vs-Tops_P Parameter: Tissue Value: Root Tips vs. Root Tops
  misc_feature: MA Experiment ID: 20000234 Result: Up-regulated in Transcription
  misc_feature: MA Experiment 20000234 PARAMETER Experiment Name: At_Siliques_P Parameter: Age (day) Value: 21
  misc_feature: MA Experiment 20000234 PARAMETER Experiment Name: At_Siliques_P Parameter: Organism Value: A. thaliana
  misc_feature: MA Experiment 20000234 PARAMETER Experiment Name: At_Siliques_P Parameter: Plant Line Value: WS
  misc_feature: MA Experiment 20000234 PARAMETER Experiment Name: At_Siliques_P Parameter: Tissue Value: Less Than 5mm Siliques vs. Whole Plant
  misc_feature: MA Experiment ID: 20000235 Result: Up-regulated in Transcription
  misc_feature: MA Experiment 20000235 PARAMETER Experiment Name: At_Siliques_P Parameter: Age (day) Value: 21
  misc_feature: MA Experiment 20000235 PARAMETER Experiment Name: At_Siliques_P Parameter: Organism Value: A. thaliana
  misc_feature: MA Experiment 20000235 PARAMETER Experiment Name: At_Siliques_P Parameter: Plant Line Value: WS
  misc_feature: MA Experiment 20000235 PARAMETER Experiment Name: At_Siliques_P Parameter: Tissue Value: 5-10mm Siliques vs. Whole Plant
  misc_feature: MA Experiment ID: 20000265 Result: Up-regulated in Transcription
  misc_feature: MA Experiment 20000265 PARAMETER Experiment Name: At_Open_Flower_P Parameter: Age (day) Value: 21
  misc_feature: MA Experiment 20000265 PARAMETER Experiment Name: At_Open_Flower_P Parameter: Plant Line Value: WS
  misc_feature: MA Experiment 20000265 PARAMETER Experiment Name: At_Open_Flower_P Parameter: Tissue Value: Closed Flower vs. Whole Plant
  misc_feature: MA Experiment ID: 20000286 Result: Up-regulated in Transcription
  misc_feature: MA Experiment 20000286 PARAMETER Experiment Name: At_Open_Flower_P Parameter: Age (day) Value: 21
  misc_feature: MA Experiment 20000286 PARAMETER Experiment Name: At_Open_Flower_P Parameter: Plant Line Value: WS
  misc_feature: MA Experiment 20000286 PARAMETER Experiment Name: At_Open_Flower_P Parameter: Tissue Value: Half Open vs. Whole Plant
  misc_feature: MA Experiment ID: 20000439 Result: Up-regulated in Transcription
  misc_feature: MA Experiment 20000439 PARAMETER Experiment Name: At_Roots__P Parameter: Age (day) Value: 14 vs. 21
  misc_feature: MA Experiment 20000439 PARAMETER Experiment Name: At_Roots__P Parameter: Organism Value: A. thaliana
  misc_feature: MA Experiment 20000439 PARAMETER Experiment Name: At_Roots__P Parameter: Tissue Value: Roots vs. Whole Plant
  misc_feature: MA Experiment ID: 20000794 Result: Up-regulated in Transcription
  misc_feature: MA Experiment 20000794 PARAMETER Experiment Name: At_Petals_P Parameter: Age (day) Value: 23-25 days
  misc_feature: MA Experiment 20000794 PARAMETER Experiment Name: At_Petals_P Parameter: Plant Line Value: WS
  misc_feature: MA Experiment 20000794 PARAMETER Experiment Name: At_Petals_P Parameter: Tissue Value: Petals vs. Whole plant
  misc_feature: MA Experiment ID: 20001757 Result: Down-regulated in Transcription
  misc_feature: MA Experiment 20001757 PARAMETER Experiment Name: At_50mM_NH4NO3_L-to-H_P Parameter: Timepoint (hr) Value: 6
  misc_feature: MA Experiment 20001757 PARAMETER Experiment Name: At_50mM_NH4NO3_L-to-H_P Parameter: Tissue Value: Leaf
  misc_feature: MA Experiment 20001757 PARAMETER Experiment Name: At_50mM_NH4NO3_L-to-H_P Parameter: Treatment Value: 50mM NH4NO3 vs 100mM Mannitol

SEQ ID NO: 94619 - protein, 655 aa, Arabidopsis thaliana; identical to SEQ ID NO: 90863
  peptide (1)..(655): Ceres Seq. ID no. 12725595
  misc_feature (152)..(647): Pfam Name: Putative methyltransferase Pfam Description: Putative methyltransferase
  misc_feature (1)..(655): Homolog of NCBI NO: 15239326 NR Description: ankyrin-like protein; protein id: At5g06050.1
  misc_feature (64)..(655): Homolog of NCBI NO: 18405149 NR Description: expressed protein; protein id: At2g39750.1, by cDNA: gi_15450748 [Arabidopsis thaliana]
  misc_feature (1)..(653): Homolog of NCBI NO: 34908262 NR Description: ankyrin-like protein [Oryza sativa (japonica
  misc_feature (88)..(631): Homolog of NCBI NO: 20161455 NR Description: ankyrin-like protein [Oryza sativa (japonica
  misc_feature (83)..(593): Homolog of NCBI NO: 38567836 NR Description: OSJNBb0020J19.14 [Oryza sativa (japonica
  misc_feature (591)..(631): Homolog of NCBI NO: 38567836 NR Description: OSJNBb0020J19.14 [Oryza sativa (japonica
  misc_feature (97)..(638): Homolog of NCBI NO: 15230391 NR Description: putative protein; protein id: At3g51070.1
  misc_feature (121)..(631): Homolog of NCBI NO: 30697941 NR Description: dehydration-induced protein-related [Arabidopsis >gi|21928175|gb|AAM78114.1| AT5g64030/MBM17_13 [Arabidopsis >gi|27764914|gb|AAO23578.1| At5g64030/MBM17_13 [Arabidopsis
  misc_feature (139)..(633): Homolog of NCBI NO: 37535372 NR Description: hypothetical protein [Oryza sativa (japonica group)] >gi|13129503|gb|AAK13157.1| hypothetical protein [Oryza
  misc_feature (104)..(641): Homolog of NCBI NO: 25403070 NR Description: unknown protein, 55790-52851 [imported] -

SEQ ID NO: 94620 - protein, 554 aa, Arabidopsis thaliana; identical to SEQ ID NO: 90864
  peptide (1)..(554): Ceres Seq. ID no. 12725596
  misc_feature (51)..(546): Pfam Name: Putative methyltransferase Pfam Description: Putative methyltransferase
  misc_feature (1)..(554): Homolog of NCBI NO: 15239326 NR Description: ankyrin-like protein; protein id: At5g06050.1
  misc_feature (1)..(554): Homolog of NCBI NO: 18405149 NR Description: expressed protein; protein id: At2g39750.1, by cDNA: gi_15450748 [Arabidopsis thaliana]
  misc_feature (1)..(552): Homolog of NCBI NO: 34908262 NR Description: ankyrin-like protein [Oryza sativa (japonica
  misc_feature (1)..(530): Homolog of NCBI NO: 20161455 NR Description: ankyrin-like protein [Oryza sativa (japonica
  misc_feature (1)..(492): Homolog of NCBI NO: 38567836 NR Description: OSJNBb0020J19.14 [Oryza sativa (japonica
  misc_feature (490)..(530): Homolog of NCBI NO: 38567836 NR Description: OSJNBb0020J19.14 [Oryza sativa (japonica
  misc_feature (1)..(537): Homolog of NCBI NO: 15230391 NR Description: putative protein; protein id: At3g51070.1
  misc_feature (20)..(530): Homolog of NCBI NO: 30697941 NR Description: dehydration-induced protein-related [Arabidopsis >gi|21928175|gb|AAM78114.1| AT5g64030/MBM17_13 [Arabidopsis >gi|27764914|gb|AAO23578.1| At5g64030/MBM17_13 [Arabidopsis
  misc_feature (38)..(532): Homolog of NCBI NO: 37535372 NR Description: hypothetical protein [Oryza sativa (japonica group)] >gi|13129503|gb|AAK13157.1| hypothetical protein [Oryza
  misc_feature (3)..(540): Homolog of NCBI NO: 25403070 NR Description: unknown protein, 55790-52851 [imported] -

SEQ ID NO: 94621 - protein, 399 aa, Arabidopsis thaliana; identical to SEQ ID NO: 90865
  peptide (1)..(399): Ceres Seq. ID no. 12725597
  misc_feature (1)..(391): Pfam Name: Putative methyltransferase Pfam Description: Putative methyltransferase
  misc_feature (1)..(399): Homolog of NCBI NO: 15239326 NR Description: ankyrin-like protein; protein id: At5g06050.1
  misc_feature (1)..(399): Homolog of NCBI NO: 18405149 NR Description: expressed protein; protein id: At2g39750.1, by cDNA: gi_15450748 [Arabidopsis thaliana]
  misc_feature (1)..(397): Homolog of NCBI NO: 34908262 NR Description: ankyrin-like protein [Oryza sativa (japonica
  misc_feature (1)..(375): Homolog of NCBI NO: 20161455 NR Description: ankyrin-like protein [Oryza sativa (japonica
  misc_feature (1)..(337): Homolog of NCBI NO: 38567836 NR Description: OSJNBb0020J19.14 [Oryza sativa (japonica
  misc_feature (335)..(375): Homolog of NCBI NO: 38567836 NR Description: OSJNBb0020J19.14 [Oryza sativa (japonica
  misc_feature (1)..(382): Homolog of NCBI NO: 15230391 NR Description: putative protein; protein id: At3g51070.1
  misc_feature (1)..(375): Homolog of NCBI NO: 30697941 NR Description: dehydration-induced protein-related [Arabidopsis >gi|21928175|gb|AAM78114.1| AT5g64030/MBM17_13 [Arabidopsis >gi|27764914|gb|AAO23578.1| At5g64030/MBM17_13 [Arabidopsis
  misc_feature (1)..(377): Homolog of NCBI NO: 37535372 NR Description: hypothetical protein [Oryza sativa (japonica group)] >gi|13129503|gb|AAK13157.1| hypothetical protein [Oryza
  misc_feature (1)..(385): Homolog of NCBI NO: 25403070 NR Description: unknown protein, 55790-52851 [imported] -

SEQ ID NO: 94622 - DNA, 1446 bp, Arabidopsis thaliana; identical to SEQ ID NO: 90866
  misc_feature (1)..(1446): Ceres Seq. ID no. 12725610
  misc_feature: MA Experiment ID: 20000180 Result: Down-regulated in Transcription
  misc_feature: MA Experiment 20000180 PARAMETER Experiment Name: At_Germinating_Seeds_P Parameter: Age (hr) Value: 24 vs. 0
  misc_feature: MA Experiment 20000180 PARAMETER Experiment Name: At_Germinating_Seeds_P Parameter: Tissue Value: Germinating Seeds
  misc_feature: MA Experiment ID: 20001451 Result: Up-regulated in Transcription
  misc_feature: MA Experiment 20001451 PARAMETER Experiment Name: At_Far-red-induction_P Parameter: Age (day) Value: 7
  misc_feature: MA Experiment 20001451 PARAMETER Experiment Name: At_Far-red-induction_P Parameter: Light Value: Far-red vs. White
  misc_feature: MA Experiment 20001451 PARAMETER Experiment Name: At_Far-red-induction_P Parameter: Organism Value: A. thaliana
  misc_feature: MA Experiment 20001451 PARAMETER Experiment Name: At_Far-red-induction_P Parameter: Plant Line Value: Columbia
  misc_feature: MA Experiment 20001451 PARAMETER Experiment Name: At_Far-red-induction_P Parameter: Timepoint (hr) Value: 24
  misc_feature: MA Experiment 20001451 PARAMETER Experiment Name: At_Far-red-induction_P Parameter: Tissue Value: Whole Plant

SEQ ID NO: 94623 - protein, 481 aa, Arabidopsis thaliana; identical to SEQ ID NO: 90867
  peptide (1)..(481): Ceres Seq. ID no. 12725611
  misc_feature (202)..(236): Pfam Name: PPR repeat Pfam Description: PPR repeat
  misc_feature (1)..(481): Homolog of NCBI NO: 15223926 NR Description: hypothetical protein; protein id: At1g77360.1
  misc_feature (31)..(481): Homolog of NCBI NO: 14488357 NR Description: unknown protein [Oryza sativa (japonica
  misc_feature (6)..(474): Homolog of NCBI NO: 15223927 NR Description: hypothetical protein; protein id: At1g71060.1
  misc_feature (31)..(477): Homolog of NCBI NO: 15229604 NR Description: putative protein; protein id: At3g49730.1
  misc_feature (25)..(450): Homolog of NCBI NO: 15228767 NR Description: putative protein; protein id: At3g62470.1
  misc_feature (25)..(450): Homolog of NCBI NO: 15228788 NR Description: putative protein; protein id: At3g62540.1
  misc_feature (33)..(481): Homolog of NCBI NO: 15239161 NR Description: putative protein; protein id: At5g65820.1
  misc_feature (25)..(450): Homolog of NCBI NO: 15241508 NR Description: putative protein; protein id: At5g14820.1
  misc_feature (19)..(471): Homolog of NCBI NO: 15219049 NR Description: hypothetical protein; protein id: At1g52640.1
  misc_feature (17)..(465): Homolog of NCBI NO: 21686921 NR Description: putative reverse transcriptase [Oryza sativa

SEQ ID NO: 94624 - protein, 438 aa, Arabidopsis thaliana; identical to SEQ ID NO: 90868
  peptide (1)..(438): Ceres Seq. ID no. 12725612
  misc_feature (159)..(193): Pfam Name: PPR repeat Pfam Description: PPR repeat
  misc_feature (1)..(438): Homolog of NCBI NO: 15223926 NR Description: hypothetical protein; protein id: At1g77360.1
  misc_feature (1)..(438): Homolog of NCBI NO: 14488357 NR Description: unknown protein [Oryza sativa (japonica
  misc_feature (1)..(431): Homolog of NCBI NO: 15223927 NR Description: hypothetical protein; protein id: At1g71060.1
  misc_feature (1)..(434): Homolog of NCBI NO: 15229604 NR Description: putative protein; protein id: At3g49730.1
  misc_feature (1)..(407): Homolog of NCBI NO: 15228767 NR Description: putative protein; protein id: At3g62470.1
  misc_feature (1)..(407): Homolog of NCBI NO: 15228788 NR Description: putative protein; protein id: At3g62540.1
  misc_feature (1)..(438): Homolog of NCBI NO: 15239161 NR Description: putative protein; protein id: At5g65820.1
  misc_feature (1)..(407): Homolog of NCBI NO: 15241508 NR Description: putative protein; protein id: At5g14820.1
  misc_feature (1)..(428): Homolog of NCBI NO: 15219049 NR Description: hypothetical protein; protein id: At1g52640.1
  misc_feature (1)..(422): Homolog of NCBI NO: 21686921 NR Description: putative reverse transcriptase [Oryza sativa

SEQ ID NO: 94625 - protein, 379 aa, Arabidopsis thaliana; identical to SEQ ID NO: 90869
  peptide (1)..(379): Ceres Seq. ID no. 12725613
  misc_feature (100)..(134): Pfam Name: PPR repeat Pfam Description: PPR repeat
  misc_feature (1)..(379): Homolog of NCBI NO: 15223926 NR Description: hypothetical protein; protein id: At1g77360.1
  misc_feature (1)..(379): Homolog of NCBI NO: 14488357 NR Description: unknown protein [Oryza sativa (japonica
  misc_feature (1)..(372): Homolog of NCBI NO: 15223927 NR Description: hypothetical protein; protein id: At1g71060.1
  misc_feature (1)..(375): Homolog of NCBI NO: 15229604 NR Description: putative protein; protein id: At3g49730.1
  misc_feature (1)..(348): Homolog of NCBI NO: 15228767 NR Description: putative protein; protein id: At3g62470.1
  misc_feature (1)..(348): Homolog of NCBI NO: 15228788 NR Description: putative protein; protein id: At3g62540.1
  misc_feature (1)..(379): Homolog of NCBI NO: 15239161 NR Description: putative protein; protein id: At5g65820.1
  misc_feature (1)..(348): Homolog of NCBI NO: 15241508 NR Description: putative protein; protein id: At5g14820.1
  misc_feature (1)..(369): Homolog of NCBI NO: 15219049 NR Description: hypothetical protein; protein id: At1g52640.1
  misc_feature (1)..(363): Homolog of NCBI NO: 21686921 NR Description: putative reverse transcriptase [Oryza sativa

SEQ ID NO: 94626 - DNA, 2343 bp, Arabidopsis thaliana; identical to SEQ ID NO: 90870
  misc_feature (1)..(2343): Ceres Seq. ID no. 12725618
  misc_feature: MA Experiment ID: 20000171 Result: Up-regulated in Transcription
  misc_feature: MA Experiment 20000171 PARAMETER Experiment Name: At_42deg_Heat_P Parameter: Age (day) Value: 14
  misc_feature: MA Experiment 20000171 PARAMETER Experiment Name: At_42deg_Heat_P Parameter: Organism Value: A. thaliana
  misc_feature: MA Experiment 20000171 PARAMETER Experiment Name: At_42deg_Heat_P Parameter: Plant Line Value: WS
  misc_feature: MA Experiment 20000171 PARAMETER Experiment Name: At_42deg_Heat_P Parameter: Temperature (deg C) Value: 42 vs. 22
  misc_feature: MA Experiment 20000171 PARAMETER Experiment Name: At_42deg_Heat_P Parameter: Timepoint (hr) Value: 1
  misc_feature: MA Experiment 20000171 PARAMETER Experiment Name: At_42deg_Heat_P Parameter: Tissue Value: Aerial
  misc_feature: MA Experiment ID: 20000173 Result: Up-regulated in Transcription
  misc_feature: MA Experiment 20000173 PARAMETER Experiment Name: At_42deg_Heat_P Parameter: Age (day) Value: 14
  misc_feature: MA Experiment 20000173 PARAMETER Experiment Name: At_42deg_Heat_P Parameter: Organism Value: A. thaliana
  misc_feature: MA Experiment 20000173 PARAMETER Experiment Name: At_42deg_Heat_P Parameter: Plant Line Value: WS
  misc_feature: MA Experiment 20000173 PARAMETER Experiment Name: At_42deg_Heat_P Parameter: Temperature (deg C) Value: 42 vs. 22
  misc_feature: MA Experiment 20000173 PARAMETER Experiment Name: At_42deg_Heat_P Parameter: Timepoint (hr) Value: 6
  misc_feature: MA Experiment 20000173 PARAMETER Experiment Name: At_42deg_Heat_P Parameter: Tissue Value: Aerial
  misc_feature: MA Experiment ID: 20000286 Result: Up-regulated in Transcription
  misc_feature: MA Experiment 20000286 PARAMETER Experiment Name: At_Open_Flower_P Parameter: Age (day) Value: 21
  misc_feature: MA Experiment 20000286 PARAMETER Experiment Name: At_Open_Flower_P Parameter: Plant Line Value: WS
  misc_feature: MA Experiment 20000286 PARAMETER Experiment Name: At_Open_Flower_P Parameter: Tissue Value: Half Open vs. Whole Plant
  misc_feature: MA Experiment ID: 20000709 Result: Up-regulated in Transcription
  misc_feature: MA Experiment 20000709 PARAMETER Experiment Name: At_15mM_NH4NO3_L-to-H_P Parameter: Age (hr) Value: 14
  misc_feature: MA Experiment 20000709 PARAMETER Experiment Name: At_15mM_NH4NO3_L-to-H_P Parameter: Organism Value: A. thaliana
  misc_feature: MA Experiment 20000709 PARAMETER Experiment Name: At_15mM_NH4NO3_L-to-H_P Parameter: Plant Line Value: WS
  misc_feature: MA Experiment 20000709 PARAMETER Experiment Name: At_15mM_NH4NO3_L-to-H_P Parameter: Timepoint (hr) Value: 4
  misc_feature: MA Experiment 20000709 PARAMETER Experiment Name: At_15mM_NH4NO3_L-to-H_P Parameter: Tissue Value: Aerial
  misc_feature: MA Experiment 20000709 PARAMETER Experiment Name: At_15mM_NH4NO3_L-to-H_P Parameter: Treatment Value: 15mM NH4NO3 vs. 30mM Mannitol

SEQ ID NO: 94627 - protein, 780 aa, Arabidopsis thaliana; identical to SEQ ID NO: 90871
  peptide (1)..(780): Ceres Seq. ID no. 12725619
  misc_feature (702)..(779): Pfam Name: Galactose binding lectin domain Pfam Description: Galactose binding lectin domain
  misc_feature (12)..(636): Homolog of NCBI NO: 30697899 NR Description: glycosyl hydrolase family 35 (beta-galactosidase)
  misc_feature (12)..(636): Homolog of NCBI NO: 6686884 NR Description: putative beta-galactosidase [Arabidopsis thaliana]
  misc_feature (2)..(622): Homolog of NCBI NO: 34913072 NR Description: putative beta-galactosidase [Oryza sativa
  misc_feature (627)..(779): Homolog of NCBI NO: 34913072 NR Description: putative beta-galactosidase [Oryza sativa
  misc_feature (10)..(622): Homolog of NCBI NO: 1168654 NR Description: Beta-galactosidase precursor (Lactase)
  misc_feature (627)..(779): Homolog of NCBI NO: 1168654 NR Description: Beta-galactosidase precursor (Lactase)
  misc_feature (11)..(394): Homolog of NCBI NO: 7939621 NR Description: beta-galactosidase [Lycopersicon esculentum]
  misc_feature (381)..(622): Homolog of NCBI NO: 7939621 NR Description: beta-galactosidase [Lycopersicon esculentum]
  misc_feature (627)..(780): Homolog of NCBI NO: 7939621 NR Description: beta-galactosidase [Lycopersicon esculentum]
  misc_feature (12)..(622): Homolog of NCBI NO: 7488063 NR Description: probable beta-galactosidase (EC 3.2.1.23)

SEQ ID NO: 94628 - protein, 739 aa, Arabidopsis thaliana; identical to SEQ ID NO: 90872
  peptide (1)..(739): Ceres Seq. ID no. 12725620
  misc_feature (661)..(738): Pfam Name: Galactose binding lectin domain Pfam Description: Galactose binding lectin domain
  misc_feature (1)..(595): Homolog of NCBI NO: 30697899 NR Description: glycosyl hydrolase family 35 (beta-galactosidase)
  misc_feature (1)..(595): Homolog of NCBI NO: 6686884 NR Description: putative beta-galactosidase [Arabidopsis thaliana]
  misc_feature (1)..(581): Homolog of NCBI NO: 34913072 NR Description: putative beta-galactosidase [Oryza sativa
  misc_feature (586)..(738): Homolog of NCBI NO: 34913072 NR Description: putative beta-galactosidase [Oryza sativa
  misc_feature (1)..(581): Homolog of NCBI NO: 1168654 NR Description: Beta-galactosidase precursor (Lactase)
  misc_feature (586)..(738): Homolog of NCBI NO: 1168654 NR Description: Beta-galactosidase precursor (Lactase)
  misc_feature (1)..(353): Homolog of NCBI NO: 7939621 NR Description: beta-galactosidase [Lycopersicon esculentum]
  misc_feature (340)..(581): Homolog of NCBI NO: 7939621 NR Description: beta-galactosidase [Lycopersicon esculentum]
  misc_feature (586)..(739): Homolog of NCBI NO: 7939621 NR Description: beta-galactosidase [Lycopersicon esculentum]
  misc_feature (1)..(581): Homolog of NCBI NO: 7488063 NR Description: probable beta-galactosidase (EC 3.2.1.23)

SEQ ID NO: 94629 - protein, 645 aa, Arabidopsis thaliana; identical to SEQ ID NO: 90873
  peptide (1)..(645): Ceres Seq. ID no. 12725621
  misc_feature (567)..(644): Pfam Name: Galactose binding lectin domain Pfam Description: Galactose binding lectin domain
  misc_feature (1)..(501): Homolog of NCBI NO: 30697899 NR Description: glycosyl hydrolase family 35 (beta-galactosidase)
  misc_feature (1)..(501): Homolog of NCBI NO: 6686884 NR Description: putative beta-galactosidase [Arabidopsis thaliana]
  misc_feature (1)..(487): Homolog of NCBI NO: 34913072 NR Description: putative beta-galactosidase [Oryza sativa
  misc_feature (492)..(644): Homolog of NCBI NO: 34913072 NR Description: putative beta-galactosidase [Oryza sativa
  misc_feature (1)..(487): Homolog of NCBI NO: 1168654 NR Description: Beta-galactosidase precursor (Lactase)
  misc_feature (492)..(644): Homolog of NCBI NO: 1168654 NR Description: Beta-galactosidase precursor (Lactase)
  misc_feature (1)..(259): Homolog of NCBI NO: 7939621 NR Description: beta-galactosidase [Lycopersicon esculentum]
  misc_feature (246)..(487): Homolog of NCBI NO: 7939621 NR Description: beta-galactosidase [Lycopersicon esculentum]
  misc_feature (492)..(645): Homolog of NCBI NO: 7939621 NR Description: beta-galactosidase [Lycopersicon esculentum]
  misc_feature (1)..(487): Homolog of NCBI NO: 7488063 NR Description: probable beta-galactosidase (EC 3.2.1.23)

SEQ ID NO: 94630 - DNA, 2893 bp, Arabidopsis thaliana; identical to SEQ ID NO: 90874
  misc_feature (1)..(2893): Ceres Seq. ID no. 12725622
  misc_feature: MA Experiment ID: 20000173 Result: Down-regulated in Transcription
  misc_feature: MA Experiment 20000173 PARAMETER Experiment Name: At_42deg_Heat_P Parameter: Age (day) Value: 14
  misc_feature: MA Experiment 20000173 PARAMETER Experiment Name: At_42deg_Heat_P Parameter: Organism Value: A. thaliana
  misc_feature: MA Experiment 20000173 PARAMETER Experiment Name: At_42deg_Heat_P Parameter: Plant Line Value: WS
  misc_feature: MA Experiment 20000173 PARAMETER Experiment Name: At_42deg_Heat_P Parameter: Temperature (deg C) Value: 42 vs. 22
  misc_feature: MA Experiment 20000173 PARAMETER Experiment Name: At_42deg_Heat_P Parameter: Timepoint (hr) Value: 6
  misc_feature: MA Experiment 20000173 PARAMETER Experiment Name: At_42deg_Heat_P Parameter: Tissue Value: Aerial
  misc_feature: MA Experiment ID: 20000180 Result: Up-regulated in Transcription
  misc_feature: MA Experiment 20000180 PARAMETER Experiment Name: At_Germinating_Seeds_P Parameter: Age (hr) Value: 24 vs. 0
  misc_feature: MA Experiment 20000180 PARAMETER Experiment Name: At_Germinating_Seeds_P Parameter: Tissue Value: Germinating Seeds
  misc_feature: MA Experiment ID: 20000182 Result: Up-regulated in Transcription
  misc_feature: MA Experiment 20000182 PARAMETER Experiment Name: At_2mM_SA_P Parameter: Age (day) Value: 14
  misc_feature: MA Experiment 20000182 PARAMETER Experiment Name: At_2mM_SA_P Parameter: Organism Value: A. thaliana
  misc_feature: MA Experiment 20000182 PARAMETER Experiment Name: At_2mM_SA_P Parameter: Plant Line Value: WS
  misc_feature: MA Experiment 20000182 PARAMETER Experiment Name: At_2mM_SA_P Parameter: Timepoint (hr) Value: 6
  misc_feature: MA Experiment 20000182 PARAMETER Experiment Name: At_2mM_SA_P Parameter: Tissue Value: Aerial
  misc_feature: MA Experiment 20000182 PARAMETER Experiment Name: At_2mM_SA_P Parameter: Treatment Value: 2mM SA vs. No Treatment
  misc_feature: MA Experiment ID: 20000184 Result: Down-regulated in Transcription
  misc_feature: MA Experiment 20000184 PARAMETER Experiment Name: At_Shoots__P Parameter: Age (day) Value: 7
  misc_feature: MA Experiment 20000184 PARAMETER Experiment Name: At_Shoots__P Parameter: Tissue Value: Shoots vs. Whole Plant
  misc_feature: MA Experiment ID: 20000185 Result: Up-regulated in Transcription
  misc_feature: MA Experiment 20000185 PARAMETER Experiment Name: At_Roots__P Parameter: Age (day) Value: 7 vs. 21
  misc_feature: MA Experiment 20000185 PARAMETER Experiment Name: At_Roots__P Parameter: Organism Value: A. thaliana
  misc_feature: MA Experiment 20000185 PARAMETER Experiment Name: At_Roots__P Parameter: Tissue Value: Roots vs. Whole Plant
  misc_feature: MA Experiment ID: 20000438 Result: Down-regulated in Transcription
  misc_feature: MA Experiment 20000438 PARAMETER Experiment Name: At_Shoots__P Parameter: Age (day) Value: 14
  misc_feature: MA Experiment 20000438 PARAMETER Experiment Name: At_Shoots__P Parameter: Tissue Value: Shoots vs. Whole Plant

SEQ ID NO: 94631 - protein, 879 aa, Arabidopsis thaliana; identical to SEQ ID NO: 90875
  peptide (1)..(879): Ceres Seq. ID no. 12725623
  misc_feature (431)..(772): Pfam Name: Protein of unknown function (DUF632) Pfam Description: Protein of unknown function (DUF632)
  misc_feature (244)..(879): Homolog of NCBI NO: 15219083 NR Description: putative bzip-like transcription factor; protein At1g21740.1 [Arabidopsis thaliana] >gi|25518309|pir||A86351
  misc_feature (1)..(233): Homolog of NCBI NO: 15219083 NR Description: putative bzip-like transcription factor; protein At1g21740.1 [Arabidopsis thaliana] >gi|25518309|pir||A86351
  misc_feature (362)..(871): Homolog of NCBI NO: 34905788 NR Description: bzip-like transcription factor-like [Oryza sativa
  misc_feature (16)..(176): Homolog of NCBI NO: 34905788 NR Description: bzip-like transcription factor-like [Oryza sativa
  misc_feature (1)..(322): Homolog of NCBI NO: 15236929 NR Description: putative protein; protein id: At4g35240.1
  misc_feature (541)..(868): Homolog of NCBI NO: 15236929 NR Description: putative protein; protein id: At4g35240.1
  misc_feature (746)..(876): Homolog of NCBI NO: 15219083 NR Description: putative bzip-like transcription factor; protein At1g21740.1 [Arabidopsis thaliana] >gi|25518309|pir||A86351
  misc_feature (318)..(610): Homolog of NCBI NO: 25411780 NR Description: hypothetical protein At2g17100 [imported] -
  misc_feature (637)..(874): Homolog of NCBI NO: 25411780 NR Description: hypothetical protein At2g17100 [imported] -
  misc_feature (1)..(170): Homolog of NCBI NO: 25411780 NR Description: hypothetical protein At2g17100 [imported] -

SEQ ID NO: 94632 - protein, 680 aa, Arabidopsis thaliana; identical to SEQ ID NO: 90876
  peptide (1)..(680): Ceres Seq. ID no. 12725624
  misc_feature (232)..(573): Pfam Name: Protein of unknown function (DUF632) Pfam Description: Protein of unknown function (DUF632)
  misc_feature (45)..(680): Homolog of NCBI NO: 15219083 NR Description: putative bzip-like transcription factor; protein At1g21740.1 [Arabidopsis thaliana] >gi|25518309|pir||A86351
  misc_feature (1)..(34): Homolog of NCBI NO: 15219083 NR Description: putative bzip-like transcription factor; protein At1g21740.1 [Arabidopsis thaliana] >gi|25518309|pir||A86351
  misc_feature (163)..(672): Homolog of NCBI NO: 34905788 NR Description: bzip-like transcription factor-like [Oryza sativa
  misc_feature (1)..(123): Homolog of NCBI NO: 15236929 NR Description: putative protein; protein id: At4g35240.1
  misc_feature (342)..(669): Homolog of NCBI NO: 15236929 NR Description: putative protein; protein id: At4g35240.1
  misc_feature (547)..(677): Homolog of NCBI NO: 15219083 NR Description: putative bzip-like transcription factor; protein At1g21740.1 [Arabidopsis thaliana] >gi|25518309|pir||A86351
  misc_feature (119)..(411): Homolog of NCBI NO: 25411780 NR Description: hypothetical protein At2g17100 [imported] -
  misc_feature (438)..(675): Homolog of NCBI NO: 25411780 NR Description: hypothetical protein At2g17100 [imported] -
  misc_feature (276)..(675): Homolog of NCBI NO: 18398315 NR Description: expressed protein; protein id: At2g17110.1, by cDNA: gi_15724285 [Arabidopsis thaliana] AT4g35240/F23E12_200 [Arabidopsis thaliana]
  misc_feature (364)..(672): Homolog of NCBI NO: 38345928 NR Description: OSJNBb0078D11.3 [Oryza sativa (japonica

SEQ ID NO: 94633 - protein, 677 aa, Arabidopsis thaliana; identical to SEQ ID NO: 90877
  peptide (1)..(677): Ceres Seq. ID no. 12725625
  misc_feature (229)..(570): Pfam Name: Protein of unknown function (DUF632) Pfam Description: Protein of unknown function (DUF632)
  misc_feature (42)..(677): Homolog of NCBI NO: 15219083 NR Description: putative bzip-like transcription factor; protein At1g21740.1 [Arabidopsis thaliana] >gi|25518309|pir||A86351
  misc_feature (1)..(31): Homolog of NCBI NO: 15219083 NR Description: putative bzip-like transcription factor; protein At1g21740.1 [Arabidopsis thaliana] >gi|25518309|pir||A86351
  misc_feature (160)..(669): Homolog of NCBI NO: 34905788 NR Description: bzip-like transcription factor-like [Oryza sativa
  misc_feature (1)..(120): Homolog of NCBI NO: 15236929 NR Description: putative protein; protein id: At4g35240.1
  misc_feature (339)..(666): Homolog of NCBI NO: 15236929 NR Description: putative protein; protein id: At4g35240.1
  misc_feature (544)..(674): Homolog of NCBI NO: 15219083 NR Description: putative bzip-like transcription factor; protein At1g21740.1 [Arabidopsis thaliana] >gi|25518309|pir||A86351
  misc_feature (116)..(408): Homolog of NCBI NO: 25411780 NR Description: hypothetical protein At2g17100 [imported] -
  misc_feature (435)..(672): Homolog of NCBI NO: 25411780 NR Description: hypothetical protein At2g17100 [imported] -
  misc_feature (273)..(672): Homolog of NCBI NO: 18398315 NR Description: expressed protein; protein id: At2g17110.1, by cDNA: gi_15724285 [Arabidopsis thaliana] AT4g35240/F23E12_200 [Arabidopsis thaliana]
  misc_feature (361)..(669): Homolog of NCBI NO: 38345928 NR Description: OSJNBb0078D11.3 [Oryza sativa (japonica

SEQ ID NO: 94634 - DNA, 1146 bp, Arabidopsis thaliana; identical to SEQ ID NO: 90878
  misc_feature (1)..(1146): Ceres Seq. ID no. 12725626
  misc_feature: MA Experiment ID: 108433 Result: Up-regulated in Transcription
  misc_feature: MA Experiment 108433 PARAMETER Experiment Name: At_rhl_Mutant2_cDNA_P Parameter: Age (day) Value: 7
  misc_feature: MA Experiment 108433 PARAMETER Experiment Name: At_rhl_Mutant2_cDNA_P Parameter: Organism Value: A. thaliana
  misc_feature: MA Experiment 108433 PARAMETER Experiment Name: At_rhl_Mutant2_cDNA_P Parameter: Plant Line Value: rhl Mutant vs. wt landsburg
  misc_feature: MA Experiment 108433 PARAMETER Experiment Name: At_rhl_Mutant2_cDNA_P Parameter: Tissue Value: Roots
  misc_feature: MA Experiment ID: 108434 Result: Down-regulated in Transcription
  misc_feature: MA Experiment 108434 PARAMETER Experiment Name: At_Root_Tips_cDNA_P Parameter: Tissue Value: Root Tips
  misc_feature: MA Experiment ID: 108463 Result: Up-regulated in Transcription
  misc_feature: MA Experiment 108463 PARAMETER Experiment Name: At_Germinating_Seeds_cDNA_P Parameter: Age (day) Value: 3 vs. 0
  misc_feature: MA Experiment 108463 PARAMETER Experiment Name: At_Germinating_Seeds_cDNA_P Parameter: Tissue Value: Germinating Seeds
  misc_feature: MA Experiment ID: 108464 Result: Up-regulated in Transcription
  misc_feature: MA Experiment 108464 PARAMETER Experiment Name: At_Germinating_Seeds_cDNA_P Parameter: Age (day) Value: 4 vs. 0
  misc_feature: MA Experiment 108464 PARAMETER Experiment Name: At_Germinating_Seeds_cDNA_P Parameter: Tissue Value: Germinating Seeds
  misc_feature: MA Experiment ID: 108594 Result: Down-regulated in Transcription
  misc_feature: MA Experiment 108594 PARAMETER Experiment Name: At_Ler-rhl_Root_cDNA_P Parameter: Plant Line Value: null
  misc_feature: MA Experiment ID: 108595 Result: Up-regulated in Transcription
  misc_feature: MA Experiment 108595 PARAMETER Experiment Name: At_Ler-pi_Ovule_cDNA_P Parameter: Plant Line Value: null
  misc_feature: MA Experiment ID: 20000069 Result: Up-regulated in Transcription
  misc_feature: MA Experiment 20000069 PARAMETER Experiment Name: At_100uM_ABA_Mutants_cDNA_P Parameter: Plant Line Value: CS23
  misc_feature: MA Experiment 20000069 PARAMETER Experiment Name: At_100uM_ABA_Mutants_cDNA_P Parameter: Timepoint (hr) Value: 6
  misc_feature: MA Experiment 20000069 PARAMETER Experiment Name: At_100uM_ABA_Mutants_cDNA_P Parameter: Tissue Value: Aerial
  misc_feature: MA Experiment 20000069 PARAMETER Experiment Name: At_100uM_ABA_Mutants_cDNA_P Parameter: Treatment Value: 100uM ABA vs. No Treatment
  misc_feature: MA Experiment ID: 20000113 Result: Down-regulated in Transcription
  misc_feature: MA Experiment 20000113 PARAMETER Experiment Name: At_42deg_Heat_cDNA_P Parameter: Temperature (deg C) Value: 42 vs. 22
  misc_feature: MA Experiment 20000113 PARAMETER Experiment Name: At_42deg_Heat_cDNA_P Parameter: Timepoint (hr) Value: 8
  misc_feature: MA Experiment 20000113 PARAMETER Experiment Name: At_42deg_Heat_cDNA_P Parameter: Tissue Value: Aerial
  misc_feature: MA Experiment ID: 20000185 Result: Up-regulated in Transcription
  misc_feature: MA Experiment 20000185 PARAMETER Experiment Name: At_Roots__P Parameter: Age (day) Value: 7 vs. 21
  misc_feature: MA Experiment 20000185 PARAMETER Experiment Name: At_Roots__P Parameter: Organism Value: A. thaliana
  misc_feature: MA Experiment 20000185 PARAMETER Experiment Name: At_Roots__P Parameter: Tissue Value: Roots vs. Whole Plant
  misc_feature: MA Experiment ID: 20000227 Result: Down-regulated in Transcription
  misc_feature: MA Experiment 20000227 PARAMETER Experiment Name: At_Root-Tips-vs-Tops_P Parameter: Tissue Value: Root Tips vs. Root Tops
  misc_feature: MA Experiment ID: 20000436 Result: Down-regulated in Transcription
  misc_feature: MA Experiment 20000436 PARAMETER Experiment Name: At_Drought_P Parameter: Age (day) Value: 7
  misc_feature: MA Experiment 20000436 PARAMETER Experiment Name: At_Drought_P Parameter: Organism Value: A. thaliana
  misc_feature: MA Experiment 20000436 PARAMETER Experiment Name: At_Drought_P Parameter: Plant Line Value: WS
  misc_feature: MA Experiment 20000436 PARAMETER Experiment Name: At_Drought_P Parameter: Timepoint (hr) Value: 12
  misc_feature: MA Experiment 20000436 PARAMETER Experiment Name: At_Drought_P Parameter: Tissue Value: Whole Plant
  misc_feature: MA Experiment 20000436 PARAMETER Experiment Name: At_Drought_P Parameter: Treatment Value: Drought vs. No Drought
  misc_feature: MA Experiment ID: 20000439 Result: Up-regulated in Transcription
  misc_feature: MA Experiment 20000439 PARAMETER Experiment Name: At_Roots__P Parameter: Age (day) Value: 14 vs. 21
  misc_feature: MA Experiment 20000439 PARAMETER Experiment Name: At_Roots__P Parameter: Organism Value: A. thaliana
  misc_feature: MA Experiment 20000439 PARAMETER Experiment Name: At_Roots__P Parameter: Tissue Value: Roots vs. Whole Plant
  misc_feature: MA Experiment ID: 20000451 Result: Down-regulated in Transcription
  misc_feature: MA Experiment 20000451 PARAMETER Experiment Name: At_CS6879_Shoots-Roots_P Parameter: Age (day) Value: 14
  misc_feature: MA Experiment 20000451 PARAMETER Experiment Name: At_CS6879_Shoots-Roots_P Parameter: Organism Value: A. thaliana
  misc_feature: MA Experiment 20000451 PARAMETER Experiment Name: At_CS6879_Shoots-Roots_P Parameter: Plant Line Value: CS6879 vs. WS
  misc_feature: MA Experiment 20000451 PARAMETER Experiment Name: At_CS6879_Shoots-Roots_P Parameter: Tissue Value: Roots
  misc_feature: MA Experiment ID: 20000460 Result: Down-regulated in Transcription
  misc_feature: MA Experiment 20000460 PARAMETER Experiment Name: At_10percent_PEG_P Parameter: Age (day) Value: 12
  misc_feature: MA Experiment 20000460 PARAMETER Experiment Name: At_10percent_PEG_P Parameter: Organism Value: A. thaliana
  misc_feature: MA Experiment 20000460 PARAMETER Experiment Name: At_10percent_PEG_P Parameter: Plant Line Value: WS
  misc_feature: MA Experiment 20000460 PARAMETER Experiment Name: At_10percent_PEG_P Parameter: Timepoint (day) Value: 12
  misc_feature: MA Experiment 20000460 PARAMETER Experiment Name: At_10percent_PEG_P Parameter: Tissue Value: Whole Plant
  misc_feature: MA Experiment 20000460 PARAMETER Experiment Name: At_10percent_PEG_P Parameter: Treatment Value: 10percent PEG vs. No Treatment
  misc_feature: MA Experiment ID: 20000527 Result: Down-regulated in Transcription
  misc_feature: MA Experiment 20000527 PARAMETER Experiment Name: At_10percent_PEG_P Parameter: Age (day) Value: 20
  misc_feature: MA Experiment 20000527 PARAMETER Experiment Name: At_10percent_PEG_P Parameter: Organism Value: A. thaliana
  misc_feature: MA Experiment 20000527 PARAMETER Experiment Name: At_10percent_PEG_P Parameter: Plant Line Value: WS
  misc_feature: MA Experiment 20000527 PARAMETER Experiment Name: At_10percent_PEG_P Parameter: Timepoint (day) Value: 20
  misc_feature: MA Experiment 20000527 PARAMETER Experiment Name: At_10percent_PEG_P Parameter: Tissue Value: Whole Plant
  misc_feature: MA Experiment 20000527 PARAMETER Experiment Name: At_10percent_PEG_P Parameter: Treatment Value: 10percent PEG vs. No Treatment

SEQ ID NO: 94635 - protein, 381 aa, Arabidopsis thaliana; identical to SEQ ID NO: 90879
  peptide (1)..(381): Ceres Seq. ID no. 12725627
  misc_feature (115)..(358): Pfam Name: O-methyltransferase Pfam Description: O-methyltransferase
  misc_feature (1)..(381): Homolog of NCBI NO: 15223977 NR Description: O-methyltransferase, family 2 family; protein id: [Arabidopsis thaliana] >gi|25315960|pir||G96804 hypothetical
  misc_feature (1)..(381): Homolog of NCBI NO: 15223976 NR Description: O-methyltransferase, family 2 family; protein id:
  misc_feature (1)..(381): Homolog of NCBI NO: 27808586 NR Description: At1g77520 [Arabidopsis thaliana]
  misc_feature (44)..(381): Homolog of NCBI NO: 21593350 NR Description: putative caffeic acid 3-O-methyltransferase
  misc_feature (1)..(381): Homolog of NCBI NO: 25315953 NR Description: hypothetical protein F16M19.12 [imported] -
  misc_feature (1)..(381): Homolog of NCBI NO: 21618183 NR Description: caffeic acid 3-O-methyltransferase-like protein
  misc_feature (1)..(381): Homolog of NCBI NO: 15238847 NR Description: O-methyltransferase 1, putative; protein id: supported by cDNA: 99784. [Arabidopsis thaliana]
  misc_feature (185)..(381): Homolog of NCBI NO: 15240132 NR Description: O-methyltransferase, family 2 family; protein id:
  misc_feature (64)..(126): Homolog of NCBI NO: 15240132 NR Description: O-methyltransferase, family 2 family; protein id:
  misc_feature (1)..(44): Homolog of NCBI NO: 15240132 NR Description: O-methyltransferase, family 2 family; protein id:

SEQ ID NO: 94636 - protein, 354 aa, Arabidopsis thaliana; identical to SEQ ID NO: 90880
  peptide (1)..(354): Ceres Seq. ID no. 12725628
  misc_feature (88)..(331): Pfam Name: O-methyltransferase Pfam Description: O-methyltransferase
  misc_feature (1)..(354): Homolog of NCBI NO: 15223977 NR Description: O-methyltransferase, family 2 family; protein id: [Arabidopsis thaliana] >gi|25315960|pir||G96804 hypothetical
  misc_feature (1)..(354): Homolog of NCBI NO: 15223976 NR Description: O-methyltransferase, family 2 family; protein id:
  misc_feature (1)..(354): Homolog of NCBI NO: 27808586 NR Description: At1g77520 [Arabidopsis thaliana]
  misc_feature (17)..(354): Homolog of NCBI NO: 21593350 NR Description: putative caffeic acid 3-O-methyltransferase
  misc_feature (1)..(354): Homolog of NCBI NO: 25315953 NR Description: hypothetical protein F16M19.12 [imported] -
  misc_feature (1)..(354): Homolog of NCBI NO: 21618183 NR Description: caffeic acid 3-O-methyltransferase-like protein
  misc_feature (1)..(354): Homolog of NCBI NO: 15238847 NR Description: O-methyltransferase 1, putative; protein id: supported by cDNA: 99784. [Arabidopsis thaliana]
  misc_feature (158)..(354): Homolog of NCBI NO: 15240132 NR Description: O-methyltransferase, family 2 family; protein id:
  misc_feature (37)..(99): Homolog of NCBI NO: 15240132 NR Description: O-methyltransferase, family 2 family; protein id:
  misc_feature (1)..(17): Homolog of NCBI NO: 15240132 NR Description: O-methyltransferase, family 2 family; protein id:

SEQ ID NO: 94637 - protein, 338 aa, Arabidopsis thaliana; identical to SEQ ID NO: 90881
  peptide (1)..(338): Ceres Seq. ID no. 12725629
  misc_feature (72)..(315): Pfam Name: O-methyltransferase Pfam Description: O-methyltransferase
  misc_feature (1)..(338): Homolog of NCBI NO: 15223977 NR Description: O-methyltransferase, family 2 family; protein id: [Arabidopsis thaliana] >gi|25315960|pir||G96804 hypothetical
  misc_feature (1)..(338): Homolog of NCBI NO: 15223976 NR Description: O-methyltransferase, family 2 family; protein id:
  misc_feature (1)..(338): Homolog of NCBI NO: 27808586 NR Description: At1g77520 [Arabidopsis thaliana]
  misc_feature (1)..(338): Homolog of NCBI NO: 21593350 NR Description: putative caffeic acid 3-O-methyltransferase
  misc_feature (1)..(338): Homolog of NCBI NO: 25315953 NR Description: hypothetical protein F16M19.12 [imported] -
  misc_feature (1)..(338): Homolog of NCBI NO: 21618183 NR Description: caffeic acid 3-O-methyltransferase-like protein
  misc_feature (1)..(338): Homolog of NCBI NO: 15238847 NR Description: O-methyltransferase 1, putative; protein id: supported by cDNA: 99784. [Arabidopsis thaliana]
  misc_feature (142)..(338): Homolog of NCBI NO: 15240132 NR Description: O-methyltransferase, family 2 family; protein id:
  misc_feature (21)..(83): Homolog of NCBI NO: 15240132 NR Description: O-methyltransferase, family 2 family; protein id:
  misc_feature (1)..(338): Homolog of NCBI NO: 21618219 NR Description: O-methyltransferase, putative [Arabidopsis

SEQ ID NO: 94638 - DNA, 735 bp, Arabidopsis thaliana; identical to SEQ ID NO: 90882
  misc_feature (1)..(735): Ceres Seq. ID no. 12725634
  misc_feature: MA Experiment ID: 20000182 Result: Down-regulated in Transcription
  misc_feature: MA Experiment 20000182 PARAMETER Experiment Name: At_2mM_SA_P Parameter: Age (day) Value: 14
  misc_feature: MA Experiment 20000182 PARAMETER Experiment Name: At_2mM_SA_P Parameter: Organism Value: A. thaliana
  misc_feature: MA Experiment 20000182 PARAMETER Experiment Name: At_2mM_SA_P Parameter: Plant Line Value: WS
  misc_feature: MA Experiment 20000182 PARAMETER Experiment Name: At_2mM_SA_P Parameter: Timepoint (hr) Value: 6
  misc_feature: MA Experiment 20000182 PARAMETER Experiment Name: At_2mM_SA_P Parameter: Tissue Value: Aerial
  misc_feature: MA Experiment 20000182 PARAMETER Experiment Name: At_2mM_SA_P Parameter: Treatment Value: 2mM SA vs. No Treatment
  misc_feature: MA Experiment ID: 20000185 Result: Down-regulated in Transcription
  misc_feature: MA Experiment 20000185 PARAMETER Experiment Name: At_Roots__P Parameter: Age (day) Value: 7 vs. 21
  misc_feature: MA Experiment 20000185 PARAMETER Experiment Name: At_Roots__P Parameter: Organism Value: A. thaliana
  misc_feature: MA Experiment 20000185 PARAMETER Experiment Name: At_Roots__P Parameter: Tissue Value: Roots vs. Whole Plant
  misc_feature: MA Experiment ID: 20000265 Result: Down-regulated in Transcription
  misc_feature: MA Experiment 20000265 PARAMETER Experiment Name: At_Open_Flower_P Parameter: Age (day) Value: 21
  misc_feature: MA Experiment 20000265 PARAMETER Experiment Name: At_Open_Flower_P Parameter: Plant Line Value: WS
  misc_feature: MA Experiment 20000265 PARAMETER Experiment Name: At_Open_Flower_P Parameter: Tissue Value: Closed Flower vs. Whole Plant
  misc_feature: MA Experiment ID: 20000268 Result: Down-regulated in Transcription
  misc_feature: MA Experiment 20000268 PARAMETER Experiment Name: At_100mM_NaCl__P Parameter: Age (day) Value: 14
  misc_feature: MA Experiment 20000268 PARAMETER Experiment Name: At_100mM_NaCl__P Parameter: Organism Value: A. thaliana
  misc_feature: MA Experiment 20000268 PARAMETER Experiment Name: At_100mM_NaCl__P Parameter: Plant Line Value: WS
  misc_feature: MA Experiment 20000268 PARAMETER Experiment Name: At_100mM_NaCl__P Parameter: Timepoint (hr) Value: 6
  misc_feature: MA Experiment 20000268 PARAMETER Experiment Name: At_100mM_NaCl__P Parameter: Tissue Value: Whole Plant
  misc_feature: MA Experiment 20000268 PARAMETER Experiment Name: At_100mM_NaCl__P Parameter: Treatment Value: 100mM NaCl vs. No Treatment
  misc_feature: MA Experiment ID: 20000288 Result: Down-regulated in Transcription
  misc_feature: MA Experiment 20000288 PARAMETER Experiment Name: At_Drought_P Parameter: Age (day) Value: 7
  misc_feature: MA Experiment 20000288 PARAMETER Experiment Name: At_Drought_P Parameter: Organism Value: A. thaliana
  misc_feature: MA Experiment 20000288 PARAMETER Experiment Name: At_Drought_P Parameter: Plant Line Value: WS
  misc_feature: MA Experiment 20000288 PARAMETER Experiment Name: At_Drought_P Parameter: Timepoint (hr) Value: 1
  misc_feature: MA Experiment 20000288 PARAMETER Experiment Name: At_Drought_P Parameter: Tissue Value: Whole Plant
  misc_feature: MA Experiment 20000288 PARAMETER Experiment Name: At_Drought_P Parameter: Treatment Value: Drought vs. No Drought
  misc_feature: MA Experiment ID: 20000437 Result: Down-regulated in Transcription
  misc_feature: MA Experiment 20000437 PARAMETER Experiment Name: At_Drought_P Parameter: Age (day) Value: 8
  misc_feature: MA Experiment 20000437 PARAMETER Experiment Name: At_Drought_P Parameter: Organism Value: A. thaliana
  misc_feature: MA Experiment 20000437 PARAMETER Experiment Name: At_Drought_P Parameter: Plant Line Value: WS
  misc_feature: MA Experiment 20000437 PARAMETER Experiment Name: At_Drought_P Parameter: Timepoint (hr) Value: 24
  misc_feature: MA Experiment 20000437 PARAMETER Experiment Name: At_Drought_P Parameter: Tissue Value: Whole Plant
  misc_feature: MA Experiment 20000437 PARAMETER Experiment Name: At_Drought_P Parameter: Treatment Value: Drought vs. No Drought
  misc_feature: MA Experiment ID: 20000453 Result: Up-regulated in Transcription
  misc_feature: MA Experiment 20000453 PARAMETER Experiment Name: At_100uM_ABA_P Parameter: Age (day) Value: 15
  misc_feature: MA Experiment 20000453 PARAMETER Experiment Name: At_100uM_ABA_P Parameter: Organism Value: A. thaliana
  misc_feature: MA Experiment 20000453 PARAMETER Experiment Name: At_100uM_ABA_P Parameter: Plant Line Value: WS
  misc_feature: MA Experiment 20000453 PARAMETER Experiment Name: At_100uM_ABA_P Parameter: Timepoint (hr) Value: 24
  misc_feature: MA Experiment 20000453 PARAMETER Experiment Name: At_100uM_ABA_P Parameter: Tissue Value: Aerial
  misc_feature: MA Experiment 20000453 PARAMETER Experiment Name: At_100uM_ABA_P Parameter: Treatment Value: 100uM ABA vs. No Treatment
  misc_feature: MA Experiment ID: 20000460 Result: Up-regulated in Transcription
  misc_feature: MA Experiment 20000460 PARAMETER Experiment Name: At_10percent_PEG_P Parameter: Age (day) Value: 12
  misc_feature: MA Experiment 20000460 PARAMETER Experiment Name: At_10percent_PEG_P Parameter: Organism Value: A. thaliana
  misc_feature: MA Experiment 20000460 PARAMETER Experiment Name: At_10percent_PEG_P Parameter: Plant Line Value: WS
  misc_feature: MA Experiment 20000460 PARAMETER Experiment Name: At_10percent_PEG_P Parameter: Timepoint (day) Value: 12
  misc_feature: MA Experiment 20000460 PARAMETER Experiment Name: At_10percent_PEG_P Parameter: Tissue Value: Whole Plant
  misc_feature: MA Experiment 20000460 PARAMETER Experiment Name: At_10percent_PEG_P Parameter: Treatment Value: 10percent PEG vs. No Treatment
  misc_feature: MA Experiment ID: 20000495 Result: Down-regulated in Transcription
  misc_feature: MA Experiment 20000495 PARAMETER Experiment Name: At_Guard_Cells_P Parameter: Harvest Date Value: 8/2/2002
  misc_feature: MA Experiment 20000495 PARAMETER Experiment Name: At_Guard_Cells_P Parameter: Organism Value: A. thaliana
  misc_feature: MA Experiment 20000495 PARAMETER Experiment Name: At_Guard_Cells_P Parameter: Tissue Value: Guard Cells vs. Leaves
  misc_feature: MA Experiment ID: 20000496 Result: Down-regulated in Transcription
  misc_feature: MA Experiment 20000496 PARAMETER Experiment Name: At_Guard_Cells_P Parameter: Harvest Date Value: 7/19/2002
  misc_feature: MA Experiment 20000496 PARAMETER Experiment Name: At_Guard_Cells_P Parameter: Organism Value: Canola
  misc_feature: MA Experiment 20000496 PARAMETER Experiment Name: At_Guard_Cells_P Parameter: Tissue Value: Guard Cells vs. Leaves
  misc_feature: MA Experiment ID: 20000527 Result: Up-regulated in Transcription
  misc_feature: MA Experiment 20000527 PARAMETER Experiment Name: At_10percent_PEG_P Parameter: Age (day) Value: 20
  misc_feature: MA Experiment 20000527 PARAMETER Experiment Name: At_10percent_PEG_P Parameter: Organism Value: A. thaliana
  misc_feature: MA Experiment 20000527 PARAMETER Experiment Name: At_10percent_PEG_P Parameter: Plant Line Value: WS
  misc_feature: MA Experiment 20000527 PARAMETER Experiment Name: At_10percent_PEG_P Parameter: Timepoint (day) Value: 20
  misc_feature: MA Experiment 20000527 PARAMETER Experiment Name: At_10percent_PEG_P Parameter: Tissue Value: Whole Plant
  misc_feature: MA Experiment 20000527 PARAMETER Experiment Name: At_10percent_PEG_P Parameter: Treatment Value: 10percent PEG vs. No Treatment
  misc_feature: MA Experiment ID: 20000794 Result: Down-regulated in Transcription
  misc_feature: MA Experiment 20000794 PARAMETER Experiment Name: At_Petals_P Parameter: Age (day) Value: 23-25 days
  misc_feature: MA Experiment 20000794 PARAMETER Experiment Name: At_Petals_P Parameter: Plant Line Value: WS
  misc_feature: MA Experiment 20000794 PARAMETER Experiment Name: At_Petals_P Parameter: Tissue Value: Petals vs. Whole plant
  misc_feature: MA Experiment ID: 20001450 Result: Up-regulated in Transcription
  misc_feature: MA Experiment 20001450 PARAMETER Experiment Name: At_Far-red-induction_P Parameter: Age (day) Value: 7
  misc_feature: MA Experiment 20001450 PARAMETER Experiment Name: At_Far-red-induction_P Parameter: Light Value: Far-red vs. White
  misc_feature: MA Experiment 20001450 PARAMETER Experiment Name: At_Far-red-induction_P Parameter: Organism Value: A. thaliana
  misc_feature: MA Experiment 20001450 PARAMETER Experiment Name: At_Far-red-induction_P Parameter: Plant Line Value: Columbia
  misc_feature: MA Experiment 20001450 PARAMETER Experiment Name: At_Far-red-induction_P Parameter: Timepoint (hr) Value: 8
  misc_feature: MA Experiment 20001450 PARAMETER Experiment Name: At_Far-red-induction_P Parameter: Tissue Value: Whole Plant
  misc_feature: MA Experiment ID: 20001557 Result: Up-regulated in Transcription
  misc_feature: MA Experiment 20001557 PARAMETER Experiment Name: At_Drought_Soil_Dry_P Parameter: Age (day) Value: 27
  misc_feature: MA Experiment 20001557 PARAMETER Experiment Name: At_Drought_Soil_Dry_P Parameter: Organism Value: A. thaliana
  misc_feature: MA Experiment 20001557 PARAMETER Experiment Name: At_Drought_Soil_Dry_P Parameter: Plant Line Value: WS
  misc_feature: MA Experiment 20001557 PARAMETER Experiment Name: At_Drought_Soil_Dry_P Parameter: Post Timepoint (hr) Value: 3
  misc_feature: MA Experiment 20001557 PARAMETER Experiment Name: At_Drought_Soil_Dry_P Parameter: Post-Treatment Value: Re-Water vs. No Drought
  misc_feature: MA Experiment 20001557 PARAMETER Experiment Name: At_Drought_Soil_Dry_P Parameter: Timepoint (day) Value: 13
  misc_feature: MA Experiment 20001557 PARAMETER Experiment Name: At_Drought_Soil_Dry_P Parameter: Treatment Value: Drought vs. No Drought
  misc_feature: MA Experiment ID: 20001558 Result: Up-regulated in Transcription
  misc_feature: MA Experiment 20001558 PARAMETER Experiment Name: At_Drought_Soil_Dry_P Parameter: Age (day) Value: 27
  misc_feature: MA Experiment 20001558 PARAMETER Experiment Name: At_Drought_Soil_Dry_P Parameter: Organism Value: A. thaliana
  misc_feature: MA Experiment 20001558 PARAMETER Experiment Name: At_Drought_Soil_Dry_P Parameter: Plant Line Value: WS
  misc_feature: MA Experiment 20001558 PARAMETER Experiment Name: At_Drought_Soil_Dry_P Parameter: Post Timepoint (hr) Value: 6
  misc_feature: MA Experiment 20001558 PARAMETER Experiment Name: At_Drought_Soil_Dry_P Parameter: Post-Treatment Value: Re-Water vs. No Drought
  misc_feature: MA Experiment 20001558 PARAMETER Experiment Name: At_Drought_Soil_Dry_P Parameter: Timepoint (day) Value: 13
  misc_feature: MA Experiment 20001558 PARAMETER Experiment Name: At_Drought_Soil_Dry_P Parameter: Treatment Value: Drought vs. No Drought
  misc_feature: MA Experiment ID: 20001774 Result: Down-regulated in Transcription
  misc_feature: MA Experiment 20001774 PARAMETER Experiment Name: At_Far-red-enriched-adult_P Parameter: Age (day) Value: 31
  misc_feature: MA Experiment 20001774 PARAMETER Experiment Name: At_Far-red-enriched-adult_P Parameter: Light Value: Far-red enriched vs. White
  misc_feature: MA Experiment 20001774 PARAMETER Experiment Name: At_Far-red-enriched-adult_P Parameter: Organism Value: A. thaliana
  misc_feature: MA Experiment 20001774 PARAMETER Experiment Name: At_Far-red-enriched-adult_P Parameter: Plant Line Value: Columbia
  misc_feature: MA Experiment 20001774 PARAMETER Experiment Name: At_Far-red-enriched-adult_P Parameter: Timepoint (hr) Value: 72
  misc_feature: MA Experiment 20001774 PARAMETER Experiment Name: At_Far-red-enriched-adult_P Parameter: Tissue Value: Aerial
  misc_feature: MA Experiment ID: 20001904 Result: Down-regulated in Transcription
  misc_feature: MA Experiment 20001904 PARAMETER Experiment Name: At_Drought_Reproduction_P Parameter: Age (day) Value: 37
  misc_feature: MA Experiment 20001904 PARAMETER Experiment Name: At_Drought_Reproduction_P Parameter: Organism Value: A. thaliana
  misc_feature: MA Experiment 20001904 PARAMETER Experiment Name: At_Drought_Reproduction_P Parameter: Plant Line Value: WS
  misc_feature: MA Experiment 20001904 PARAMETER Experiment Name: At_Drought_Reproduction_P Parameter: Timepoint (day) Value: 7
  misc_feature: MA Experiment 20001904 PARAMETER Experiment Name: At_Drought_Reproduction_P Parameter: Tissue Value: Rosettes
  misc_feature: MA Experiment 20001904 PARAMETER Experiment Name: At_Drought_Reproduction_P Parameter: Treatment Value: Drought vs. No Drought

SEQ ID NO: 94639 - protein, 244 aa, Arabidopsis thaliana; identical to SEQ ID NO: 90883
  peptide (1)..(244): Ceres Seq. ID no. 12725635
  misc_feature (40)..(104): Pfam Name: AP2 domain Pfam Description: AP2 domain
  misc_feature (1)..(244): Homolog of NCBI NO: 15224024 NR Description: hypothetical protein; protein id: At1g77640.1
  misc_feature (1)..(172): Homolog of NCBI NO: 15219139 NR Description: TINY-like protein; protein id: At1g21910.1, by cDNA: 19721. [Arabidopsis thaliana] >gi|25402947|pir||D86352
  misc_feature (1)..(172): Homolog of NCBI NO: 21554056 NR Description: TINY-like protein [Arabidopsis thaliana]
  misc_feature (8)..(190): Homolog of NCBI NO: 15219452 NR Description: transcription factor, putative; protein id: [Arabidopsis thaliana] >gi|25352175|pir||D96507 hypothetical
  misc_feature (11)..(194): Homolog of NCBI NO: 38605848 NR Description: OSJNBb0034G17.6 [Oryza sativa (japonica
  misc_feature (40)..(130): Homolog of NCBI NO: 34902130 NR Description: hypothetical protein [Oryza sativa (japonica group)] >gi|29893600|gb|AAP06854.1| hypothetical protein [Oryza
  misc_feature (11)..(183): Homolog of NCBI NO: 14140163 NR Description: putative AP2 domain containing protein [Oryza
  misc_feature (42)..(170): Homolog of NCBI NO: 15222040 NR Description: AP2 domain containing protein, putative; protein At1g74930.1 [Arabidopsis thaliana] >gi|25352178|pir||A96779
  misc_feature (20)..(177): Homolog of NCBI NO: 37536842 NR Description: putative DNA binding protein [Oryza sativa
  misc_feature (11)..(204): Homolog of NCBI NO: 38605845 NR Description: OSJNBb0034G17.3 [Oryza sativa (japonica

SEQ ID NO: 94640 - protein, 197 aa, Arabidopsis thaliana; identical to SEQ ID NO: 90884
  peptide (1)..(197): Ceres Seq. ID no. 12725636
  misc_feature (1)..(57): Pfam Name: AP2 domain Pfam Description: AP2 domain
  misc_feature (1)..(197): Homolog of NCBI NO: 15224024 NR Description: hypothetical protein; protein id: At1g77640.1
  misc_feature (1)..(125): Homolog of NCBI NO: 15219139 NR Description: TINY-like protein; protein id: At1g21910.1, by cDNA: 19721. [Arabidopsis thaliana] >gi|25402947|pir||D86352
  misc_feature (1)..(125): Homolog of NCBI NO: 21554056 NR Description: TINY-like protein [Arabidopsis thaliana]
  misc_feature (1)..(143): Homolog of NCBI NO: 15219452 NR Description: transcription factor, putative; protein id: [Arabidopsis thaliana] >gi|25352175|pir||D96507 hypothetical
  misc_feature (1)..(147): Homolog of NCBI NO: 38605848 NR Description: OSJNBb0034G17.6 [Oryza sativa (japonica
  misc_feature (1)..(83): Homolog of NCBI NO: 34902130 NR Description: hypothetical protein [Oryza sativa (japonica group)] >gi|29893600|gb|AAP06854.1| hypothetical protein [Oryza
  misc_feature (1)..(136): Homolog of NCBI NO: 14140163 NR Description: putative AP2 domain containing protein [Oryza
  misc_feature (1)..(123): Homolog of NCBI NO: 15222040 NR Description: AP2 domain containing protein, putative; protein At1g74930.1 [Arabidopsis thaliana] >gi|25352178|pir||A96779
  misc_feature (1)..(130): Homolog of NCBI NO: 37536842 NR Description: putative DNA binding protein [Oryza sativa
  misc_feature (1)..(157): Homolog of NCBI NO: 38605845 NR Description: OSJNBb0034G17.3 [Oryza sativa (japonica

SEQ ID NO: 94641 - protein, 136 aa, Arabidopsis thaliana; identical to SEQ ID NO: 90885
  peptide (1)..(136): Ceres Seq. ID no. 12725637
  misc_feature (1)..(136): Homolog of NCBI NO: 15224024 NR Description: hypothetical protein; protein id: At1g77640.1
  misc_feature (1)..(64): Homolog of NCBI NO: 15219139 NR Description: TINY-like protein; protein id: At1g21910.1, by cDNA: 19721. [Arabidopsis thaliana] >gi|25402947|pir||D86352
  misc_feature (1)..(64): Homolog of NCBI NO: 21554056 NR Description: TINY-like protein [Arabidopsis thaliana]
  misc_feature (1)..(82): Homolog of NCBI NO: 15219452 NR Description: transcription factor, putative; protein id: [Arabidopsis thaliana] >gi|25352175|pir||D96507 hypothetical
  misc_feature (1)..(86): Homolog of NCBI NO: 38605848 NR Description: OSJNBb0034G17.6 [Oryza sativa (japonica
  misc_feature (1)..(22): Homolog of NCBI NO: 34902130 NR Description: hypothetical protein [Oryza sativa (japonica group)] >gi|29893600|gb|AAP06854.1| hypothetical protein [Oryza
  misc_feature (1)..(75): Homolog of NCBI NO: 14140163 NR Description: putative AP2 domain containing protein [Oryza
  misc_feature (1)..(62): Homolog of NCBI NO: 15222040 NR Description: AP2 domain containing protein, putative; protein At1g74930.1 [Arabidopsis thaliana] >gi|25352178|pir||A96779
  misc_feature (1)..(69): Homolog of NCBI NO: 37536842 NR Description: putative DNA binding protein [Oryza sativa
  misc_feature (1)..(96): Homolog of NCBI NO: 38605845 NR Description: OSJNBb0034G17.3 [Oryza sativa (japonica

SEQ ID NO: 94642 - DNA, 1636 bp, Arabidopsis thaliana; identical to SEQ ID NO: 90886
  misc_feature (1)..(1636): Ceres Seq. ID no. 12725642
  misc_feature: MA Experiment ID: 20000169 Result: Down-regulated in Transcription
  misc_feature: MA Experiment 20000169 PARAMETER Experiment Name: At_100uM_ABA_P Parameter: Age (day) Value: 14
  misc_feature: MA Experiment 20000169 PARAMETER Experiment Name: At_100uM_ABA_P Parameter: Organism Value: A. thaliana
  misc_feature: MA Experiment 20000169 PARAMETER Experiment Name: At_100uM_ABA_P Parameter: Plant Line Value: WS
  misc_feature: MA Experiment 20000169 PARAMETER Experiment Name: At_100uM_ABA_P Parameter: Timepoint (hr) Value: 6
  misc_feature: MA Experiment 20000169 PARAMETER Experiment Name: At_100uM_ABA_P Parameter: Tissue Value: Aerial
  misc_feature: MA Experiment 20000169 PARAMETER Experiment Name: At_100uM_ABA_P Parameter: Treatment Value: 100uM ABA vs. No Treatment
  misc_feature: MA Experiment ID: 20000173 Result: Down-regulated in Transcription
  misc_feature: MA Experiment 20000173 PARAMETER Experiment Name: At_42deg_Heat_P Parameter: Age (day) Value: 14
  misc_feature: MA Experiment 20000173 PARAMETER Experiment Name: At_42deg_Heat_P Parameter: Organism Value: A. thaliana
  misc_feature: MA Experiment 20000173 PARAMETER Experiment Name: At_42deg_Heat_P Parameter: Plant Line Value: WS
  misc_feature: MA Experiment 20000173 PARAMETER Experiment Name: At_42deg_Heat_P Parameter: Temperature (deg C) Value: 42 vs. 22
  misc_feature: MA Experiment 20000173 PARAMETER Experiment Name: At_42deg_Heat_P Parameter: Timepoint (hr) Value: 6
  misc_feature: MA Experiment 20000173 PARAMETER Experiment Name: At_42deg_Heat_P Parameter: Tissue Value: Aerial
  misc_feature: MA Experiment ID: 20000180 Result: Up-regulated in Transcription
  misc_feature: MA Experiment 20000180 PARAMETER Experiment Name: At_Germinating_Seeds_P Parameter: Age (hr) Value: 24 vs. 0
  misc_feature: MA Experiment 20000180 PARAMETER Experiment Name: At_Germinating_Seeds_P Parameter: Tissue Value: Germinating Seeds
  misc_feature: MA Experiment ID: 20000234 Result: Down-regulated in Transcription
  misc_feature: MA Experiment 20000234 PARAMETER Experiment Name: At_Siliques_P Parameter: Age (day) Value: 21
  misc_feature: MA Experiment 20000234 PARAMETER Experiment Name: At_Siliques_P Parameter: Organism Value: A. thaliana
  misc_feature: MA Experiment 20000234 PARAMETER Experiment Name: At_Siliques_P Parameter: Plant Line Value: WS
  misc_feature: MA Experiment 20000234 PARAMETER Experiment Name: At_Siliques_P Parameter: Tissue Value: Less Than 5mm Siliques vs. Whole Plant
  misc_feature: MA Experiment ID: 20000437 Result: Down-regulated in Transcription
  misc_feature: MA Experiment 20000437 PARAMETER Experiment Name: At_Drought_P Parameter: Age (day) Value: 8
  misc_feature: MA Experiment 20000437 PARAMETER Experiment Name: At_Drought_P Parameter: Organism Value: A. thaliana
  misc_feature: MA Experiment 20000437 PARAMETER Experiment Name: At_Drought_P Parameter: Plant Line Value: WS
  misc_feature: MA Experiment 20000437 PARAMETER Experiment Name: At_Drought_P Parameter: Timepoint (hr) Value: 24
  misc_feature: MA Experiment 20000437 PARAMETER Experiment Name: At_Drought_P Parameter: Tissue Value: Whole Plant
  misc_feature: MA Experiment 20000437 PARAMETER Experiment Name: At_Drought_P Parameter: Treatment Value: Drought vs. No Drought
  misc_feature: MA Experiment ID: 20001555 Result: Down-regulated in Transcription
  misc_feature: MA Experiment 20001555 PARAMETER Experiment Name: At_Drought_Soil_Dry_P Parameter: Age (day) Value: 24
  misc_feature: MA Experiment 20001555 PARAMETER Experiment Name: At_Drought_Soil_Dry_P Parameter: Organism Value: A. thaliana
  misc_feature: MA Experiment 20001555 PARAMETER Experiment Name: At_Drought_Soil_Dry_P Parameter: Plant Line Value: WS
  misc_feature: MA Experiment 20001555 PARAMETER Experiment Name: At_Drought_Soil_Dry_P Parameter: Post Timepoint (hr) Value: None
  misc_feature: MA Experiment 20001555 PARAMETER Experiment Name: At_Drought_Soil_Dry_P Parameter: Post-Treatment Value: None
  misc_feature: MA Experiment 20001555 PARAMETER Experiment Name: At_Drought_Soil_Dry_P Parameter: Timepoint (day) Value: 10
  misc_feature: MA Experiment 20001555 PARAMETER Experiment Name: At_Drought_Soil_Dry_P Parameter: Treatment Value: Drought vs. No Drought
  misc_feature: MA Experiment ID: 20001556 Result: Down-regulated in Transcription
  misc_feature: MA Experiment 20001556 PARAMETER Experiment Name: At_Drought_Soil_Dry_P Parameter: Age (day) Value: 26
  misc_feature: MA Experiment 20001556 PARAMETER Experiment Name: At_Drought_Soil_Dry_P Parameter: Organism Value: A. thaliana
  misc_feature: MA Experiment 20001556 PARAMETER Experiment Name: At_Drought_Soil_Dry_P Parameter: Plant Line Value: WS
  misc_feature: MA Experiment 20001556 PARAMETER Experiment Name: At_Drought_Soil_Dry_P Parameter: Post Timepoint (hr) Value: None
  misc_feature: MA Experiment 20001556 PARAMETER Experiment Name: At_Drought_Soil_Dry_P Parameter: Post-Treatment Value: None
  misc_feature: MA Experiment 20001556 PARAMETER Experiment Name: At_Drought_Soil_Dry_P Parameter: Timepoint (day) Value: 12
  misc_feature: MA Experiment 20001556 PARAMETER Experiment Name: At_Drought_Soil_Dry_P Parameter: Treatment Value: Drought vs. No Drought
  misc_feature: MA Experiment ID: 20001757 Result: Up-regulated in Transcription
  misc_feature: MA Experiment 20001757 PARAMETER Experiment Name: At_50mM_NH4NO3_L-to-H_P Parameter: Timepoint (hr) Value: 6
  misc_feature: MA Experiment 20001757 PARAMETER Experiment Name: At_50mM_NH4NO3_L-to-H_P Parameter: Tissue Value: Leaf
  misc_feature: MA Experiment 20001757 PARAMETER Experiment Name: At_50mM_NH4NO3_L-to-H_P Parameter: Treatment Value: 50mM NH4NO3 vs 100mM Mannitol
  misc_feature: MA Experiment ID: 20001906 Result: Down-regulated in Transcription
  misc_feature: MA Experiment 20001906 PARAMETER Experiment Name: At_Drought_Reproduction_P Parameter: Age (day) Value: 35
  misc_feature: MA Experiment 20001906 PARAMETER Experiment Name: At_Drought_Reproduction_P Parameter: Organism Value: A. thaliana
  misc_feature: MA Experiment 20001906 PARAMETER Experiment Name: At_Drought_Reproduction_P Parameter: Plant Line Value: WS
  misc_feature: MA Experiment 20001906 PARAMETER Experiment Name: At_Drought_Reproduction_P Parameter: Timepoint (day) Value: 5
  misc_feature: MA Experiment 20001906 PARAMETER Experiment Name: At_Drought_Reproduction_P Parameter: Tissue Value: Siliques
  misc_feature: MA Experiment 20001906 PARAMETER Experiment Name: At_Drought_Reproduction_P Parameter: Treatment Value: Drought vs. No Drought

SEQ ID NO: 94643 - protein, 470 aa, Arabidopsis thaliana; identical to SEQ ID NO: 90887
  peptide (1)..(470): Ceres Seq. ID no. 12725643
  misc_feature (1)..(470): Homolog of NCBI NO: 15217443 NR Description: putative AUX1-like permease; protein id: supported by cDNA: gi_15809995 [Arabidopsis thaliana]
  misc_feature (1)..(469): Homolog of NCBI NO: 10800922 NR Description: putative AUX1-like permease [Medicago truncatula]
  misc_feature (1)..(470): Homolog of NCBI NO: 21586474 NR Description: auxin influx carrier protein [Medicago truncatula]
  misc_feature (7)..(467): Homolog of NCBI NO: 15226450 NR Description: AUX1-like amino acid permease; protein id: supported by cDNA: gi_15451207 [Arabidopsis thaliana]
  misc_feature (1)..(467): Homolog of NCBI NO: 14279184 NR Description: putative AUX1-like permease [Populus tremula x
  misc_feature (1)..(468): Homolog of NCBI NO: 6689614 NR Description: AUX1 protein [Zea mays]
  misc_feature (18)..(468): Homolog of NCBI NO: 37531048 NR Description: putative AUX1-like permease [Oryza sativa
  misc_feature (1)..(470): Homolog of NCBI NO: 15240927 NR Description: LAX1 / AUX1 -like permease; protein id:
  misc_feature (3)..(467): Homolog of NCBI NO: 18404642 NR Description: expressed protein; protein id: At2g38120.1, by cDNA: 31586., supported by cDNA: gi_15450815, supported by gi_20259903 [Arabidopsis thaliana] >gi|7485590|pir||T01244
  misc_feature (1)..(470): Homolog of NCBI NO: 21586468 NR Description: auxin influx carrier protein [Medicago truncatula]

SEQ ID NO: 94644 - protein, 454 aa, Arabidopsis thaliana; identical to SEQ ID NO: 90888
  peptide (1)..(454): Ceres Seq. ID no. 12725644
  misc_feature (1)..(454): Homolog of NCBI NO: 15217443 NR Description: putative AUX1-like permease; protein id: supported by cDNA: gi_15809995 [Arabidopsis thaliana]
  misc_feature (1)..(453): Homolog of NCBI NO: 10800922 NR Description: putative AUX1-like permease [Medicago truncatula]
  misc_feature (1)..(454): Homolog of NCBI NO: 21586474 NR Description: auxin influx carrier protein [Medicago truncatula]
  misc_feature (1)..(451): Homolog of NCBI NO: 15226450 NR Description: AUX1-like amino acid permease; protein id: supported by cDNA: gi_15451207 [Arabidopsis thaliana]
  misc_feature (1)..(451): Homolog of NCBI NO: 14279184 NR Description: putative AUX1-like permease [Populus tremula x
  misc_feature (1)..(452): Homolog of NCBI NO: 6689614 NR Description: AUX1 protein [Zea mays]
  misc_feature (2)..(452): Homolog of NCBI NO: 37531048 NR Description: putative AUX1-like permease [Oryza sativa
  misc_feature (1)..(454): Homolog of NCBI NO: 15240927 NR Description: LAX1 / AUX1 -like permease; protein id:
  misc_feature (1)..(451): Homolog of NCBI NO: 18404642 NR Description: expressed protein; protein id: At2g38120.1, by cDNA: 31586., supported by cDNA: gi_15450815, supported by gi_20259903 [Arabidopsis thaliana] >gi|7485590|pir||T01244
  misc_feature (1)..(454): Homolog of NCBI NO: 21586468 NR Description: auxin influx carrier protein [Medicago truncatula]

SEQ ID NO: 94645 - protein, 397 aa, Arabidopsis thaliana; identical to SEQ ID NO: 90889
  peptide (1)..(397): Ceres Seq. ID no. 12725645
  misc_feature (1)..(397): Homolog of NCBI NO: 15217443 NR Description: putative AUX1-like permease; protein id: supported by cDNA: gi_15809995 [Arabidopsis thaliana]
  misc_feature (1)..(396): Homolog of NCBI NO: 10800922 NR Description: putative AUX1-like permease [Medicago truncatula]
  misc_feature (1)..(397): Homolog of NCBI NO: 21586474 NR Description: auxin influx carrier protein [Medicago truncatula]
  misc_feature (1)..(394): Homolog of NCBI NO: 15226450 NR Description: AUX1-like amino acid permease; protein id: supported by cDNA: gi_15451207 [Arabidopsis thaliana]
  misc_feature (1)..(394): Homolog of NCBI NO: 14279184 NR Description: putative AUX1-like permease [Populus tremula x
  misc_feature (1)..(395): Homolog of NCBI NO: 6689614 NR Description: AUX1 protein [Zea mays]
  misc_feature (1)..(395): Homolog of NCBI NO: 37531048 NR Description: putative AUX1-like permease [Oryza sativa
  misc_feature (1)..(397): Homolog of NCBI NO: 15240927 NR Description: LAX1 / AUX1 -like permease; protein id:
  misc_feature (1)..(394): Homolog of NCBI NO: 18404642 NR Description: expressed protein; protein id: At2g38120.1, by cDNA: 31586., supported by cDNA: gi_15450815, supported by gi_20259903 [Arabidopsis thaliana] >gi|7485590|pir||T01244
  misc_feature (1)..(397): Homolog of NCBI NO: 21586468 NR Description: auxin influx carrier protein [Medicago truncatula]

SEQ ID NO: 94646 - DNA, 3033 bp, Arabidopsis thaliana; identical to SEQ ID NO: 90890
  misc_feature (1)..(3033): Ceres Seq. ID no. 12725655
  misc_feature: MA Experiment ID: 20000166 Result: Down-regulated in Transcription
  misc_feature: MA Experiment 20000166 PARAMETER Experiment Name: At_100uM_ABA_P Parameter: Age (day) Value: 14
  misc_feature: MA Experiment 20000166 PARAMETER Experiment Name: At_100uM_ABA_P Parameter: Organism Value: A. thaliana
  misc_feature: MA Experiment 20000166 PARAMETER Experiment Name: At_100uM_ABA_P Parameter: Plant Line Value: WS
  misc_feature: MA Experiment 20000166 PARAMETER Experiment Name: At_100uM_ABA_P Parameter: Timepoint (hr) Value: 1
  misc_feature: MA Experiment 20000166 PARAMETER Experiment Name: At_100uM_ABA_P Parameter: Tissue Value: Aerial
  misc_feature: MA Experiment 20000166 PARAMETER Experiment Name: At_100uM_ABA_P Parameter: Treatment Value: 100uM ABA vs. No Treatment
  misc_feature: MA Experiment ID: 20000171 Result: Down-regulated in Transcription
  misc_feature: MA Experiment 20000171 PARAMETER Experiment Name: At_42deg_Heat_P Parameter: Age (day) Value: 14
  misc_feature: MA Experiment 20000171 PARAMETER Experiment Name: At_42deg_Heat_P Parameter: Organism Value: A. thaliana
  misc_feature: MA Experiment 20000171 PARAMETER Experiment Name: At_42deg_Heat_P Parameter: Plant Line Value: WS
  misc_feature: MA Experiment 20000171 PARAMETER Experiment Name: At_42deg_Heat_P Parameter: Temperature (deg C) Value: 42 vs. 22
  misc_feature: MA Experiment 20000171 PARAMETER Experiment Name: At_42deg_Heat_P Parameter: Timepoint (hr) Value: 1
  misc_feature: MA Experiment 20000171 PARAMETER Experiment Name: At_42deg_Heat_P Parameter: Tissue Value: Aerial
  misc_feature: MA Experiment ID: 20000173 Result: Up-regulated in Transcription
  misc_feature: MA Experiment 20000173 PARAMETER Experiment Name: At_42deg_Heat_P Parameter: Age (day) Value: 14
  misc_feature: MA Experiment 20000173 PARAMETER Experiment Name: At_42deg_Heat_P Parameter: Organism Value: A. thaliana
  misc_feature: MA Experiment 20000173 PARAMETER Experiment Name: At_42deg_Heat_P Parameter: Plant Line Value: WS
  misc_feature: MA Experiment 20000173 PARAMETER Experiment Name: At_42deg_Heat_P Parameter: Temperature (deg C) Value: 42 vs. 22
  misc_feature: MA Experiment 20000173 PARAMETER Experiment Name: At_42deg_Heat_P Parameter: Timepoint (hr) Value: 6
  misc_feature: MA Experiment 20000173 PARAMETER Experiment Name: At_42deg_Heat_P Parameter: Tissue Value: Aerial
  misc_feature: MA Experiment ID: 20000180 Result: Down-regulated in Transcription
  misc_feature: MA Experiment 20000180 PARAMETER Experiment Name: At_Germinating_Seeds_P Parameter: Age (hr) Value: 24 vs. 0
  misc_feature: MA Experiment 20000180 PARAMETER Experiment Name: At_Germinating_Seeds_P Parameter: Tissue Value: Germinating Seeds
  misc_feature: MA Experiment ID: 20000182 Result: Up-regulated in Transcription
  misc_feature: MA Experiment 20000182 PARAMETER Experiment Name: At_2mM_SA_P Parameter: Age (day) Value: 14
  misc_feature: MA Experiment 20000182 PARAMETER Experiment Name: At_2mM_SA_P Parameter: Organism Value: A. thaliana
  misc_feature: MA Experiment 20000182 PARAMETER Experiment Name: At_2mM_SA_P Parameter: Plant Line Value: WS
  misc_feature: MA Experiment 20000182 PARAMETER Experiment Name: At_2mM_SA_P Parameter: Timepoint (hr) Value: 6
  misc_feature: MA Experiment 20000182 PARAMETER Experiment Name: At_2mM_SA_P Parameter: Tissue Value: Aerial
  misc_feature: MA Experiment 20000182 PARAMETER Experiment Name: At_2mM_SA_P Parameter: Treatment Value: 2mM SA vs. No Treatment
  misc_feature: MA Experiment ID: 20000184 Result: Up-regulated in Transcription
  misc_feature: MA Experiment 20000184 PARAMETER Experiment Name: At_Shoots__P Parameter: Age (day) Value: 7
  misc_feature: MA Experiment 20000184 PARAMETER Experiment Name: At_Shoots__P Parameter: Tissue Value: Shoots vs. Whole Plant
  misc_feature: MA Experiment ID: 20000185 Result: Up-regulated in Transcription
  misc_feature: MA Experiment 20000185 PARAMETER Experiment Name: At_Roots__P Parameter: Age (day) Value: 7 vs. 21
  misc_feature: MA Experiment 20000185 PARAMETER Experiment Name: At_Roots__P Parameter: Organism Value: A. thaliana
  misc_feature: MA Experiment 20000185 PARAMETER Experiment Name: At_Roots__P Parameter: Tissue Value: Roots vs. Whole Plant
  misc_feature: MA Experiment ID: 20000213 Result: Up-regulated in Transcription
  misc_feature: MA Experiment 20000213 PARAMETER Experiment Name: At_4deg_Cold_P Parameter: Timepoint (hr) Value: 2
  misc_feature: MA Experiment ID: 20000234 Result: Down-regulated in Transcription
  misc_feature: MA Experiment 20000234 PARAMETER Experiment Name: At_Siliques_P Parameter: Age (day) Value: 21
  misc_feature: MA Experiment 20000234 PARAMETER Experiment Name: At_Siliques_P Parameter: Organism Value: A. thaliana
  misc_feature: MA Experiment 20000234 PARAMETER Experiment Name: At_Siliques_P Parameter: Plant Line Value: WS
  misc_feature: MA Experiment 20000234 PARAMETER Experiment Name: At_Siliques_P Parameter: Tissue Value: Less Than 5mm Siliques vs. Whole Plant
  misc_feature: MA Experiment ID: 20000235 Result: Down-regulated in Transcription
  misc_feature: MA Experiment 20000235 PARAMETER Experiment Name: At_Siliques_P Parameter: Age (day) Value: 21
  misc_feature: MA Experiment 20000235 PARAMETER Experiment Name: At_Siliques_P Parameter: Organism Value: A. thaliana
  misc_feature: MA Experiment 20000235 PARAMETER Experiment Name: At_Siliques_P Parameter: Plant Line Value: WS
  misc_feature: MA Experiment 20000235 PARAMETER Experiment Name: At_Siliques_P Parameter: Tissue Value: 5-10mm Siliques vs. Whole Plant
  misc_feature: MA Experiment ID: 20000264 Result: Up-regulated in Transcription
  misc_feature: MA Experiment 20000264 PARAMETER Experiment Name: At_Open_Flower_P Parameter: Age (day) Value: 21
  misc_feature: MA Experiment 20000264 PARAMETER Experiment Name: At_Open_Flower_P Parameter: Plant Line Value: WS
  misc_feature: MA Experiment 20000264 PARAMETER Experiment Name: At_Open_Flower_P Parameter: Tissue Value: Open Flower vs. Whole Plant
  misc_feature: MA Experiment ID: 20000267 Result: Down-regulated in Transcription
  misc_feature: MA Experiment 20000267 PARAMETER Experiment Name: At_Drought_P Parameter: Age (day) Value: 7
  misc_feature: MA Experiment 20000267 PARAMETER Experiment Name: At_Drought_P Parameter: Organism Value: A. thaliana
  misc_feature: MA Experiment 20000267 PARAMETER Experiment Name: At_Drought_P Parameter: Plant Line Value: WS
  misc_feature: MA Experiment 20000267 PARAMETER Experiment Name: At_Drought_P Parameter: Timepoint (hr) Value: 6
  misc_feature: MA Experiment 20000267 PARAMETER Experiment Name: At_Drought_P Parameter: Tissue Value: Whole Plant
  misc_feature: MA Experiment 20000267 PARAMETER Experiment Name: At_Drought_P Parameter: Treatment Value: Drought vs. No Drought
  misc_feature: MA Experiment ID: 20000268 Result: Down-regulated in Transcription
  misc_feature: MA Experiment 20000268 PARAMETER Experiment Name: At_100mM_NaCl__P Parameter: Age (day) Value: 14
  misc_feature: MA Experiment 20000268 PARAMETER Experiment Name: At_100mM_NaCl__P Parameter: Organism Value: A. thaliana
  misc_feature: MA Experiment 20000268 PARAMETER Experiment Name: At_100mM_NaCl__P Parameter: Plant Line Value: WS
  misc_feature: MA Experiment 20000268 PARAMETER Experiment Name: At_100mM_NaCl__P Parameter: Timepoint (hr) Value: 6
  misc_feature: MA Experiment 20000268 PARAMETER Experiment Name: At_100mM_NaCl__P Parameter: Tissue Value: Whole Plant
  misc_feature: MA Experiment 20000268 PARAMETER Experiment Name: At_100mM_NaCl__P Parameter: Treatment Value: 100mM NaCl vs. No Treatment
  misc_feature: MA Experiment ID: 20000308 Result: Down-regulated in Transcription
  misc_feature: MA Experiment 20000308 PARAMETER Experiment Name: At_100mM_NaCl__P Parameter: Age (day) Value: 17
  misc_feature: MA Experiment 20000308 PARAMETER Experiment Name: At_100mM_NaCl__P Parameter: Organism Value: A. thaliana
  misc_feature: MA Experiment 20000308 PARAMETER Experiment Name: At_100mM_NaCl__P Parameter: Plant Line Value: WS
  misc_feature: MA Experiment 20000308 PARAMETER Experiment Name: At_100mM_NaCl__P Parameter: Timepoint (hr) Value: 72
  misc_feature: MA Experiment 20000308 PARAMETER Experiment Name: At_100mM_NaCl__P Parameter: Tissue Value: Whole Plant
  misc_feature: MA Experiment 20000308 PARAMETER Experiment Name: At_100mM_NaCl__P Parameter: Treatment Value: 100mM NaCl vs. No Treatment
  misc_feature: MA Experiment ID: 20000437 Result: Down-regulated in Transcription
  misc_feature: MA Experiment 20000437 PARAMETER Experiment Name: At_Drought_P Parameter: Age (day) Value: 8
  misc_feature: MA Experiment 20000437 PARAMETER Experiment Name: At_Drought_P Parameter: Organism Value: A. thaliana
  misc_feature: MA Experiment 20000437 PARAMETER Experiment Name: At_Drought_P Parameter: Plant Line Value: WS
  misc_feature: MA Experiment 20000437 PARAMETER Experiment Name: At_Drought_P Parameter: Timepoint (hr) Value: 24
  misc_feature: MA Experiment 20000437 PARAMETER Experiment Name: At_Drought_P Parameter: Tissue Value: Whole Plant
  misc_feature: MA Experiment 20000437 PARAMETER Experiment Name: At_Drought_P Parameter: Treatment Value: Drought vs. No Drought
  misc_feature: MA Experiment ID: 20000438 Result: Up-regulated in Transcription
  misc_feature: MA Experiment 20000438 PARAMETER Experiment Name: At_Shoots__P Parameter: Age (day) Value: 14
  misc_feature: MA Experiment 20000438 PARAMETER Experiment Name: At_Shoots__P Parameter: Tissue Value: Shoots vs. Whole Plant
  misc_feature: MA Experiment ID: 20000439 Result: Up-regulated in Transcription
  misc_feature: MA Experiment 20000439 PARAMETER Experiment Name: At_Roots__P Parameter: Age (day) Value: 14 vs. 21
  misc_feature: MA Experiment 20000439 PARAMETER Experiment Name: At_Roots__P Parameter: Organism Value: A. thaliana
  misc_feature: MA Experiment 20000439 PARAMETER Experiment Name: At_Roots__P Parameter: Tissue Value: Roots vs. Whole Plant
  misc_feature: MA Experiment ID: 20000441 Result: Up-regulated in Transcription
  misc_feature: MA Experiment 20000441 PARAMETER Experiment Name: At_1uM_BR-BRZ__P Parameter: Tissue Value: Shoot Apices
  misc_feature: MA Experiment 20000441 PARAMETER Experiment Name: At_1uM_BR-BRZ__P Parameter: Treatment Value: 1uM BR vs. No Treatment
  misc_feature: MA Experiment ID: 20000443 Result: Up-regulated in Transcription
  misc_feature: MA Experiment 20000443 PARAMETER Experiment Name: At_1uM_BR-BRZ__P Parameter: Tissue Value: Shoot Apices
  misc_feature: MA Experiment 20000443 PARAMETER Experiment Name: At_1uM_BR-BRZ__P Parameter: Treatment Value: 1uM BRZ vs. No Treatment
  misc_feature: MA Experiment ID: 20000451 Result: Up-regulated in Transcription
  misc_feature: MA Experiment 20000451 PARAMETER Experiment Name: At_CS6879_Shoots-Roots_P Parameter: Age (day) Value: 14
  misc_feature: MA Experiment 20000451 PARAMETER Experiment Name: At_CS6879_Shoots-Roots_P Parameter: Organism Value: A. thaliana
  misc_feature: MA Experiment 20000451 PARAMETER Experiment Name: At_CS6879_Shoots-Roots_P Parameter: Plant Line Value: CS6879 vs. WS
  misc_feature: MA Experiment 20000451 PARAMETER Experiment Name: At_CS6879_Shoots-Roots_P Parameter: Tissue Value: Roots
  misc_feature: MA Experiment ID: 20000453 Result: Down-regulated in Transcription
  misc_feature: MA Experiment 20000453 PARAMETER Experiment Name: At_100uM_ABA_P Parameter: Age (day) Value: 15
  misc_feature: MA Experiment 20000453 PARAMETER Experiment Name: At_100uM_ABA_P Parameter: Organism Value: A. thaliana
  misc_feature: MA Experiment 20000453 PARAMETER Experiment Name: At_100uM_ABA_P Parameter: Plant Line Value: WS
  misc_feature: MA Experiment 20000453 PARAMETER Experiment Name: At_100uM_ABA_P Parameter: Timepoint (hr) Value: 24
  misc_feature: MA Experiment 20000453 PARAMETER Experiment Name: At_100uM_ABA_P Parameter: Tissue Value: Aerial
  misc_feature: MA Experiment 20000453 PARAMETER Experiment Name: At_100uM_ABA_P Parameter: Treatment Value: 100uM ABA vs. No Treatment
  misc_feature: MA Experiment ID: 20000495 Result: Down-regulated in Transcription
  misc_feature: MA Experiment 20000495 PARAMETER Experiment Name: At_Guard_Cells_P Parameter: Harvest Date Value: 8/2/2002
  misc_feature: MA Experiment 20000495 PARAMETER Experiment Name: At_Guard_Cells_P Parameter: Organism Value: A. thaliana
  misc_feature: MA Experiment 20000495 PARAMETER Experiment Name: At_Guard_Cells_P Parameter: Tissue Value: Guard Cells vs. Leaves
  misc_feature: MA Experiment ID: 20000527 Result: Up-regulated in Transcription
  misc_feature: MA Experiment 20000527 PARAMETER Experiment Name: At_10percent_PEG_P Parameter: Age (day) Value: 20
  misc_feature: MA Experiment 20000527 PARAMETER Experiment Name: At_10percent_PEG_P Parameter: Organism Value: A. thaliana
  misc_feature: MA Experiment 20000527 PARAMETER Experiment Name: At_10percent_PEG_P Parameter: Plant Line Value: WS
  misc_feature: MA Experiment 20000527 PARAMETER Experiment Name: At_10percent_PEG_P Parameter: Timepoint (day) Value: 20
  misc_feature: MA Experiment 20000527 PARAMETER Experiment Name: At_10percent_PEG_P Parameter: Tissue Value: Whole Plant
  misc_feature: MA Experiment 20000527 PARAMETER Experiment Name: At_10percent_PEG_P Parameter: Treatment Value: 10percent PEG vs. No Treatment
  misc_feature: MA Experiment ID: 20000709 Result: Up-regulated in Transcription
  misc_feature: MA Experiment 20000709 PARAMETER Experiment Name: At_15mM_NH4NO3_L-to-H_P Parameter: Age (hr) Value: 14
  misc_feature: MA Experiment 20000709 PARAMETER Experiment Name: At_15mM_NH4NO3_L-to-H_P Parameter: Organism Value: A. thaliana
  misc_feature: MA Experiment 20000709 PARAMETER Experiment Name: At_15mM_NH4NO3_L-to-H_P Parameter: Plant Line Value: WS
  misc_feature: MA Experiment 20000709 PARAMETER Experiment Name: At_15mM_NH4NO3_L-to-H_P Parameter: Timepoint (hr) Value: 4
  misc_feature: MA Experiment 20000709 PARAMETER Experiment Name: At_15mM_NH4NO3_L-to-H_P Parameter: Tissue Value: Aerial
  misc_feature: MA Experiment 20000709 PARAMETER Experiment Name: At_15mM_NH4NO3_L-to-H_P Parameter: Treatment Value: 15mM NH4NO3 vs. 30mM Mannitol
  misc_feature: MA Experiment ID: 20000794 Result: Up-regulated in Transcription
  misc_feature: MA Experiment 20000794 PARAMETER Experiment Name: At_Petals_P Parameter: Age (day) Value: 23-25 days
  misc_feature: MA Experiment 20000794 PARAMETER Experiment Name: At_Petals_P Parameter: Plant Line Value: WS
  misc_feature: MA Experiment 20000794 PARAMETER Experiment Name: At_Petals_P Parameter: Tissue Value: Petals vs. Whole plant
  misc_feature: MA Experiment ID: 20001459 Result: Up-regulated in Transcription
  misc_feature: MA Experiment 20001459 PARAMETER Experiment Name: At_50mM_NH4NO3_L-to-H_P Parameter: Age (day) Value: Undefined
  misc_feature: MA Experiment 20001459 PARAMETER Experiment Name: At_50mM_NH4NO3_L-to-H_P Parameter: Organism Value: Undefined
  misc_feature: MA Experiment 20001459 PARAMETER Experiment Name: At_50mM_NH4NO3_L-to-H_P Parameter: Plant Line Value: Undefined
  misc_feature: MA Experiment 20001459 PARAMETER Experiment Name: At_50mM_NH4NO3_L-to-H_P Parameter: Timepoint (hr) Value: 4
  misc_feature: MA Experiment 20001459 PARAMETER Experiment Name: At_50mM_NH4NO3_L-to-H_P Parameter: Tissue Value: Siliques
  misc_feature: MA Experiment 20001459 PARAMETER Experiment Name: At_50mM_NH4NO3_L-to-H_P Parameter: Treatment Value: 50mM NH4NO3 vs. 100mM Manitol
  misc_feature: MA Experiment ID: 20001556 Result: Down-regulated in Transcription
  misc_feature: MA Experiment 20001556 PARAMETER Experiment Name: At_Drought_Soil_Dry_P Parameter: Age (day) Value: 26
  misc_feature: MA Experiment 20001556 PARAMETER Experiment Name: At_Drought_Soil_Dry_P Parameter: Organism Value: A. thaliana
  misc_feature: MA Experiment 20001556 PARAMETER Experiment Name: At_Drought_Soil_Dry_P Parameter: Plant Line Value: WS
  misc_feature: MA Experiment 20001556 PARAMETER Experiment Name: At_Drought_Soil_Dry_P Parameter: Post Timepoint (hr) Value: None
  misc_feature: MA Experiment 20001556 PARAMETER Experiment Name: At_Drought_Soil_Dry_P Parameter: Post-Treatment Value: None
  misc_feature: MA Experiment 20001556 PARAMETER Experiment Name: At_Drought_Soil_Dry_P Parameter: Timepoint (day) Value: 12
  misc_feature: MA Experiment 20001556 PARAMETER Experiment Name: At_Drought_Soil_Dry_P Parameter: Treatment Value: Drought vs. No Drought
  misc_feature: MA Experiment ID: 20001559 Result: Down-regulated in Transcription
  misc_feature: MA Experiment 20001559 PARAMETER Experiment Name: At_Drought_Soil_Dry_P Parameter: Age (day) Value: 28
  misc_feature: MA Experiment 20001559 PARAMETER Experiment Name: At_Drought_Soil_Dry_P Parameter: Organism Value: A. thaliana
  misc_feature: MA Experiment 20001559 PARAMETER Experiment Name: At_Drought_Soil_Dry_P Parameter: Plant Line Value: WS
  misc_feature: MA Experiment 20001559 PARAMETER Experiment Name: At_Drought_Soil_Dry_P Parameter: Post Timepoint (hr) Value: 29
  misc_feature: MA Experiment 20001559 PARAMETER Experiment Name: At_Drought_Soil_Dry_P Parameter: Post-Treatment Value: Re-Water vs. No Drought
  misc_feature: MA Experiment 20001559 PARAMETER Experiment Name: At_Drought_Soil_Dry_P Parameter: Timepoint (day) Value: 14
  misc_feature: MA Experiment 20001559 PARAMETER Experiment Name: At_Drought_Soil_Dry_P Parameter: Treatment Value: Drought vs. No Drought
  misc_feature: MA Experiment ID: 20001560 Result: Down-regulated in Transcription
  misc_feature: MA Experiment 20001560 PARAMETER Experiment Name: At_Drought_Soil_Dry_P Parameter: Age (day) Value: 28
  misc_feature: MA Experiment 20001560 PARAMETER Experiment Name: At_Drought_Soil_Dry_P Parameter: Organism Value: A. thaliana
  misc_feature: MA Experiment 20001560 PARAMETER Experiment Name: At_Drought_Soil_Dry_P Parameter: Plant Line Value: WS
  misc_feature: MA Experiment 20001560 PARAMETER Experiment Name: At_Drought_Soil_Dry_P Parameter: Post Timepoint (hr) Value: None
  misc_feature: MA Experiment 20001560 PARAMETER Experiment Name: At_Drought_Soil_Dry_P Parameter: Post-Treatment Value: None
  misc_feature: MA Experiment 20001560 PARAMETER Experiment Name: At_Drought_Soil_Dry_P Parameter: Timepoint (day) Value: 14
  misc_feature: MA Experiment 20001560 PARAMETER Experiment Name: At_Drought_Soil_Dry_P Parameter: Treatment Value: Drought vs. No Drought
  misc_feature: MA Experiment ID: 20001757 Result: Up-regulated in Transcription
  misc_feature: MA Experiment 20001757 PARAMETER Experiment Name: At_50mM_NH4NO3_L-to-H_P Parameter: Timepoint (hr) Value: 6
  misc_feature: MA Experiment 20001757 PARAMETER Experiment Name: At_50mM_NH4NO3_L-to-H_P Parameter: Tissue Value: Leaf
  misc_feature: MA Experiment 20001757 PARAMETER Experiment Name: At_50mM_NH4NO3_L-to-H_P Parameter: Treatment Value: 50mM NH4NO3 vs 100mM Mannitol
  misc_feature: MA Experiment ID: 20001760 Result: Up-regulated in Transcription
  misc_feature: MA Experiment 20001760 PARAMETER Experiment Name: At_50mM_NH4NO3_L-to-H_P Parameter: Timepoint (hr) Value: 2
  misc_feature: MA Experiment 20001760 PARAMETER Experiment Name: At_50mM_NH4NO3_L-to-H_P Parameter: Tissue Value: Siliques
  misc_feature: MA Experiment 20001760 PARAMETER Experiment Name: At_50mM_NH4NO3_L-to-H_P Parameter: Treatment Value: 50mM NH4NO3 vs 100mM Mannitol
  misc_feature: MA Experiment ID: 20001911 Result: Down-regulated in Transcription
  misc_feature: MA Experiment 20001911 PARAMETER Experiment Name: At_Drought_Reproduction_P Parameter: Age (day) Value: 40
  misc_feature: MA Experiment 20001911 PARAMETER Experiment Name: At_Drought_Reproduction_P Parameter: Organism Value: A. thaliana
  misc_feature: MA Experiment 20001911 PARAMETER Experiment Name: At_Drought_Reproduction_P Parameter: Plant Line Value: WS
  misc_feature: MA Experiment 20001911 PARAMETER Experiment Name: At_Drought_Reproduction_P Parameter: Timepoint (day) Value: 10
  misc_feature: MA Experiment 20001911 PARAMETER Experiment Name: At_Drought_Reproduction_P Parameter: Tissue Value: Flowers
  misc_feature: MA Experiment 20001911 PARAMETER Experiment Name: At_Drought_Reproduction_P Parameter: Treatment Value: Drought vs. No Drought

SEQ ID NO: 94647 - protein, 917 aa, Arabidopsis thaliana; identical to SEQ ID NO: 90891
  peptide (1)..(917): Ceres Seq. ID no. 12725656
  misc_feature (103)..(332): Pfam Name: Oxidoreductase molybdopterin binding domain Pfam Description: Oxidoreductase molybdopterin binding domain
  misc_feature (98)..(912): Homolog of NCBI NO: 7432652 NR Description: nitrate reductase (NADH) (EC 1.7.1.1) - Chlorella vulgaris >gi|1113861|gb|AAC49459.1| nitrate reductase
  misc_feature (89)..(916): Homolog of NCBI NO: 30526321 NR Description: nitrate reductase ['Chlorella' ellipsoidea]
  misc_feature (92)..(917): Homolog of NCBI NO: 730148 NR Description: Nitrate reductase [NADPH] (NR)
  misc_feature (435)..(917): Homolog of NCBI NO: 6224515 NR Description: nitrate reductase [Hebeloma cylindrosporum]
  misc_feature (95)..(518): Homolog of NCBI NO: 6224515 NR Description: nitrate reductase [Hebeloma cylindrosporum]
  misc_feature (103)..(917): Homolog of NCBI NO: 2894356 NR Description: nitrate reductase (NADPH) [Phaeosphaeria nodorum]
  misc_feature (101)..(917): Homolog of NCBI NO: 2342599 NR Description: Nitrate reductase [Metarhizium anisopliae]
  misc_feature (95)..(917): Homolog of NCBI NO: 730145 NR Description: Nitrate reductase [NADPH] (NR)
  misc_feature (435)..(917): Homolog of NCBI NO: 548358 NR Description: Nitrate reductase [NADPH] (NR)
  misc_feature (435)..(917): Homolog of NCBI NO: 1071816 NR Description: nitrate reductase (NADPH) (EC 1.6.6.3) -

SEQ ID NO: 94648 - protein, 905 aa, Arabidopsis thaliana; identical to SEQ ID NO: 90892
  peptide (1)..(905): Ceres Seq. ID no. 12725657
  misc_feature (91)..(320): Pfam Name: Oxidoreductase molybdopterin binding domain Pfam Description: Oxidoreductase molybdopterin binding domain
  misc_feature (86)..(900): Homolog of NCBI NO: 7432652 NR Description: nitrate reductase (NADH) (EC 1.7.1.1) - Chlorella vulgaris >gi|1113861|gb|AAC49459.1| nitrate reductase
  misc_feature (77)..(904): Homolog of NCBI NO: 30526321 NR Description: nitrate reductase ['Chlorella' ellipsoidea]
  misc_feature (80)..(905): Homolog of NCBI NO: 730148 NR Description: Nitrate reductase [NADPH] (NR)
  misc_feature (423)..(905): Homolog of NCBI NO: 6224515 NR Description: nitrate reductase [Hebeloma cylindrosporum]
  misc_feature (83)..(506): Homolog of NCBI NO: 6224515 NR Description: nitrate reductase [Hebeloma cylindrosporum]
  misc_feature (91)..(905): Homolog of NCBI NO: 2894356 NR Description: nitrate reductase (NADPH) [Phaeosphaeria nodorum]
  misc_feature (89)..(905): Homolog of NCBI NO: 2342599 NR Description: Nitrate reductase [Metarhizium anisopliae]
  misc_feature (83)..(905): Homolog of NCBI NO: 730145 NR Description: Nitrate reductase [NADPH] (NR)
  misc_feature (423)..(905): Homolog of NCBI NO: 548358 NR Description: Nitrate reductase [NADPH] (NR)
  misc_feature (423)..(905): Homolog of NCBI NO: 1071816 NR Description: nitrate reductase (NADPH) (EC 1.6.6.3) -

SEQ ID NO: 94649 - protein, 801 aa, Arabidopsis thaliana; identical to SEQ ID NO: 90893
  peptide (1)..(801): Ceres Seq. ID no. 12725658
  misc_feature (1)..(216): Pfam Name: Oxidoreductase molybdopterin binding domain Pfam Description: Oxidoreductase molybdopterin binding domain
  misc_feature (1)..(796): Homolog of NCBI NO: 7432652 NR Description: nitrate reductase (NADH) (EC 1.7.1.1) - Chlorella vulgaris >gi|1113861|gb|AAC49459.1| nitrate reductase
  misc_feature (1)..(800): Homolog of NCBI NO: 30526321 NR Description: nitrate reductase ['Chlorella' ellipsoidea]
  misc_feature (1)..(801): Homolog of NCBI NO: 730148 NR Description: Nitrate reductase [NADPH] (NR)
  misc_feature (319)..(801): Homolog of NCBI NO: 6224515 NR Description: nitrate reductase [Hebeloma cylindrosporum]
  misc_feature (1)..(402): Homolog of NCBI NO: 6224515 NR Description: nitrate reductase [Hebeloma cylindrosporum]
  misc_feature (1)..(801): Homolog of NCBI NO: 2894356 NR Description: nitrate reductase (NADPH) [Phaeosphaeria nodorum]
  misc_feature (1)..(801): Homolog of NCBI NO: 2342599 NR Description: Nitrate reductase [Metarhizium anisopliae]
  misc_feature (1)..(801): Homolog of NCBI NO: 730145 NR Description: Nitrate reductase [NADPH] (NR)
  misc_feature (319)..(801): Homolog of NCBI NO: 548358 NR Description: Nitrate reductase [NADPH] (NR)
  misc_feature (319)..(801): Homolog of NCBI NO: 1071816 NR Description: nitrate reductase (NADPH) (EC 1.6.6.3) -

SEQ ID NO: 94650 - DNA, 1092 bp, Arabidopsis thaliana; identical to SEQ ID NO: 90894
  misc_feature (1)..(1092): Ceres Seq. ID no. 12725663

SEQ ID NO: 94651 - protein, 363 aa, Arabidopsis thaliana; identical to SEQ ID NO: 90895
  peptide (1)..(363): Ceres Seq. ID no. 12725664
  misc_feature (24)..(334): Pfam Name: Glycosyl hydrolases family 17 Pfam Description: Glycosyl hydrolases family 17
  misc_feature (1)..(363): Homolog of NCBI NO: 15218106 NR Description: glycosyl hydrolase family 17; protein id:
  misc_feature (7)..(333): Homolog of NCBI NO: 15218107 NR Description: glycosyl hydrolase family 17; protein id:
  misc_feature (25)..(330): Homolog of NCBI NO: 34908958 NR Description: beta-1,3-glucanase precursor [Oryza sativa
  misc_feature (1)..(330): Homolog of NCBI NO: 4097946 NR Description: beta-1,3-glucanase precursor [Oryza sativa]
  misc_feature (25)..(330): Homolog of NCBI NO: 4097944 NR Description: beta-1,3-glucanase precursor [Oryza sativa]
  misc_feature (26)..(330): Homolog of NCBI NO: 4884532 NR Description: beta-1,3-glucanase [Oryza sativa]
  misc_feature (2)..(265): Homolog of NCBI NO: 7484720 NR Description: endo-1,3-beta-glucanase (EC 3.2.1.-) - upland
  misc_feature (8)..(332): Homolog of NCBI NO: 6073860 NR Description: beta-1, 3-glucananse [Musa acuminata]
  misc_feature (25)..(332): Homolog of NCBI NO: 6448757 NR Description: beta-1,3-glucanase [Musa acuminata]
  misc_feature (25)..(330): Homolog of NCBI NO: 322839 NR Description: glucan endo-1,3-beta-D-glucosidase (EC 3.2.1.39)

SEQ ID NO: 94652 - protein, 344 aa, Arabidopsis thaliana; identical to SEQ ID NO: 90896
  peptide (1)..(344): Ceres Seq. ID no. 12725665
  misc_feature (5)..(315): Pfam Name: Glycosyl hydrolases family 17 Pfam Description: Glycosyl hydrolases family 17
  misc_feature (1)..(344): Homolog of NCBI NO: 15218106 NR Description: glycosyl hydrolase family 17; protein id:
  misc_feature (1)..(314): Homolog of NCBI NO: 15218107 NR Description: glycosyl hydrolase family 17; protein id:
  misc_feature (6)..(311): Homolog of NCBI NO: 34908958 NR Description: beta-1,3-glucanase precursor [Oryza sativa
  misc_feature (1)..(311): Homolog of NCBI NO: 4097946 NR Description: beta-1,3-glucanase precursor [Oryza sativa]
  misc_feature (6)..(311): Homolog of NCBI NO: 4097944 NR Description: beta-1,3-glucanase precursor [Oryza sativa]
  misc_feature (7)..(311): Homolog of NCBI NO: 4884532 NR Description: beta-1,3-glucanase [Oryza sativa]
  misc_feature (1)..(246): Homolog of NCBI NO: 7484720 NR Description: endo-1,3-beta-glucanase (EC 3.2.1.-) - upland
  misc_feature (1)..(313): Homolog of NCBI NO: 6073860 NR Description: beta-1, 3-glucananse [Musa acuminata]
  misc_feature (6)..(313): Homolog of NCBI NO: 6448757 NR Description: beta-1,3-glucanase [Musa acuminata]
  misc_feature (6)..(311): Homolog of NCBI NO: 322839 NR Description: glucan endo-1,3-beta-D-glucosidase (EC 3.2.1.39)

SEQ ID NO: 94653 - protein, 234 aa, Arabidopsis thaliana; identical to SEQ ID NO: 90897
  peptide (1)..(234): Ceres Seq. ID no. 12725666
  misc_feature (1)..(205): Pfam Name: Glycosyl hydrolases family 17 Pfam Description: Glycosyl hydrolases family 17
  misc_feature (1)..(234): Homolog of NCBI NO: 15218106 NR Description: glycosyl hydrolase family 17; protein id:
  misc_feature (1)..(204): Homolog of NCBI NO: 15218107 NR Description: glycosyl hydrolase family 17; protein id:
  misc_feature (1)..(201): Homolog of NCBI NO: 34908958 NR Description: beta-1,3-glucanase precursor [Oryza sativa
  misc_feature (1)..(201): Homolog of NCBI NO: 4097946 NR Description: beta-1,3-glucanase precursor [Oryza sativa]
  misc_feature (1)..(201): Homolog of NCBI NO: 4097944 NR Description: beta-1,3-glucanase precursor [Oryza sativa]
  misc_feature (1)..(201): Homolog of NCBI NO: 4884532 NR Description: beta-1,3-glucanase [Oryza sativa]
  misc_feature (1)..(136): Homolog of NCBI NO: 7484720 NR Description: endo-1,3-beta-glucanase (EC 3.2.1.-) - upland
  misc_feature (1)..(203): Homolog of NCBI NO: 6073860 NR Description: beta-1, 3-glucananse [Musa acuminata]
  misc_feature (1)..(203): Homolog of NCBI NO: 6448757 NR Description: beta-1,3-glucanase [Musa acuminata]
  misc_feature (1)..(201): Homolog of NCBI NO: 322839 NR Description: glucan endo-1,3-beta-D-glucosidase (EC 3.2.1.39)

SEQ ID NO: 94654 - DNA, 954 bp, Arabidopsis thaliana; identical to SEQ ID NO: 90898
  misc_feature (1)..(954): Ceres Seq. ID no. 12725679
  misc_feature: MA Experiment ID: 20000314 Result: Up-regulated in Transcription
  misc_feature: MA Experiment 20000314 PARAMETER Experiment Name: At_14day_Shoots-Roots_Sub_P Parameter: Age (day) Value: 14
  misc_feature: MA Experiment 20000314 PARAMETER Experiment Name: At_14day_Shoots-Roots_Sub_P Parameter: Organism Value: A. thaliana
  misc_feature: MA Experiment 20000314 PARAMETER Experiment Name: At_14day_Shoots-Roots_Sub_P Parameter: Plant Line Value: WS
  misc_feature: MA Experiment 20000314 PARAMETER Experiment Name: At_14day_Shoots-Roots_Sub_P Parameter: Tissue Value: Roots vs. Whole Plant

SEQ ID NO: 94655 - protein, 317 aa, Arabidopsis thaliana; identical to SEQ ID NO: 90899
  peptide (1)..(317): Ceres Seq. ID no. 12725680
  misc_feature (1)..(317): Homolog of NCBI NO: 22330710 NR Description: hypothetical protein; protein id: At1g77855.1
  misc_feature (123)..(317): Homolog of NCBI NO: 6573780 NR Description: F28K19.7 [Arabidopsis thaliana]
  misc_feature (4)..(124): Homolog of NCBI NO: 6573780 NR Description: F28K19.7 [Arabidopsis thaliana]
  misc_feature (1)..(317): Homolog of NCBI NO: 18395063 NR Description: expressed protein; protein id: At1g22030.1, by cDNA: 39052. [Arabidopsis thaliana] >gi|25402951|pir||C86353
  misc_feature (1)..(317): Homolog of NCBI NO: 21593454 NR Description: unknown [Arabidopsis thaliana]
  misc_feature (9)..(316): Homolog of NCBI NO: 34907302 NR Description: hypothetical protein~similar to Arabidopsis

SEQ ID NO: 94656 - protein, 298 aa, Arabidopsis thaliana; identical to SEQ ID NO: 90900
  peptide (1)..(298): Ceres Seq. ID no. 12725681
  misc_feature (1)..(298): Homolog of NCBI NO: 22330710 NR Description: hypothetical protein; protein id: At1g77855.1
  misc_feature (104)..(298): Homolog of NCBI NO: 6573780 NR Description: F28K19.7 [Arabidopsis thaliana]
  misc_feature (1)..(105): Homolog of NCBI NO: 6573780 NR Description: F28K19.7 [Arabidopsis thaliana]
  misc_feature (1)..(298): Homolog of NCBI NO: 18395063 NR Description: expressed protein; protein id: At1g22030.1, by cDNA: 39052. [Arabidopsis thaliana] >gi|25402951|pir||C86353
  misc_feature (1)..(298): Homolog of NCBI NO: 21593454 NR Description: unknown [Arabidopsis thaliana]
  misc_feature (1)..(297): Homolog of NCBI NO: 34907302 NR Description: hypothetical protein~similar to Arabidopsis

SEQ ID NO: 94657 - protein, 285 aa, Arabidopsis thaliana; identical to SEQ ID NO: 90901
  peptide (1)..(285): Ceres Seq. ID no. 12725682
  misc_feature (1)..(285): Homolog of NCBI NO: 22330710 NR Description: hypothetical protein; protein id: At1g77855.1
  misc_feature (91)..(285): Homolog of NCBI NO: 6573780 NR Description: F28K19.7 [Arabidopsis thaliana]
  misc_feature (1)..(92): Homolog of NCBI NO: 6573780 NR Description: F28K19.7 [Arabidopsis thaliana]
  misc_feature (1)..(285): Homolog of NCBI NO: 18395063 NR Description: expressed protein; protein id: At1g22030.1, by cDNA: 39052. [Arabidopsis thaliana] >gi|25402951|pir||C86353
  misc_feature (1)..(285): Homolog of NCBI NO: 21593454 NR Description: unknown [Arabidopsis thaliana]
  misc_feature (1)..(284): Homolog of NCBI NO: 34907302 NR Description: hypothetical protein~similar to Arabidopsis

SEQ ID NO: 94658 - DNA, 2091 bp, Arabidopsis thaliana; identical to SEQ ID NO: 90902
  misc_feature (1)..(2091): Ceres Seq. ID no. 12725687
  misc_feature: MA Experiment ID: 20000171 Result: Down-regulated in Transcription
  misc_feature: MA Experiment 20000171 PARAMETER Experiment Name: At_42deg_Heat_P Parameter: Age (day) Value: 14
  misc_feature: MA Experiment 20000171 PARAMETER Experiment Name: At_42deg_Heat_P Parameter: Organism Value: A. thaliana
  misc_feature: MA Experiment 20000171 PARAMETER Experiment Name: At_42deg_Heat_P Parameter: Plant Line Value: WS
  misc_feature: MA Experiment 20000171 PARAMETER Experiment Name: At_42deg_Heat_P Parameter: Temperature (deg C) Value: 42 vs. 22
  misc_feature: MA Experiment 20000171 PARAMETER Experiment Name: At_42deg_Heat_P Parameter: Timepoint (hr) Value: 1
  misc_feature: MA Experiment 20000171 PARAMETER Experiment Name: At_42deg_Heat_P Parameter: Tissue Value: Aerial
  misc_feature: MA Experiment ID: 20000173 Result: Down-regulated in Transcription
  misc_feature: MA Experiment 20000173 PARAMETER Experiment Name: At_42deg_Heat_P Parameter: Age (day) Value: 14
  misc_feature: MA Experiment 20000173 PARAMETER Experiment Name: At_42deg_Heat_P Parameter: Organism Value: A. thaliana
  misc_feature: MA Experiment 20000173 PARAMETER Experiment Name: At_42deg_Heat_P Parameter: Plant Line Value: WS
  misc_feature: MA Experiment 20000173 PARAMETER Experiment Name: At_42deg_Heat_P Parameter: Temperature (deg C) Value: 42 vs. 22
  misc_feature: MA Experiment 20000173 PARAMETER Experiment Name: At_42deg_Heat_P Parameter: Timepoint (hr) Value: 6
  misc_feature: MA Experiment 20000173 PARAMETER Experiment Name: At_42deg_Heat_P Parameter: Tissue Value: Aerial
  misc_feature: MA Experiment ID: 20000184 Result: Down-regulated in Transcription
  misc_feature: MA Experiment 20000184 PARAMETER Experiment Name: At_Shoots__P Parameter: Age (day) Value: 7
  misc_feature: MA Experiment 20000184 PARAMETER Experiment Name: At_Shoots__P Parameter: Tissue Value: Shoots vs. Whole Plant
  misc_feature: MA Experiment ID: 20000452 Result: Down-regulated in Transcription
  misc_feature: MA Experiment 20000452 PARAMETER Experiment Name: At_CS6879_Shoots-Roots_P Parameter: Age (day) Value: 14
  misc_feature: MA Experiment 20000452 PARAMETER Experiment Name: At_CS6879_Shoots-Roots_P Parameter: Organism Value: A. thaliana
  misc_feature: MA Experiment 20000452 PARAMETER Experiment Name: At_CS6879_Shoots-Roots_P Parameter: Plant Line Value: CS6879 vs. WS
  misc_feature: MA Experiment 20000452 PARAMETER Experiment Name: At_CS6879_Shoots-Roots_P Parameter: Tissue Value: Shoots
  misc_feature: MA Experiment ID: 20000496 Result: Up-regulated in Transcription
  misc_feature: MA Experiment 20000496 PARAMETER Experiment Name: At_Guard_Cells_P Parameter: Harvest Date Value: 7/19/2002
  misc_feature: MA Experiment 20000496 PARAMETER Experiment Name: At_Guard_Cells_P Parameter: Organism Value: Canola
  misc_feature: MA Experiment 20000496 PARAMETER Experiment Name: At_Guard_Cells_P Parameter: Tissue Value: Guard Cells vs. Leaves
  misc_feature: MA Experiment ID: 20001459 Result: Up-regulated in Transcription
  misc_feature: MA Experiment 20001459 PARAMETER Experiment Name: At_50mM_NH4NO3_L-to-H_P Parameter: Age (day) Value: Undefined
  misc_feature: MA Experiment 20001459 PARAMETER Experiment Name: At_50mM_NH4NO3_L-to-H_P Parameter: Organism Value: Undefined
  misc_feature: MA Experiment 20001459 PARAMETER Experiment Name: At_50mM_NH4NO3_L-to-H_P Parameter: Plant Line Value: Undefined
  misc_feature: MA Experiment 20001459 PARAMETER Experiment Name: At_50mM_NH4NO3_L-to-H_P Parameter: Timepoint (hr) Value: 4
  misc_feature: MA Experiment 20001459 PARAMETER Experiment Name: At_50mM_NH4NO3_L-to-H_P Parameter: Tissue Value: Siliques
  misc_feature: MA Experiment 20001459 PARAMETER Experiment Name: At_50mM_NH4NO3_L-to-H_P Parameter: Treatment Value: 50mM NH4NO3 vs. 100mM Manitol
  misc_feature: MA Experiment ID: 20001905 Result: Down-regulated in Transcription
  misc_feature: MA Experiment 20001905 PARAMETER Experiment Name: At_Drought_Reproduction_P Parameter: Age (day) Value: 40
  misc_feature: MA Experiment 20001905 PARAMETER Experiment Name: At_Drought_Reproduction_P Parameter: Organism Value: A. thaliana
  misc_feature: MA Experiment 20001905 PARAMETER Experiment Name: At_Drought_Reproduction_P Parameter: Plant Line Value: WS
  misc_feature: MA Experiment 20001905 PARAMETER Experiment Name: At_Drought_Reproduction_P Parameter: Timepoint (day) Value: 10
  misc_feature: MA Experiment 20001905 PARAMETER Experiment Name: At_Drought_Reproduction_P Parameter: Tissue Value: Rosettes
  misc_feature: MA Experiment 20001905 PARAMETER Experiment Name: At_Drought_Reproduction_P Parameter: Treatment Value: Drought vs. No Drought
  misc_feature: MA Experiment ID: 20001911 Result: Down-regulated in Transcription
  misc_feature: MA Experiment 20001911 PARAMETER Experiment Name: At_Drought_Reproduction_P Parameter: Age (day) Value: 40
  misc_feature: MA Experiment 20001911 PARAMETER Experiment Name: At_Drought_Reproduction_P Parameter: Organism Value: A. thaliana
  misc_feature: MA Experiment 20001911 PARAMETER Experiment Name: At_Drought_Reproduction_P Parameter: Plant Line Value: WS
  misc_feature: MA Experiment 20001911 PARAMETER Experiment Name: At_Drought_Reproduction_P Parameter: Timepoint (day) Value: 10
  misc_feature: MA Experiment 20001911 PARAMETER Experiment Name: At_Drought_Reproduction_P Parameter: Tissue Value: Flowers
  misc_feature: MA Experiment 20001911 PARAMETER Experiment Name: At_Drought_Reproduction_P Parameter: Treatment Value: Drought vs. No Drought

SEQ ID NO: 94659 - protein, 674 aa, Arabidopsis thaliana; identical to SEQ ID NO: 90903
  peptide (1)..(674): Ceres Seq. ID no. 12725688
  misc_feature (203)..(514): Pfam Name: Sulfate transporter family Pfam Description: Sulfate transporter family
  misc_feature (121)..(674): Homolog of NCBI NO: 6573773 NR Description: F28K19.21 [Arabidopsis thaliana]
  misc_feature (2)..(661): Homolog of NCBI NO: 15238085 NR Description: sulfate transporter; protein id: At5g10180.1, by cDNA: gi_17064939, supported by cDNA: gi_20259973, supported
  misc_feature (39)..(667): Homolog of NCBI NO: 1711618 NR Description: Low affinity sulphate transporter 3
  misc_feature (39)..(664): Homolog of NCBI NO: 24414266 NR Description: Putative sulfate transporter [Oryza sativa
  misc_feature (288)..(619): Homolog of NCBI NO: 24414267 NR Description: Putative sulfate transporter [Oryza sativa
  misc_feature (29)..(263): Homolog of NCBI NO: 24414267 NR Description: Putative sulfate transporter [Oryza sativa
  misc_feature (623)..(661): Homolog of NCBI NO: 24414267 NR Description: Putative sulfate transporter [Oryza sativa
  misc_feature (291)..(674): Homolog of NCBI NO: 4033347 NR Description: sulfate permease [Brassica juncea]
  misc_feature (86)..(662): Homolog of NCBI NO: 11279063 NR Description: sulfate transport protein [imported] - thaliana >gi|3777483|dbj|BAA33932.1| sulfate transporter
  misc_feature (86)..(662): Homolog of NCBI NO: 15236537 NR Description: putative sulfate transporter; protein id: supported by cDNA: gi_14196242 [Arabidopsis thaliana]

SEQ ID NO: 94660 - protein, 658 aa, Arabidopsis thaliana; identical to SEQ ID NO: 90904
  peptide (1)..(658): Ceres Seq. ID no. 12725689
  misc_feature (187)..(498): Pfam Name: Sulfate transporter family Pfam Description: Sulfate transporter family
  misc_feature (105)..(658): Homolog of NCBI NO: 6573773 NR Description: F28K19.21 [Arabidopsis thaliana]
  misc_feature (1)..(645): Homolog of NCBI NO: 15238085 NR Description: sulfate transporter; protein id: At5g10180.1, by cDNA: gi_17064939, supported by cDNA: gi_20259973, supported
  misc_feature (23)..(651): Homolog of NCBI NO: 1711618 NR Description: Low affinity sulphate transporter 3
  misc_feature (23)..(648): Homolog of NCBI NO: 24414266 NR Description: Putative sulfate transporter [Oryza sativa
  misc_feature (272)..(603): Homolog of NCBI NO: 24414267 NR Description: Putative sulfate transporter [Oryza sativa
  misc_feature (13)..(247): Homolog of NCBI NO: 24414267 NR Description: Putative sulfate transporter [Oryza sativa
  misc_feature (607)..(645): Homolog of NCBI NO: 24414267 NR Description: Putative sulfate transporter [Oryza sativa
  misc_feature (275)..(658): Homolog of NCBI NO: 4033347 NR Description: sulfate permease [Brassica juncea]
  misc_feature (70)..(646): Homolog of NCBI NO: 11279063 NR Description: sulfate transport protein [imported] - thaliana >gi|3777483|dbj|BAA33932.1| sulfate transporter
  misc_feature (70)..(646): Homolog of NCBI NO: 15236537 NR Description: putative sulfate transporter; protein id: supported by cDNA: gi_14196242 [Arabidopsis thaliana]

SEQ ID NO: 94661 - protein, 637 aa, Arabidopsis thaliana; identical to SEQ ID NO: 90905
  peptide (1)..(637): Ceres Seq. ID no. 12725690
  misc_feature (166)..(477): Pfam Name: Sulfate transporter family Pfam Description: Sulfate transporter family
  misc_feature (84)..(637): Homolog of NCBI NO: 6573773 NR Description: F28K19.21 [Arabidopsis thaliana]
  misc_feature (1)..(624): Homolog of NCBI NO: 15238085 NR Description: sulfate transporter; protein id: At5g10180.1, by cDNA: gi_17064939, supported by cDNA: gi_20259973, supported
  misc_feature (2)..(630): Homolog of NCBI NO: 1711618 NR Description: Low affinity sulphate transporter 3
  misc_feature (2)..(627): Homolog of NCBI NO: 24414266 NR Description: Putative sulfate transporter [Oryza sativa
  misc_feature (251)..(582): Homolog of NCBI NO: 24414267 NR Description: Putative sulfate transporter [Oryza sativa
  misc_feature (1)..(226): Homolog of NCBI NO: 24414267 NR Description: Putative sulfate transporter [Oryza sativa
  misc_feature (586)..(624): Homolog of NCBI NO: 24414267 NR Description: Putative sulfate transporter [Oryza sativa
  misc_feature (254)..(637): Homolog of NCBI NO: 4033347 NR Description: sulfate permease [Brassica juncea]
  misc_feature (49)..(625): Homolog of NCBI NO: 11279063 NR Description: sulfate transport protein [imported] - thaliana >gi|3777483|dbj|BAA33932.1| sulfate transporter
  misc_feature (49)..(625): Homolog of NCBI NO: 15236537 NR Description: putative sulfate transporter; protein id: supported by cDNA: gi_14196242 [Arabidopsis thaliana]

SEQ ID NO: 94662 - DNA, 2158 bp, Arabidopsis thaliana; identical to SEQ ID NO: 90906
  misc_feature (1)..(2158): Ceres Seq. ID no. 12725691
  misc_feature: MA Experiment ID: 20000184 Result: Up-regulated in Transcription
  misc_feature: MA Experiment 20000184 PARAMETER Experiment Name: At_Shoots__P Parameter: Age (day) Value: 7
  misc_feature: MA Experiment 20000184 PARAMETER Experiment Name: At_Shoots__P Parameter: Tissue Value: Shoots vs. Whole Plant
  misc_feature: MA Experiment ID: 20000185 Result: Up-regulated in Transcription
  misc_feature: MA Experiment 20000185 PARAMETER Experiment Name: At_Roots__P Parameter: Age (day) Value: 7 vs. 21
  misc_feature: MA Experiment 20000185 PARAMETER Experiment Name: At_Roots__P Parameter: Organism Value: A. thaliana
  misc_feature: MA Experiment 20000185 PARAMETER Experiment Name: At_Roots__P Parameter: Tissue Value: Roots vs. Whole Plant
  misc_feature: MA Experiment ID: 20000227 Result: Down-regulated in Transcription
  misc_feature: MA Experiment 20000227 PARAMETER Experiment Name: At_Root-Tips-vs-Tops_P Parameter: Tissue Value: Root Tips vs. Root Tops
  misc_feature: MA Experiment ID: 20000267 Result: Down-regulated in Transcription
  misc_feature: MA Experiment 20000267 PARAMETER Experiment Name: At_Drought_P Parameter: Age (day) Value: 7
  misc_feature: MA Experiment 20000267 PARAMETER Experiment Name: At_Drought_P Parameter: Organism Value: A. thaliana
  misc_feature: MA Experiment 20000267 PARAMETER Experiment Name: At_Drought_P Parameter: Plant Line Value: WS
  misc_feature: MA Experiment 20000267 PARAMETER Experiment Name: At_Drought_P Parameter: Timepoint (hr) Value: 6
  misc_feature: MA Experiment 20000267 PARAMETER Experiment Name: At_Drought_P Parameter: Tissue Value: Whole Plant
  misc_feature: MA Experiment 20000267 PARAMETER Experiment Name: At_Drought_P Parameter: Treatment Value: Drought vs. No Drought
  misc_feature: MA Experiment ID: 20000269 Result: Down-regulated in Transcription
  misc_feature: MA Experiment 20000269 PARAMETER Experiment Name: At_1mM_KNO3_L-vs-H_Roots_P Parameter: Age (day) Value: 7,10,12
  misc_feature: MA Experiment 20000269 PARAMETER Experiment Name: At_1mM_KNO3_L-vs-H_Roots_P Parameter: Organism Value: A. thaliana
  misc_feature: MA Experiment 20000269 PARAMETER Experiment Name: At_1mM_KNO3_L-vs-H_Roots_P Parameter: Plant Line Value: WS
  misc_feature: MA Experiment 20000269 PARAMETER Experiment Name: At_1mM_KNO3_L-vs-H_Roots_P Parameter: Timepoint (day) Value: 7,10,12
  misc_feature: MA Experiment 20000269 PARAMETER Experiment Name: At_1mM_KNO3_L-vs-H_Roots_P Parameter: Tissue Value: Roots
  misc_feature: MA Experiment 20000269 PARAMETER Experiment Name: At_1mM_KNO3_L-vs-H_Roots_P Parameter: Treatment Value: 1mM KNO3 vs. 50mM KNO3
  misc_feature: MA Experiment ID: 20000286 Result: Up-regulated in Transcription
  misc_feature: MA Experiment 20000286 PARAMETER Experiment Name: At_Open_Flower_P Parameter: Age (day) Value: 21
  misc_feature: MA Experiment 20000286 PARAMETER Experiment Name: At_Open_Flower_P Parameter: Plant Line Value: WS
  misc_feature: MA Experiment 20000286 PARAMETER Experiment Name: At_Open_Flower_P Parameter: Tissue Value: Half Open vs. Whole Plant
  misc_feature: MA Experiment ID: 20000437 Result: Down-regulated in Transcription
  misc_feature: MA Experiment 20000437 PARAMETER Experiment Name: At_Drought_P Parameter: Age (day) Value: 8
  misc_feature: MA Experiment 20000437 PARAMETER Experiment Name: At_Drought_P Parameter: Organism Value: A. thaliana
  misc_feature: MA Experiment 20000437 PARAMETER Experiment Name: At_Drought_P Parameter: Plant Line Value: WS
  misc_feature: MA Experiment 20000437 PARAMETER Experiment Name: At_Drought_P Parameter: Timepoint (hr) Value: 24
  misc_feature: MA Experiment 20000437 PARAMETER Experiment Name: At_Drought_P Parameter: Tissue Value: Whole Plant
  misc_feature: MA Experiment 20000437 PARAMETER Experiment Name: At_Drought_P Parameter: Treatment Value: Drought vs. No Drought
  misc_feature: MA Experiment ID: 20000438 Result: Up-regulated in Transcription
  misc_feature: MA Experiment 20000438 PARAMETER Experiment Name: At_Shoots__P Parameter: Age (day) Value: 14
  misc_feature: MA Experiment 20000438 PARAMETER Experiment Name: At_Shoots__P Parameter: Tissue Value: Shoots vs. Whole Plant
  misc_feature: MA Experiment ID: 20000439 Result: Up-regulated in Transcription
  misc_feature: MA Experiment 20000439 PARAMETER Experiment Name: At_Roots__P Parameter: Age (day) Value: 14 vs. 21
  misc_feature: MA Experiment 20000439 PARAMETER Experiment Name: At_Roots__P Parameter: Organism Value: A. thaliana
  misc_feature: MA Experiment 20000439 PARAMETER Experiment Name: At_Roots__P Parameter: Tissue Value: Roots vs. Whole Plant
  misc_feature: MA Experiment ID: 20000527 Result: Down-regulated in Transcription
  misc_feature: MA Experiment 20000527 PARAMETER Experiment Name: At_10percent_PEG_P Parameter: Age (day) Value: 20
  misc_feature: MA Experiment 20000527 PARAMETER Experiment Name: At_10percent_PEG_P Parameter: Organism Value: A. thaliana
  misc_feature: MA Experiment 20000527 PARAMETER Experiment Name: At_10percent_PEG_P Parameter: Plant Line Value: WS
  misc_feature: MA Experiment 20000527 PARAMETER Experiment Name: At_10percent_PEG_P Parameter: Timepoint (day) Value: 20
  misc_feature: MA Experiment 20000527 PARAMETER Experiment Name: At_10percent_PEG_P Parameter: Tissue Value: Whole Plant
  misc_feature: MA Experiment 20000527 PARAMETER Experiment Name: At_10percent_PEG_P Parameter: Treatment Value: 10percent PEG vs. No Treatment
  misc_feature: MA Experiment ID: 20001248 Result: Down-regulated in Transcription
  misc_feature: MA Experiment 20001248 PARAMETER Experiment Name: At_Far-red-induction_P Parameter: Age (day) Value: 7
  misc_feature: MA Experiment 20001248 PARAMETER Experiment Name: At_Far-red-induction_P Parameter: Light Value: Far-red vs. White
  misc_feature: MA Experiment 20001248 PARAMETER Experiment Name: At_Far-red-induction_P Parameter: Organism Value: A. thaliana
  misc_feature: MA Experiment 20001248 PARAMETER Experiment Name: At_Far-red-induction_P Parameter: Plant Line Value: Columbia
  misc_feature: MA Experiment 20001248 PARAMETER Experiment Name: At_Far-red-induction_P Parameter: Timepoint (hr) Value: 4
  misc_feature: MA Experiment 20001248 PARAMETER Experiment Name: At_Far-red-induction_P Parameter: Tissue Value: Whole Plant
  misc_feature: MA Experiment ID: 20001450 Result: Down-regulated in Transcription
  misc_feature: MA Experiment 20001450 PARAMETER Experiment Name: At_Far-red-induction_P Parameter: Age (day) Value: 7
  misc_feature: MA Experiment 20001450 PARAMETER Experiment Name: At_Far-red-induction_P Parameter: Light Value: Far-red vs. White
  misc_feature: MA Experiment 20001450 PARAMETER Experiment Name: At_Far-red-induction_P Parameter: Organism Value: A. thaliana
  misc_feature: MA Experiment 20001450 PARAMETER Experiment Name: At_Far-red-induction_P Parameter: Plant Line Value: Columbia
  misc_feature: MA Experiment 20001450 PARAMETER Experiment Name: At_Far-red-induction_P Parameter: Timepoint (hr) Value: 8
  misc_feature: MA Experiment 20001450 PARAMETER Experiment Name: At_Far-red-induction_P Parameter: Tissue Value: Whole Plant
  misc_feature: MA Experiment ID: 20001556 Result: Up-regulated in Transcription
  misc_feature: MA Experiment 20001556 PARAMETER Experiment Name: At_Drought_Soil_Dry_P Parameter: Age (day) Value: 26
  misc_feature: MA Experiment 20001556 PARAMETER Experiment Name: At_Drought_Soil_Dry_P Parameter: Organism Value: A. thaliana
  misc_feature: MA Experiment 20001556 PARAMETER Experiment Name: At_Drought_Soil_Dry_P Parameter: Plant Line Value: WS
  misc_feature: MA Experiment 20001556 PARAMETER Experiment Name: At_Drought_Soil_Dry_P Parameter: Post Timepoint (hr) Value: None
  misc_feature: MA Experiment 20001556 PARAMETER Experiment Name: At_Drought_Soil_Dry_P Parameter: Post-Treatment Value: None
  misc_feature: MA Experiment 20001556 PARAMETER Experiment Name: At_Drought_Soil_Dry_P Parameter: Timepoint (day) Value: 12
  misc_feature: MA Experiment 20001556 PARAMETER Experiment Name: At_Drought_Soil_Dry_P Parameter: Treatment Value: Drought vs. No Drought
  misc_feature: MA Experiment ID: 20001557 Result: Up-regulated in Transcription
  misc_feature: MA Experiment 20001557 PARAMETER Experiment Name: At_Drought_Soil_Dry_P Parameter: Age (day) Value: 27
  misc_feature: MA Experiment 20001557 PARAMETER Experiment Name: At_Drought_Soil_Dry_P Parameter: Organism Value: A. thaliana
  misc_feature: MA Experiment 20001557 PARAMETER Experiment Name: At_Drought_Soil_Dry_P Parameter: Plant Line Value: WS
  misc_feature: MA Experiment 20001557 PARAMETER Experiment Name: At_Drought_Soil_Dry_P Parameter: Post Timepoint (hr) Value: 3
  misc_feature: MA Experiment 20001557 PARAMETER Experiment Name: At_Drought_Soil_Dry_P Parameter: Post-Treatment Value: Re-Water vs. No Drought
  misc_feature: MA Experiment 20001557 PARAMETER Experiment Name: At_Drought_Soil_Dry_P Parameter: Timepoint (day) Value: 13
  misc_feature: MA Experiment 20001557 PARAMETER Experiment Name: At_Drought_Soil_Dry_P Parameter: Treatment Value: Drought vs. No Drought

SEQ ID NO: 94663 - protein, 673 aa, Arabidopsis thaliana; identical to SEQ ID NO: 90907
  peptide (1)..(673): Ceres Seq. ID no. 12725692
  misc_feature (209)..(520): Pfam Name: Sulfate transporter family Pfam Description: Sulfate transporter family
  misc_feature (21)..(673): Homolog of NCBI NO: 18395079 NR Description: high affinity sulphate transporter, putative; id: At1g22150.1, supported by cDNA: gi_10716804 [Arabidopsis >gi|10716805|dbj|BAB16410.1| sulfate tansporter Sultr1;3
  misc_feature (272)..(673): Homolog of NCBI NO: 25310832 NR Description: protein F2E2.22 [imported] - Arabidopsis thaliana
  misc_feature (21)..(271): Homolog of NCBI NO: 25310832 NR Description: protein F2E2.22 [imported] - Arabidopsis thaliana
  misc_feature (44)..(673): Homolog of NCBI NO: 13487717 NR Description: sulfate transporter 2 [Lycopersicon esculentum]
  misc_feature (31)..(672): Homolog of NCBI NO: 16197732 NR Description: sulfate transporter [Brassica napus]
  misc_feature (45)..(669): Homolog of NCBI NO: 14484936 NR Description: high affinity sulfate transporter [Lycopersicon
  misc_feature (45)..(669): Homolog of NCBI NO: 13487715 NR Description: sulfate transporter 1 [Lycopersicon esculentum]
  misc_feature (45)..(669): Homolog of NCBI NO: 11907976 NR Description: high affinity sulfate transporter type 1 [Solanum
  misc_feature (6)..(668): Homolog of NCBI NO: 1711615 NR Description: High affinity sulphate transporter 1
  misc_feature (48)..(665): Homolog of NCBI NO: 11279064 NR Description: hypothetical protein [imported] - Arabidopsis

SEQ ID NO: 94664 - protein, 653 aa, Arabidopsis thaliana; identical to SEQ ID NO: 90908
  peptide (1)..(653): Ceres Seq. ID no. 12725693
  misc_feature (189)..(500): Pfam Name: Sulfate transporter family Pfam Description: Sulfate transporter family
  misc_feature (1)..(653): Homolog of NCBI NO: 18395079 NR Description: high affinity sulphate transporter, putative; id: At1g22150.1, supported by cDNA: gi_10716804 [Arabidopsis >gi|10716805|dbj|BAB16410.1| sulfate tansporter Sultr1;3
  misc_feature (252)..(653): Homolog of NCBI NO: 25310832 NR Description: protein F2E2.22 [imported] - Arabidopsis thaliana
  misc_feature (1)..(251): Homolog of NCBI NO: 25310832 NR Description: protein F2E2.22 [imported] - Arabidopsis thaliana
  misc_feature (24)..(653): Homolog of NCBI NO: 13487717 NR Description: sulfate transporter 2 [Lycopersicon esculentum]
  misc_feature (11)..(652): Homolog of NCBI NO: 16197732 NR Description: sulfate transporter [Brassica napus]
  misc_feature (25)..(649): Homolog of NCBI NO: 14484936 NR Description: high affinity sulfate transporter [Lycopersicon
  misc_feature (25)..(649): Homolog of NCBI NO: 13487715 NR Description: sulfate transporter 1 [Lycopersicon esculentum]
  misc_feature (25)..(649): Homolog of NCBI NO: 11907976 NR Description: high affinity sulfate transporter type 1 [Solanum
  misc_feature (1)..(648): Homolog of NCBI NO: 1711615 NR Description: High affinity sulphate transporter 1
  misc_feature (28)..(645): Homolog of NCBI NO: 11279064 NR Description: hypothetical protein [imported] - Arabidopsis

SEQ ID NO: 94665 - protein, 633 aa, Arabidopsis thaliana; identical to SEQ ID NO: 90909
  peptide (1)..(633): Ceres Seq. ID no. 12725694
  misc_feature (169)..(480): Pfam Name: Sulfate transporter family Pfam Description: Sulfate transporter family
  misc_feature (1)..(633): Homolog of NCBI NO: 18395079 NR Description: high affinity sulphate transporter, putative; id: At1g22150.1, supported by cDNA: gi_10716804 [Arabidopsis >gi|10716805|dbj|BAB16410.1| sulfate tansporter Sultr1;3
  misc_feature (232)..(633): Homolog of NCBI NO: 25310832 NR Description: protein F2E2.22 [imported] - Arabidopsis thaliana
  misc_feature (1)..(231): Homolog of NCBI NO: 25310832 NR Description: protein F2E2.22 [imported] - Arabidopsis thaliana
  misc_feature (4)..(633): Homolog of NCBI NO: 13487717 NR Description: sulfate transporter 2 [Lycopersicon esculentum]
  misc_feature (1)..(632): Homolog of NCBI NO: 16197732 NR Description: sulfate transporter [Brassica napus]
  misc_feature (5)..(629): Homolog of NCBI NO: 14484936 NR Description: high affinity sulfate transporter [Lycopersicon
  misc_feature (5)..(629): Homolog of NCBI NO: 13487715 NR Description: sulfate transporter 1 [Lycopersicon esculentum]
  misc_feature (5)..(629): Homolog of NCBI NO: 11907976 NR Description: high affinity sulfate transporter type 1 [Solanum
  misc_feature (1)..(628): Homolog of NCBI NO: 1711615 NR Description: High affinity sulphate transporter 1
  misc_feature (8)..(625): Homolog of NCBI NO: 11279064 NR Description: hypothetical protein [imported] - Arabidopsis

SEQ ID NO: 94666 - DNA, 1588 bp, Arabidopsis thaliana; identical to SEQ ID NO: 90910
  misc_feature (1)..(1588): Ceres Seq. ID no. 12725707
  misc_feature: MA Experiment ID: 20000166 Result: Up-regulated in Transcription
  misc_feature: MA Experiment 20000166 PARAMETER Experiment Name: At_100uM_ABA_P Parameter: Age (day) Value: 14
  misc_feature: MA Experiment 20000166 PARAMETER Experiment Name: At_100uM_ABA_P Parameter: Organism Value: A. thaliana
  misc_feature: MA Experiment 20000166 PARAMETER Experiment Name: At_100uM_ABA_P Parameter: Plant Line Value: WS
  misc_feature: MA Experiment 20000166 PARAMETER Experiment Name: At_100uM_ABA_P Parameter: Timepoint (hr) Value: 1
  misc_feature: MA Experiment 20000166 PARAMETER Experiment Name: At_100uM_ABA_P Parameter: Tissue Value: Aerial
  misc_feature: MA Experiment 20000166 PARAMETER Experiment Name: At_100uM_ABA_P Parameter: Treatment Value: 100uM ABA vs. No Treatment
  misc_feature: MA Experiment ID: 20000173 Result: Up-regulated in Transcription
  misc_feature: MA Experiment 20000173 PARAMETER Experiment Name: At_42deg_Heat_P Parameter: Age (day) Value: 14
  misc_feature: MA Experiment 20000173 PARAMETER Experiment Name: At_42deg_Heat_P Parameter: Organism Value: A. thaliana
  misc_feature: MA Experiment 20000173 PARAMETER Experiment Name: At_42deg_Heat_P Parameter: Plant Line Value: WS
  misc_feature: MA Experiment 20000173 PARAMETER Experiment Name: At_42deg_Heat_P Parameter: Temperature (deg C) Value: 42 vs. 22
  misc_feature: MA Experiment 20000173 PARAMETER Experiment Name: At_42deg_Heat_P Parameter: Timepoint (hr) Value: 6
  misc_feature: MA Experiment 20000173 PARAMETER Experiment Name: At_42deg_Heat_P Parameter: Tissue Value: Aerial
  misc_feature: MA Experiment ID: 20000234 Result: Down-regulated in Transcription
  misc_feature: MA Experiment 20000234 PARAMETER Experiment Name: At_Siliques_P Parameter: Age (day) Value: 21
  misc_feature: MA Experiment 20000234 PARAMETER Experiment Name: At_Siliques_P Parameter: Organism Value: A. thaliana
  misc_feature: MA Experiment 20000234 PARAMETER Experiment Name: At_Siliques_P Parameter: Plant Line Value: WS
  misc_feature: MA Experiment 20000234 PARAMETER Experiment Name: At_Siliques_P Parameter: Tissue Value: Less Than 5mm Siliques vs. Whole Plant
  misc_feature: MA Experiment ID: 20000264 Result: Down-regulated in Transcription
  misc_feature: MA Experiment 20000264 PARAMETER Experiment Name: At_Open_Flower_P Parameter: Age (day) Value: 21
  misc_feature: MA Experiment 20000264 PARAMETER Experiment Name: At_Open_Flower_P Parameter: Plant Line Value: WS
  misc_feature: MA Experiment 20000264 PARAMETER Experiment Name: At_Open_Flower_P Parameter: Tissue Value: Open Flower vs. Whole Plant
  misc_feature: MA Experiment ID: 20000267 Result: Up-regulated in Transcription
  misc_feature: MA Experiment 20000267 PARAMETER Experiment Name: At_Drought_P Parameter: Age (day) Value: 7
  misc_feature: MA Experiment 20000267 PARAMETER Experiment Name: At_Drought_P Parameter: Organism Value: A. thaliana
  misc_feature: MA Experiment 20000267 PARAMETER Experiment Name: At_Drought_P Parameter: Plant Line Value: WS
  misc_feature: MA Experiment 20000267 PARAMETER Experiment Name: At_Drought_P Parameter: Timepoint (hr) Value: 6
  misc_feature: MA Experiment 20000267 PARAMETER Experiment Name: At_Drought_P Parameter: Tissue Value: Whole Plant
  misc_feature: MA Experiment 20000267 PARAMETER Experiment Name: At_Drought_P Parameter: Treatment Value: Drought vs. No Drought
  misc_feature: MA Experiment ID: 20000268 Result: Up-regulated in Transcription
  misc_feature: MA Experiment 20000268 PARAMETER Experiment Name: At_100mM_NaCl__P Parameter: Age (day) Value: 14
  misc_feature: MA Experiment 20000268 PARAMETER Experiment Name: At_100mM_NaCl__P Parameter: Organism Value: A. thaliana
  misc_feature: MA Experiment 20000268 PARAMETER Experiment Name: At_100mM_NaCl__P Parameter: Plant Line Value: WS
  misc_feature: MA Experiment 20000268 PARAMETER Experiment Name: At_100mM_NaCl__P Parameter: Timepoint (hr) Value: 6
  misc_feature: MA Experiment 20000268 PARAMETER Experiment Name: At_100mM_NaCl__P Parameter: Tissue Value: Whole Plant
  misc_feature: MA Experiment 20000268 PARAMETER Experiment Name: At_100mM_NaCl__P Parameter: Treatment Value: 100mM NaCl vs. No Treatment
  misc_feature: MA Experiment ID: 20000286 Result: Down-regulated in Transcription
  misc_feature: MA Experiment 20000286 PARAMETER Experiment Name: At_Open_Flower_P Parameter: Age (day) Value: 21
  misc_feature: MA Experiment 20000286 PARAMETER Experiment Name: At_Open_Flower_P Parameter: Plant Line Value: WS
  misc_feature: MA Experiment 20000286 PARAMETER Experiment Name: At_Open_Flower_P Parameter: Tissue Value: Half Open vs. Whole Plant
  misc_feature: MA Experiment ID: 20000436 Result: Up-regulated in Transcription
  misc_feature: MA Experiment 20000436 PARAMETER Experiment Name: At_Drought_P Parameter: Age (day) Value: 7
  misc_feature: MA Experiment 20000436 PARAMETER Experiment Name: At_Drought_P Parameter: Organism Value: A. thaliana
  misc_feature: MA Experiment 20000436 PARAMETER Experiment Name: At_Drought_P Parameter: Plant Line Value: WS
  misc_feature: MA Experiment 20000436 PARAMETER Experiment Name: At_Drought_P Parameter: Timepoint (hr) Value: 12
  misc_feature: MA Experiment 20000436 PARAMETER Experiment Name: At_Drought_P Parameter: Tissue Value: Whole Plant
  misc_feature: MA Experiment 20000436 PARAMETER Experiment Name: At_Drought_P Parameter: Treatment Value: Drought vs. No Drought
  misc_feature: MA Experiment ID: 20000437 Result: Up-regulated in Transcription
  misc_feature: MA Experiment 20000437 PARAMETER Experiment Name: At_Drought_P Parameter: Age (day) Value: 8
  misc_feature: MA Experiment 20000437 PARAMETER Experiment Name: At_Drought_P Parameter: Organism Value: A. thaliana
  misc_feature: MA Experiment 20000437 PARAMETER Experiment Name: At_Drought_P Parameter: Plant Line Value: WS
  misc_feature: MA Experiment 20000437 PARAMETER Experiment Name: At_Drought_P Parameter: Timepoint (hr) Value: 24
  misc_feature: MA Experiment 20000437 PARAMETER Experiment Name: At_Drought_P Parameter: Tissue Value: Whole Plant
  misc_feature: MA Experiment 20000437 PARAMETER Experiment Name: At_Drought_P Parameter: Treatment Value: Drought vs. No Drought
  misc_feature: MA Experiment ID: 20000573 Result: Down-regulated in Transcription
  misc_feature: MA Experiment 20000573 PARAMETER Experiment Name: At_100uM_ABA_Mutants__P Parameter: Organism Value: A. thaliana
  misc_feature: MA Experiment 20000573 PARAMETER Experiment Name: At_100uM_ABA_Mutants__P Parameter: Plant Line Value: CS22 vs. Ler wt
  misc_feature: MA Experiment 20000573 PARAMETER Experiment Name: At_100uM_ABA_Mutants__P Parameter: Timepoint (hr) Value: N/A
  misc_feature: MA Experiment 20000573 PARAMETER Experiment Name: At_100uM_ABA_Mutants__P Parameter: Tissue Value: Whole Plant
  misc_feature: MA Experiment 20000573 PARAMETER Experiment Name: At_100uM_ABA_Mutants__P Parameter: Treatment Value: None
  misc_feature: MA Experiment ID: 20001554 Result: Up-regulated in Transcription
  misc_feature: MA Experiment 20001554 PARAMETER Experiment Name: At_Drought_Soil_Dry_P Parameter: Age (day) Value: 21
  misc_feature: MA Experiment 20001554 PARAMETER Experiment Name: At_Drought_Soil_Dry_P Parameter: Organism Value: A. thaliana
  misc_feature: MA Experiment 20001554 PARAMETER Experiment Name: At_Drought_Soil_Dry_P Parameter: Plant Line Value: WS
  misc_feature: MA Experiment 20001554 PARAMETER Experiment Name: At_Drought_Soil_Dry_P Parameter: Post Timepoint (hr) Value: None
  misc_feature: MA Experiment 20001554 PARAMETER Experiment Name: At_Drought_Soil_Dry_P Parameter: Post-Treatment Value: None
  misc_feature: MA Experiment 20001554 PARAMETER Experiment Name: At_Drought_Soil_Dry_P Parameter: Timepoint (day) Value: 7
  misc_feature: MA Experiment 20001554 PARAMETER Experiment Name: At_Drought_Soil_Dry_P Parameter: Treatment Value: Drought vs. No Drought
  misc_feature: MA Experiment ID: 20001555 Result: Up-regulated in Transcription
  misc_feature: MA Experiment 20001555 PARAMETER Experiment Name: At_Drought_Soil_Dry_P Parameter: Age (day) Value: 24
  misc_feature: MA Experiment 20001555 PARAMETER Experiment Name: At_Drought_Soil_Dry_P Parameter: Organism Value: A. thaliana
  misc_feature: MA Experiment 20001555 PARAMETER Experiment Name: At_Drought_Soil_Dry_P Parameter: Plant Line Value: WS
  misc_feature: MA Experiment 20001555 PARAMETER Experiment Name: At_Drought_Soil_Dry_P Parameter: Post Timepoint (hr) Value: None
  misc_feature: MA Experiment 20001555 PARAMETER Experiment Name: At_Drought_Soil_Dry_P Parameter: Post-Treatment Value: None
  misc_feature: MA Experiment 20001555 PARAMETER Experiment Name: At_Drought_Soil_Dry_P Parameter: Timepoint (day) Value: 10
  misc_feature: MA Experiment 20001555 PARAMETER Experiment Name: At_Drought_Soil_Dry_P Parameter: Treatment Value: Drought vs. No Drought
  misc_feature: MA Experiment ID: 20001558 Result: Down-regulated in Transcription
  misc_feature: MA Experiment 20001558 PARAMETER Experiment Name: At_Drought_Soil_Dry_P Parameter: Age (day) Value: 27
  misc_feature: MA Experiment 20001558 PARAMETER Experiment Name: At_Drought_Soil_Dry_P Parameter: Organism Value: A. thaliana
  misc_feature: MA Experiment 20001558 PARAMETER Experiment Name: At_Drought_Soil_Dry_P Parameter: Plant Line Value: WS
  misc_feature: MA Experiment 20001558 PARAMETER Experiment Name: At_Drought_Soil_Dry_P Parameter: Post Timepoint (hr) Value: 6
  misc_feature: MA Experiment 20001558 PARAMETER Experiment Name: At_Drought_Soil_Dry_P Parameter: Post-Treatment Value: Re-Water vs. No Drought
  misc_feature: MA Experiment 20001558 PARAMETER Experiment Name: At_Drought_Soil_Dry_P Parameter: Timepoint (day) Value: 13
  misc_feature: MA Experiment 20001558 PARAMETER Experiment Name: At_Drought_Soil_Dry_P Parameter: Treatment Value: Drought vs. No Drought
  misc_feature: MA Experiment ID: 20001905 Result: Up-regulated in Transcription
  misc_feature: MA Experiment 20001905 PARAMETER Experiment Name: At_Drought_Reproduction_P Parameter: Age (day) Value: 40
  misc_feature: MA Experiment 20001905 PARAMETER Experiment Name: At_Drought_Reproduction_P Parameter: Organism Value: A. thaliana
  misc_feature: MA Experiment 20001905 PARAMETER Experiment Name: At_Drought_Reproduction_P Parameter: Plant Line Value: WS
  misc_feature: MA Experiment 20001905 PARAMETER Experiment Name: At_Drought_Reproduction_P Parameter: Timepoint (day) Value: 10
  misc_feature: MA Experiment 20001905 PARAMETER Experiment Name: At_Drought_Reproduction_P Parameter: Tissue Value: Rosettes
  misc_feature: MA Experiment 20001905 PARAMETER Experiment Name: At_Drought_Reproduction_P Parameter: Treatment Value: Drought vs. No Drought
  misc_feature: MA Experiment ID: 20001911 Result: Up-regulated in Transcription
  misc_feature: MA Experiment 20001911 PARAMETER Experiment Name: At_Drought_Reproduction_P Parameter: Age (day) Value: 40
  misc_feature: MA Experiment 20001911 PARAMETER Experiment Name: At_Drought_Reproduction_P Parameter: Organism Value: A. thaliana
  misc_feature: MA Experiment 20001911 PARAMETER Experiment Name: At_Drought_Reproduction_P Parameter: Plant Line Value: WS
  misc_feature: MA Experiment 20001911 PARAMETER Experiment Name: At_Drought_Reproduction_P Parameter: Timepoint (day) Value: 10
  misc_feature: MA Experiment 20001911 PARAMETER Experiment Name: At_Drought_Reproduction_P Parameter: Tissue Value: Flowers
  misc_feature: MA Experiment 20001911 PARAMETER Experiment Name: At_Drought_Reproduction_P Parameter: Treatment Value: Drought vs. No Drought

SEQ ID NO: 94667 - protein, 259 aa, Arabidopsis thaliana; identical to SEQ ID NO: 90911
  peptide (1)..(259): Ceres Seq. ID no. 12725708
  misc_feature (31)..(248): Homolog of NCBI NO: 13937195 NR Description: At1g78070/F28K19_28 [Arabidopsis thaliana]
  misc_feature (28)..(165): Homolog of NCBI NO: 25405023 NR Description: protein F28K19.28 [imported] - Arabidopsis >gi|6573770|gb|AAF17690.1|AC009243_17 F28K19.28 [Arabidopsis
  misc_feature (165)..(245): Homolog of NCBI NO: 25405023 NR Description: protein F28K19.28 [imported] - Arabidopsis >gi|6573770|gb|AAF17690.1|AC009243_17 F28K19.28 [Arabidopsis
  misc_feature (71)..(239): Homolog of NCBI NO: 18400003 NR Description: expressed protein; protein id: At1g36070.1,
  misc_feature (71)..(239): Homolog of NCBI NO: 12324715 NR Description: unknown protein; 4584-7806 [Arabidopsis thaliana]
  misc_feature (86)..(239): Homolog of NCBI NO: 21553502 NR Description: unknown [Arabidopsis thaliana]
  misc_feature (71)..(171): Homolog of NCBI NO: 6598592 NR Description: F5J5.6 [Arabidopsis thaliana]
  misc_feature (166)..(239): Homolog of NCBI NO: 6598592 NR Description: F5J5.6 [Arabidopsis thaliana]
  misc_feature (31)..(244): Homolog of NCBI NO: 18423837 NR Description: WD-repeat protein-like; protein id: At5g56190.1,
  misc_feature (40)..(244): Homolog of NCBI NO: 30696707 NR Description: WD-40 repeat protein family [Arabidopsis thaliana]

SEQ ID NO: 94668 - protein, 229 aa, Arabidopsis thaliana; identical to SEQ ID NO: 90912
  peptide (1)..(229): Ceres Seq. ID no. 12725709
  misc_feature (1)..(218): Homolog of NCBI NO: 13937195 NR Description: At1g78070/F28K19_28 [Arabidopsis thaliana]
  misc_feature (1)..(135): Homolog of NCBI NO: 25405023 NR Description: protein F28K19.28 [imported] - Arabidopsis >gi|6573770|gb|AAF17690.1|AC009243_17 F28K19.28 [Arabidopsis
  misc_feature (135)..(215): Homolog of NCBI NO: 25405023 NR Description: protein F28K19.28 [imported] - Arabidopsis >gi|6573770|gb|AAF17690.1|AC009243_17 F28K19.28 [Arabidopsis
  misc_feature (41)..(209): Homolog of NCBI NO: 18400003 NR Description: expressed protein; protein id: At1g36070.1,
  misc_feature (41)..(209): Homolog of NCBI NO: 12324715 NR Description: unknown protein; 4584-7806 [Arabidopsis thaliana]
  misc_feature (56)..(209): Homolog of NCBI NO: 21553502 NR Description: unknown [Arabidopsis thaliana]
  misc_feature (41)..(141): Homolog of NCBI NO: 6598592 NR Description: F5J5.6 [Arabidopsis thaliana]
  misc_feature (136)..(209): Homolog of NCBI NO: 6598592 NR Description: F5J5.6 [Arabidopsis thaliana]
  misc_feature (1)..(214): Homolog of NCBI NO: 18423837 NR Description: WD-repeat protein-like; protein id: At5g56190.1,
  misc_feature (10)..(214): Homolog of NCBI NO: 30696707 NR Description: WD-40 repeat protein family [Arabidopsis thaliana]

SEQ ID NO: 94669 - protein, 196 aa, Arabidopsis thaliana; identical to SEQ ID NO: 90913
  peptide (1)..(196): Ceres Seq. ID no. 12725710
  misc_feature (1)..(196): Homolog of NCBI NO: 13937195 NR Description: At1g78070/F28K19_28 [Arabidopsis thaliana]
  misc_feature (1)..(196): Homolog of NCBI NO: 25405023 NR Description: protein F28K19.28 [imported] - Arabidopsis >gi|6573770|gb|AAF17690.1|AC009243_17 F28K19.28 [Arabidopsis
  misc_feature (1)..(196): Homolog of NCBI NO: 18400003 NR Description: expressed protein; protein id: At1g36070.1,
  misc_feature (1)..(196): Homolog of NCBI NO: 12324715 NR Description: unknown protein; 4584-7806 [Arabidopsis thaliana]
  misc_feature (1)..(196): Homolog of NCBI NO: 21553502 NR Description: unknown [Arabidopsis thaliana]
  misc_feature (29)..(196): Homolog of NCBI NO: 6598592 NR Description: F5J5.6 [Arabidopsis thaliana]
  misc_feature (1)..(195): Homolog of NCBI NO: 18423837 NR Description: WD-repeat protein-like; protein id: At5g56190.1,
  misc_feature (1)..(195): Homolog of NCBI NO: 30696707 NR Description: WD-40 repeat protein family [Arabidopsis thaliana]
  misc_feature (1)..(194): Homolog of NCBI NO: 18399975 NR Description: expressed protein; protein id: At3g13340.1, by cDNA: gi_15081810 [Arabidopsis thaliana] AT3g13340/MDC11_13 [Arabidopsis thaliana]
  misc_feature (1)..(195): Homolog of NCBI NO: 21536732 NR Description: WD-repeat protein-like [Arabidopsis thaliana]

SEQ ID NO: 94670 - DNA, 588 bp, Arabidopsis thaliana; identical to SEQ ID NO: 90914
  misc_feature (1)..(588): Ceres Seq. ID no. 12725711
  misc_feature: MA Experiment ID: 20000314 Result: Up-regulated in Transcription
  misc_feature: MA Experiment 20000314 PARAMETER Experiment Name: At_14day_Shoots-Roots_Sub_P Parameter: Age (day) Value: 14
  misc_feature: MA Experiment 20000314 PARAMETER Experiment Name: At_14day_Shoots-Roots_Sub_P Parameter: Organism Value: A. thaliana
  misc_feature: MA Experiment 20000314 PARAMETER Experiment Name: At_14day_Shoots-Roots_Sub_P Parameter: Plant Line Value: WS
  misc_feature: MA Experiment 20000314 PARAMETER Experiment Name: At_14day_Shoots-Roots_Sub_P Parameter: Tissue Value: Roots vs. Whole Plant
  misc_feature: MA Experiment ID: 20000355 Result: Up-regulated in Transcription
  misc_feature: MA Experiment 20000355 PARAMETER Experiment Name: At_Siliques_Sub_P Parameter: Age (day) Value: 21
  misc_feature: MA Experiment 20000355 PARAMETER Experiment Name: At_Siliques_Sub_P Parameter: Organism Value: A. thaliana
  misc_feature: MA Experiment 20000355 PARAMETER Experiment Name: At_Siliques_Sub_P Parameter: Plant Line Value: WS
  misc_feature: MA Experiment 20000355 PARAMETER Experiment Name: At_Siliques_Sub_P Parameter: Tissue Value: Less Than 5mm Siliques vs. Whole Plant
  misc_feature: MA Experiment ID: 20000440 Result: Up-regulated in Transcription
  misc_feature: MA Experiment 20000440 PARAMETER Experiment Name: At_Closed-Flower__Sub_P Parameter: Tissue Value: Closed Flower vs. Whole Plant
  misc_feature: MA Experiment ID: 20001806 Result: Up-regulated in Transcription
  misc_feature: MA Experiment 20001806 PARAMETER Experiment Name: At_50mM_NH4NO3_L-to-H_Sub_P Parameter: Timepoint (hr) Value: 4
  misc_feature: MA Experiment 20001806 PARAMETER Experiment Name: At_50mM_NH4NO3_L-to-H_Sub_P Parameter: Tissue Value: Leaf
  misc_feature: MA Experiment 20001806 PARAMETER Experiment Name: At_50mM_NH4NO3_L-to-H_Sub_P Parameter: Treatment Value: 50mM NH4NO3 vs 100mM Mannitol

SEQ ID NO: 94671 - protein, 195 aa, Arabidopsis thaliana; identical to SEQ ID NO: 90915
  peptide (1)..(195): Ceres Seq. ID no. 12725712
  misc_feature (1)..(164): Pfam Name: Phosphoglycerate mutase family Pfam Description: Phosphoglycerate mutase family
  misc_feature (1)..(195): Homolog of NCBI NO: 15218201 NR Description: phosphoglycerate mutase, putative; protein id: [Arabidopsis thaliana] >gi|26451923|dbj|BAC43054.1| unknown [Arabidopsis thaliana] >gi|28372948|gb|AAO39956.1| At1g78050
  misc_feature (1)..(195): Homolog of NCBI NO: 25405021 NR Description: protein F28K19.26 [imported] - Arabidopsis >gi|6573769|gb|AAF17689.1|AC009243_16 F28K19.26 [Arabidopsis
  misc_feature (1)..(190): Homolog of NCBI NO: 18395083 NR Description: expressed protein; protein id: At1g22170.1, by cDNA: 33490. [Arabidopsis thaliana] >gi|25511655|pir||C86354
  misc_feature (1)..(190): Homolog of NCBI NO: 21539557 NR Description: unknown protein [Arabidopsis thaliana]
  misc_feature (1)..(190): Homolog of NCBI NO: 21618275 NR Description: unknown [Arabidopsis thaliana]
  misc_feature (1)..(163): Homolog of NCBI NO: 15618772 NR Description: Phosphoglycerate Mutase [Chlamydophila pneumoniae >gi|16752176|ref|NP_445543.1| phosphoglycerate mutase
  misc_feature (1)..(163): Homolog of NCBI NO: 15836396 NR Description: phosphoglycerate mutase [Chlamydophila pneumoniae
  misc_feature (1)..(169): Homolog of NCBI NO: 15834720 NR Description: phosphoglycerate mutase [Chlamydia muridarum]
  misc_feature (1)..(169): Homolog of NCBI NO: 29840659 NR Description: phosphoglycerate mutase [Chlamydophila caviae >gi|29835009|gb|AAP05643.1| phosphoglycerate mutase
  misc_feature (1)..(169): Homolog of NCBI NO: 15605455 NR Description: Phosphoglycerate Mutase [Chlamydia trachomatis]

SEQ ID NO: 94672 - protein, 192 aa, Arabidopsis thaliana; identical to SEQ ID NO: 90916
  peptide (1)..(192): Ceres Seq. ID no. 12725713
  misc_feature (1)..(161): Pfam Name: Phosphoglycerate mutase family Pfam Description: Phosphoglycerate mutase family
  misc_feature (1)..(192): Homolog of NCBI NO: 15218201 NR Description: phosphoglycerate mutase, putative; protein id: [Arabidopsis thaliana] >gi|26451923|dbj|BAC43054.1| unknown [Arabidopsis thaliana] >gi|28372948|gb|AAO39956.1| At1g78050
  misc_feature (1)..(192): Homolog of NCBI NO: 25405021 NR Description: protein F28K19.26 [imported] - Arabidopsis >gi|6573769|gb|AAF17689.1|AC009243_16 F28K19.26 [Arabidopsis
  misc_feature (1)..(187): Homolog of NCBI NO: 18395083 NR Description: expressed protein; protein id: At1g22170.1, by cDNA: 33490. [Arabidopsis thaliana] >gi|25511655|pir||C86354
  misc_feature (1)..(187): Homolog of NCBI NO: 21539557 NR Description: unknown protein [Arabidopsis thaliana]
  misc_feature (1)..(187): Homolog of NCBI NO: 21618275 NR Description: unknown [Arabidopsis thaliana]
  misc_feature (1)..(160): Homolog of NCBI NO: 15618772 NR Description: Phosphoglycerate Mutase [Chlamydophila pneumoniae >gi|16752176|ref|NP_445543.1| phosphoglycerate mutase
  misc_feature (1)..(160): Homolog of NCBI NO: 15836396 NR Description: phosphoglycerate mutase [Chlamydophila pneumoniae
  misc_feature (1)..(166): Homolog of NCBI NO: 15834720 NR Description: phosphoglycerate mutase [Chlamydia muridarum]
  misc_feature (1)..(166): Homolog of NCBI NO: 29840659 NR Description: phosphoglycerate mutase [Chlamydophila caviae >gi|29835009|gb|AAP05643.1| phosphoglycerate mutase
  misc_feature (1)..(166): Homolog of NCBI NO: 15605455 NR Description: Phosphoglycerate Mutase [Chlamydia trachomatis]

SEQ ID NO: 94673 - protein, 189 aa, Arabidopsis thaliana; identical to SEQ ID NO: 90917
  peptide (1)..(189): Ceres Seq. ID no. 12725714
  misc_feature (1)..(158): Pfam Name: Phosphoglycerate mutase family Pfam Description: Phosphoglycerate mutase family
  misc_feature (1)..(189): Homolog of NCBI NO: 15218201 NR Description: phosphoglycerate mutase, putative; protein id: [Arabidopsis thaliana] >gi|26451923|dbj|BAC43054.1| unknown [Arabidopsis thaliana] >gi|28372948|gb|AAO39956.1| At1g78050
  misc_feature (1)..(189): Homolog of NCBI NO: 25405021 NR Description: protein F28K19.26 [imported] - Arabidopsis >gi|6573769|gb|AAF17689.1|AC009243_16 F28K19.26 [Arabidopsis
  misc_feature (1)..(184): Homolog of NCBI NO: 18395083 NR Description: expressed protein; protein id: At1g22170.1, by cDNA: 33490. [Arabidopsis thaliana] >gi|25511655|pir||C86354
  misc_feature (1)..(184): Homolog of NCBI NO: 21539557 NR Description: unknown protein [Arabidopsis thaliana]
  misc_feature (1)..(184): Homolog of NCBI NO: 21618275 NR Description: unknown [Arabidopsis thaliana]
  misc_feature (1)..(157): Homolog of NCBI NO: 15618772 NR Description: Phosphoglycerate Mutase [Chlamydophila pneumoniae >gi|16752176|ref|NP_445543.1| phosphoglycerate mutase
  misc_feature (1)..(157): Homolog of NCBI NO: 15836396 NR Description: phosphoglycerate mutase [Chlamydophila pneumoniae
  misc_feature (1)..(163): Homolog of NCBI NO: 15834720 NR Description: phosphoglycerate mutase [Chlamydia muridarum]
  misc_feature (1)..(163): Homolog of NCBI NO: 29840659 NR Description: phosphoglycerate mutase [Chlamydophila caviae >gi|29835009|gb|AAP05643.1| phosphoglycerate mutase
  misc_feature (1)..(163): Homolog of NCBI NO: 15605455 NR Description: Phosphoglycerate Mutase [Chlamydia trachomatis]

SEQ ID NO: 94674 - DNA, 1823 bp, Arabidopsis thaliana; identical to SEQ ID NO: 90918
  misc_feature (1)..(1823): Ceres Seq. ID no. 12725715
  misc_feature: MA Experiment ID: 20000166 Result: Up-regulated in Transcription
  misc_feature: MA Experiment 20000166 PARAMETER Experiment Name: At_100uM_ABA_P Parameter: Age (day) Value: 14
  misc_feature: MA Experiment 20000166 PARAMETER Experiment Name: At_100uM_ABA_P Parameter: Organism Value: A. thaliana
  misc_feature: MA Experiment 20000166 PARAMETER Experiment Name: At_100uM_ABA_P Parameter: Plant Line Value: WS
  misc_feature: MA Experiment 20000166 PARAMETER Experiment Name: At_100uM_ABA_P Parameter: Timepoint (hr) Value: 1
  misc_feature: MA Experiment 20000166 PARAMETER Experiment Name: At_100uM_ABA_P Parameter: Tissue Value: Aerial
  misc_feature: MA Experiment 20000166 PARAMETER Experiment Name: At_100uM_ABA_P Parameter: Treatment Value: 100uM ABA vs. No Treatment
  misc_feature: MA Experiment ID: 20000173 Result: Down-regulated in Transcription
  misc_feature: MA Experiment 20000173 PARAMETER Experiment Name: At_42deg_Heat_P Parameter: Age (day) Value: 14
  misc_feature: MA Experiment 20000173 PARAMETER Experiment Name: At_42deg_Heat_P Parameter: Organism Value: A. thaliana
  misc_feature: MA Experiment 20000173 PARAMETER Experiment Name: At_42deg_Heat_P Parameter: Plant Line Value: WS
  misc_feature: MA Experiment 20000173 PARAMETER Experiment Name: At_42deg_Heat_P Parameter: Temperature (deg C) Value: 42 vs. 22
  misc_feature: MA Experiment 20000173 PARAMETER Experiment Name: At_42deg_Heat_P Parameter: Timepoint (hr) Value: 6
  misc_feature: MA Experiment 20000173 PARAMETER Experiment Name: At_42deg_Heat_P Parameter: Tissue Value: Aerial
  misc_feature: MA Experiment ID: 20000227 Result: Down-regulated in Transcription
  misc_feature: MA Experiment 20000227 PARAMETER Experiment Name: At_Root-Tips-vs-Tops_P Parameter: Tissue Value: Root Tips vs. Root Tops
  misc_feature: MA Experiment ID: 20000234 Result: Down-regulated in Transcription
  misc_feature: MA Experiment 20000234 PARAMETER Experiment Name: At_Siliques_P Parameter: Age (day) Value: 21
  misc_feature: MA Experiment 20000234 PARAMETER Experiment Name: At_Siliques_P Parameter: Organism Value: A. thaliana
  misc_feature: MA Experiment 20000234 PARAMETER Experiment Name: At_Siliques_P Parameter: Plant Line Value: WS
  misc_feature: MA Experiment 20000234 PARAMETER Experiment Name: At_Siliques_P Parameter: Tissue Value: Less Than 5mm Siliques vs. Whole Plant
  misc_feature: MA Experiment ID: 20000286 Result: Down-regulated in Transcription
  misc_feature: MA Experiment 20000286 PARAMETER Experiment Name: At_Open_Flower_P Parameter: Age (day) Value: 21
  misc_feature: MA Experiment 20000286 PARAMETER Experiment Name: At_Open_Flower_P Parameter: Plant Line Value: WS
  misc_feature: MA Experiment 20000286 PARAMETER Experiment Name: At_Open_Flower_P Parameter: Tissue Value: Half Open vs. Whole Plant

SEQ ID NO: 94675 - protein, 334 aa, Arabidopsis thaliana; identical to SEQ ID NO: 90919
  peptide (1)..(334): Ceres Seq. ID no. 12725716
  misc_feature (149)..(213): Pfam Name: AP2 domain Pfam Description: AP2 domain
  misc_feature (1)..(334): Homolog of NCBI NO: 15218204 NR Description: AP2 domain protein RAP2.4; protein id: supported by cDNA: gi_13877778 [Arabidopsis thaliana]
  misc_feature (1)..(334): Homolog of NCBI NO: 13877779 NR Description: putative AP2 domain-containing protein
  misc_feature (5)..(334): Homolog of NCBI NO: 6573771 NR Description: F28K19.29 [Arabidopsis thaliana]
  misc_feature (106)..(334): Homolog of NCBI NO: 2281633 NR Description: AP2 domain containing protein RAP2.4 [Arabidopsis
  misc_feature (150)..(334): Homolog of NCBI NO: 12324244 NR Description: putative AP2 domain transcriptional regulator, 5'
  misc_feature (114)..(257): Homolog of NCBI NO: 8571476 NR Description: apetala2 domain-containing protein [Atriplex
  misc_feature (240)..(334): Homolog of NCBI NO: 8571476 NR Description: apetala2 domain-containing protein [Atriplex
  misc_feature (61)..(333): Homolog of NCBI NO: 15219839 NR Description: AP2 domain transcription factor RAP2, putative; id: At1g22190.1, supported by cDNA: gi_15292782 [Arabidopsis
  misc_feature (64)..(332): Homolog of NCBI NO: 27436378 NR Description: dehydration-responsive element binding protein 3
  misc_feature (18)..(334): Homolog of NCBI NO: 18400001 NR Description: AP2 domain transcription factor RAP2, putative; id: At1g36060.1 [Arabidopsis thaliana] >gi|25350213|pir||E86482

SEQ ID NO: 94676 - protein, 330 aa, Arabidopsis thaliana; identical to SEQ ID NO: 90920
  peptide (1)..(330): Ceres Seq. ID no. 12725717
  misc_feature (145)..(209): Pfam Name: AP2 domain Pfam Description: AP2 domain
  misc_feature (1)..(330): Homolog of NCBI NO: 15218204 NR Description: AP2 domain protein RAP2.4; protein id: supported by cDNA: gi_13877778 [Arabidopsis thaliana]
  misc_feature (1)..(330): Homolog of NCBI NO: 13877779 NR Description: putative AP2 domain-containing protein
  misc_feature (1)..(330): Homolog of NCBI NO: 6573771 NR Description: F28K19.29 [Arabidopsis thaliana]
  misc_feature (102)..(330): Homolog of NCBI NO: 2281633 NR Description: AP2 domain containing protein RAP2.4 [Arabidopsis
  misc_feature (146)..(330): Homolog of NCBI NO: 12324244 NR Description: putative AP2 domain transcriptional regulator, 5'
  misc_feature (110)..(253): Homolog of NCBI NO: 8571476 NR Description: apetala2 domain-containing protein [Atriplex
  misc_feature (236)..(330): Homolog of NCBI NO: 8571476 NR Description: apetala2 domain-containing protein [Atriplex
  misc_feature (57)..(329): Homolog of NCBI NO: 15219839 NR Description: AP2 domain transcription factor RAP2, putative; id: At1g22190.1, supported by cDNA: gi_15292782 [Arabidopsis
  misc_feature (60)..(328): Homolog of NCBI NO: 27436378 NR Description: dehydration-responsive element binding protein 3
  misc_feature (14)..(330): Homolog of NCBI NO: 18400001 NR Description: AP2 domain transcription factor RAP2, putative; id: At1g36060.1 [Arabidopsis thaliana] >gi|25350213|pir||E86482

SEQ ID NO: 94677 - protein, 313 aa, Arabidopsis thaliana; identical to SEQ ID NO: 90921
  peptide (1)..(313): Ceres Seq. ID no. 12725718
  misc_feature (128)..(192): Pfam Name: AP2 domain Pfam Description: AP2 domain
  misc_feature (1)..(313): Homolog of NCBI NO: 15218204 NR Description: AP2 domain protein RAP2.4; protein id: supported by cDNA: gi_13877778 [Arabidopsis thaliana]
  misc_feature (1)..(313): Homolog of NCBI NO: 13877779 NR Description: putative AP2 domain-containing protein
  misc_feature (1)..(313): Homolog of NCBI NO: 6573771 NR Description: F28K19.29 [Arabidopsis thaliana]
  misc_feature (85)..(313): Homolog of NCBI NO: 2281633 NR Description: AP2 domain containing protein RAP2.4 [Arabidopsis
  misc_feature (129)..(313): Homolog of NCBI NO: 12324244 NR Description: putative AP2 domain transcriptional regulator, 5'
  misc_feature (93)..(236): Homolog of NCBI NO: 8571476 NR Description: apetala2 domain-containing protein [Atriplex
  misc_feature (219)..(313): Homolog of NCBI NO: 8571476 NR Description: apetala2 domain-containing protein [Atriplex
  misc_feature (40)..(312): Homolog of NCBI NO: 15219839 NR Description: AP2 domain transcription factor RAP2, putative; id: At1g22190.1, supported by cDNA: gi_15292782 [Arabidopsis
  misc_feature (43)..(311): Homolog of NCBI NO: 27436378 NR Description: dehydration-responsive element binding protein 3
  misc_feature (1)..(313): Homolog of NCBI NO: 18400001 NR Description: AP2 domain transcription factor RAP2, putative; id: At1g36060.1 [Arabidopsis thaliana] >gi|25350213|pir||E86482

SEQ ID NO: 94678 - DNA, 2816 bp, Arabidopsis thaliana; identical to SEQ ID NO: 90922
  misc_feature (1)..(2816): Ceres Seq. ID no. 12725735
  misc_feature: MA Experiment ID: 20000184 Result: Down-regulated in Transcription
  misc_feature: MA Experiment 20000184 PARAMETER Experiment Name: At_Shoots__P Parameter: Age (day) Value: 7
  misc_feature: MA Experiment 20000184 PARAMETER Experiment Name: At_Shoots__P Parameter: Tissue Value: Shoots vs. Whole Plant
  misc_feature: MA Experiment ID: 20000185 Result: Down-regulated in Transcription
  misc_feature: MA Experiment 20000185 PARAMETER Experiment Name: At_Roots__P Parameter: Age (day) Value: 7 vs. 21
  misc_feature: MA Experiment 20000185 PARAMETER Experiment Name: At_Roots__P Parameter: Organism Value: A. thaliana
  misc_feature: MA Experiment 20000185 PARAMETER Experiment Name: At_Roots__P Parameter: Tissue Value: Roots vs. Whole Plant
  misc_feature: MA Experiment ID: 20000214 Result: Up-regulated in Transcription
  misc_feature: MA Experiment 20000214 PARAMETER Experiment Name: At_4deg_Cold_P Parameter: Timepoint (hr) Value: 6
  misc_feature: MA Experiment ID: 20000235 Result: Up-regulated in Transcription
  misc_feature: MA Experiment 20000235 PARAMETER Experiment Name: At_Siliques_P Parameter: Age (day) Value: 21
  misc_feature: MA Experiment 20000235 PARAMETER Experiment Name: At_Siliques_P Parameter: Organism Value: A. thaliana
  misc_feature: MA Experiment 20000235 PARAMETER Experiment Name: At_Siliques_P Parameter: Plant Line Value: WS
  misc_feature: MA Experiment 20000235 PARAMETER Experiment Name: At_Siliques_P Parameter: Tissue Value: 5-10mm Siliques vs. Whole Plant
  misc_feature: MA Experiment ID: 20000794 Result: Up-regulated in Transcription
  misc_feature: MA Experiment 20000794 PARAMETER Experiment Name: At_Petals_P Parameter: Age (day) Value: 23-25 days
  misc_feature: MA Experiment 20000794 PARAMETER Experiment Name: At_Petals_P Parameter: Plant Line Value: WS
  misc_feature: MA Experiment 20000794 PARAMETER Experiment Name: At_Petals_P Parameter: Tissue Value: Petals vs. Whole plant
  misc_feature: MA Experiment ID: 20001247 Result: Up-regulated in Transcription
  misc_feature: MA Experiment 20001247 PARAMETER Experiment Name: At_Far-red-induction_P Parameter: Age (day) Value: 7
  misc_feature: MA Experiment 20001247 PARAMETER Experiment Name: At_Far-red-induction_P Parameter: Light Value: Far-red vs. White
  misc_feature: MA Experiment 20001247 PARAMETER Experiment Name: At_Far-red-induction_P Parameter: Organism Value: A. thaliana
  misc_feature: MA Experiment 20001247 PARAMETER Experiment Name: At_Far-red-induction_P Parameter: Plant Line Value: Columbia
  misc_feature: MA Experiment 20001247 PARAMETER Experiment Name: At_Far-red-induction_P Parameter: Timepoint (hr) Value: 1
  misc_feature: MA Experiment 20001247 PARAMETER Experiment Name: At_Far-red-induction_P Parameter: Tissue Value: Whole Plant
  misc_feature: MA Experiment ID: 20001248 Result: Up-regulated in Transcription
  misc_feature: MA Experiment 20001248 PARAMETER Experiment Name: At_Far-red-induction_P Parameter: Age (day) Value: 7
  misc_feature: MA Experiment 20001248 PARAMETER Experiment Name: At_Far-red-induction_P Parameter: Light Value: Far-red vs. White
  misc_feature: MA Experiment 20001248 PARAMETER Experiment Name: At_Far-red-induction_P Parameter: Organism Value: A. thaliana
  misc_feature: MA Experiment 20001248 PARAMETER Experiment Name: At_Far-red-induction_P Parameter: Plant Line Value: Columbia
  misc_feature: MA Experiment 20001248 PARAMETER Experiment Name: At_Far-red-induction_P Parameter: Timepoint (hr) Value: 4
  misc_feature: MA Experiment 20001248 PARAMETER Experiment Name: At_Far-red-induction_P Parameter: Tissue Value: Whole Plant
  misc_feature: MA Experiment ID: 20001555 Result: Down-regulated in Transcription
  misc_feature: MA Experiment 20001555 PARAMETER Experiment Name: At_Drought_Soil_Dry_P Parameter: Age (day) Value: 24
  misc_feature: MA Experiment 20001555 PARAMETER Experiment Name: At_Drought_Soil_Dry_P Parameter: Organism Value: A. thaliana
  misc_feature: MA Experiment 20001555 PARAMETER Experiment Name: At_Drought_Soil_Dry_P Parameter: Plant Line Value: WS
  misc_feature: MA Experiment 20001555 PARAMETER Experiment Name: At_Drought_Soil_Dry_P Parameter: Post Timepoint (hr) Value: None
  misc_feature: MA Experiment 20001555 PARAMETER Experiment Name: At_Drought_Soil_Dry_P Parameter: Post-Treatment Value: None
  misc_feature: MA Experiment 20001555 PARAMETER Experiment Name: At_Drought_Soil_Dry_P Parameter: Timepoint (day) Value: 10
  misc_feature: MA Experiment 20001555 PARAMETER Experiment Name: At_Drought_Soil_Dry_P Parameter: Treatment Value: Drought vs. No Drought

SEQ ID NO: 94679 - protein, 382 aa, Arabidopsis thaliana; identical to SEQ ID NO: 90923
  peptide (1)..(382): Ceres Seq. ID no. 12725736
  misc_feature (155)..(370): Pfam Name: Putative methyltransferase Pfam Description: Putative methyltransferase
  misc_feature (306)..(370): Homolog of NCBI NO: 12324243 NR Description: unknown protein, 5' partial; 69506-67937
  misc_feature (1)..(382): Homolog of NCBI NO: 22330717 NR Description: unknown protein; protein id: At1g78240.1,
  misc_feature (72)..(358): Homolog of NCBI NO: 25411012 NR Description: hypothetical protein At2g03480 [imported] -
  misc_feature (82)..(358): Homolog of NCBI NO: 15222970 NR Description: hypothetical protein; protein id: At1g13860.1
  misc_feature (82)..(358): Homolog of NCBI NO: 26449782 NR Description: unknown protein [Arabidopsis thaliana]
  misc_feature (82)..(358): Homolog of NCBI NO: 25402770 NR Description: protein F16A14.7 [imported] - Arabidopsis >gi|8778408|gb|AAF79416.1|AC068197_26 F16A14.7 [Arabidopsis
  misc_feature (297)..(358): Homolog of NCBI NO: 14532450 NR Description: At2g03480/T4M8.9 [Arabidopsis thaliana]
  misc_feature (297)..(358): Homolog of NCBI NO: 18395560 NR Description: expressed protein; protein id: At2g03480.1 thaliana] >gi|20197738|gb|AAD17428.2| expressed protein
  misc_feature (297)..(358): Homolog of NCBI NO: 24111341 NR Description: At2g03480/T4M8.9 [Arabidopsis thaliana]
  misc_feature (144)..(362): Homolog of NCBI NO: 15239326 NR Description: ankyrin-like protein; protein id: At5g06050.1

SEQ ID NO: 94680 - protein, 380 aa, Arabidopsis thaliana; identical to SEQ ID NO: 90924
  peptide (1)..(380): Ceres Seq. ID no. 12725737
  misc_feature (153)..(368): Pfam Name: Putative methyltransferase Pfam Description: Putative methyltransferase
  misc_feature (304)..(368): Homolog of NCBI NO: 12324243 NR Description: unknown protein, 5' partial; 69506-67937
  misc_feature (1)..(380): Homolog of NCBI NO: 22330717 NR Description: unknown protein; protein id: At1g78240.1,
  misc_feature (70)..(356): Homolog of NCBI NO: 25411012 NR Description: hypothetical protein At2g03480 [imported] -
  misc_feature (80)..(356): Homolog of NCBI NO: 15222970 NR Description: hypothetical protein; protein id: At1g13860.1
  misc_feature (80)..(356): Homolog of NCBI NO: 26449782 NR Description: unknown protein [Arabidopsis thaliana]
  misc_feature (80)..(356): Homolog of NCBI NO: 25402770 NR Description: protein F16A14.7 [imported] - Arabidopsis >gi|8778408|gb|AAF79416.1|AC068197_26 F16A14.7 [Arabidopsis
  misc_feature (295)..(356): Homolog of NCBI NO: 14532450 NR Description: At2g03480/T4M8.9 [Arabidopsis thaliana]
  misc_feature (295)..(356): Homolog of NCBI NO: 18395560 NR Description: expressed protein; protein id: At2g03480.1 thaliana] >gi|20197738|gb|AAD17428.2| expressed protein
  misc_feature (295)..(356): Homolog of NCBI NO: 24111341 NR Description: At2g03480/T4M8.9 [Arabidopsis thaliana]
  misc_feature (142)..(360): Homolog of NCBI NO: 15239326 NR Description: ankyrin-like protein; protein id: At5g06050.1

SEQ ID NO: 94681 - protein, 357 aa, Arabidopsis thaliana; identical to SEQ ID NO: 90925
  peptide (1)..(357): Ceres Seq. ID no. 12725738
  misc_feature (130)..(345): Pfam Name: Putative methyltransferase Pfam Description: Putative methyltransferase
  misc_feature (281)..(345): Homolog of NCBI NO: 12324243 NR Description: unknown protein, 5' partial; 69506-67937
  misc_feature (1)..(357): Homolog of NCBI NO: 22330717 NR Description: unknown protein; protein id: At1g78240.1,
  misc_feature (47)..(333): Homolog of NCBI NO: 25411012 NR Description: hypothetical protein At2g03480 [imported] -
  misc_feature (57)..(333): Homolog of NCBI NO: 15222970 NR Description: hypothetical protein; protein id: At1g13860.1
  misc_feature (57)..(333): Homolog of NCBI NO: 26449782 NR Description: unknown protein [Arabidopsis thaliana]
  misc_feature (57)..(333): Homolog of NCBI NO: 25402770 NR Description: protein F16A14.7 [imported] - Arabidopsis >gi|8778408|gb|AAF79416.1|AC068197_26 F16A14.7 [Arabidopsis
  misc_feature (272)..(333): Homolog of NCBI NO: 14532450 NR Description: At2g03480/T4M8.9 [Arabidopsis thaliana]
  misc_feature (272)..(333): Homolog of NCBI NO: 18395560 NR Description: expressed protein; protein id: At2g03480.1 thaliana] >gi|20197738|gb|AAD17428.2| expressed protein
  misc_feature (272)..(333): Homolog of NCBI NO: 24111341 NR Description: At2g03480/T4M8.9 [Arabidopsis thaliana]
  misc_feature (119)..(337): Homolog of NCBI NO: 15239326 NR Description: ankyrin-like protein; protein id: At5g06050.1

SEQ ID NO: 94682 - DNA, 669 bp, Arabidopsis thaliana; identical to SEQ ID NO: 90926
  misc_feature (1)..(669): Ceres Seq. ID no. 12725743
  misc_feature: MA Experiment ID: 20000173 Result: Up-regulated in Transcription
  misc_feature: MA Experiment 20000173 PARAMETER Experiment Name: At_42deg_Heat_P Parameter: Age (day) Value: 14
  misc_feature: MA Experiment 20000173 PARAMETER Experiment Name: At_42deg_Heat_P Parameter: Organism Value: A. thaliana
  misc_feature: MA Experiment 20000173 PARAMETER Experiment Name: At_42deg_Heat_P Parameter: Plant Line Value: WS
  misc_feature: MA Experiment 20000173 PARAMETER Experiment Name: At_42deg_Heat_P Parameter: Temperature (deg C) Value: 42 vs. 22
  misc_feature: MA Experiment 20000173 PARAMETER Experiment Name: At_42deg_Heat_P Parameter: Timepoint (hr) Value: 6
  misc_feature: MA Experiment 20000173 PARAMETER Experiment Name: At_42deg_Heat_P Parameter: Tissue Value: Aerial
  misc_feature: MA Experiment ID: 20000227 Result: Down-regulated in Transcription
  misc_feature: MA Experiment 20000227 PARAMETER Experiment Name: At_Root-Tips-vs-Tops_P Parameter: Tissue Value: Root Tips vs. Root Tops

SEQ ID NO: 94683 - protein, 222 aa, Arabidopsis thaliana; identical to SEQ ID NO: 90927
  peptide (1)..(222): Ceres Seq. ID no. 12725744
  misc_feature (1)..(222): Homolog of NCBI NO: 15218308 NR Description: glutathione transferase, putative; protein id:
  misc_feature (106)..(222): Homolog of NCBI NO: 8052534 NR Description: F3F9.11 [Arabidopsis thaliana]
  misc_feature (1)..(106): Homolog of NCBI NO: 8052534 NR Description: F3F9.11 [Arabidopsis thaliana]
  misc_feature (1)..(219): Homolog of NCBI NO: 18411929 NR Description: glutathione transferase, putative; protein id: supported by cDNA: 30759., supported by cDNA: gi_14326476
  misc_feature (1)..(219): Homolog of NCBI NO: 21592644 NR Description: glutathione transferase, putative [Arabidopsis
  misc_feature (1)..(222): Homolog of NCBI NO: 15220041 NR Description: glutathione transferase, putative; protein id: [Arabidopsis thaliana] >gi|25313212|pir||H86307 probable
  misc_feature (1)..(219): Homolog of NCBI NO: 8052534 NR Description: F3F9.11 [Arabidopsis thaliana]
  misc_feature (1)..(221): Homolog of NCBI NO: 7447307 NR Description: glutathione transferase (EC 2.5.1.18) - papaya
  misc_feature (4)..(222): Homolog of NCBI NO: 1346215 NR Description: PROBABLE GLUTATHIONE S-TRANSFERASE PARC
  misc_feature (4)..(222): Homolog of NCBI NO: 416652 NR Description: PROBABLE GLUTATHIONE S-TRANSFERASE (AUXIN-INDUCED

SEQ ID NO: 94684 - protein, 209 aa, Arabidopsis thaliana; identical to SEQ ID NO: 90928
  peptide (1)..(209): Ceres Seq. ID no. 12725745
  misc_feature (1)..(209): Homolog of NCBI NO: 15218308 NR Description: glutathione transferase, putative; protein id:
  misc_feature (93)..(209): Homolog of NCBI NO: 8052534 NR Description: F3F9.11 [Arabidopsis thaliana]
  misc_feature (1)..(93): Homolog of NCBI NO: 8052534 NR Description: F3F9.11 [Arabidopsis thaliana]
  misc_feature (1)..(206): Homolog of NCBI NO: 18411929 NR Description: glutathione transferase, putative; protein id: supported by cDNA: 30759., supported by cDNA: gi_14326476
  misc_feature (1)..(206): Homolog of NCBI NO: 21592644 NR Description: glutathione transferase, putative [Arabidopsis
  misc_feature (1)..(209): Homolog of NCBI NO: 15220041 NR Description: glutathione transferase, putative; protein id: [Arabidopsis thaliana] >gi|25313212|pir||H86307 probable
  misc_feature (1)..(206): Homolog of NCBI NO: 8052534 NR Description: F3F9.11 [Arabidopsis thaliana]
  misc_feature (1)..(208): Homolog of NCBI NO: 7447307 NR Description: glutathione transferase (EC 2.5.1.18) - papaya
  misc_feature (1)..(209): Homolog of NCBI NO: 1346215 NR Description: PROBABLE GLUTATHIONE S-TRANSFERASE PARC
  misc_feature (1)..(209): Homolog of NCBI NO: 416652 NR Description: PROBABLE GLUTATHIONE S-TRANSFERASE (AUXIN-INDUCED

SEQ ID NO: 94685 - protein, 206 aa, Arabidopsis thaliana; identical to SEQ ID NO: 90929
  peptide (1)..(206): Ceres Seq. ID no. 12725746
  misc_feature (1)..(206): Homolog of NCBI NO: 15218308 NR Description: glutathione transferase, putative; protein id:
  misc_feature (90)..(206): Homolog of NCBI NO: 8052534 NR Description: F3F9.11 [Arabidopsis thaliana]
  misc_feature (1)..(90): Homolog of NCBI NO: 8052534 NR Description: F3F9.11 [Arabidopsis thaliana]
  misc_feature (1)..(203): Homolog of NCBI NO: 18411929 NR Description: glutathione transferase, putative; protein id: supported by cDNA: 30759., supported by cDNA: gi_14326476
  misc_feature (1)..(203): Homolog of NCBI NO: 21592644 NR Description: glutathione transferase, putative [Arabidopsis
  misc_feature (1)..(206): Homolog of NCBI NO: 15220041 NR Description: glutathione transferase, putative; protein id: [Arabidopsis thaliana] >gi|25313212|pir||H86307 probable
  misc_feature (1)..(203): Homolog of NCBI NO: 8052534 NR Description: F3F9.11 [Arabidopsis thaliana]
  misc_feature (1)..(205): Homolog of NCBI NO: 7447307 NR Description: glutathione transferase (EC 2.5.1.18) - papaya
  misc_feature (1)..(206): Homolog of NCBI NO: 1346215 NR Description: PROBABLE GLUTATHIONE S-TRANSFERASE PARC
  misc_feature (1)..(206): Homolog of NCBI NO: 416652 NR Description: PROBABLE GLUTATHIONE S-TRANSFERASE (AUXIN-INDUCED

SEQ ID NO: 94686 - DNA, 1200 bp, Arabidopsis thaliana; identical to SEQ ID NO: 90930
  misc_feature (1)..(1200): Ceres Seq. ID no. 12725773
  misc_feature: MA Experiment ID: 20000173 Result: Down-regulated in Transcription
  misc_feature: MA Experiment 20000173 PARAMETER Experiment Name: At_42deg_Heat_P Parameter: Age (day) Value: 14
  misc_feature: MA Experiment 20000173 PARAMETER Experiment Name: At_42deg_Heat_P Parameter: Organism Value: A. thaliana
  misc_feature: MA Experiment 20000173 PARAMETER Experiment Name: At_42deg_Heat_P Parameter: Plant Line Value: WS
  misc_feature: MA Experiment 20000173 PARAMETER Experiment Name: At_42deg_Heat_P Parameter: Temperature (deg C) Value: 42 vs. 22
  misc_feature: MA Experiment 20000173 PARAMETER Experiment Name: At_42deg_Heat_P Parameter: Timepoint (hr) Value: 6
  misc_feature: MA Experiment 20000173 PARAMETER Experiment Name: At_42deg_Heat_P Parameter: Tissue Value: Aerial
  misc_feature: MA Experiment ID: 20000182 Result: Up-regulated in Transcription
  misc_feature: MA Experiment 20000182 PARAMETER Experiment Name: At_2mM_SA_P Parameter: Age (day) Value: 14
  misc_feature: MA Experiment 20000182 PARAMETER Experiment Name: At_2mM_SA_P Parameter: Organism Value: A. thaliana
  misc_feature: MA Experiment 20000182 PARAMETER Experiment Name: At_2mM_SA_P Parameter: Plant Line Value: WS
  misc_feature: MA Experiment 20000182 PARAMETER Experiment Name: At_2mM_SA_P Parameter: Timepoint (hr) Value: 6
  misc_feature: MA Experiment 20000182 PARAMETER Experiment Name: At_2mM_SA_P Parameter: Tissue Value: Aerial
  misc_feature: MA Experiment 20000182 PARAMETER Experiment Name: At_2mM_SA_P Parameter: Treatment Value: 2mM SA vs. No Treatment

SEQ ID NO: 94687 - protein, 356 aa, Arabidopsis thaliana; identical to SEQ ID NO: 90931
  peptide (1)..(356): Ceres Seq. ID no. 12725774
  misc_feature (207)..(307): Pfam Name: 2OG-Fe(II) oxygenase superfamily Pfam Description: 2OG-Fe(II) oxygenase superfamily
  misc_feature (1)..(356): Homolog of NCBI NO: 15218400 NR Description: flavanone 3-hydroxylase, putative; protein id: supported by cDNA: gi_13507544, supported by cDNA: gi_15293284
  misc_feature (1)..(356): Homolog of NCBI NO: 15219988 NR Description: SRG1-like protein; protein id: At1g17020.1,
  misc_feature (1)..(356): Homolog of NCBI NO: 15219986 NR Description: SRG1-like protein; protein id: At1g17010.1
  misc_feature (1)..(356): Homolog of NCBI NO: 26451337 NR Description: SRG1 like protein [Arabidopsis thaliana]
  misc_feature (1)..(356): Homolog of NCBI NO: 15235014 NR Description: SRG1-like protein; protein id: At4g25300.1
  misc_feature (1)..(356): Homolog of NCBI NO: 15235017 NR Description: SRG1-like protein; protein id: At4g25310.1
  misc_feature (1)..(356): Homolog of NCBI NO: 25285681 NR Description: SRG1 homolog [imported] - Arabidopsis thaliana
  misc_feature (5)..(356): Homolog of NCBI NO: 37536804 NR Description: putative ethylene-forming enzyme [Oryza sativa
  misc_feature (29)..(356): Homolog of NCBI NO: 40736992 NR Description: putative oxidoreductase [Oryza sativa (japonica
  misc_feature (6)..(329): Homolog of NCBI NO: 34898470 NR Description: ESTs D47168(S12332),D46350(S10967) correspond to

SEQ ID NO: 94688 - protein, 299 aa, Arabidopsis thaliana; identical to SEQ ID NO: 90932
  peptide (1)..(299): Ceres Seq. ID no. 12725775
  misc_feature (150)..(250): Pfam Name: 2OG-Fe(II) oxygenase superfamily Pfam Description: 2OG-Fe(II) oxygenase superfamily
  misc_feature (1)..(299): Homolog of NCBI NO: 15218400 NR Description: flavanone 3-hydroxylase, putative; protein id: supported by cDNA: gi_13507544, supported by cDNA: gi_15293284
  misc_feature (1)..(299): Homolog of NCBI NO: 15219988 NR Description: SRG1-like protein; protein id: At1g17020.1,
  misc_feature (1)..(299): Homolog of NCBI NO: 15219986 NR Description: SRG1-like protein; protein id: At1g17010.1
  misc_feature (1)..(299): Homolog of NCBI NO: 26451337 NR Description: SRG1 like protein [Arabidopsis thaliana]
  misc_feature (1)..(299): Homolog of NCBI NO: 15235014 NR Description: SRG1-like protein; protein id: At4g25300.1
  misc_feature (1)..(299): Homolog of NCBI NO: 15235017 NR Description: SRG1-like protein; protein id: At4g25310.1
  misc_feature (1)..(299): Homolog of NCBI NO: 25285681 NR Description: SRG1 homolog [imported] - Arabidopsis thaliana
  misc_feature (1)..(299): Homolog of NCBI NO: 37536804 NR Description: putative ethylene-forming enzyme [Oryza sativa
  misc_feature (1)..(299): Homolog of NCBI NO: 40736992 NR Description: putative oxidoreductase [Oryza sativa (japonica
  misc_feature (1)..(272): Homolog of NCBI NO: 34898470 NR Description: ESTs D47168(S12332),D46350(S10967) correspond to

SEQ ID NO: 94689 - protein, 290 aa, Arabidopsis thaliana; identical to SEQ ID NO: 90933
  peptide (1)..(290): Ceres Seq. ID no. 12725776
  misc_feature (141)..(241): Pfam Name: 2OG-Fe(II) oxygenase superfamily Pfam Description: 2OG-Fe(II) oxygenase superfamily
  misc_feature (1)..(290): Homolog of NCBI NO: 15218400 NR Description: flavanone 3-hydroxylase, putative; protein id: supported by cDNA: gi_13507544, supported by cDNA: gi_15293284
  misc_feature (1)..(290): Homolog of NCBI NO: 15219988 NR Description: SRG1-like protein; protein id: At1g17020.1,
  misc_feature (1)..(290): Homolog of NCBI NO: 15219986 NR Description: SRG1-like protein; protein id: At1g17010.1
  misc_feature (1)..(290): Homolog of NCBI NO: 26451337 NR Description: SRG1 like protein [Arabidopsis thaliana]
  misc_feature (1)..(290): Homolog of NCBI NO: 15235014 NR Description: SRG1-like protein; protein id: At4g25300.1
  misc_feature (1)..(290): Homolog of NCBI NO: 15235017 NR Description: SRG1-like protein; protein id: At4g25310.1
  misc_feature (1)..(290): Homolog of NCBI NO: 25285681 NR Description: SRG1 homolog [imported] - Arabidopsis thaliana
  misc_feature (1)..(290): Homolog of NCBI NO: 37536804 NR Description: putative ethylene-forming enzyme [Oryza sativa
  misc_feature (1)..(290): Homolog of NCBI NO: 40736992 NR Description: putative oxidoreductase [Oryza sativa (japonica
  misc_feature (1)..(263): Homolog of NCBI NO: 34898470 NR Description: ESTs D47168(S12332),D46350(S10967) correspond to

SEQ ID NO: 94690 - DNA, 2571 bp, Arabidopsis thaliana; identical to SEQ ID NO: 90934
  misc_feature (1)..(2571): Ceres Seq. ID no. 12725777
  misc_feature: MA Experiment ID: 20000169 Result: Up-regulated in Transcription
  misc_feature: MA Experiment 20000169 PARAMETER Experiment Name: At_100uM_ABA_P Parameter: Age (day) Value: 14
  misc_feature: MA Experiment 20000169 PARAMETER Experiment Name: At_100uM_ABA_P Parameter: Organism Value: A. thaliana
  misc_feature: MA Experiment 20000169 PARAMETER Experiment Name: At_100uM_ABA_P Parameter: Plant Line Value: WS
  misc_feature: MA Experiment 20000169 PARAMETER Experiment Name: At_100uM_ABA_P Parameter: Timepoint (hr) Value: 6
  misc_feature: MA Experiment 20000169 PARAMETER Experiment Name: At_100uM_ABA_P Parameter: Tissue Value: Aerial
  misc_feature: MA Experiment 20000169 PARAMETER Experiment Name: At_100uM_ABA_P Parameter: Treatment Value: 100uM ABA vs. No Treatment
  misc_feature: MA Experiment ID: 20000171 Result: Up-regulated in Transcription
  misc_feature: MA Experiment 20000171 PARAMETER Experiment Name: At_42deg_Heat_P Parameter: Age (day) Value: 14
  misc_feature: MA Experiment 20000171 PARAMETER Experiment Name: At_42deg_Heat_P Parameter: Organism Value: A. thaliana
  misc_feature: MA Experiment 20000171 PARAMETER Experiment Name: At_42deg_Heat_P Parameter: Plant Line Value: WS
  misc_feature: MA Experiment 20000171 PARAMETER Experiment Name: At_42deg_Heat_P Parameter: Temperature (deg C) Value: 42 vs. 22
  misc_feature: MA Experiment 20000171 PARAMETER Experiment Name: At_42deg_Heat_P Parameter: Timepoint (hr) Value: 1
  misc_feature: MA Experiment 20000171 PARAMETER Experiment Name: At_42deg_Heat_P Parameter: Tissue Value: Aerial
  misc_feature: MA Experiment ID: 20000234 Result: Up-regulated in Transcription
  misc_feature: MA Experiment 20000234 PARAMETER Experiment Name: At_Siliques_P Parameter: Age (day) Value: 21
  misc_feature: MA Experiment 20000234 PARAMETER Experiment Name: At_Siliques_P Parameter: Organism Value: A. thaliana
  misc_feature: MA Experiment 20000234 PARAMETER Experiment Name: At_Siliques_P Parameter: Plant Line Value: WS
  misc_feature: MA Experiment 20000234 PARAMETER Experiment Name: At_Siliques_P Parameter: Tissue Value: Less Than 5mm Siliques vs. Whole Plant
  misc_feature: MA Experiment ID: 20000264 Result: Up-regulated in Transcription
  misc_feature: MA Experiment 20000264 PARAMETER Experiment Name: At_Open_Flower_P Parameter: Age (day) Value: 21
  misc_feature: MA Experiment 20000264 PARAMETER Experiment Name: At_Open_Flower_P Parameter: Plant Line Value: WS
  misc_feature: MA Experiment 20000264 PARAMETER Experiment Name: At_Open_Flower_P Parameter: Tissue Value: Open Flower vs. Whole Plant
  misc_feature: MA Experiment ID: 20000268 Result: Up-regulated in Transcription
  misc_feature: MA Experiment 20000268 PARAMETER Experiment Name: At_100mM_NaCl__P Parameter: Age (day) Value: 14
  misc_feature: MA Experiment 20000268 PARAMETER Experiment Name: At_100mM_NaCl__P Parameter: Organism Value: A. thaliana
  misc_feature: MA Experiment 20000268 PARAMETER Experiment Name: At_100mM_NaCl__P Parameter: Plant Line Value: WS
  misc_feature: MA Experiment 20000268 PARAMETER Experiment Name: At_100mM_NaCl__P Parameter: Timepoint (hr) Value: 6
  misc_feature: MA Experiment 20000268 PARAMETER Experiment Name: At_100mM_NaCl__P Parameter: Tissue Value: Whole Plant
  misc_feature: MA Experiment 20000268 PARAMETER Experiment Name: At_100mM_NaCl__P Parameter: Treatment Value: 100mM NaCl vs. No Treatment
  misc_feature: MA Experiment ID: 20000436 Result: Up-regulated in Transcription
  misc_feature: MA Experiment 20000436 PARAMETER Experiment Name: At_Drought_P Parameter: Age (day) Value: 7
  misc_feature: MA Experiment 20000436 PARAMETER Experiment Name: At_Drought_P Parameter: Organism Value: A. thaliana
  misc_feature: MA Experiment 20000436 PARAMETER Experiment Name: At_Drought_P Parameter: Plant Line Value: WS
  misc_feature: MA Experiment 20000436 PARAMETER Experiment Name: At_Drought_P Parameter: Timepoint (hr) Value: 12
  misc_feature: MA Experiment 20000436 PARAMETER Experiment Name: At_Drought_P Parameter: Tissue Value: Whole Plant
  misc_feature: MA Experiment 20000436 PARAMETER Experiment Name: At_Drought_P Parameter: Treatment Value: Drought vs. No Drought
  misc_feature: MA Experiment ID: 20000437 Result: Up-regulated in Transcription
  misc_feature: MA Experiment 20000437 PARAMETER Experiment Name: At_Drought_P Parameter: Age (day) Value: 8
  misc_feature: MA Experiment 20000437 PARAMETER Experiment Name: At_Drought_P Parameter: Organism Value: A. thaliana
  misc_feature: MA Experiment 20000437 PARAMETER Experiment Name: At_Drought_P Parameter: Plant Line Value: WS
  misc_feature: MA Experiment 20000437 PARAMETER Experiment Name: At_Drought_P Parameter: Timepoint (hr) Value: 24
  misc_feature: MA Experiment 20000437 PARAMETER Experiment Name: At_Drought_P Parameter: Tissue Value: Whole Plant
  misc_feature: MA Experiment 20000437 PARAMETER Experiment Name: At_Drought_P Parameter: Treatment Value: Drought vs. No Drought
  misc_feature: MA Experiment ID: 20000453 Result: Up-regulated in Transcription
  misc_feature: MA Experiment 20000453 PARAMETER Experiment Name: At_100uM_ABA_P Parameter: Age (day) Value: 15
  misc_feature: MA Experiment 20000453 PARAMETER Experiment Name: At_100uM_ABA_P Parameter: Organism Value: A. thaliana
  misc_feature: MA Experiment 20000453 PARAMETER Experiment Name: At_100uM_ABA_P Parameter: Plant Line Value: WS
  misc_feature: MA Experiment 20000453 PARAMETER Experiment Name: At_100uM_ABA_P Parameter: Timepoint (hr) Value: 24
  misc_feature: MA Experiment 20000453 PARAMETER Experiment Name: At_100uM_ABA_P Parameter: Tissue Value: Aerial
  misc_feature: MA Experiment 20000453 PARAMETER Experiment Name: At_100uM_ABA_P Parameter: Treatment Value: 100uM ABA vs. No Treatment
  misc_feature: MA Experiment ID: 20000455 Result: Up-regulated in Transcription
  misc_feature: MA Experiment 20000455 PARAMETER Experiment Name: At_100uM_ABA_P Parameter: Age (day) Value: 16
  misc_feature: MA Experiment 20000455 PARAMETER Experiment Name: At_100uM_ABA_P Parameter: Organism Value: A. thaliana
  misc_feature: MA Experiment 20000455 PARAMETER Experiment Name: At_100uM_ABA_P Parameter: Plant Line Value: WS
  misc_feature: MA Experiment 20000455 PARAMETER Experiment Name: At_100uM_ABA_P Parameter: Timepoint (hr) Value: 48
  misc_feature: MA Experiment 20000455 PARAMETER Experiment Name: At_100uM_ABA_P Parameter: Tissue Value: Aerial
  misc_feature: MA Experiment 20000455 PARAMETER Experiment Name: At_100uM_ABA_P Parameter: Treatment Value: 100uM ABA vs. No Treatment
  misc_feature: MA Experiment ID: 20000794 Result: Up-regulated in Transcription
  misc_feature: MA Experiment 20000794 PARAMETER Experiment Name: At_Petals_P Parameter: Age (day) Value: 23-25 days
  misc_feature: MA Experiment 20000794 PARAMETER Experiment Name: At_Petals_P Parameter: Plant Line Value: WS
  misc_feature: MA Experiment 20000794 PARAMETER Experiment Name: At_Petals_P Parameter: Tissue Value: Petals vs. Whole plant
  misc_feature: MA Experiment ID: 20001555 Result: Up-regulated in Transcription
  misc_feature: MA Experiment 20001555 PARAMETER Experiment Name: At_Drought_Soil_Dry_P Parameter: Age (day) Value: 24
  misc_feature: MA Experiment 20001555 PARAMETER Experiment Name: At_Drought_Soil_Dry_P Parameter: Organism Value: A. thaliana
  misc_feature: MA Experiment 20001555 PARAMETER Experiment Name: At_Drought_Soil_Dry_P Parameter: Plant Line Value: WS
  misc_feature: MA Experiment 20001555 PARAMETER Experiment Name: At_Drought_Soil_Dry_P Parameter: Post Timepoint (hr) Value: None
  misc_feature: MA Experiment 20001555 PARAMETER Experiment Name: At_Drought_Soil_Dry_P Parameter: Post-Treatment Value: None
  misc_feature: MA Experiment 20001555 PARAMETER Experiment Name: At_Drought_Soil_Dry_P Parameter: Timepoint (day) Value: 10
  misc_feature: MA Experiment 20001555 PARAMETER Experiment Name: At_Drought_Soil_Dry_P Parameter: Treatment Value: Drought vs. No Drought
  misc_feature: MA Experiment ID: 20001556 Result: Up-regulated in Transcription
  misc_feature: MA Experiment 20001556 PARAMETER Experiment Name: At_Drought_Soil_Dry_P Parameter: Age (day) Value: 26
  misc_feature: MA Experiment 20001556 PARAMETER Experiment Name: At_Drought_Soil_Dry_P Parameter: Organism Value: A. thaliana
  misc_feature: MA Experiment 20001556 PARAMETER Experiment Name: At_Drought_Soil_Dry_P Parameter: Plant Line Value: WS
  misc_feature: MA Experiment 20001556 PARAMETER Experiment Name: At_Drought_Soil_Dry_P Parameter: Post Timepoint (hr) Value: None
  misc_feature: MA Experiment 20001556 PARAMETER Experiment Name: At_Drought_Soil_Dry_P Parameter: Post-Treatment Value: None
  misc_feature: MA Experiment 20001556 PARAMETER Experiment Name: At_Drought_Soil_Dry_P Parameter: Timepoint (day) Value: 12
  misc_feature: MA Experiment 20001556 PARAMETER Experiment Name: At_Drought_Soil_Dry_P Parameter: Treatment Value: Drought vs. No Drought
  misc_feature: MA Experiment ID: 20001559 Result: Up-regulated in Transcription
  misc_feature: MA Experiment 20001559 PARAMETER Experiment Name: At_Drought_Soil_Dry_P Parameter: Age (day) Value: 28
  misc_feature: MA Experiment 20001559 PARAMETER Experiment Name: At_Drought_Soil_Dry_P Parameter: Organism Value: A. thaliana
  misc_feature: MA Experiment 20001559 PARAMETER Experiment Name: At_Drought_Soil_Dry_P Parameter: Plant Line Value: WS
  misc_feature: MA Experiment 20001559 PARAMETER Experiment Name: At_Drought_Soil_Dry_P Parameter: Post Timepoint (hr) Value: 29
  misc_feature: MA Experiment 20001559 PARAMETER Experiment Name: At_Drought_Soil_Dry_P Parameter: Post-Treatment Value: Re-Water vs. No Drought
  misc_feature: MA Experiment 20001559 PARAMETER Experiment Name: At_Drought_Soil_Dry_P Parameter: Timepoint (day) Value: 14
  misc_feature: MA Experiment 20001559 PARAMETER Experiment Name: At_Drought_Soil_Dry_P Parameter: Treatment Value: Drought vs. No Drought
  misc_feature: MA Experiment ID: 20001560 Result: Up-regulated in Transcription
  misc_feature: MA Experiment 20001560 PARAMETER Experiment Name: At_Drought_Soil_Dry_P Parameter: Age (day) Value: 28
  misc_feature: MA Experiment 20001560 PARAMETER Experiment Name: At_Drought_Soil_Dry_P Parameter: Organism Value: A. thaliana
  misc_feature: MA Experiment 20001560 PARAMETER Experiment Name: At_Drought_Soil_Dry_P Parameter: Plant Line Value: WS
  misc_feature: MA Experiment 20001560 PARAMETER Experiment Name: At_Drought_Soil_Dry_P Parameter: Post Timepoint (hr) Value: None
  misc_feature: MA Experiment 20001560 PARAMETER Experiment Name: At_Drought_Soil_Dry_P Parameter: Post-Treatment Value: None
  misc_feature: MA Experiment 20001560 PARAMETER Experiment Name: At_Drought_Soil_Dry_P Parameter: Timepoint (day) Value: 14
  misc_feature: MA Experiment 20001560 PARAMETER Experiment Name: At_Drought_Soil_Dry_P Parameter: Treatment Value: Drought vs. No Drought
  misc_feature: MA Experiment ID: 20001911 Result: Up-regulated in Transcription
  misc_feature: MA Experiment 20001911 PARAMETER Experiment Name: At_Drought_Reproduction_P Parameter: Age (day) Value: 40
  misc_feature: MA Experiment 20001911 PARAMETER Experiment Name: At_Drought_Reproduction_P Parameter: Organism Value: A. thaliana
  misc_feature: MA Experiment 20001911 PARAMETER Experiment Name: At_Drought_Reproduction_P Parameter: Plant Line Value: WS
  misc_feature: MA Experiment 20001911 PARAMETER Experiment Name: At_Drought_Reproduction_P Parameter: Timepoint (day) Value: 10
  misc_feature: MA Experiment 20001911 PARAMETER Experiment Name: At_Drought_Reproduction_P Parameter: Tissue Value: Flowers
  misc_feature: MA Experiment 20001911 PARAMETER Experiment Name: At_Drought_Reproduction_P Parameter: Treatment Value: Drought vs. No Drought

SEQ ID NO: 94691 - protein, 856 aa, Arabidopsis thaliana; identical to SEQ ID NO: 90935
  peptide (1)..(856): Ceres Seq. ID no. 12725778
  misc_feature (613)..(821): Pfam Name: Mechanosensitive ion channel Pfam Description: Mechanosensitive ion channel
  misc_feature (138)..(853): Homolog of NCBI NO: 15220793 NR Description: hypothetical protein; protein id: At1g53470.1
  misc_feature (1)..(148): Homolog of NCBI NO: 15220793 NR Description: hypothetical protein; protein id: At1g53470.1
  misc_feature (116)..(848): Homolog of NCBI NO: 11994592 NR Description: gb|AAD30575.1~gene_id:T21E2.7~strong similarity
  misc_feature (116)..(660): Homolog of NCBI NO: 15231928 NR Description: hypothetical protein; protein id: At3g14810.1
  misc_feature (647)..(848): Homolog of NCBI NO: 15231928 NR Description: hypothetical protein; protein id: At3g14810.1
  misc_feature (112)..(849): Homolog of NCBI NO: 15227342 NR Description: hypothetical protein; protein id: At2g17000.1
  misc_feature (186)..(848): Homolog of NCBI NO: 38345847 NR Description: OSJNBa0084K11.11 [Oryza sativa (japonica
  misc_feature (560)..(849): Homolog of NCBI NO: 30679840 NR Description: expressed protein [Arabidopsis thaliana]
  misc_feature (105)..(392): Homolog of NCBI NO: 30679840 NR Description: expressed protein [Arabidopsis thaliana]
  misc_feature (470)..(841): Homolog of NCBI NO: 18390104 NR Description: putative protein T30F21.6 [Sorghum bicolor]

SEQ ID NO: 94692 - protein, 751 aa, Arabidopsis thaliana; identical to SEQ ID NO: 90936
  peptide (1)..(751): Ceres Seq. ID no. 12725779
  misc_feature (508)..(716): Pfam Name: Mechanosensitive ion channel Pfam Description: Mechanosensitive ion channel
  misc_feature (33)..(748): Homolog of NCBI NO: 15220793 NR Description: hypothetical protein; protein id: At1g53470.1
  misc_feature (1)..(43): Homolog of NCBI NO: 15220793 NR Description: hypothetical protein; protein id: At1g53470.1
  misc_feature (11)..(743): Homolog of NCBI NO: 11994592 NR Description: gb|AAD30575.1~gene_id:T21E2.7~strong similarity
  misc_feature (11)..(555): Homolog of NCBI NO: 15231928 NR Description: hypothetical protein; protein id: At3g14810.1
  misc_feature (542)..(743): Homolog of NCBI NO: 15231928 NR Description: hypothetical protein; protein id: At3g14810.1
  misc_feature (7)..(744): Homolog of NCBI NO: 15227342 NR Description: hypothetical protein; protein id: At2g17000.1
  misc_feature (81)..(743): Homolog of NCBI NO: 38345847 NR Description: OSJNBa0084K11.11 [Oryza sativa (japonica
  misc_feature (455)..(744): Homolog of NCBI NO: 30679840 NR Description: expressed protein [Arabidopsis thaliana]
  misc_feature (1)..(287): Homolog of NCBI NO: 30679840 NR Description: expressed protein [Arabidopsis thaliana]
  misc_feature (365)..(736): Homolog of NCBI NO: 18390104 NR Description: putative protein T30F21.6 [Sorghum bicolor]

SEQ ID NO: 94693 - protein, 747 aa, Arabidopsis thaliana; identical to SEQ ID NO: 90937
  peptide (1)..(747): Ceres Seq. ID no. 12725780
  misc_feature (504)..(712): Pfam Name: Mechanosensitive ion channel Pfam Description: Mechanosensitive ion channel
  misc_feature (29)..(744): Homolog of NCBI NO: 15220793 NR Description: hypothetical protein; protein id: At1g53470.1
  misc_feature (1)..(39): Homolog of NCBI NO: 15220793 NR Description: hypothetical protein; protein id: At1g53470.1
  misc_feature (7)..(739): Homolog of NCBI NO: 11994592 NR Description: gb|AAD30575.1~gene_id:T21E2.7~strong similarity
  misc_feature (7)..(551): Homolog of NCBI NO: 15231928 NR Description: hypothetical protein; protein id: At3g14810.1
  misc_feature (538)..(739): Homolog of NCBI NO: 15231928 NR Description: hypothetical protein; protein id: At3g14810.1
  misc_feature (3)..(740): Homolog of NCBI NO: 15227342 NR Description: hypothetical protein; protein id: At2g17000.1
  misc_feature (77)..(739): Homolog of NCBI NO: 38345847 NR Description: OSJNBa0084K11.11 [Oryza sativa (japonica
  misc_feature (451)..(740): Homolog of NCBI NO: 30679840 NR Description: expressed protein [Arabidopsis thaliana]
  misc_feature (1)..(283): Homolog of NCBI NO: 30679840 NR Description: expressed protein [Arabidopsis thaliana]
  misc_feature (361)..(732): Homolog of NCBI NO: 18390104 NR Description: putative protein T30F21.6 [Sorghum bicolor]

SEQ ID NO: 94694 - DNA, 1080 bp, Arabidopsis thaliana; identical to SEQ ID NO: 90938
  misc_feature (1)..(1080): Ceres Seq. ID no. 12725789

SEQ ID NO: 94695 - protein, 359 aa, Arabidopsis thaliana; identical to SEQ ID NO: 90939
  peptide (1)..(359): Ceres Seq. ID no. 12725790
  misc_feature (1)..(359): Homolog of NCBI NO: 15219157 NR Description: hypothetical protein; protein id: At1g78710.1
  misc_feature (38)..(358): Homolog of NCBI NO: 34911864 NR Description: OSJNBb0032K15.9 [Oryza sativa (japonica
  misc_feature (27)..(358): Homolog of NCBI NO: 21593142 NR Description: unknown [Arabidopsis thaliana]
  misc_feature (27)..(358): Homolog of NCBI NO: 28393769 NR Description: unknown protein [Arabidopsis thaliana]
  misc_feature (33)..(356): Homolog of NCBI NO: 18396930 NR Description: expressed protein; protein id: At1g29050.1, by cDNA: 30068., supported by cDNA: gi_18377637, supported by gi_20465654 [Arabidopsis thaliana] >gi|18377638|gb|AAL66969.1|
  misc_feature (6)..(356): Homolog of NCBI NO: 15224585 NR Description: hypothetical protein; protein id: At2g30900.1
  misc_feature (6)..(356): Homolog of NCBI NO: 30350855 NR Description: hypothetical protein At2g30900 [Arabidopsis
  misc_feature (8)..(358): Homolog of NCBI NO: 18406003 NR Description: expressed protein; protein id: At2g42570.1, by cDNA: 17752., supported by cDNA: gi_14334589, supported by
  misc_feature (31)..(356): Homolog of NCBI NO: 18403435 NR Description: expressed protein; protein id: At2g34070.1, by cDNA: 25519. [Arabidopsis thaliana] expressed protein [Arabidopsis thaliana]
  misc_feature (33)..(356): Homolog of NCBI NO: 25366741 NR Description: F28N24.24 protein - Arabidopsis thaliana

SEQ ID NO: 94696 - protein, 243 aa, Arabidopsis thaliana; identical to SEQ ID NO: 90940
  peptide (1)..(243): Ceres Seq. ID no. 12725791
  misc_feature (1)..(243): Homolog of NCBI NO: 15219157 NR Description: hypothetical protein; protein id: At1g78710.1
  misc_feature (1)..(242): Homolog of NCBI NO: 34911864 NR Description: OSJNBb0032K15.9 [Oryza sativa (japonica
  misc_feature (1)..(242): Homolog of NCBI NO: 21593142 NR Description: unknown [Arabidopsis thaliana]
  misc_feature (1)..(242): Homolog of NCBI NO: 28393769 NR Description: unknown protein [Arabidopsis thaliana]
  misc_feature (1)..(240): Homolog of NCBI NO: 18396930 NR Description: expressed protein; protein id: At1g29050.1, by cDNA: 30068., supported by cDNA: gi_18377637, supported by gi_20465654 [Arabidopsis thaliana] >gi|18377638|gb|AAL66969.1|
  misc_feature (1)..(240): Homolog of NCBI NO: 15224585 NR Description: hypothetical protein; protein id: At2g30900.1
  misc_feature (1)..(240): Homolog of NCBI NO: 30350855 NR Description: hypothetical protein At2g30900 [Arabidopsis
  misc_feature (1)..(242): Homolog of NCBI NO: 18406003 NR Description: expressed protein; protein id: At2g42570.1, by cDNA: 17752., supported by cDNA: gi_14334589, supported by
  misc_feature (1)..(240): Homolog of NCBI NO: 18403435 NR Description: expressed protein; protein id: At2g34070.1, by cDNA: 25519. [Arabidopsis thaliana] expressed protein [Arabidopsis thaliana]
  misc_feature (1)..(240): Homolog of NCBI NO: 25366741 NR Description: F28N24.24 protein - Arabidopsis thaliana

SEQ ID NO: 94697 - protein, 236 aa, Arabidopsis thaliana; identical to SEQ ID NO: 90941
  peptide (1)..(236): Ceres Seq. ID no. 12725792
  misc_feature (1)..(236): Homolog of NCBI NO: 15219157 NR Description: hypothetical protein; protein id: At1g78710.1
  misc_feature (1)..(235): Homolog of NCBI NO: 34911864 NR Description: OSJNBb0032K15.9 [Oryza sativa (japonica
  misc_feature (1)..(235): Homolog of NCBI NO: 21593142 NR Description: unknown [Arabidopsis thaliana]
  misc_feature (1)..(235): Homolog of NCBI NO: 28393769 NR Description: unknown protein [Arabidopsis thaliana]
  misc_feature (1)..(233): Homolog of NCBI NO: 18396930 NR Description: expressed protein; protein id: At1g29050.1, by cDNA: 30068., supported by cDNA: gi_18377637, supported by gi_20465654 [Arabidopsis thaliana] >gi|18377638|gb|AAL66969.1|
  misc_feature (1)..(233): Homolog of NCBI NO: 15224585 NR Description: hypothetical protein; protein id: At2g30900.1
  misc_feature (1)..(233): Homolog of NCBI NO: 30350855 NR Description: hypothetical protein At2g30900 [Arabidopsis
  misc_feature (1)..(235): Homolog of NCBI NO: 18406003 NR Description: expressed protein; protein id: At2g42570.1, by cDNA: 17752., supported by cDNA: gi_14334589, supported by
  misc_feature (1)..(233): Homolog of NCBI NO: 18403435 NR Description: expressed protein; protein id: At2g34070.1, by cDNA: 25519. [Arabidopsis thaliana] expressed protein [Arabidopsis thaliana]
  misc_feature (1)..(233): Homolog of NCBI NO: 25366741 NR Description: F28N24.24 protein - Arabidopsis thaliana

SEQ ID NO: 94698 - DNA, 1368 bp, Arabidopsis thaliana; identical to SEQ ID NO: 90942
  misc_feature (1)..(1368): Ceres Seq. ID no. 12725820
  misc_feature: MA Experiment ID: 20000314 Result: Up-regulated in Transcription
  misc_feature: MA Experiment 20000314 PARAMETER Experiment Name: At_14day_Shoots-Roots_Sub_P Parameter: Age (day) Value: 14
  misc_feature: MA Experiment 20000314 PARAMETER Experiment Name: At_14day_Shoots-Roots_Sub_P Parameter: Organism Value: A. thaliana
  misc_feature: MA Experiment 20000314 PARAMETER Experiment Name: At_14day_Shoots-Roots_Sub_P Parameter: Plant Line Value: WS
  misc_feature: MA Experiment 20000314 PARAMETER Experiment Name: At_14day_Shoots-Roots_Sub_P Parameter: Tissue Value: Roots vs. Whole Plant
  misc_feature: MA Experiment ID: 20000355 Result: Down-regulated in Transcription
  misc_feature: MA Experiment 20000355 PARAMETER Experiment Name: At_Siliques_Sub_P Parameter: Age (day) Value: 21
  misc_feature: MA Experiment 20000355 PARAMETER Experiment Name: At_Siliques_Sub_P Parameter: Organism Value: A. thaliana
  misc_feature: MA Experiment 20000355 PARAMETER Experiment Name: At_Siliques_Sub_P Parameter: Plant Line Value: WS
  misc_feature: MA Experiment 20000355 PARAMETER Experiment Name: At_Siliques_Sub_P Parameter: Tissue Value: Less Than 5mm Siliques vs. Whole Plant
  misc_feature: MA Experiment ID: 20000440 Result: Down-regulated in Transcription
  misc_feature: MA Experiment 20000440 PARAMETER Experiment Name: At_Closed-Flower__Sub_P Parameter: Tissue Value: Closed Flower vs. Whole Plant
  misc_feature: MA Experiment ID: 20000634 Result: Down-regulated in Transcription
  misc_feature: MA Experiment 20000634 PARAMETER Experiment Name: At_10percent_PEG_Sub_P Parameter: Age (day) Value: 12
  misc_feature: MA Experiment 20000634 PARAMETER Experiment Name: At_10percent_PEG_Sub_P Parameter: Organism Value: A. thaliana
  misc_feature: MA Experiment 20000634 PARAMETER Experiment Name: At_10percent_PEG_Sub_P Parameter: Plant Line Value: WS
  misc_feature: MA Experiment 20000634 PARAMETER Experiment Name: At_10percent_PEG_Sub_P Parameter: Timepoint (day) Value: 12
  misc_feature: MA Experiment 20000634 PARAMETER Experiment Name: At_10percent_PEG_Sub_P Parameter: Tissue Value: Whole Plant
  misc_feature: MA Experiment 20000634 PARAMETER Experiment Name: At_10percent_PEG_Sub_P Parameter: Treatment Value: 10% PEG vs. No Treatment

SEQ ID NO: 94699 - protein, 455 aa, Arabidopsis thaliana; identical to SEQ ID NO: 90943
  peptide (1)..(455): Ceres Seq. ID no. 12725821
  misc_feature (11)..(444): Pfam Name: Transferase family Pfam Description: Transferase family
  misc_feature (1)..(455): Homolog of NCBI NO: 7487911 NR Description: hypothetical protein YUP8H12R.39 - Arabidopsis
  misc_feature (1)..(455): Homolog of NCBI NO: 15219263 NR Description: hypothetical protein; protein id: At1g78990.1
  misc_feature (1)..(455): Homolog of NCBI NO: 15223333 NR Description: hypothetical protein; protein id: At1g32910.1
  misc_feature (7)..(455): Homolog of NCBI NO: 15237343 NR Description: putative protein; protein id: At5g16410.1
  misc_feature (1)..(453): Homolog of NCBI NO: 38567901 NR Description: OSJNBa0060N03.21 [Oryza sativa (japonica
  misc_feature (11)..(455): Homolog of NCBI NO: 15222365 NR Description: hypothetical protein; protein id: At1g31490.1
  misc_feature (26)..(439): Homolog of NCBI NO: 15239747 NR Description: anthranilate N-benzoyltransferase; protein id: supported by cDNA: 114130. [Arabidopsis thaliana]
  misc_feature (26)..(439): Homolog of NCBI NO: 21536883 NR Description: anthranilate N-benzoyltransferase [Arabidopsis
  misc_feature (35)..(419): Homolog of NCBI NO: 40644899 NR Description: hydroxycinnamoyl CoA quinate transferase
  misc_feature (35)..(439): Homolog of NCBI NO: 40644084 NR Description: hydroxycinnamoyl CoA quinate transferase

SEQ ID NO: 94700 - protein, 291 aa, Arabidopsis thaliana; identical to SEQ ID NO: 90944
  peptide (1)..(291): Ceres Seq. ID no. 12725822
  misc_feature (1)..(280): Pfam Name: Transferase family Pfam Description: Transferase family
  misc_feature (1)..(291): Homolog of NCBI NO: 7487911 NR Description: hypothetical protein YUP8H12R.39 - Arabidopsis
  misc_feature (1)..(291): Homolog of NCBI NO: 15219263 NR Description: hypothetical protein; protein id: At1g78990.1
  misc_feature (1)..(291): Homolog of NCBI NO: 15223333 NR Description: hypothetical protein; protein id: At1g32910.1
  misc_feature (1)..(291): Homolog of NCBI NO: 15237343 NR Description: putative protein; protein id: At5g16410.1
  misc_feature (1)..(289): Homolog of NCBI NO: 38567901 NR Description: OSJNBa0060N03.21 [Oryza sativa (japonica
  misc_feature (1)..(291): Homolog of NCBI NO: 15222365 NR Description: hypothetical protein; protein id: At1g31490.1
  misc_feature (1)..(275): Homolog of NCBI NO: 15239747 NR Description: anthranilate N-benzoyltransferase; protein id: supported by cDNA: 114130. [Arabidopsis thaliana]
  misc_feature (1)..(275): Homolog of NCBI NO: 21536883 NR Description: anthranilate N-benzoyltransferase [Arabidopsis
  misc_feature (1)..(255): Homolog of NCBI NO: 40644899 NR Description: hydroxycinnamoyl CoA quinate transferase
  misc_feature (1)..(275): Homolog of NCBI NO: 40644084 NR Description: hydroxycinnamoyl CoA quinate transferase

SEQ ID NO: 94701 - protein, 289 aa, Arabidopsis thaliana; identical to SEQ ID NO: 90945
  peptide (1)..(289): Ceres Seq. ID no. 12725823
  misc_feature (1)..(278): Pfam Name: Transferase family Pfam Description: Transferase family
  misc_feature (1)..(289): Homolog of NCBI NO: 7487911 NR Description: hypothetical protein YUP8H12R.39 - Arabidopsis
  misc_feature (1)..(289): Homolog of NCBI NO: 15219263 NR Description: hypothetical protein; protein id: At1g78990.1
  misc_feature (1)..(289): Homolog of NCBI NO: 15223333 NR Description: hypothetical protein; protein id: At1g32910.1
  misc_feature (1)..(289): Homolog of NCBI NO: 15237343 NR Description: putative protein; protein id: At5g16410.1
  misc_feature (1)..(287): Homolog of NCBI NO: 38567901 NR Description: OSJNBa0060N03.21 [Oryza sativa (japonica
  misc_feature (1)..(289): Homolog of NCBI NO: 15222365 NR Description: hypothetical protein; protein id: At1g31490.1
  misc_feature (1)..(273): Homolog of NCBI NO: 15239747 NR Description: anthranilate N-benzoyltransferase; protein id: supported by cDNA: 114130. [Arabidopsis thaliana]
  misc_feature (1)..(273): Homolog of NCBI NO: 21536883 NR Description: anthranilate N-benzoyltransferase [Arabidopsis
  misc_feature (1)..(253): Homolog of NCBI NO: 40644899 NR Description: hydroxycinnamoyl CoA quinate transferase
  misc_feature (1)..(273): Homolog of NCBI NO: 40644084 NR Description: hydroxycinnamoyl CoA quinate transferase

SEQ ID NO: 94702 - DNA, 1701 bp, Arabidopsis thaliana; identical to SEQ ID NO: 90946
  misc_feature (1)..(1701): Ceres Seq. ID no. 12725828
  misc_feature: MA Experiment ID: 20000171 Result: Down-regulated in Transcription
  misc_feature: MA Experiment 20000171 PARAMETER Experiment Name: At_42deg_Heat_P Parameter: Age (day) Value: 14
  misc_feature: MA Experiment 20000171 PARAMETER Experiment Name: At_42deg_Heat_P Parameter: Organism Value: A. thaliana
  misc_feature: MA Experiment 20000171 PARAMETER Experiment Name: At_42deg_Heat_P Parameter: Plant Line Value: WS
  misc_feature: MA Experiment 20000171 PARAMETER Experiment Name: At_42deg_Heat_P Parameter: Temperature (deg C) Value: 42 vs. 22
  misc_feature: MA Experiment 20000171 PARAMETER Experiment Name: At_42deg_Heat_P Parameter: Timepoint (hr) Value: 1
  misc_feature: MA Experiment 20000171 PARAMETER Experiment Name: At_42deg_Heat_P Parameter: Tissue Value: Aerial
  misc_feature: MA Experiment ID: 20000173 Result: Down-regulated in Transcription
  misc_feature: MA Experiment 20000173 PARAMETER Experiment Name: At_42deg_Heat_P Parameter: Age (day) Value: 14
  misc_feature: MA Experiment 20000173 PARAMETER Experiment Name: At_42deg_Heat_P Parameter: Organism Value: A. thaliana
  misc_feature: MA Experiment 20000173 PARAMETER Experiment Name: At_42deg_Heat_P Parameter: Plant Line Value: WS
  misc_feature: MA Experiment 20000173 PARAMETER Experiment Name: At_42deg_Heat_P Parameter: Temperature (deg C) Value: 42 vs. 22
  misc_feature: MA Experiment 20000173 PARAMETER Experiment Name: At_42deg_Heat_P Parameter: Timepoint (hr) Value: 6
  misc_feature: MA Experiment 20000173 PARAMETER Experiment Name: At_42deg_Heat_P Parameter: Tissue Value: Aerial
  misc_feature: MA Experiment ID: 20000185 Result: Down-regulated in Transcription
  misc_feature: MA Experiment 20000185 PARAMETER Experiment Name: At_Roots__P Parameter: Age (day) Value: 7 vs. 21
  misc_feature: MA Experiment 20000185 PARAMETER Experiment Name: At_Roots__P Parameter: Organism Value: A. thaliana
  misc_feature: MA Experiment 20000185 PARAMETER Experiment Name: At_Roots__P Parameter: Tissue Value: Roots vs. Whole Plant
  misc_feature: MA Experiment ID: 20000439 Result: Down-regulated in Transcription
  misc_feature: MA Experiment 20000439 PARAMETER Experiment Name: At_Roots__P Parameter: Age (day) Value: 14 vs. 21
  misc_feature: MA Experiment 20000439 PARAMETER Experiment Name: At_Roots__P Parameter: Organism Value: A. thaliana
  misc_feature: MA Experiment 20000439 PARAMETER Experiment Name: At_Roots__P Parameter: Tissue Value: Roots vs. Whole Plant
  misc_feature: MA Experiment ID: 20001451 Result: Up-regulated in Transcription
  misc_feature: MA Experiment 20001451 PARAMETER Experiment Name: At_Far-red-induction_P Parameter: Age (day) Value: 7
  misc_feature: MA Experiment 20001451 PARAMETER Experiment Name: At_Far-red-induction_P Parameter: Light Value: Far-red vs. White
  misc_feature: MA Experiment 20001451 PARAMETER Experiment Name: At_Far-red-induction_P Parameter: Organism Value: A. thaliana
  misc_feature: MA Experiment 20001451 PARAMETER Experiment Name: At_Far-red-induction_P Parameter: Plant Line Value: Columbia
  misc_feature: MA Experiment 20001451 PARAMETER Experiment Name: At_Far-red-induction_P Parameter: Timepoint (hr) Value: 24
  misc_feature: MA Experiment 20001451 PARAMETER Experiment Name: At_Far-red-induction_P Parameter: Tissue Value: Whole Plant

SEQ ID NO: 94703 - protein, 566 aa, Arabidopsis thaliana; identical to SEQ ID NO: 90947
  peptide (1)..(566): Ceres Seq. ID no. 12725829
  misc_feature (272)..(306): Pfam Name: PPR repeat Pfam Description: PPR repeat
  misc_feature (1)..(566): Homolog of NCBI NO: 7487907 NR Description: hypothetical protein YUP8H12R.30 - Arabidopsis >gi|3152594|gb|AAC17075.1| Contains repeats similar to RECA gb|L26100 from Acinetobacter calcoaceticus. [Arabidopsis
  misc_feature (1)..(566): Homolog of NCBI NO: 30699392 NR Description: pentatricopeptide (PPR) repeat-containing protein
  misc_feature (77)..(559): Homolog of NCBI NO: 15218325 NR Description: hypothetical protein; protein id: At1g09900.1
  misc_feature (76)..(565): Homolog of NCBI NO: 18397002 NR Description: expressed protein; protein id: At3g04760.1, by cDNA: gi_15810358 [Arabidopsis thaliana] hypothetical protein [Arabidopsis thaliana]
  misc_feature (52)..(545): Homolog of NCBI NO: 34910106 NR Description: B1100D10.28 [Oryza sativa (japonica
  misc_feature (132)..(550): Homolog of NCBI NO: 38605763 NR Description: OSJNBa0044K18.6 [Oryza sativa (japonica
  misc_feature (87)..(551): Homolog of NCBI NO: 34015232 NR Description: putative fertility restorer [Oryza sativa
  misc_feature (25)..(538): Homolog of NCBI NO: 9502388 NR Description: T12C24.15 [Arabidopsis thaliana]
  misc_feature (25)..(538): Homolog of NCBI NO: 18391414 NR Description: expressed protein; protein id: At1g12620.1, by cDNA: gi_13605504 [Arabidopsis thaliana] At1g12620/T12C24_25 [Arabidopsis thaliana]
  misc_feature (96)..(538): Homolog of NCBI NO: 25518293 NR Description: hypothetical protein F13K23.2 - Arabidopsis >gi|8698724|gb|AAF78482.1|AC012187_2 Contains similarity to an protein F16M19.7 gi|6598837 from Arabidopsis thaliana BAC

SEQ ID NO: 94704 - protein, 445 aa, Arabidopsis thaliana; identical to SEQ ID NO: 90948
  peptide (1)..(445): Ceres Seq. ID no. 12725830
  misc_feature (151)..(185): Pfam Name: PPR repeat Pfam Description: PPR repeat
  misc_feature (1)..(445): Homolog of NCBI NO: 30699392 NR Description: pentatricopeptide (PPR) repeat-containing protein
  misc_feature (1)..(445): Homolog of NCBI NO: 7487907 NR Description: hypothetical protein YUP8H12R.30 - Arabidopsis >gi|3152594|gb|AAC17075.1| Contains repeats similar to RECA gb|L26100 from Acinetobacter calcoaceticus. [Arabidopsis
  misc_feature (1)..(438): Homolog of NCBI NO: 15218325 NR Description: hypothetical protein; protein id: At1g09900.1
  misc_feature (1)..(444): Homolog of NCBI NO: 18397002 NR Description: expressed protein; protein id: At3g04760.1, by cDNA: gi_15810358 [Arabidopsis thaliana] hypothetical protein [Arabidopsis thaliana]
  misc_feature (1)..(424): Homolog of NCBI NO: 34910106 NR Description: B1100D10.28 [Oryza sativa (japonica
  misc_feature (11)..(429): Homolog of NCBI NO: 38605763 NR Description: OSJNBa0044K18.6 [Oryza sativa (japonica
  misc_feature (1)..(430): Homolog of NCBI NO: 34015232 NR Description: putative fertility restorer [Oryza sativa
  misc_feature (1)..(417): Homolog of NCBI NO: 9502388 NR Description: T12C24.15 [Arabidopsis thaliana]
  misc_feature (1)..(417): Homolog of NCBI NO: 18391414 NR Description: expressed protein; protein id: At1g12620.1, by cDNA: gi_13605504 [Arabidopsis thaliana] At1g12620/T12C24_25 [Arabidopsis thaliana]
  misc_feature (1)..(417): Homolog of NCBI NO: 25518293 NR Description: hypothetical protein F13K23.2 - Arabidopsis >gi|8698724|gb|AAF78482.1|AC012187_2 Contains similarity to an protein F16M19.7 gi|6598837 from Arabidopsis thaliana BAC

SEQ ID NO: 94705 - protein, 416 aa, Arabidopsis thaliana; identical to SEQ ID NO: 90949
  peptide (1)..(416): Ceres Seq. ID no. 12725831
  misc_feature (122)..(156): Pfam Name: PPR repeat Pfam Description: PPR repeat
  misc_feature (1)..(416): Homolog of NCBI NO: 30699392 NR Description: pentatricopeptide (PPR) repeat-containing protein
  misc_feature (1)..(416): Homolog of NCBI NO: 7487907 NR Description: hypothetical protein YUP8H12R.30 - Arabidopsis >gi|3152594|gb|AAC17075.1| Contains repeats similar to RECA gb|L26100 from Acinetobacter calcoaceticus. [Arabidopsis
  misc_feature (1)..(409): Homolog of NCBI NO: 15218325 NR Description: hypothetical protein; protein id: At1g09900.1
  misc_feature (1)..(415): Homolog of NCBI NO: 18397002 NR Description: expressed protein; protein id: At3g04760.1, by cDNA: gi_15810358 [Arabidopsis thaliana] hypothetical protein [Arabidopsis thaliana]
  misc_feature (1)..(395): Homolog of NCBI NO: 34910106 NR Description: B1100D10.28 [Oryza sativa (japonica
  misc_feature (1)..(400): Homolog of NCBI NO: 38605763 NR Description: OSJNBa0044K18.6 [Oryza sativa (japonica
  misc_feature (1)..(401): Homolog of NCBI NO: 34015232 NR Description: putative fertility restorer [Oryza sativa
  misc_feature (1)..(388): Homolog of NCBI NO: 9502388 NR Description: T12C24.15 [Arabidopsis thaliana]
  misc_feature (1)..(388): Homolog of NCBI NO: 18391414 NR Description: expressed protein; protein id: At1g12620.1, by cDNA: gi_13605504 [Arabidopsis thaliana] At1g12620/T12C24_25 [Arabidopsis thaliana]
  misc_feature (1)..(388): Homolog of NCBI NO: 25518293 NR Description: hypothetical protein F13K23.2 - Arabidopsis >gi|8698724|gb|AAF78482.1|AC012187_2 Contains similarity to an protein F16M19.7 gi|6598837 from Arabidopsis thaliana BAC

SEQ ID NO: 94706 - DNA, 936 bp, Arabidopsis thaliana; identical to SEQ ID NO: 90950
  misc_feature (1)..(936): Ceres Seq. ID no. 12725836
  misc_feature: MA Experiment ID: 20000179 Result: Down-regulated in Transcription
  misc_feature: MA Experiment 20000179 PARAMETER Experiment Name: At_Germinating_Seeds_P Parameter: Age (hr) Value: 6 vs. 0
  misc_feature: MA Experiment 20000179 PARAMETER Experiment Name: At_Germinating_Seeds_P Parameter: Tissue Value: Germinating Seeds
  misc_feature: MA Experiment ID: 20000180 Result: Down-regulated in Transcription
  misc_feature: MA Experiment 20000180 PARAMETER Experiment Name: At_Germinating_Seeds_P Parameter: Age (hr) Value: 24 vs. 0
  misc_feature: MA Experiment 20000180 PARAMETER Experiment Name: At_Germinating_Seeds_P Parameter: Tissue Value: Germinating Seeds
  misc_feature: MA Experiment ID: 20000227 Result: Up-regulated in Transcription
  misc_feature: MA Experiment 20000227 PARAMETER Experiment Name: At_Root-Tips-vs-Tops_P Parameter: Tissue Value: Root Tips vs. Root Tops
  misc_feature: MA Experiment ID: 20000234 Result: Up-regulated in Transcription
  misc_feature: MA Experiment 20000234 PARAMETER Experiment Name: At_Siliques_P Parameter: Age (day) Value: 21
  misc_feature: MA Experiment 20000234 PARAMETER Experiment Name: At_Siliques_P Parameter: Organism Value: A. thaliana
  misc_feature: MA Experiment 20000234 PARAMETER Experiment Name: At_Siliques_P Parameter: Plant Line Value: WS
  misc_feature: MA Experiment 20000234 PARAMETER Experiment Name: At_Siliques_P Parameter: Tissue Value: Less Than 5mm Siliques vs. Whole Plant
  misc_feature: MA Experiment ID: 20000264 Result: Up-regulated in Transcription
  misc_feature: MA Experiment 20000264 PARAMETER Experiment Name: At_Open_Flower_P Parameter: Age (day) Value: 21
  misc_feature: MA Experiment 20000264 PARAMETER Experiment Name: At_Open_Flower_P Parameter: Plant Line Value: WS
  misc_feature: MA Experiment 20000264 PARAMETER Experiment Name: At_Open_Flower_P Parameter: Tissue Value: Open Flower vs. Whole Plant
  misc_feature: MA Experiment ID: 20000265 Result: Up-regulated in Transcription
  misc_feature: MA Experiment 20000265 PARAMETER Experiment Name: At_Open_Flower_P Parameter: Age (day) Value: 21
  misc_feature: MA Experiment 20000265 PARAMETER Experiment Name: At_Open_Flower_P Parameter: Plant Line Value: WS
  misc_feature: MA Experiment 20000265 PARAMETER Experiment Name: At_Open_Flower_P Parameter: Tissue Value: Closed Flower vs. Whole Plant
  misc_feature: MA Experiment ID: 20000439 Result: Up-regulated in Transcription
  misc_feature: MA Experiment 20000439 PARAMETER Experiment Name: At_Roots__P Parameter: Age (day) Value: 14 vs. 21
  misc_feature: MA Experiment 20000439 PARAMETER Experiment Name: At_Roots__P Parameter: Organism Value: A. thaliana
  misc_feature: MA Experiment 20000439 PARAMETER Experiment Name: At_Roots__P Parameter: Tissue Value: Roots vs. Whole Plant
  misc_feature: MA Experiment ID: 20001458 Result: Up-regulated in Transcription
  misc_feature: MA Experiment 20001458 PARAMETER Experiment Name: At_50mM_NH4NO3_L-to-H_P Parameter: Age (day) Value: Undefined
  misc_feature: MA Experiment 20001458 PARAMETER Experiment Name: At_50mM_NH4NO3_L-to-H_P Parameter: Organism Value: Undefined
  misc_feature: MA Experiment 20001458 PARAMETER Experiment Name: At_50mM_NH4NO3_L-to-H_P Parameter: Plant Line Value: Undefined
  misc_feature: MA Experiment 20001458 PARAMETER Experiment Name: At_50mM_NH4NO3_L-to-H_P Parameter: Timepoint (hr) Value: 2
  misc_feature: MA Experiment 20001458 PARAMETER Experiment Name: At_50mM_NH4NO3_L-to-H_P Parameter: Tissue Value: Siliques
  misc_feature: MA Experiment 20001458 PARAMETER Experiment Name: At_50mM_NH4NO3_L-to-H_P Parameter: Treatment Value: 50mM NH4NO3 vs. 100mM Manitol
  misc_feature: MA Experiment ID: 20001557 Result: Up-regulated in Transcription
  misc_feature: MA Experiment 20001557 PARAMETER Experiment Name: At_Drought_Soil_Dry_P Parameter: Age (day) Value: 27
  misc_feature: MA Experiment 20001557 PARAMETER Experiment Name: At_Drought_Soil_Dry_P Parameter: Organism Value: A. thaliana
  misc_feature: MA Experiment 20001557 PARAMETER Experiment Name: At_Drought_Soil_Dry_P Parameter: Plant Line Value: WS
  misc_feature: MA Experiment 20001557 PARAMETER Experiment Name: At_Drought_Soil_Dry_P Parameter: Post Timepoint (hr) Value: 3
  misc_feature: MA Experiment 20001557 PARAMETER Experiment Name: At_Drought_Soil_Dry_P Parameter: Post-Treatment Value: Re-Water vs. No Drought
  misc_feature: MA Experiment 20001557 PARAMETER Experiment Name: At_Drought_Soil_Dry_P Parameter: Timepoint (day) Value: 13
  misc_feature: MA Experiment 20001557 PARAMETER Experiment Name: At_Drought_Soil_Dry_P Parameter: Treatment Value: Drought vs. No Drought
  misc_feature: MA Experiment ID: 20001558 Result: Up-regulated in Transcription
  misc_feature: MA Experiment 20001558 PARAMETER Experiment Name: At_Drought_Soil_Dry_P Parameter: Age (day) Value: 27
  misc_feature: MA Experiment 20001558 PARAMETER Experiment Name: At_Drought_Soil_Dry_P Parameter: Organism Value: A. thaliana
  misc_feature: MA Experiment 20001558 PARAMETER Experiment Name: At_Drought_Soil_Dry_P Parameter: Plant Line Value: WS
  misc_feature: MA Experiment 20001558 PARAMETER Experiment Name: At_Drought_Soil_Dry_P Parameter: Post Timepoint (hr) Value: 6
  misc_feature: MA Experiment 20001558 PARAMETER Experiment Name: At_Drought_Soil_Dry_P Parameter: Post-Treatment Value: Re-Water vs. No Drought
  misc_feature: MA Experiment 20001558 PARAMETER Experiment Name: At_Drought_Soil_Dry_P Parameter: Timepoint (day) Value: 13
  misc_feature: MA Experiment 20001558 PARAMETER Experiment Name: At_Drought_Soil_Dry_P Parameter: Treatment Value: Drought vs. No Drought
  misc_feature: MA Experiment ID: 20001560 Result: Up-regulated in Transcription
  misc_feature: MA Experiment 20001560 PARAMETER Experiment Name: At_Drought_Soil_Dry_P Parameter: Age (day) Value: 28
  misc_feature: MA Experiment 20001560 PARAMETER Experiment Name: At_Drought_Soil_Dry_P Parameter: Organism Value: A. thaliana
  misc_feature: MA Experiment 20001560 PARAMETER Experiment Name: At_Drought_Soil_Dry_P Parameter: Plant Line Value: WS
  misc_feature: MA Experiment 20001560 PARAMETER Experiment Name: At_Drought_Soil_Dry_P Parameter: Post Timepoint (hr) Value: None
  misc_feature: MA Experiment 20001560 PARAMETER Experiment Name: At_Drought_Soil_Dry_P Parameter: Post-Treatment Value: None
  misc_feature: MA Experiment 20001560 PARAMETER Experiment Name: At_Drought_Soil_Dry_P Parameter: Timepoint (day) Value: 14
  misc_feature: MA Experiment 20001560 PARAMETER Experiment Name: At_Drought_Soil_Dry_P Parameter: Treatment Value: Drought vs. No Drought
  misc_feature: MA Experiment ID: 20001757 Result: Up-regulated in Transcription
  misc_feature: MA Experiment 20001757 PARAMETER Experiment Name: At_50mM_NH4NO3_L-to-H_P Parameter: Timepoint (hr) Value: 6
  misc_feature: MA Experiment 20001757 PARAMETER Experiment Name: At_50mM_NH4NO3_L-to-H_P Parameter: Tissue Value: Leaf
  misc_feature: MA Experiment 20001757 PARAMETER Experiment Name: At_50mM_NH4NO3_L-to-H_P Parameter: Treatment Value: 50mM NH4NO3 vs 100mM Mannitol

SEQ ID NO: 94707 - protein, 311 aa, Arabidopsis thaliana; identical to SEQ ID NO: 90951
  peptide (1)..(311): Ceres Seq. ID no. 12725837
  misc_feature (150)..(193): Pfam Name: CBF/Mak21 family Pfam Description: CBF/Mak21 family
  misc_feature (1)..(311): Homolog of NCBI NO: 7487900 NR Description: hypothetical protein YUP8H12R.24 - Arabidopsis >gi|3152566|gb|AAC17047.1| Similar to hypothetical protein
  misc_feature (1)..(311): Homolog of NCBI NO: 15219298 NR Description: unknown protein; protein id: At1g79140.1
  misc_feature (30)..(247): Homolog of NCBI NO: 7208452 NR Description: unknown [Mus musculus]
  misc_feature (30)..(247): Homolog of NCBI NO: 23956108 NR Description: cDNA sequence AF233884; cDNA sequence, AF233884 musculus] >gi|18389431|dbj|BAB84193.1| AD24 [Mus musculus]
  misc_feature (30)..(247): Homolog of NCBI NO: 34877840 NR Description: similar to AD24 [Rattus norvegicus]
  misc_feature (30)..(239): Homolog of NCBI NO: 10439934 NR Description: unnamed protein product [Homo sapiens]
  misc_feature (30)..(261): Homolog of NCBI NO: 14039964 NR Description: hypothetical protein 1-2 [Cricetulus griseus]
  misc_feature (30)..(239): Homolog of NCBI NO: 10434534 NR Description: unnamed protein product [Homo sapiens]
  misc_feature (30)..(239): Homolog of NCBI NO: 20806097 NR Description: AD24 protein [Homo sapiens] bA146P21.2 (novel protein) [Homo sapiens] AD24 [Homo sapiens] >gi|29436383|gb|AAH49850.1| AD24 protein
  misc_feature (34)..(227): Homolog of NCBI NO: 21358345 NR Description: CG1234-PA [Drosophila melanogaster]

SEQ ID NO: 94708 - protein, 307 aa, Arabidopsis thaliana; identical to SEQ ID NO: 90952
  peptide (1)..(307): Ceres Seq. ID no. 12725838
  misc_feature (146)..(189): Pfam Name: CBF/Mak21 family Pfam Description: CBF/Mak21 family
  misc_feature (1)..(307): Homolog of NCBI NO: 7487900 NR Description: hypothetical protein YUP8H12R.24 - Arabidopsis >gi|3152566|gb|AAC17047.1| Similar to hypothetical protein
  misc_feature (1)..(307): Homolog of NCBI NO: 15219298 NR Description: unknown protein; protein id: At1g79140.1
  misc_feature (26)..(243): Homolog of NCBI NO: 7208452 NR Description: unknown [Mus musculus]
  misc_feature (26)..(243): Homolog of NCBI NO: 23956108 NR Description: cDNA sequence AF233884; cDNA sequence, AF233884 musculus] >gi|18389431|dbj|BAB84193.1| AD24 [Mus musculus]
  misc_feature (26)..(243): Homolog of NCBI NO: 34877840 NR Description: similar to AD24 [Rattus norvegicus]
  misc_feature (26)..(235): Homolog of NCBI NO: 10439934 NR Description: unnamed protein product [Homo sapiens]
  misc_feature (26)..(257): Homolog of NCBI NO: 14039964 NR Description: hypothetical protein 1-2 [Cricetulus griseus]
  misc_feature (26)..(235): Homolog of NCBI NO: 10434534 NR Description: unnamed protein product [Homo sapiens]
  misc_feature (26)..(235): Homolog of NCBI NO: 20806097 NR Description: AD24 protein [Homo sapiens] bA146P21.2 (novel protein) [Homo sapiens] AD24 [Homo sapiens] >gi|29436383|gb|AAH49850.1| AD24 protein
  misc_feature (30)..(223): Homolog of NCBI NO: 21358345 NR Description: CG1234-PA [Drosophila melanogaster]

SEQ ID NO: 94709 - protein, 266 aa, Arabidopsis thaliana; identical to SEQ ID NO: 90953
  peptide (1)..(266): Ceres Seq. ID no. 12725839
  misc_feature (105)..(148): Pfam Name: CBF/Mak21 family Pfam Description: CBF/Mak21 family
  misc_feature (1)..(266): Homolog of NCBI NO: 7487900 NR Description: hypothetical protein YUP8H12R.24 - Arabidopsis >gi|3152566|gb|AAC17047.1| Similar to hypothetical protein
  misc_feature (1)..(266): Homolog of NCBI NO: 15219298 NR Description: unknown protein; protein id: At1g79140.1
  misc_feature (1)..(202): Homolog of NCBI NO: 7208452 NR Description: unknown [Mus musculus]
  misc_feature (1)..(202): Homolog of NCBI NO: 23956108 NR Description: cDNA sequence AF233884; cDNA sequence, AF233884 musculus] >gi|18389431|dbj|BAB84193.1| AD24 [Mus musculus]
  misc_feature (1)..(202): Homolog of NCBI NO: 34877840 NR Description: similar to AD24 [Rattus norvegicus]
  misc_feature (1)..(194): Homolog of NCBI NO: 10439934 NR Description: unnamed protein product [Homo sapiens]
  misc_feature (1)..(216): Homolog of NCBI NO: 14039964 NR Description: hypothetical protein 1-2 [Cricetulus griseus]
  misc_feature (1)..(194): Homolog of NCBI NO: 10434534 NR Description: unnamed protein product [Homo sapiens]
  misc_feature (1)..(194): Homolog of NCBI NO: 20806097 NR Description: AD24 protein [Homo sapiens] bA146P21.2 (novel protein) [Homo sapiens] AD24 [Homo sapiens] >gi|29436383|gb|AAH49850.1| AD24 protein
  misc_feature (1)..(182): Homolog of NCBI NO: 21358345 NR Description: CG1234-PA [Drosophila melanogaster]

SEQ ID NO: 94710 - DNA, 1143 bp, Arabidopsis thaliana; identical to SEQ ID NO: 90954
  misc_feature (1)..(1143): Ceres Seq. ID no. 12725850
  misc_feature: MA Experiment ID: 20000185 Result: Up-regulated in Transcription
  misc_feature: MA Experiment 20000185 PARAMETER Experiment Name: At_Roots__P Parameter: Age (day) Value: 7 vs. 21
  misc_feature: MA Experiment 20000185 PARAMETER Experiment Name: At_Roots__P Parameter: Organism Value: A. thaliana
  misc_feature: MA Experiment 20000185 PARAMETER Experiment Name: At_Roots__P Parameter: Tissue Value: Roots vs. Whole Plant
  misc_feature: MA Experiment ID: 20000439 Result: Up-regulated in Transcription
  misc_feature: MA Experiment 20000439 PARAMETER Experiment Name: At_Roots__P Parameter: Age (day) Value: 14 vs. 21
  misc_feature: MA Experiment 20000439 PARAMETER Experiment Name: At_Roots__P Parameter: Organism Value: A. thaliana
  misc_feature: MA Experiment 20000439 PARAMETER Experiment Name: At_Roots__P Parameter: Tissue Value: Roots vs. Whole Plant

SEQ ID NO: 94711 - protein, 380 aa, Arabidopsis thaliana; identical to SEQ ID NO: 90955
  peptide (1)..(380): Ceres Seq. ID no. 12725851
  misc_feature (81)..(375): Pfam Name: Pectinesterase Pfam Description: Pectinesterase
  misc_feature (1)..(380): Homolog of NCBI NO: 15240544 NR Description: pectinesterase family; protein id: At5g55590.1 thaliana] >gi|9758593|dbj|BAB09226.1| contains similarity to
  misc_feature (78)..(378): Homolog of NCBI NO: 38345478 NR Description: OSJNBa0010H02.16 [Oryza sativa (japonica
  misc_feature (82)..(380): Homolog of NCBI NO: 34909402 NR Description: putative pectin methylesterase [Oryza sativa
  misc_feature (80)..(378): Homolog of NCBI NO: 15238111 NR Description: pectinesterase family; protein id: At5g47500.1, by cDNA: gi_20856814 [Arabidopsis thaliana] AT5g47500/MNJ7_9 [Arabidopsis thaliana]
  misc_feature (80)..(378): Homolog of NCBI NO: 9758778 NR Description: pectin methylesterase-like [Arabidopsis thaliana]
  misc_feature (86)..(380): Homolog of NCBI NO: 15241163 NR Description: pectinesterase family; protein id: At5g19730.1, by cDNA: gi_17529289, supported by cDNA: gi_20465498 [Arabidopsis >gi|17529290|gb|AAL38872.1| putative pectin methylesterase
  misc_feature (76)..(379): Homolog of NCBI NO: 15220471 NR Description: pectinesterase family; protein id: At1g05310.1
  misc_feature (81)..(379): Homolog of NCBI NO: 15228023 NR Description: pectinesterase family; protein id: At2g36710.1
  misc_feature (76)..(379): Homolog of NCBI NO: 25325338 NR Description: hypothetical protein [imported] - Arabidopsis >gi|2388565|gb|AAB71446.1| Similar to Prunus pectinesterase
  misc_feature (81)..(379): Homolog of NCBI NO: 27754550 NR Description: putative pectinesterase family protein

SEQ ID NO: 94712 - protein, 363 aa, Arabidopsis thaliana; identical to SEQ ID NO: 90956
  peptide (1)..(363): Ceres Seq. ID no. 12725852
  misc_feature (64)..(358): Pfam Name: Pectinesterase Pfam Description: Pectinesterase
  misc_feature (1)..(363): Homolog of NCBI NO: 15240544 NR Description: pectinesterase family; protein id: At5g55590.1 thaliana] >gi|9758593|dbj|BAB09226.1| contains similarity to
  misc_feature (61)..(361): Homolog of NCBI NO: 38345478 NR Description: OSJNBa0010H02.16 [Oryza sativa (japonica
  misc_feature (65)..(363): Homolog of NCBI NO: 34909402 NR Description: putative pectin methylesterase [Oryza sativa
  misc_feature (63)..(361): Homolog of NCBI NO: 15238111 NR Description: pectinesterase family; protein id: At5g47500.1, by cDNA: gi_20856814 [Arabidopsis thaliana] AT5g47500/MNJ7_9 [Arabidopsis thaliana]
  misc_feature (63)..(361): Homolog of NCBI NO: 9758778 NR Description: pectin methylesterase-like [Arabidopsis thaliana]
  misc_feature (69)..(363): Homolog of NCBI NO: 15241163 NR Description: pectinesterase family; protein id: At5g19730.1, by cDNA: gi_17529289, supported by cDNA: gi_20465498 [Arabidopsis >gi|17529290|gb|AAL38872.1| putative pectin methylesterase
  misc_feature (59)..(362): Homolog of NCBI NO: 15220471 NR Description: pectinesterase family; protein id: At1g05310.1
  misc_feature (64)..(362): Homolog of NCBI NO: 15228023 NR Description: pectinesterase family; protein id: At2g36710.1
  misc_feature (59)..(362): Homolog of NCBI NO: 25325338 NR Description: hypothetical protein [imported] - Arabidopsis >gi|2388565|gb|AAB71446.1| Similar to Prunus pectinesterase
  misc_feature (64)..(362): Homolog of NCBI NO: 27754550 NR Description: putative pectinesterase family protein

SEQ ID NO: 94713 - protein, 280 aa, Arabidopsis thaliana; identical to SEQ ID NO: 90957
  peptide (1)..(280): Ceres Seq. ID no. 12725853
  misc_feature (1)..(275): Pfam Name: Pectinesterase Pfam Description: Pectinesterase
  misc_feature (1)..(280): Homolog of NCBI NO: 15240544 NR Description: pectinesterase family; protein id: At5g55590.1 thaliana] >gi|9758593|dbj|BAB09226.1| contains similarity to
  misc_feature (1)..(278): Homolog of NCBI NO: 38345478 NR Description: OSJNBa0010H02.16 [Oryza sativa (japonica
  misc_feature (1)..(280): Homolog of NCBI NO: 34909402 NR Description: putative pectin methylesterase [Oryza sativa
  misc_feature (1)..(278): Homolog of NCBI NO: 15238111 NR Description: pectinesterase family; protein id: At5g47500.1, by cDNA: gi_20856814 [Arabidopsis thaliana] AT5g47500/MNJ7_9 [Arabidopsis thaliana]
  misc_feature (1)..(278): Homolog of NCBI NO: 9758778 NR Description: pectin methylesterase-like [Arabidopsis thaliana]
  misc_feature (1)..(280): Homolog of NCBI NO: 15241163 NR Description: pectinesterase family; protein id: At5g19730.1, by cDNA: gi_17529289, supported by cDNA: gi_20465498 [Arabidopsis >gi|17529290|gb|AAL38872.1| putative pectin methylesterase
  misc_feature (1)..(279): Homolog of NCBI NO: 15220471 NR Description: pectinesterase family; protein id: At1g05310.1
  misc_feature (1)..(279): Homolog of NCBI NO: 15228023 NR Description: pectinesterase family; protein id: At2g36710.1
  misc_feature (1)..(279): Homolog of NCBI NO: 25325338 NR Description: hypothetical protein [imported] - Arabidopsis >gi|2388565|gb|AAB71446.1| Similar to Prunus pectinesterase
  misc_feature (1)..(279): Homolog of NCBI NO: 27754550 NR Description: putative pectinesterase family protein

SEQ ID NO: 94714 - DNA, 944 bp, Arabidopsis thaliana; identical to SEQ ID NO: 90958
  misc_feature (1)..(944): Ceres Seq. ID no. 12725866
  misc_feature: MA Experiment ID: 20001557 Result: Down-regulated in Transcription
  misc_feature: MA Experiment 20001557 PARAMETER Experiment Name: At_Drought_Soil_Dry_P Parameter: Age (day) Value: 27
  misc_feature: MA Experiment 20001557 PARAMETER Experiment Name: At_Drought_Soil_Dry_P Parameter: Organism Value: A. thaliana
  misc_feature: MA Experiment 20001557 PARAMETER Experiment Name: At_Drought_Soil_Dry_P Parameter: Plant Line Value: WS
  misc_feature: MA Experiment 20001557 PARAMETER Experiment Name: At_Drought_Soil_Dry_P Parameter: Post Timepoint (hr) Value: 3
  misc_feature: MA Experiment 20001557 PARAMETER Experiment Name: At_Drought_Soil_Dry_P Parameter: Post-Treatment Value: Re-Water vs. No Drought
  misc_feature: MA Experiment 20001557 PARAMETER Experiment Name: At_Drought_Soil_Dry_P Parameter: Timepoint (day) Value: 13
  misc_feature: MA Experiment 20001557 PARAMETER Experiment Name: At_Drought_Soil_Dry_P Parameter: Treatment Value: Drought vs. No Drought
  misc_feature: MA Experiment ID: 20001558 Result: Down-regulated in Transcription
  misc_feature: MA Experiment 20001558 PARAMETER Experiment Name: At_Drought_Soil_Dry_P Parameter: Age (day) Value: 27
  misc_feature: MA Experiment 20001558 PARAMETER Experiment Name: At_Drought_Soil_Dry_P Parameter: Organism Value: A. thaliana
  misc_feature: MA Experiment 20001558 PARAMETER Experiment Name: At_Drought_Soil_Dry_P Parameter: Plant Line Value: WS
  misc_feature: MA Experiment 20001558 PARAMETER Experiment Name: At_Drought_Soil_Dry_P Parameter: Post Timepoint (hr) Value: 6
  misc_feature: MA Experiment 20001558 PARAMETER Experiment Name: At_Drought_Soil_Dry_P Parameter: Post-Treatment Value: Re-Water vs. No Drought
  misc_feature: MA Experiment 20001558 PARAMETER Experiment Name: At_Drought_Soil_Dry_P Parameter: Timepoint (day) Value: 13
  misc_feature: MA Experiment 20001558 PARAMETER Experiment Name: At_Drought_Soil_Dry_P Parameter: Treatment Value: Drought vs. No Drought

SEQ ID NO: 94715 - protein, 158 aa, Arabidopsis thaliana; identical to SEQ ID NO: 90959
  peptide (1)..(158): Ceres Seq. ID no. 12725867
  misc_feature (47)..(158): Homolog of NCBI NO: 9758615 NR Description: gene_id:MDF20.25~ref|NP_011524.1~similar to
  misc_feature (1)..(158): Homolog of NCBI NO: 22327861 NR Description: putative protein; protein id: At5g55810.1, by cDNA: gi_17473554 [Arabidopsis thaliana] unknown protein [Arabidopsis thaliana]
  misc_feature (50)..(155): Homolog of NCBI NO: 20070321 NR Description: nicotinamide nucleotide adenylyltransferase; NMN [Homo sapiens] >gi|28373465|pdb|1KQN|A Chain A, Crystal Structure NmnNAMN ADENYLYLTRANSFERASE COMPLEXED With Nad NmnNAMN
  misc_feature (1)..(31): Homolog of NCBI NO: 20070321 NR Description: nicotinamide nucleotide adenylyltransferase; NMN [Homo sapiens] >gi|28373465|pdb|1KQN|A Chain A, Crystal Structure NmnNAMN ADENYLYLTRANSFERASE COMPLEXED With Nad NmnNAMN
  misc_feature (50)..(155): Homolog of NCBI NO: 18652051 NR Description: nicotinamide mononucleotide adenylyl transferase sapiens] >gi|18652057|gb|AAL76935.1| nicotinamide mononucleotide
  misc_feature (1)..(31): Homolog of NCBI NO: 18652051 NR Description: nicotinamide mononucleotide adenylyl transferase sapiens] >gi|18652057|gb|AAL76935.1| nicotinamide mononucleotide
  misc_feature (50)..(155): Homolog of NCBI NO: 10438792 NR Description: unnamed protein product [Homo sapiens]
  misc_feature (1)..(31): Homolog of NCBI NO: 10438792 NR Description: unnamed protein product [Homo sapiens]
  misc_feature (50)..(155): Homolog of NCBI NO: 21730493 NR Description: Chain A, Crystal Structure Of Nuclear Human Mononucleotide Adenylyltransferase
  misc_feature (50)..(155): Homolog of NCBI NO: 22218688 NR Description: Chain A, Crystal Structure Of Human Nicotinamide Adenylyltransferase In Complex With Nmn >gi|22218689|pdb|1GZU|B B, Crystal Structure Of Human Nicotinamide Mononucleotide

SEQ ID NO: 94716 - protein, 146 aa, Arabidopsis thaliana; identical to SEQ ID NO: 90960
  peptide (1)..(146): Ceres Seq. ID no. 12725868
  misc_feature (35)..(146): Homolog of NCBI NO: 9758615 NR Description: gene_id:MDF20.25~ref|NP_011524.1~similar to
  misc_feature (1)..(146): Homolog of NCBI NO: 22327861 NR Description: putative protein; protein id: At5g55810.1, by cDNA: gi_17473554 [Arabidopsis thaliana] unknown protein [Arabidopsis thaliana]
  misc_feature (38)..(143): Homolog of NCBI NO: 20070321 NR Description: nicotinamide nucleotide adenylyltransferase; NMN [Homo sapiens] >gi|28373465|pdb|1KQN|A Chain A, Crystal Structure NmnNAMN ADENYLYLTRANSFERASE COMPLEXED With Nad NmnNAMN
  misc_feature (1)..(19): Homolog of NCBI NO: 20070321 NR Description: nicotinamide nucleotide adenylyltransferase; NMN [Homo sapiens] >gi|28373465|pdb|1KQN|A Chain A, Crystal Structure NmnNAMN ADENYLYLTRANSFERASE COMPLEXED With Nad NmnNAMN
  misc_feature (38)..(143): Homolog of NCBI NO: 18652051 NR Description: nicotinamide mononucleotide adenylyl transferase sapiens] >gi|18652057|gb|AAL76935.1| nicotinamide mononucleotide
  misc_feature (1)..(19): Homolog of NCBI NO: 18652051 NR Description: nicotinamide mononucleotide adenylyl transferase sapiens] >gi|18652057|gb|AAL76935.1| nicotinamide mononucleotide
  misc_feature (38)..(143): Homolog of NCBI NO: 10438792 NR Description: unnamed protein product [Homo sapiens]
  misc_feature (1)..(19): Homolog of NCBI NO: 10438792 NR Description: unnamed protein product [Homo sapiens]
  misc_feature (38)..(143): Homolog of NCBI NO: 21730493 NR Description: Chain A, Crystal Structure Of Nuclear Human Mononucleotide Adenylyltransferase
  misc_feature (38)..(143): Homolog of NCBI NO: 22218688 NR Description: Chain A, Crystal Structure Of Human Nicotinamide Adenylyltransferase In Complex With Nmn >gi|22218689|pdb|1GZU|B B, Crystal Structure Of Human Nicotinamide Mononucleotide

SEQ ID NO: 94717 - protein, 107 aa, Arabidopsis thaliana; identical to SEQ ID NO: 90961
  peptide (1)..(107): Ceres Seq. ID no. 12725869
  misc_feature (1)..(107): Homolog of NCBI NO: 9758615 NR Description: gene_id:MDF20.25~ref|NP_011524.1~similar to
  misc_feature (1)..(107): Homolog of NCBI NO: 22327861 NR Description: putative protein; protein id: At5g55810.1, by cDNA: gi_17473554 [Arabidopsis thaliana] unknown protein [Arabidopsis thaliana]
  misc_feature (1)..(104): Homolog of NCBI NO: 20070321 NR Description: nicotinamide nucleotide adenylyltransferase; NMN [Homo sapiens] >gi|28373465|pdb|1KQN|A Chain A, Crystal Structure NmnNAMN ADENYLYLTRANSFERASE COMPLEXED With Nad NmnNAMN
  misc_feature (1)..(104): Homolog of NCBI NO: 18652051 NR Description: nicotinamide mononucleotide adenylyl transferase sapiens] >gi|18652057|gb|AAL76935.1| nicotinamide mononucleotide
  misc_feature (1)..(104): Homolog of NCBI NO: 10438792 NR Description: unnamed protein product [Homo sapiens]
  misc_feature (1)..(104): Homolog of NCBI NO: 21730493 NR Description: Chain A, Crystal Structure Of Nuclear Human Mononucleotide Adenylyltransferase
  misc_feature (1)..(104): Homolog of NCBI NO: 22218688 NR Description: Chain A, Crystal Structure Of Human Nicotinamide Adenylyltransferase In Complex With Nmn >gi|22218689|pdb|1GZU|B B, Crystal Structure Of Human Nicotinamide Mononucleotide
  misc_feature (1)..(105): Homolog of NCBI NO: 30580490 NR Description: Nicotinamide mononucleotide adenylyltransferase
  misc_feature (1)..(103): Homolog of NCBI NO: 6321447 NR Description: NAD(+) salvage pathway; Nma2p [Saccharomyces
  misc_feature (1)..(105): Homolog of NCBI NO: 10442021 NR Description: D4COLE1E [Mus musculus]

SEQ ID NO: 94718 - DNA, 2046 bp, Arabidopsis thaliana; identical to SEQ ID NO: 90962
  misc_feature (1)..(2046): Ceres Seq. ID no. 12725870
  misc_feature: MA Experiment ID: 20000171 Result: Up-regulated in Transcription
  misc_feature: MA Experiment 20000171 PARAMETER Experiment Name: At_42deg_Heat_P Parameter: Age (day) Value: 14
  misc_feature: MA Experiment 20000171 PARAMETER Experiment Name: At_42deg_Heat_P Parameter: Organism Value: A. thaliana
  misc_feature: MA Experiment 20000171 PARAMETER Experiment Name: At_42deg_Heat_P Parameter: Plant Line Value: WS
  misc_feature: MA Experiment 20000171 PARAMETER Experiment Name: At_42deg_Heat_P Parameter: Temperature (deg C) Value: 42 vs. 22
  misc_feature: MA Experiment 20000171 PARAMETER Experiment Name: At_42deg_Heat_P Parameter: Timepoint (hr) Value: 1
  misc_feature: MA Experiment 20000171 PARAMETER Experiment Name: At_42deg_Heat_P Parameter: Tissue Value: Aerial

SEQ ID NO: 94719 - protein, 681 aa, Arabidopsis thaliana; identical to SEQ ID NO: 90963
  peptide (1)..(681): Ceres Seq. ID no. 12725871
  misc_feature (320)..(669): Homolog of NCBI NO: 15231802 NR Description: receptor lectin kinase -like protein; protein id:
  misc_feature (25)..(267): Homolog of NCBI NO: 15231802 NR Description: receptor lectin kinase -like protein; protein id:
  misc_feature (33)..(672): Homolog of NCBI NO: 15242646 NR Description: receptor like protein kinase; protein id: supported by cDNA: gi_20260625 [Arabidopsis thaliana]
  misc_feature (295)..(650): Homolog of NCBI NO: 38112429 NR Description: lectin-like receptor kinase 7;3 [Medicago
  misc_feature (23)..(335): Homolog of NCBI NO: 38112429 NR Description: lectin-like receptor kinase 7;3 [Medicago
  misc_feature (24)..(679): Homolog of NCBI NO: 15238300 NR Description: receptor lectin kinase-like protein; protein id:
  misc_feature (338)..(675): Homolog of NCBI NO: 15289871 NR Description: putative receptor protein kinase-like protein
  misc_feature (18)..(267): Homolog of NCBI NO: 15289871 NR Description: putative receptor protein kinase-like protein
  misc_feature (6)..(681): Homolog of NCBI NO: 18411935 NR Description: contains similarity to a protein kinase domain pkinase.hmm, score: 166.20) and to legume lectins beta domain lectin_legB.hmm, score: 139.32); protein id: At4g02410.1,
  misc_feature (26)..(675): Homolog of NCBI NO: 15233300 NR Description: probable serine/threonine-specific protein protein id: At3g55550.1 [Arabidopsis thaliana]

SEQ ID NO: 94720 - protein, 662 aa, Arabidopsis thaliana; identical to SEQ ID NO: 90964
  peptide (1)..(662): Ceres Seq. ID no. 12725872
  misc_feature (301)..(650): Homolog of NCBI NO: 15231802 NR Description: receptor lectin kinase -like protein; protein id:
  misc_feature (6)..(248): Homolog of NCBI NO: 15231802 NR Description: receptor lectin kinase -like protein; protein id:
  misc_feature (14)..(653): Homolog of NCBI NO: 15242646 NR Description: receptor like protein kinase; protein id: supported by cDNA: gi_20260625 [Arabidopsis thaliana]
  misc_feature (276)..(631): Homolog of NCBI NO: 38112429 NR Description: lectin-like receptor kinase 7;3 [Medicago
  misc_feature (4)..(316): Homolog of NCBI NO: 38112429 NR Description: lectin-like receptor kinase 7;3 [Medicago
  misc_feature (5)..(660): Homolog of NCBI NO: 15238300 NR Description: receptor lectin kinase-like protein; protein id:
  misc_feature (319)..(656): Homolog of NCBI NO: 15289871 NR Description: putative receptor protein kinase-like protein
  misc_feature (1)..(248): Homolog of NCBI NO: 15289871 NR Description: putative receptor protein kinase-like protein
  misc_feature (1)..(662): Homolog of NCBI NO: 18411935 NR Description: contains similarity to a protein kinase domain pkinase.hmm, score: 166.20) and to legume lectins beta domain lectin_legB.hmm, score: 139.32); protein id: At4g02410.1,
  misc_feature (7)..(656): Homolog of NCBI NO: 15233300 NR Description: probable serine/threonine-specific protein protein id: At3g55550.1 [Arabidopsis thaliana]

SEQ ID NO: 94721 - protein, 651 aa, Arabidopsis thaliana; identical to SEQ ID NO: 90965
  peptide (1)..(651): Ceres Seq. ID no. 12725873
  misc_feature (290)..(639): Homolog of NCBI NO: 15231802 NR Description: receptor lectin kinase -like protein; protein id:
  misc_feature (1)..(237): Homolog of NCBI NO: 15231802 NR Description: receptor lectin kinase -like protein; protein id:
  misc_feature (3)..(642): Homolog of NCBI NO: 15242646 NR Description: receptor like protein kinase; protein id: supported by cDNA: gi_20260625 [Arabidopsis thaliana]
  misc_feature (265)..(620): Homolog of NCBI NO: 38112429 NR Description: lectin-like receptor kinase 7;3 [Medicago
  misc_feature (1)..(305): Homolog of NCBI NO: 38112429 NR Description: lectin-like receptor kinase 7;3 [Medicago
  misc_feature (1)..(649): Homolog of NCBI NO: 15238300 NR Description: receptor lectin kinase-like protein; protein id:
  misc_feature (308)..(645): Homolog of NCBI NO: 15289871 NR Description: putative receptor protein kinase-like protein
  misc_feature (1)..(237): Homolog of NCBI NO: 15289871 NR Description: putative receptor protein kinase-like protein
  misc_feature (1)..(651): Homolog of NCBI NO: 18411935 NR Description: contains similarity to a protein kinase domain pkinase.hmm, score: 166.20) and to legume lectins beta domain lectin_legB.hmm, score: 139.32); protein id: At4g02410.1,
  misc_feature (1)..(645): Homolog of NCBI NO: 15233300 NR Description: probable serine/threonine-specific protein protein id: At3g55550.1 [Arabidopsis thaliana]

SEQ ID NO: 94722 - DNA, 963 bp, Arabidopsis thaliana; identical to SEQ ID NO: 90966
  misc_feature (1)..(963): Ceres Seq. ID no. 12725903
  misc_feature: MA Experiment ID: 20000171 Result: Down-regulated in Transcription
  misc_feature: MA Experiment 20000171 PARAMETER Experiment Name: At_42deg_Heat_P Parameter: Age (day) Value: 14
  misc_feature: MA Experiment 20000171 PARAMETER Experiment Name: At_42deg_Heat_P Parameter: Organism Value: A. thaliana
  misc_feature: MA Experiment 20000171 PARAMETER Experiment Name: At_42deg_Heat_P Parameter: Plant Line Value: WS
  misc_feature: MA Experiment 20000171 PARAMETER Experiment Name: At_42deg_Heat_P Parameter: Temperature (deg C) Value: 42 vs. 22
  misc_feature: MA Experiment 20000171 PARAMETER Experiment Name: At_42deg_Heat_P Parameter: Timepoint (hr) Value: 1
  misc_feature: MA Experiment 20000171 PARAMETER Experiment Name: At_42deg_Heat_P Parameter: Tissue Value: Aerial
  misc_feature: MA Experiment ID: 20000227 Result: Down-regulated in Transcription
  misc_feature: MA Experiment 20000227 PARAMETER Experiment Name: At_Root-Tips-vs-Tops_P Parameter: Tissue Value: Root Tips vs. Root Tops
  misc_feature: MA Experiment ID: 20000267 Result: Down-regulated in Transcription
  misc_feature: MA Experiment 20000267 PARAMETER Experiment Name: At_Drought_P Parameter: Age (day) Value: 7
  misc_feature: MA Experiment 20000267 PARAMETER Experiment Name: At_Drought_P Parameter: Organism Value: A. thaliana
  misc_feature: MA Experiment 20000267 PARAMETER Experiment Name: At_Drought_P Parameter: Plant Line Value: WS
  misc_feature: MA Experiment 20000267 PARAMETER Experiment Name: At_Drought_P Parameter: Timepoint (hr) Value: 6
  misc_feature: MA Experiment 20000267 PARAMETER Experiment Name: At_Drought_P Parameter: Tissue Value: Whole Plant
  misc_feature: MA Experiment 20000267 PARAMETER Experiment Name: At_Drought_P Parameter: Treatment Value: Drought vs. No Drought
  misc_feature: MA Experiment ID: 20000436 Result: Down-regulated in Transcription
  misc_feature: MA Experiment 20000436 PARAMETER Experiment Name: At_Drought_P Parameter: Age (day) Value: 7
  misc_feature: MA Experiment 20000436 PARAMETER Experiment Name: At_Drought_P Parameter: Organism Value: A. thaliana
  misc_feature: MA Experiment 20000436 PARAMETER Experiment Name: At_Drought_P Parameter: Plant Line Value: WS
  misc_feature: MA Experiment 20000436 PARAMETER Experiment Name: At_Drought_P Parameter: Timepoint (hr) Value: 12
  misc_feature: MA Experiment 20000436 PARAMETER Experiment Name: At_Drought_P Parameter: Tissue Value: Whole Plant
  misc_feature: MA Experiment 20000436 PARAMETER Experiment Name: At_Drought_P Parameter: Treatment Value: Drought vs. No Drought
  misc_feature: MA Experiment ID: 20000437 Result: Down-regulated in Transcription
  misc_feature: MA Experiment 20000437 PARAMETER Experiment Name: At_Drought_P Parameter: Age (day) Value: 8
  misc_feature: MA Experiment 20000437 PARAMETER Experiment Name: At_Drought_P Parameter: Organism Value: A. thaliana
  misc_feature: MA Experiment 20000437 PARAMETER Experiment Name: At_Drought_P Parameter: Plant Line Value: WS
  misc_feature: MA Experiment 20000437 PARAMETER Experiment Name: At_Drought_P Parameter: Timepoint (hr) Value: 24
  misc_feature: MA Experiment 20000437 PARAMETER Experiment Name: At_Drought_P Parameter: Tissue Value: Whole Plant
  misc_feature: MA Experiment 20000437 PARAMETER Experiment Name: At_Drought_P Parameter: Treatment Value: Drought vs. No Drought
  misc_feature: MA Experiment ID: 20000438 Result: Up-regulated in Transcription
  misc_feature: MA Experiment 20000438 PARAMETER Experiment Name: At_Shoots__P Parameter: Age (day) Value: 14
  misc_feature: MA Experiment 20000438 PARAMETER Experiment Name: At_Shoots__P Parameter: Tissue Value: Shoots vs. Whole Plant
  misc_feature: MA Experiment ID: 20000439 Result: Up-regulated in Transcription
  misc_feature: MA Experiment 20000439 PARAMETER Experiment Name: At_Roots__P Parameter: Age (day) Value: 14 vs. 21
  misc_feature: MA Experiment 20000439 PARAMETER Experiment Name: At_Roots__P Parameter: Organism Value: A. thaliana
  misc_feature: MA Experiment 20000439 PARAMETER Experiment Name: At_Roots__P Parameter: Tissue Value: Roots vs. Whole Plant
  misc_feature: MA Experiment ID: 20000451 Result: Up-regulated in Transcription
  misc_feature: MA Experiment 20000451 PARAMETER Experiment Name: At_CS6879_Shoots-Roots_P Parameter: Age (day) Value: 14
  misc_feature: MA Experiment 20000451 PARAMETER Experiment Name: At_CS6879_Shoots-Roots_P Parameter: Organism Value: A. thaliana
  misc_feature: MA Experiment 20000451 PARAMETER Experiment Name: At_CS6879_Shoots-Roots_P Parameter: Plant Line Value: CS6879 vs. WS
  misc_feature: MA Experiment 20000451 PARAMETER Experiment Name: At_CS6879_Shoots-Roots_P Parameter: Tissue Value: Roots
  misc_feature: MA Experiment ID: 20000452 Result: Up-regulated in Transcription
  misc_feature: MA Experiment 20000452 PARAMETER Experiment Name: At_CS6879_Shoots-Roots_P Parameter: Age (day) Value: 14
  misc_feature: MA Experiment 20000452 PARAMETER Experiment Name: At_CS6879_Shoots-Roots_P Parameter: Organism Value: A. thaliana
  misc_feature: MA Experiment 20000452 PARAMETER Experiment Name: At_CS6879_Shoots-Roots_P Parameter: Plant Line Value: CS6879 vs. WS
  misc_feature: MA Experiment 20000452 PARAMETER Experiment Name: At_CS6879_Shoots-Roots_P Parameter: Tissue Value: Shoots
  misc_feature: MA Experiment ID: 20000527 Result: Up-regulated in Transcription
  misc_feature: MA Experiment 20000527 PARAMETER Experiment Name: At_10percent_PEG_P Parameter: Age (day) Value: 20
  misc_feature: MA Experiment 20000527 PARAMETER Experiment Name: At_10percent_PEG_P Parameter: Organism Value: A. thaliana
  misc_feature: MA Experiment 20000527 PARAMETER Experiment Name: At_10percent_PEG_P Parameter: Plant Line Value: WS
  misc_feature: MA Experiment 20000527 PARAMETER Experiment Name: At_10percent_PEG_P Parameter: Timepoint (day) Value: 20
  misc_feature: MA Experiment 20000527 PARAMETER Experiment Name: At_10percent_PEG_P Parameter: Tissue Value: Whole Plant
  misc_feature: MA Experiment 20000527 PARAMETER Experiment Name: At_10percent_PEG_P Parameter: Treatment Value: 10percent PEG vs. No Treatment
  misc_feature: MA Experiment ID: 20000573 Result: Down-regulated in Transcription
  misc_feature: MA Experiment 20000573 PARAMETER Experiment Name: At_100uM_ABA_Mutants__P Parameter: Organism Value: A. thaliana
  misc_feature: MA Experiment 20000573 PARAMETER Experiment Name: At_100uM_ABA_Mutants__P Parameter: Plant Line Value: CS22 vs. Ler wt
  misc_feature: MA Experiment 20000573 PARAMETER Experiment Name: At_100uM_ABA_Mutants__P Parameter: Timepoint (hr) Value: N/A
  misc_feature: MA Experiment 20000573 PARAMETER Experiment Name: At_100uM_ABA_Mutants__P Parameter: Tissue Value: Whole Plant
  misc_feature: MA Experiment 20000573 PARAMETER Experiment Name: At_100uM_ABA_Mutants__P Parameter: Treatment Value: None
  misc_feature: MA Experiment ID: 20001248 Result: Down-regulated in Transcription
  misc_feature: MA Experiment 20001248 PARAMETER Experiment Name: At_Far-red-induction_P Parameter: Age (day) Value: 7
  misc_feature: MA Experiment 20001248 PARAMETER Experiment Name: At_Far-red-induction_P Parameter: Light Value: Far-red vs. White
  misc_feature: MA Experiment 20001248 PARAMETER Experiment Name: At_Far-red-induction_P Parameter: Organism Value: A. thaliana
  misc_feature: MA Experiment 20001248 PARAMETER Experiment Name: At_Far-red-induction_P Parameter: Plant Line Value: Columbia
  misc_feature: MA Experiment 20001248 PARAMETER Experiment Name: At_Far-red-induction_P Parameter: Timepoint (hr) Value: 4
  misc_feature: MA Experiment 20001248 PARAMETER Experiment Name: At_Far-red-induction_P Parameter: Tissue Value: Whole Plant
  misc_feature: MA Experiment ID: 20001450 Result: Down-regulated in Transcription
  misc_feature: MA Experiment 20001450 PARAMETER Experiment Name: At_Far-red-induction_P Parameter: Age (day) Value: 7
  misc_feature: MA Experiment 20001450 PARAMETER Experiment Name: At_Far-red-induction_P Parameter: Light Value: Far-red vs. White
  misc_feature: MA Experiment 20001450 PARAMETER Experiment Name: At_Far-red-induction_P Parameter: Organism Value: A. thaliana
  misc_feature: MA Experiment 20001450 PARAMETER Experiment Name: At_Far-red-induction_P Parameter: Plant Line Value: Columbia
  misc_feature: MA Experiment 20001450 PARAMETER Experiment Name: At_Far-red-induction_P Parameter: Timepoint (hr) Value: 8
  misc_feature: MA Experiment 20001450 PARAMETER Experiment Name: At_Far-red-induction_P Parameter: Tissue Value: Whole Plant
  misc_feature: MA Experiment ID: 20001451 Result: Down-regulated in Transcription
  misc_feature: MA Experiment 20001451 PARAMETER Experiment Name: At_Far-red-induction_P Parameter: Age (day) Value: 7
  misc_feature: MA Experiment 20001451 PARAMETER Experiment Name: At_Far-red-induction_P Parameter: Light Value: Far-red vs. White
  misc_feature: MA Experiment 20001451 PARAMETER Experiment Name: At_Far-red-induction_P Parameter: Organism Value: A. thaliana
  misc_feature: MA Experiment 20001451 PARAMETER Experiment Name: At_Far-red-induction_P Parameter: Plant Line Value: Columbia
  misc_feature: MA Experiment 20001451 PARAMETER Experiment Name: At_Far-red-induction_P Parameter: Timepoint (hr) Value: 24
  misc_feature: MA Experiment 20001451 PARAMETER Experiment Name: At_Far-red-induction_P Parameter: Tissue Value: Whole Plant
  misc_feature: MA Experiment ID: 20001503 Result: Up-regulated in Transcription
  misc_feature: MA Experiment 20001503 PARAMETER Experiment Name: At_Far-red-enriched_P Parameter: Age (day) Value: 7
  misc_feature: MA Experiment 20001503 PARAMETER Experiment Name: At_Far-red-enriched_P Parameter: Light Value: Far-red enriched vs. White
  misc_feature: MA Experiment 20001503 PARAMETER Experiment Name: At_Far-red-enriched_P Parameter: Organism Value: A. thaliana
  misc_feature: MA Experiment 20001503 PARAMETER Experiment Name: At_Far-red-enriched_P Parameter: Plant Line Value: Columbia
  misc_feature: MA Experiment 20001503 PARAMETER Experiment Name: At_Far-red-enriched_P Parameter: Timepoint (day) Value: 3
  misc_feature: MA Experiment 20001503 PARAMETER Experiment Name: At_Far-red-enriched_P Parameter: Tissue Value: Whole Plant
  misc_feature: MA Experiment ID: 20001554 Result: Up-regulated in Transcription
  misc_feature: MA Experiment 20001554 PARAMETER Experiment Name: At_Drought_Soil_Dry_P Parameter: Age (day) Value: 21
  misc_feature: MA Experiment 20001554 PARAMETER Experiment Name: At_Drought_Soil_Dry_P Parameter: Organism Value: A. thaliana
  misc_feature: MA Experiment 20001554 PARAMETER Experiment Name: At_Drought_Soil_Dry_P Parameter: Plant Line Value: WS
  misc_feature: MA Experiment 20001554 PARAMETER Experiment Name: At_Drought_Soil_Dry_P Parameter: Post Timepoint (hr) Value: None
  misc_feature: MA Experiment 20001554 PARAMETER Experiment Name: At_Drought_Soil_Dry_P Parameter: Post-Treatment Value: None
  misc_feature: MA Experiment 20001554 PARAMETER Experiment Name: At_Drought_Soil_Dry_P Parameter: Timepoint (day) Value: 7
  misc_feature: MA Experiment 20001554 PARAMETER Experiment Name: At_Drought_Soil_Dry_P Parameter: Treatment Value: Drought vs. No Drought
  misc_feature: MA Experiment ID: 20001757 Result: Up-regulated in Transcription
  misc_feature: MA Experiment 20001757 PARAMETER Experiment Name: At_50mM_NH4NO3_L-to-H_P Parameter: Timepoint (hr) Value: 6
  misc_feature: MA Experiment 20001757 PARAMETER Experiment Name: At_50mM_NH4NO3_L-to-H_P Parameter: Tissue Value: Leaf
  misc_feature: MA Experiment 20001757 PARAMETER Experiment Name: At_50mM_NH4NO3_L-to-H_P Parameter: Treatment Value: 50mM NH4NO3 vs 100mM Mannitol

SEQ ID NO: 94723 - protein, 320 aa, Arabidopsis thaliana; identical to SEQ ID NO: 90967
  peptide (1)..(320): Ceres Seq. ID no. 12725904
  misc_feature (3)..(279): Pfam Name: Nicotianamine synthase protein Pfam Description: Nicotianamine synthase protein
  misc_feature (1)..(320): Homolog of NCBI NO: 15241120 NR Description: nicotianamine synthase, putative; protein id: [Arabidopsis thaliana] >gi|27151632|sp|Q9FKT9|NAS2_ARATH
  misc_feature (1)..(320): Homolog of NCBI NO: 4220614 NR Description: nicotianamine synathase [Arabidopsis thaliana]
  misc_feature (1)..(320): Homolog of NCBI NO: 15238376 NR Description: nicotianamine synthase, putative; protein id:
  misc_feature (1)..(320): Homolog of NCBI NO: 4220612 NR Description: nicotianamine synthase [Arabidopsis thaliana]
  misc_feature (3)..(317): Homolog of NCBI NO: 15223535 NR Description: nicotianamine synthase, putative; protein id: supported by cDNA: gi_20466583 [Arabidopsis thaliana] Probable nicotianamine synthase 4 thaliana
  misc_feature (1)..(320): Homolog of NCBI NO: 15217462 NR Description: nicotianamine synthase, putative; protein id:
  misc_feature (1)..(320): Homolog of NCBI NO: 27528464 NR Description: nicotianamine synthase [Thlaspi caerulescens]
  misc_feature (1)..(320): Homolog of NCBI NO: 40782199 NR Description: putative nicotianamine synthase [Arabidopsis
  misc_feature (1)..(320): Homolog of NCBI NO: 27151627 NR Description: Nicotianamine synthase
  misc_feature (8)..(275): Homolog of NCBI NO: 20387262 NR Description: ZmNAS3 [Zea mays]

SEQ ID NO: 94724 - protein, 308 aa, Arabidopsis thaliana; identical to SEQ ID NO: 90968
  peptide (1)..(308): Ceres Seq. ID no. 12725905
  misc_feature (1)..(267): Pfam Name: Nicotianamine synthase protein Pfam Description: Nicotianamine synthase protein
  misc_feature (1)..(308): Homolog of NCBI NO: 15241120 NR Description: nicotianamine synthase, putative; protein id: [Arabidopsis thaliana] >gi|27151632|sp|Q9FKT9|NAS2_ARATH
  misc_feature (1)..(308): Homolog of NCBI NO: 4220614 NR Description: nicotianamine synathase [Arabidopsis thaliana]
  misc_feature (1)..(308): Homolog of NCBI NO: 15238376 NR Description: nicotianamine synthase, putative; protein id:
  misc_feature (1)..(308): Homolog of NCBI NO: 4220612 NR Description: nicotianamine synthase [Arabidopsis thaliana]
  misc_feature (1)..(305): Homolog of NCBI NO: 15223535 NR Description: nicotianamine synthase, putative; protein id: supported by cDNA: gi_20466583 [Arabidopsis thaliana] Probable nicotianamine synthase 4 thaliana
  misc_feature (1)..(308): Homolog of NCBI NO: 15217462 NR Description: nicotianamine synthase, putative; protein id:
  misc_feature (1)..(308): Homolog of NCBI NO: 27528464 NR Description: nicotianamine synthase [Thlaspi caerulescens]
  misc_feature (1)..(308): Homolog of NCBI NO: 40782199 NR Description: putative nicotianamine synthase [Arabidopsis
  misc_feature (1)..(308): Homolog of NCBI NO: 27151627 NR Description: Nicotianamine synthase
  misc_feature (1)..(263): Homolog of NCBI NO: 20387262 NR Description: ZmNAS3 [Zea mays]

SEQ ID NO: 94725 - protein, 259 aa, Arabidopsis thaliana; identical to SEQ ID NO: 90969
  peptide (1)..(259): Ceres Seq. ID no. 12725906
  misc_feature (1)..(218): Pfam Name: Nicotianamine synthase protein Pfam Description: Nicotianamine synthase protein
  misc_feature (1)..(259): Homolog of NCBI NO: 15241120 NR Description: nicotianamine synthase, putative; protein id: [Arabidopsis thaliana] >gi|27151632|sp|Q9FKT9|NAS2_ARATH
  misc_feature (1)..(259): Homolog of NCBI NO: 4220614 NR Description: nicotianamine synathase [Arabidopsis thaliana]
  misc_feature (1)..(259): Homolog of NCBI NO: 15238376 NR Description: nicotianamine synthase, putative; protein id:
  misc_feature (1)..(259): Homolog of NCBI NO: 4220612 NR Description: nicotianamine synthase [Arabidopsis thaliana]
  misc_feature (1)..(256): Homolog of NCBI NO: 15223535 NR Description: nicotianamine synthase, putative; protein id: supported by cDNA: gi_20466583 [Arabidopsis thaliana] Probable nicotianamine synthase 4 thaliana
  misc_feature (1)..(259): Homolog of NCBI NO: 15217462 NR Description: nicotianamine synthase, putative; protein id:
  misc_feature (1)..(259): Homolog of NCBI NO: 27528464 NR Description: nicotianamine synthase [Thlaspi caerulescens]
  misc_feature (1)..(259): Homolog of NCBI NO: 40782199 NR Description: putative nicotianamine synthase [Arabidopsis
  misc_feature (1)..(259): Homolog of NCBI NO: 27151627 NR Description: Nicotianamine synthase
  misc_feature (1)..(214): Homolog of NCBI NO: 20387262 NR Description: ZmNAS3 [Zea mays]

SEQ ID NO: 94726 - DNA, 2723 bp, Arabidopsis thaliana; identical to SEQ ID NO: 90970
  misc_feature (1)..(2723): Ceres Seq. ID no. 12725923
  misc_feature: MA Experiment ID: 20000171 Result: Down-regulated in Transcription
  misc_feature: MA Experiment 20000171 PARAMETER Experiment Name: At_42deg_Heat_P Parameter: Age (day) Value: 14
  misc_feature: MA Experiment 20000171 PARAMETER Experiment Name: At_42deg_Heat_P Parameter: Organism Value: A. thaliana
  misc_feature: MA Experiment 20000171 PARAMETER Experiment Name: At_42deg_Heat_P Parameter: Plant Line Value: WS
  misc_feature: MA Experiment 20000171 PARAMETER Experiment Name: At_42deg_Heat_P Parameter: Temperature (deg C) Value: 42 vs. 22
  misc_feature: MA Experiment 20000171 PARAMETER Experiment Name: At_42deg_Heat_P Parameter: Timepoint (hr) Value: 1
  misc_feature: MA Experiment 20000171 PARAMETER Experiment Name: At_42deg_Heat_P Parameter: Tissue Value: Aerial
  misc_feature: MA Experiment ID: 20000173 Result: Down-regulated in Transcription
  misc_feature: MA Experiment 20000173 PARAMETER Experiment Name: At_42deg_Heat_P Parameter: Age (day) Value: 14
  misc_feature: MA Experiment 20000173 PARAMETER Experiment Name: At_42deg_Heat_P Parameter: Organism Value: A. thaliana
  misc_feature: MA Experiment 20000173 PARAMETER Experiment Name: At_42deg_Heat_P Parameter: Plant Line Value: WS
  misc_feature: MA Experiment 20000173 PARAMETER Experiment Name: At_42deg_Heat_P Parameter: Temperature (deg C) Value: 42 vs. 22
  misc_feature: MA Experiment 20000173 PARAMETER Experiment Name: At_42deg_Heat_P Parameter: Timepoint (hr) Value: 6
  misc_feature: MA Experiment 20000173 PARAMETER Experiment Name: At_42deg_Heat_P Parameter: Tissue Value: Aerial
  misc_feature: MA Experiment ID: 20000184 Result: Down-regulated in Transcription
  misc_feature: MA Experiment 20000184 PARAMETER Experiment Name: At_Shoots__P Parameter: Age (day) Value: 7
  misc_feature: MA Experiment 20000184 PARAMETER Experiment Name: At_Shoots__P Parameter: Tissue Value: Shoots vs. Whole Plant
  misc_feature: MA Experiment ID: 20000264 Result: Up-regulated in Transcription
  misc_feature: MA Experiment 20000264 PARAMETER Experiment Name: At_Open_Flower_P Parameter: Age (day) Value: 21
  misc_feature: MA Experiment 20000264 PARAMETER Experiment Name: At_Open_Flower_P Parameter: Plant Line Value: WS
  misc_feature: MA Experiment 20000264 PARAMETER Experiment Name: At_Open_Flower_P Parameter: Tissue Value: Open Flower vs. Whole Plant
  misc_feature: MA Experiment ID: 20000794 Result: Up-regulated in Transcription
  misc_feature: MA Experiment 20000794 PARAMETER Experiment Name: At_Petals_P Parameter: Age (day) Value: 23-25 days
  misc_feature: MA Experiment 20000794 PARAMETER Experiment Name: At_Petals_P Parameter: Plant Line Value: WS
  misc_feature: MA Experiment 20000794 PARAMETER Experiment Name: At_Petals_P Parameter: Tissue Value: Petals vs. Whole plant

SEQ ID NO: 94727 - protein, 687 aa, Arabidopsis thaliana; identical to SEQ ID NO: 90971
  peptide (1)..(687): Ceres Seq. ID no. 12725924
  misc_feature (486)..(545): Pfam Name: WRKY DNA -binding domain Pfam Description: WRKY DNA -binding domain
  misc_feature (199)..(684): Homolog of NCBI NO: 13620227 NR Description: hypothetical protein [Lycopersicon esculentum]
  misc_feature (1)..(241): Homolog of NCBI NO: 13620227 NR Description: hypothetical protein [Lycopersicon esculentum]
  misc_feature (199)..(684): Homolog of NCBI NO: 13620220 NR Description: hypothetical protein [Lycopersicon esculentum]
  misc_feature (1)..(241): Homolog of NCBI NO: 13620220 NR Description: hypothetical protein [Lycopersicon esculentum]
  misc_feature (97)..(685): Homolog of NCBI NO: 14530687 NR Description: WRKY DNA-binding protein [Nicotiana tabacum]
  misc_feature (207)..(685): Homolog of NCBI NO: 6174838 NR Description: transcription factor NtWRKY4 [Nicotiana tabacum]
  misc_feature (366)..(687): Homolog of NCBI NO: 15236195 NR Description: WRKY family transcription factor; protein id: supported by cDNA: gi_15990591 [Arabidopsis thaliana]
  misc_feature (51)..(181): Homolog of NCBI NO: 15236195 NR Description: WRKY family transcription factor; protein id: supported by cDNA: gi_15990591 [Arabidopsis thaliana]
  misc_feature (73)..(336): Homolog of NCBI NO: 38344754 NR Description: OSJNBa0089K21.12 [Oryza sativa (japonica
  misc_feature (385)..(612): Homolog of NCBI NO: 38344754 NR Description: OSJNBa0089K21.12 [Oryza sativa (japonica

SEQ ID NO: 94728 - protein, 677 aa, Arabidopsis thaliana; identical to SEQ ID NO: 90972
  peptide (1)..(677): Ceres Seq. ID no. 12725925
  misc_feature (476)..(535): Pfam Name: WRKY DNA -binding domain Pfam Description: WRKY DNA -binding domain
  misc_feature (189)..(674): Homolog of NCBI NO: 13620227 NR Description: hypothetical protein [Lycopersicon esculentum]
  misc_feature (1)..(231): Homolog of NCBI NO: 13620227 NR Description: hypothetical protein [Lycopersicon esculentum]
  misc_feature (189)..(674): Homolog of NCBI NO: 13620220 NR Description: hypothetical protein [Lycopersicon esculentum]
  misc_feature (1)..(231): Homolog of NCBI NO: 13620220 NR Description: hypothetical protein [Lycopersicon esculentum]
  misc_feature (87)..(675): Homolog of NCBI NO: 14530687 NR Description: WRKY DNA-binding protein [Nicotiana tabacum]
  misc_feature (197)..(675): Homolog of NCBI NO: 6174838 NR Description: transcription factor NtWRKY4 [Nicotiana tabacum]
  misc_feature (356)..(677): Homolog of NCBI NO: 15236195 NR Description: WRKY family transcription factor; protein id: supported by cDNA: gi_15990591 [Arabidopsis thaliana]
  misc_feature (41)..(171): Homolog of NCBI NO: 15236195 NR Description: WRKY family transcription factor; protein id: supported by cDNA: gi_15990591 [Arabidopsis thaliana]
  misc_feature (63)..(326): Homolog of NCBI NO: 38344754 NR Description: OSJNBa0089K21.12 [Oryza sativa (japonica
  misc_feature (375)..(602): Homolog of NCBI NO: 38344754 NR Description: OSJNBa0089K21.12 [Oryza sativa (japonica

SEQ ID NO: 94729 - protein, 496 aa, Arabidopsis thaliana; identical to SEQ ID NO: 90973
  peptide (1)..(496): Ceres Seq. ID no. 12725926
  misc_feature (295)..(354): Pfam Name: WRKY DNA -binding domain Pfam Description: WRKY DNA -binding domain
  misc_feature (8)..(493): Homolog of NCBI NO: 13620227 NR Description: hypothetical protein [Lycopersicon esculentum]
  misc_feature (1)..(50): Homolog of NCBI NO: 13620227 NR Description: hypothetical protein [Lycopersicon esculentum]
  misc_feature (8)..(493): Homolog of NCBI NO: 13620220 NR Description: hypothetical protein [Lycopersicon esculentum]
  misc_feature (1)..(50): Homolog of NCBI NO: 13620220 NR Description: hypothetical protein [Lycopersicon esculentum]
  misc_feature (1)..(494): Homolog of NCBI NO: 14530687 NR Description: WRKY DNA-binding protein [Nicotiana tabacum]
  misc_feature (16)..(494): Homolog of NCBI NO: 6174838 NR Description: transcription factor NtWRKY4 [Nicotiana tabacum]
  misc_feature (175)..(496): Homolog of NCBI NO: 15236195 NR Description: WRKY family transcription factor; protein id: supported by cDNA: gi_15990591 [Arabidopsis thaliana]
  misc_feature (1)..(145): Homolog of NCBI NO: 38344754 NR Description: OSJNBa0089K21.12 [Oryza sativa (japonica
  misc_feature (194)..(421): Homolog of NCBI NO: 38344754 NR Description: OSJNBa0089K21.12 [Oryza sativa (japonica
  misc_feature (1)..(145): Homolog of NCBI NO: 33519174 NR Description: WRKY2 [Oryza sativa (japonica cultivar-group)]

SEQ ID NO: 94730 - DNA, 1593 bp, Arabidopsis thaliana; identical to SEQ ID NO: 90974
  misc_feature (1)..(1593): Ceres Seq. ID no. 12725931
  misc_feature: MA Experiment ID: 20000180 Result: Down-regulated in Transcription
  misc_feature: MA Experiment 20000180 PARAMETER Experiment Name: At_Germinating_Seeds_P Parameter: Age (hr) Value: 24 vs. 0
  misc_feature: MA Experiment 20000180 PARAMETER Experiment Name: At_Germinating_Seeds_P Parameter: Tissue Value: Germinating Seeds
  misc_feature: MA Experiment ID: 20001556 Result: Up-regulated in Transcription
  misc_feature: MA Experiment 20001556 PARAMETER Experiment Name: At_Drought_Soil_Dry_P Parameter: Age (day) Value: 26
  misc_feature: MA Experiment 20001556 PARAMETER Experiment Name: At_Drought_Soil_Dry_P Parameter: Organism Value: A. thaliana
  misc_feature: MA Experiment 20001556 PARAMETER Experiment Name: At_Drought_Soil_Dry_P Parameter: Plant Line Value: WS
  misc_feature: MA Experiment 20001556 PARAMETER Experiment Name: At_Drought_Soil_Dry_P Parameter: Post Timepoint (hr) Value: None
  misc_feature: MA Experiment 20001556 PARAMETER Experiment Name: At_Drought_Soil_Dry_P Parameter: Post-Treatment Value: None
  misc_feature: MA Experiment 20001556 PARAMETER Experiment Name: At_Drought_Soil_Dry_P Parameter: Timepoint (day) Value: 12
  misc_feature: MA Experiment 20001556 PARAMETER Experiment Name: At_Drought_Soil_Dry_P Parameter: Treatment Value: Drought vs. No Drought
  misc_feature: MA Experiment ID: 20001558 Result: Up-regulated in Transcription
  misc_feature: MA Experiment 20001558 PARAMETER Experiment Name: At_Drought_Soil_Dry_P Parameter: Age (day) Value: 27
  misc_feature: MA Experiment 20001558 PARAMETER Experiment Name: At_Drought_Soil_Dry_P Parameter: Organism Value: A. thaliana
  misc_feature: MA Experiment 20001558 PARAMETER Experiment Name: At_Drought_Soil_Dry_P Parameter: Plant Line Value: WS
  misc_feature: MA Experiment 20001558 PARAMETER Experiment Name: At_Drought_Soil_Dry_P Parameter: Post Timepoint (hr) Value: 6
  misc_feature: MA Experiment 20001558 PARAMETER Experiment Name: At_Drought_Soil_Dry_P Parameter: Post-Treatment Value: Re-Water vs. No Drought
  misc_feature: MA Experiment 20001558 PARAMETER Experiment Name: At_Drought_Soil_Dry_P Parameter: Timepoint (day) Value: 13
  misc_feature: MA Experiment 20001558 PARAMETER Experiment Name: At_Drought_Soil_Dry_P Parameter: Treatment Value: Drought vs. No Drought

SEQ ID NO: 94731 - protein, 530 aa, Arabidopsis thaliana; identical to SEQ ID NO: 90975
  peptide (1)..(530): Ceres Seq. ID no. 12725932
  misc_feature (152)..(186): Pfam Name: PPR repeat Pfam Description: PPR repeat
  misc_feature (1)..(530): Homolog of NCBI NO: 15241180 NR Description: putative protein; protein id: At5g56310.1 thaliana] >gi|10177829|dbj|BAB11258.1|
  misc_feature (137)..(528): Homolog of NCBI NO: 34902972 NR Description: unnamed protein product [Oryza sativa (japonica group)] >gi|9558518|dbj|BAB03436.1| unnamed protein product
  misc_feature (15)..(520): Homolog of NCBI NO: 15225375 NR Description: unknown protein; protein id: At2g20540.1
  misc_feature (5)..(515): Homolog of NCBI NO: 15239979 NR Description: selenium-binding protein-like; protein id:
  misc_feature (26)..(522): Homolog of NCBI NO: 15240085 NR Description: selenium-binding protein-like; protein id:
  misc_feature (28)..(522): Homolog of NCBI NO: 15239745 NR Description: selenium-binding protein-like; protein id:
  misc_feature (27)..(529): Homolog of NCBI NO: 9759241 NR Description: gene_id:MNC17.11~pir||T04732~strong similarity to
  misc_feature (27)..(529): Homolog of NCBI NO: 15237835 NR Description: putative protein; protein id: At5g59200.1
  misc_feature (14)..(522): Homolog of NCBI NO: 15217517 NR Description: PPR-repeat protein, putative; protein id:
  misc_feature (23)..(493): Homolog of NCBI NO: 25402522 NR Description: hypothetical protein [imported] - Arabidopsis

SEQ ID NO: 94732 - protein, 493 aa, Arabidopsis thaliana; identical to SEQ ID NO: 90976
  peptide (1)..(493): Ceres Seq. ID no. 12725933
  misc_feature (115)..(149): Pfam Name: PPR repeat Pfam Description: PPR repeat
  misc_feature (1)..(493): Homolog of NCBI NO: 15241180 NR Description: putative protein; protein id: At5g56310.1 thaliana] >gi|10177829|dbj|BAB11258.1|
  misc_feature (100)..(491): Homolog of NCBI NO: 34902972 NR Description: unnamed protein product [Oryza sativa (japonica group)] >gi|9558518|dbj|BAB03436.1| unnamed protein product
  misc_feature (1)..(483): Homolog of NCBI NO: 15225375 NR Description: unknown protein; protein id: At2g20540.1
  misc_feature (1)..(478): Homolog of NCBI NO: 15239979 NR Description: selenium-binding protein-like; protein id:
  misc_feature (1)..(485): Homolog of NCBI NO: 15240085 NR Description: selenium-binding protein-like; protein id:
  misc_feature (1)..(485): Homolog of NCBI NO: 15239745 NR Description: selenium-binding protein-like; protein id:
  misc_feature (1)..(492): Homolog of NCBI NO: 9759241 NR Description: gene_id:MNC17.11~pir||T04732~strong similarity to
  misc_feature (1)..(492): Homolog of NCBI NO: 15237835 NR Description: putative protein; protein id: At5g59200.1
  misc_feature (1)..(485): Homolog of NCBI NO: 15217517 NR Description: PPR-repeat protein, putative; protein id:
  misc_feature (1)..(456): Homolog of NCBI NO: 25402522 NR Description: hypothetical protein [imported] - Arabidopsis

SEQ ID NO: 94733 - protein, 447 aa, Arabidopsis thaliana; identical to SEQ ID NO: 90977
  peptide (1)..(447): Ceres Seq. ID no. 12725934
  misc_feature (69)..(103): Pfam Name: PPR repeat Pfam Description: PPR repeat
  misc_feature (1)..(447): Homolog of NCBI NO: 15241180 NR Description: putative protein; protein id: At5g56310.1 thaliana] >gi|10177829|dbj|BAB11258.1|
  misc_feature (54)..(445): Homolog of NCBI NO: 34902972 NR Description: unnamed protein product [Oryza sativa (japonica group)] >gi|9558518|dbj|BAB03436.1| unnamed protein product
  misc_feature (1)..(437): Homolog of NCBI NO: 15225375 NR Description: unknown protein; protein id: At2g20540.1
  misc_feature (1)..(432): Homolog of NCBI NO: 15239979 NR Description: selenium-binding protein-like; protein id:
  misc_feature (1)..(439): Homolog of NCBI NO: 15240085 NR Description: selenium-binding protein-like; protein id:
  misc_feature (1)..(439): Homolog of NCBI NO: 15239745 NR Description: selenium-binding protein-like; protein id:
  misc_feature (1)..(446): Homolog of NCBI NO: 9759241 NR Description: gene_id:MNC17.11~pir||T04732~strong similarity to
  misc_feature (1)..(446): Homolog of NCBI NO: 15237835 NR Description: putative protein; protein id: At5g59200.1
  misc_feature (1)..(439): Homolog of NCBI NO: 15217517 NR Description: PPR-repeat protein, putative; protein id:
  misc_feature (1)..(410): Homolog of NCBI NO: 25402522 NR Description: hypothetical protein [imported] - Arabidopsis

SEQ ID NO: 94734 - DNA, 1455 bp, Arabidopsis thaliana; identical to SEQ ID NO: 90978
  misc_feature (1)..(1455): Ceres Seq. ID no. 12725939
  misc_feature: MA Experiment ID: 20001451 Result: Up-regulated in Transcription
  misc_feature: MA Experiment 20001451 PARAMETER Experiment Name: At_Far-red-induction_P Parameter: Age (day) Value: 7
  misc_feature: MA Experiment 20001451 PARAMETER Experiment Name: At_Far-red-induction_P Parameter: Light Value: Far-red vs. White
  misc_feature: MA Experiment 20001451 PARAMETER Experiment Name: At_Far-red-induction_P Parameter: Organism Value: A. thaliana
  misc_feature: MA Experiment 20001451 PARAMETER Experiment Name: At_Far-red-induction_P Parameter: Plant Line Value: Columbia
  misc_feature: MA Experiment 20001451 PARAMETER Experiment Name: At_Far-red-induction_P Parameter: Timepoint (hr) Value: 24
  misc_feature: MA Experiment 20001451 PARAMETER Experiment Name: At_Far-red-induction_P Parameter: Tissue Value: Whole Plant
  misc_feature: MA Experiment ID: 20001905 Result: Up-regulated in Transcription
  misc_feature: MA Experiment 20001905 PARAMETER Experiment Name: At_Drought_Reproduction_P Parameter: Age (day) Value: 40
  misc_feature: MA Experiment 20001905 PARAMETER Experiment Name: At_Drought_Reproduction_P Parameter: Organism Value: A. thaliana
  misc_feature: MA Experiment 20001905 PARAMETER Experiment Name: At_Drought_Reproduction_P Parameter: Plant Line Value: WS
  misc_feature: MA Experiment 20001905 PARAMETER Experiment Name: At_Drought_Reproduction_P Parameter: Timepoint (day) Value: 10
  misc_feature: MA Experiment 20001905 PARAMETER Experiment Name: At_Drought_Reproduction_P Parameter: Tissue Value: Rosettes
  misc_feature: MA Experiment 20001905 PARAMETER Experiment Name: At_Drought_Reproduction_P Parameter: Treatment Value: Drought vs. No Drought

SEQ ID NO: 94735 - protein, 396 aa, Arabidopsis thaliana; identical to SEQ ID NO: 90979
  peptide (1)..(396): Ceres Seq. ID no. 12725940
  misc_feature (259)..(299): Pfam Name: Zinc finger, C3HC4 type (RING finger) Pfam Description: Zinc finger, C3HC4 type (RING finger)
  misc_feature (1)..(396): Homolog of NCBI NO: 15241188 NR Description: putative protein; protein id: At5g56340.1, by cDNA: gi_17380897, supported by cDNA: gi_20259580 [Arabidopsis >gi|10177832|dbj|BAB11261.1| gene_id:MCD7.7~pir||T05064~similar
  misc_feature (5)..(386): Homolog of NCBI NO: 22328949 NR Description: putative protein; protein id: At4g26400.1, by cDNA: gi_20466681 [Arabidopsis thaliana] putative protein [Arabidopsis thaliana]
  misc_feature (17)..(386): Homolog of NCBI NO: 7486783 NR Description: hypothetical protein M3E9.170 - Arabidopsis >gi|2982466|emb|CAA18230.1| putative protein [Arabidopsis >gi|7269492|emb|CAB79495.1| putative protein [Arabidopsis
  misc_feature (96)..(342): Homolog of NCBI NO: 15231238 NR Description: unknown protein; protein id: At3g13430.1 thaliana] >gi|9280292|dbj|BAB01747.1| gene_id:MRP15.6~unknown
  misc_feature (1)..(42): Homolog of NCBI NO: 15231238 NR Description: unknown protein; protein id: At3g13430.1 thaliana] >gi|9280292|dbj|BAB01747.1| gene_id:MRP15.6~unknown
  misc_feature (96)..(342): Homolog of NCBI NO: 38454178 NR Description: At3g13430 [Arabidopsis thaliana]
  misc_feature (1)..(42): Homolog of NCBI NO: 38454178 NR Description: At3g13430 [Arabidopsis thaliana]
  misc_feature (132)..(380): Homolog of NCBI NO: 18405411 NR Description: expressed protein; protein id: At1g55530.1, by cDNA: gi_14517545, supported by cDNA: gi_15983407 [Arabidopsis
  misc_feature (210)..(376): Homolog of NCBI NO: 34903272 NR Description: unnamed protein product [Oryza sativa (japonica group)] >gi|6539567|dbj|BAA88184.1| unnamed protein product
  misc_feature (2)..(98): Homolog of NCBI NO: 34903272 NR Description: unnamed protein product [Oryza sativa (japonica group)] >gi|6539567|dbj|BAA88184.1| unnamed protein product

SEQ ID NO: 94736 - protein, 392 aa, Arabidopsis thaliana; identical to SEQ ID NO: 90980
  peptide (1)..(392): Ceres Seq. ID no. 12725941
  misc_feature (255)..(295): Pfam Name: Zinc finger, C3HC4 type (RING finger) Pfam Description: Zinc finger, C3HC4 type (RING finger)
  misc_feature (1)..(392): Homolog of NCBI NO: 15241188 NR Description: putative protein; protein id: At5g56340.1, by cDNA: gi_17380897, supported by cDNA: gi_20259580 [Arabidopsis >gi|10177832|dbj|BAB11261.1| gene_id:MCD7.7~pir||T05064~similar
  misc_feature (1)..(382): Homolog of NCBI NO: 22328949 NR Description: putative protein; protein id: At4g26400.1, by cDNA: gi_20466681 [Arabidopsis thaliana] putative protein [Arabidopsis thaliana]
  misc_feature (13)..(382): Homolog of NCBI NO: 7486783 NR Description: hypothetical protein M3E9.170 - Arabidopsis >gi|2982466|emb|CAA18230.1| putative protein [Arabidopsis >gi|7269492|emb|CAB79495.1| putative protein [Arabidopsis
  misc_feature (92)..(338): Homolog of NCBI NO: 15231238 NR Description: unknown protein; protein id: At3g13430.1 thaliana] >gi|9280292|dbj|BAB01747.1| gene_id:MRP15.6~unknown
  misc_feature (1)..(38): Homolog of NCBI NO: 15231238 NR Description: unknown protein; protein id: At3g13430.1 thaliana] >gi|9280292|dbj|BAB01747.1| gene_id:MRP15.6~unknown
  misc_feature (92)..(338): Homolog of NCBI NO: 38454178 NR Description: At3g13430 [Arabidopsis thaliana]
  misc_feature (1)..(38): Homolog of NCBI NO: 38454178 NR Description: At3g13430 [Arabidopsis thaliana]
  misc_feature (128)..(376): Homolog of NCBI NO: 18405411 NR Description: expressed protein; protein id: At1g55530.1, by cDNA: gi_14517545, supported by cDNA: gi_15983407 [Arabidopsis
  misc_feature (206)..(372): Homolog of NCBI NO: 34903272 NR Description: unnamed protein product [Oryza sativa (japonica group)] >gi|6539567|dbj|BAA88184.1| unnamed protein product
  misc_feature (1)..(94): Homolog of NCBI NO: 34903272 NR Description: unnamed protein product [Oryza sativa (japonica group)] >gi|6539567|dbj|BAA88184.1| unnamed protein product

SEQ ID NO: 94737 - protein, 384 aa, Arabidopsis thaliana; identical to SEQ ID NO: 90981
  peptide (1)..(384): Ceres Seq. ID no. 12725942
  misc_feature (247)..(287): Pfam Name: Zinc finger, C3HC4 type (RING finger) Pfam Description: Zinc finger, C3HC4 type (RING finger)
  misc_feature (1)..(384): Homolog of NCBI NO: 15241188 NR Description: putative protein; protein id: At5g56340.1, by cDNA: gi_17380897, supported by cDNA: gi_20259580 [Arabidopsis >gi|10177832|dbj|BAB11261.1| gene_id:MCD7.7~pir||T05064~similar
  misc_feature (1)..(374): Homolog of NCBI NO: 22328949 NR Description: putative protein; protein id: At4g26400.1, by cDNA: gi_20466681 [Arabidopsis thaliana] putative protein [Arabidopsis thaliana]
  misc_feature (5)..(374): Homolog of NCBI NO: 7486783 NR Description: hypothetical protein M3E9.170 - Arabidopsis >gi|2982466|emb|CAA18230.1| putative protein [Arabidopsis >gi|7269492|emb|CAB79495.1| putative protein [Arabidopsis
  misc_feature (84)..(330): Homolog of NCBI NO: 15231238 NR Description: unknown protein; protein id: At3g13430.1 thaliana] >gi|9280292|dbj|BAB01747.1| gene_id:MRP15.6~unknown
  misc_feature (1)..(30): Homolog of NCBI NO: 15231238 NR Description: unknown protein; protein id: At3g13430.1 thaliana] >gi|9280292|dbj|BAB01747.1| gene_id:MRP15.6~unknown
  misc_feature (84)..(330): Homolog of NCBI NO: 38454178 NR Description: At3g13430 [Arabidopsis thaliana]
  misc_feature (1)..(30): Homolog of NCBI NO: 38454178 NR Description: At3g13430 [Arabidopsis thaliana]
  misc_feature (120)..(368): Homolog of NCBI NO: 18405411 NR Description: expressed protein; protein id: At1g55530.1, by cDNA: gi_14517545, supported by cDNA: gi_15983407 [Arabidopsis
  misc_feature (198)..(364): Homolog of NCBI NO: 34903272 NR Description: unnamed protein product [Oryza sativa (japonica group)] >gi|6539567|dbj|BAA88184.1| unnamed protein product
  misc_feature (1)..(86): Homolog of NCBI NO: 34903272 NR Description: unnamed protein product [Oryza sativa (japonica group)] >gi|6539567|dbj|BAA88184.1| unnamed protein product

SEQ ID NO: 94738 - DNA, 1791 bp, Arabidopsis thaliana; identical to SEQ ID NO: 90982
  misc_feature (1)..(1791): Ceres Seq. ID no. 12725975
  misc_feature: MA Experiment ID: 20000171 Result: Up-regulated in Transcription
  misc_feature: MA Experiment 20000171 PARAMETER Experiment Name: At_42deg_Heat_P Parameter: Age (day) Value: 14
  misc_feature: MA Experiment 20000171 PARAMETER Experiment Name: At_42deg_Heat_P Parameter: Organism Value: A. thaliana
  misc_feature: MA Experiment 20000171 PARAMETER Experiment Name: At_42deg_Heat_P Parameter: Plant Line Value: WS
  misc_feature: MA Experiment 20000171 PARAMETER Experiment Name: At_42deg_Heat_P Parameter: Temperature (deg C) Value: 42 vs. 22
  misc_feature: MA Experiment 20000171 PARAMETER Experiment Name: At_42deg_Heat_P Parameter: Timepoint (hr) Value: 1
  misc_feature: MA Experiment 20000171 PARAMETER Experiment Name: At_42deg_Heat_P Parameter: Tissue Value: Aerial
  misc_feature: MA Experiment ID: 20000173 Result: Up-regulated in Transcription
  misc_feature: MA Experiment 20000173 PARAMETER Experiment Name: At_42deg_Heat_P Parameter: Age (day) Value: 14
  misc_feature: MA Experiment 20000173 PARAMETER Experiment Name: At_42deg_Heat_P Parameter: Organism Value: A. thaliana
  misc_feature: MA Experiment 20000173 PARAMETER Experiment Name: At_42deg_Heat_P Parameter: Plant Line Value: WS
  misc_feature: MA Experiment 20000173 PARAMETER Experiment Name: At_42deg_Heat_P Parameter: Temperature (deg C) Value: 42 vs. 22
  misc_feature: MA Experiment 20000173 PARAMETER Experiment Name: At_42deg_Heat_P Parameter: Timepoint (hr) Value: 6
  misc_feature: MA Experiment 20000173 PARAMETER Experiment Name: At_42deg_Heat_P Parameter: Tissue Value: Aerial
  misc_feature: MA Experiment ID: 20000185 Result: Up-regulated in Transcription
  misc_feature: MA Experiment 20000185 PARAMETER Experiment Name: At_Roots__P Parameter: Age (day) Value: 7 vs. 21
  misc_feature: MA Experiment 20000185 PARAMETER Experiment Name: At_Roots__P Parameter: Organism Value: A. thaliana
  misc_feature: MA Experiment 20000185 PARAMETER Experiment Name: At_Roots__P Parameter: Tissue Value: Roots vs. Whole Plant
  misc_feature: MA Experiment ID: 20000265 Result: Up-regulated in Transcription
  misc_feature: MA Experiment 20000265 PARAMETER Experiment Name: At_Open_Flower_P Parameter: Age (day) Value: 21
  misc_feature: MA Experiment 20000265 PARAMETER Experiment Name: At_Open_Flower_P Parameter: Plant Line Value: WS
  misc_feature: MA Experiment 20000265 PARAMETER Experiment Name: At_Open_Flower_P Parameter: Tissue Value: Closed Flower vs. Whole Plant
  misc_feature: MA Experiment ID: 20000439 Result: Up-regulated in Transcription
  misc_feature: MA Experiment 20000439 PARAMETER Experiment Name: At_Roots__P Parameter: Age (day) Value: 14 vs. 21
  misc_feature: MA Experiment 20000439 PARAMETER Experiment Name: At_Roots__P Parameter: Organism Value: A. thaliana
  misc_feature: MA Experiment 20000439 PARAMETER Experiment Name: At_Roots__P Parameter: Tissue Value: Roots vs. Whole Plant
  misc_feature: MA Experiment ID: 20001248 Result: Down-regulated in Transcription
  misc_feature: MA Experiment 20001248 PARAMETER Experiment Name: At_Far-red-induction_P Parameter: Age (day) Value: 7
  misc_feature: MA Experiment 20001248 PARAMETER Experiment Name: At_Far-red-induction_P Parameter: Light Value: Far-red vs. White
  misc_feature: MA Experiment 20001248 PARAMETER Experiment Name: At_Far-red-induction_P Parameter: Organism Value: A. thaliana
  misc_feature: MA Experiment 20001248 PARAMETER Experiment Name: At_Far-red-induction_P Parameter: Plant Line Value: Columbia
  misc_feature: MA Experiment 20001248 PARAMETER Experiment Name: At_Far-red-induction_P Parameter: Timepoint (hr) Value: 4
  misc_feature: MA Experiment 20001248 PARAMETER Experiment Name: At_Far-red-induction_P Parameter: Tissue Value: Whole Plant
  misc_feature: MA Experiment ID: 20001450 Result: Down-regulated in Transcription
  misc_feature: MA Experiment 20001450 PARAMETER Experiment Name: At_Far-red-induction_P Parameter: Age (day) Value: 7
  misc_feature: MA Experiment 20001450 PARAMETER Experiment Name: At_Far-red-induction_P Parameter: Light Value: Far-red vs. White
  misc_feature: MA Experiment 20001450 PARAMETER Experiment Name: At_Far-red-induction_P Parameter: Organism Value: A. thaliana
  misc_feature: MA Experiment 20001450 PARAMETER Experiment Name: At_Far-red-induction_P Parameter: Plant Line Value: Columbia
  misc_feature: MA Experiment 20001450 PARAMETER Experiment Name: At_Far-red-induction_P Parameter: Timepoint (hr) Value: 8
  misc_feature: MA Experiment 20001450 PARAMETER Experiment Name: At_Far-red-induction_P Parameter: Tissue Value: Whole Plant
  misc_feature: MA Experiment ID: 20001451 Result: Down-regulated in Transcription
  misc_feature: MA Experiment 20001451 PARAMETER Experiment Name: At_Far-red-induction_P Parameter: Age (day) Value: 7
  misc_feature: MA Experiment 20001451 PARAMETER Experiment Name: At_Far-red-induction_P Parameter: Light Value: Far-red vs. White
  misc_feature: MA Experiment 20001451 PARAMETER Experiment Name: At_Far-red-induction_P Parameter: Organism Value: A. thaliana
  misc_feature: MA Experiment 20001451 PARAMETER Experiment Name: At_Far-red-induction_P Parameter: Plant Line Value: Columbia
  misc_feature: MA Experiment 20001451 PARAMETER Experiment Name: At_Far-red-induction_P Parameter: Timepoint (hr) Value: 24
  misc_feature: MA Experiment 20001451 PARAMETER Experiment Name: At_Far-red-induction_P Parameter: Tissue Value: Whole Plant

SEQ ID NO: 94739 - protein, 596 aa, Arabidopsis thaliana; identical to SEQ ID NO: 90983
  peptide (1)..(596): Ceres Seq. ID no. 12725976
  misc_feature (74)..(578): Pfam Name: TCP-1/cpn60 chaperonin family Pfam Description: TCP-1/cpn60 chaperonin family
  misc_feature (1)..(594): Homolog of NCBI NO: 30696748 NR Description: chaperonin, putative [Arabidopsis thaliana]
  misc_feature (1)..(594): Homolog of NCBI NO: 15231255 NR Description: chaperonin 60 beta, putative; protein id: [Arabidopsis thaliana] >gi|9280299|dbj|BAB01754.1| GloEL protein;
  misc_feature (1)..(594): Homolog of NCBI NO: 15222729 NR Description: Rubisco subunit binding-protein beta subunit; id: At1g55490.1, supported by cDNA: gi_14423415, supported by gi_20148344 [Arabidopsis thaliana]
  misc_feature (1)..(594): Homolog of NCBI NO: 7443855 NR Description: probable chaperonin 60 beta chain precursor,
  misc_feature (1)..(595): Homolog of NCBI NO: 81601 NR Description: chaperonin 60 beta precursor - Arabidopsis
  misc_feature (1)..(594): Homolog of NCBI NO: 2506277 NR Description: RuBisCO subunit binding-protein beta subunit,
  misc_feature (1)..(581): Homolog of NCBI NO: 134104 NR Description: RuBisCO subunit binding-protein beta subunit,
  misc_feature (1)..(594): Homolog of NCBI NO: 34897924 NR Description: ESTs C99033(E4350),C99032(E4350),D46006(S10372), correspond to a region of the predicted gene.~Similar to thaliana chromosome I BAC T5A14 genomic sequence; 60 KD
  misc_feature (98)..(594): Homolog of NCBI NO: 2493650 NR Description: RUBISCO SUBUNIT BINDING-PROTEIN BETA SUBUNIT (60
  misc_feature (51)..(589): Homolog of NCBI NO: 15222666 NR Description: chaperonin precursor, putative; protein id: [Arabidopsis thaliana] >gi|25300350|pir||E86388 probable

SEQ ID NO: 94740 - protein, 586 aa, Arabidopsis thaliana; identical to SEQ ID NO: 90984
  peptide (1)..(586): Ceres Seq. ID no. 12725977
  misc_feature (64)..(568): Pfam Name: TCP-1/cpn60 chaperonin family Pfam Description: TCP-1/cpn60 chaperonin family
  misc_feature (1)..(584): Homolog of NCBI NO: 30696748 NR Description: chaperonin, putative [Arabidopsis thaliana]
  misc_feature (1)..(584): Homolog of NCBI NO: 15231255 NR Description: chaperonin 60 beta, putative; protein id: [Arabidopsis thaliana] >gi|9280299|dbj|BAB01754.1| GloEL protein;
  misc_feature (1)..(584): Homolog of NCBI NO: 15222729 NR Description: Rubisco subunit binding-protein beta subunit; id: At1g55490.1, supported by cDNA: gi_14423415, supported by gi_20148344 [Arabidopsis thaliana]
  misc_feature (1)..(584): Homolog of NCBI NO: 7443855 NR Description: probable chaperonin 60 beta chain precursor,
  misc_feature (1)..(585): Homolog of NCBI NO: 81601 NR Description: chaperonin 60 beta precursor - Arabidopsis
  misc_feature (1)..(584): Homolog of NCBI NO: 2506277 NR Description: RuBisCO subunit binding-protein beta subunit,
  misc_feature (1)..(571): Homolog of NCBI NO: 134104 NR Description: RuBisCO subunit binding-protein beta subunit,
  misc_feature (1)..(584): Homolog of NCBI NO: 34897924 NR Description: ESTs C99033(E4350),C99032(E4350),D46006(S10372), correspond to a region of the predicted gene.~Similar to thaliana chromosome I BAC T5A14 genomic sequence; 60 KD
  misc_feature (88)..(584): Homolog of NCBI NO: 2493650 NR Description: RUBISCO SUBUNIT BINDING-PROTEIN BETA SUBUNIT (60
  misc_feature (41)..(579): Homolog of NCBI NO: 15222666 NR Description: chaperonin precursor, putative; protein id: [Arabidopsis thaliana] >gi|25300350|pir||E86388 probable

SEQ ID NO: 94741 - protein, 412 aa, Arabidopsis thaliana; identical to SEQ ID NO: 90985
  peptide (1)..(412): Ceres Seq. ID no. 12725978
  misc_feature (1)..(394): Pfam Name: TCP-1/cpn60 chaperonin family Pfam Description: TCP-1/cpn60 chaperonin family
  misc_feature (1)..(410): Homolog of NCBI NO: 30696748 NR Description: chaperonin, putative [Arabidopsis thaliana]
  misc_feature (1)..(410): Homolog of NCBI NO: 15231255 NR Description: chaperonin 60 beta, putative; protein id: [Arabidopsis thaliana] >gi|9280299|dbj|BAB01754.1| GloEL protein;
  misc_feature (1)..(410): Homolog of NCBI NO: 15222729 NR Description: Rubisco subunit binding-protein beta subunit; id: At1g55490.1, supported by cDNA: gi_14423415, supported by gi_20148344 [Arabidopsis thaliana]
  misc_feature (1)..(410): Homolog of NCBI NO: 7443855 NR Description: probable chaperonin 60 beta chain precursor,
  misc_feature (1)..(411): Homolog of NCBI NO: 81601 NR Description: chaperonin 60 beta precursor - Arabidopsis
  misc_feature (1)..(410): Homolog of NCBI NO: 2506277 NR Description: RuBisCO subunit binding-protein beta subunit,
  misc_feature (1)..(397): Homolog of NCBI NO: 134104 NR Description: RuBisCO subunit binding-protein beta subunit,
  misc_feature (1)..(410): Homolog of NCBI NO: 34897924 NR Description: ESTs C99033(E4350),C99032(E4350),D46006(S10372), correspond to a region of the predicted gene.~Similar to thaliana chromosome I BAC T5A14 genomic sequence; 60 KD
  misc_feature (1)..(410): Homolog of NCBI NO: 2493650 NR Description: RUBISCO SUBUNIT BINDING-PROTEIN BETA SUBUNIT (60
  misc_feature (1)..(405): Homolog of NCBI NO: 15222666 NR Description: chaperonin precursor, putative; protein id: [Arabidopsis thaliana] >gi|25300350|pir||E86388 probable

SEQ ID NO: 94742 - DNA, 1632 bp, Arabidopsis thaliana; identical to SEQ ID NO: 90986
  misc_feature (1)..(1632): Ceres Seq. ID no. 12725998
  misc_feature: MA Experiment ID: 20000185 Result: Up-regulated in Transcription
  misc_feature: MA Experiment 20000185 PARAMETER Experiment Name: At_Roots__P Parameter: Age (day) Value: 7 vs. 21
  misc_feature: MA Experiment 20000185 PARAMETER Experiment Name: At_Roots__P Parameter: Organism Value: A. thaliana
  misc_feature: MA Experiment 20000185 PARAMETER Experiment Name: At_Roots__P Parameter: Tissue Value: Roots vs. Whole Plant
  misc_feature: MA Experiment ID: 20000439 Result: Up-regulated in Transcription
  misc_feature: MA Experiment 20000439 PARAMETER Experiment Name: At_Roots__P Parameter: Age (day) Value: 14 vs. 21
  misc_feature: MA Experiment 20000439 PARAMETER Experiment Name: At_Roots__P Parameter: Organism Value: A. thaliana
  misc_feature: MA Experiment 20000439 PARAMETER Experiment Name: At_Roots__P Parameter: Tissue Value: Roots vs. Whole Plant
  misc_feature: MA Experiment ID: 20001558 Result: Down-regulated in Transcription
  misc_feature: MA Experiment 20001558 PARAMETER Experiment Name: At_Drought_Soil_Dry_P Parameter: Age (day) Value: 27
  misc_feature: MA Experiment 20001558 PARAMETER Experiment Name: At_Drought_Soil_Dry_P Parameter: Organism Value: A. thaliana
  misc_feature: MA Experiment 20001558 PARAMETER Experiment Name: At_Drought_Soil_Dry_P Parameter: Plant Line Value: WS
  misc_feature: MA Experiment 20001558 PARAMETER Experiment Name: At_Drought_Soil_Dry_P Parameter: Post Timepoint (hr) Value: 6
  misc_feature: MA Experiment 20001558 PARAMETER Experiment Name: At_Drought_Soil_Dry_P Parameter: Post-Treatment Value: Re-Water vs. No Drought
  misc_feature: MA Experiment 20001558 PARAMETER Experiment Name: At_Drought_Soil_Dry_P Parameter: Timepoint (day) Value: 13
  misc_feature: MA Experiment 20001558 PARAMETER Experiment Name: At_Drought_Soil_Dry_P Parameter: Treatment Value: Drought vs. No Drought
  misc_feature: MA Experiment ID: 20001560 Result: Down-regulated in Transcription
  misc_feature: MA Experiment 20001560 PARAMETER Experiment Name: At_Drought_Soil_Dry_P Parameter: Age (day) Value: 28
  misc_feature: MA Experiment 20001560 PARAMETER Experiment Name: At_Drought_Soil_Dry_P Parameter: Organism Value: A. thaliana
  misc_feature: MA Experiment 20001560 PARAMETER Experiment Name: At_Drought_Soil_Dry_P Parameter: Plant Line Value: WS
  misc_feature: MA Experiment 20001560 PARAMETER Experiment Name: At_Drought_Soil_Dry_P Parameter: Post Timepoint (hr) Value: None
  misc_feature: MA Experiment 20001560 PARAMETER Experiment Name: At_Drought_Soil_Dry_P Parameter: Post-Treatment Value: None
  misc_feature: MA Experiment 20001560 PARAMETER Experiment Name: At_Drought_Soil_Dry_P Parameter: Timepoint (day) Value: 14
  misc_feature: MA Experiment 20001560 PARAMETER Experiment Name: At_Drought_Soil_Dry_P Parameter: Treatment Value: Drought vs. No Drought
  misc_feature: MA Experiment ID: 20001905 Result: Down-regulated in Transcription
  misc_feature: MA Experiment 20001905 PARAMETER Experiment Name: At_Drought_Reproduction_P Parameter: Age (day) Value: 40
  misc_feature: MA Experiment 20001905 PARAMETER Experiment Name: At_Drought_Reproduction_P Parameter: Organism Value: A. thaliana
  misc_feature: MA Experiment 20001905 PARAMETER Experiment Name: At_Drought_Reproduction_P Parameter: Plant Line Value: WS
  misc_feature: MA Experiment 20001905 PARAMETER Experiment Name: At_Drought_Reproduction_P Parameter: Timepoint (day) Value: 10
  misc_feature: MA Experiment 20001905 PARAMETER Experiment Name: At_Drought_Reproduction_P Parameter: Tissue Value: Rosettes
  misc_feature: MA Experiment 20001905 PARAMETER Experiment Name: At_Drought_Reproduction_P Parameter: Treatment Value: Drought vs. No Drought

SEQ ID NO: 94743 - protein, 442 aa, Arabidopsis thaliana; identical to SEQ ID NO: 90987
  peptide (1)..(442): Ceres Seq. ID no. 12725999
  misc_feature (51)..(425): Pfam Name: Peptidase family M20/M25/M40 Pfam Description: Peptidase family M20/M25/M40
  misc_feature (4)..(442): Homolog of NCBI NO: 15241894 NR Description: IAA-amino acid hydrolase (gb|AAC04866.1); protein At5g56660.1, supported by cDNA: gi_18175666, supported by cDNA:
  misc_feature (4)..(442): Homolog of NCBI NO: 18175667 NR Description: IAA-amino acid hydrolase [Arabidopsis thaliana]
  misc_feature (4)..(442): Homolog of NCBI NO: 902791 NR Description: ILL2
  misc_feature (4)..(442): Homolog of NCBI NO: 15241892 NR Description: IAA-amino acid hydrolase homolog 1 precursor protein id: At5g56650.1, supported by cDNA: gi_902788
  misc_feature (12)..(442): Homolog of NCBI NO: 15218027 NR Description: IAA-Ala hydrolase (IAR3); protein id:
  misc_feature (12)..(442): Homolog of NCBI NO: 2181184 NR Description: JR3 protein [Arabidopsis thaliana]
  misc_feature (4)..(431): Homolog of NCBI NO: 15218029 NR Description: auxin conjugate hydrolase (ILL5); protein id: [Arabidopsis thaliana] >gi|25319490|pir||H96556 auxin conjugate
  misc_feature (41)..(442): Homolog of NCBI NO: 34914096 NR Description: putative IAA-Ala hydrolase [Oryza sativa
  misc_feature (41)..(442): Homolog of NCBI NO: 27948556 NR Description: IAA-amino acid hydrolase [Oryza sativa (indica
  misc_feature (41)..(442): Homolog of NCBI NO: 34910396 NR Description: putative IAA-Ala hydrolase [Oryza sativa

SEQ ID NO: 94744 - protein, 439 aa, Arabidopsis thaliana; identical to SEQ ID NO: 90988
  peptide (1)..(439): Ceres Seq. ID no. 12726000
  misc_feature (48)..(422): Pfam Name: Peptidase family M20/M25/M40 Pfam Description: Peptidase family M20/M25/M40
  misc_feature (1)..(439): Homolog of NCBI NO: 15241894 NR Description: IAA-amino acid hydrolase (gb|AAC04866.1); protein At5g56660.1, supported by cDNA: gi_18175666, supported by cDNA:
  misc_feature (1)..(439): Homolog of NCBI NO: 18175667 NR Description: IAA-amino acid hydrolase [Arabidopsis thaliana]
  misc_feature (1)..(439): Homolog of NCBI NO: 902791 NR Description: ILL2
  misc_feature (1)..(439): Homolog of NCBI NO: 15241892 NR Description: IAA-amino acid hydrolase homolog 1 precursor protein id: At5g56650.1, supported by cDNA: gi_902788
  misc_feature (9)..(439): Homolog of NCBI NO: 15218027 NR Description: IAA-Ala hydrolase (IAR3); protein id:
  misc_feature (9)..(439): Homolog of NCBI NO: 2181184 NR Description: JR3 protein [Arabidopsis thaliana]
  misc_feature (1)..(428): Homolog of NCBI NO: 15218029 NR Description: auxin conjugate hydrolase (ILL5); protein id: [Arabidopsis thaliana] >gi|25319490|pir||H96556 auxin conjugate
  misc_feature (38)..(439): Homolog of NCBI NO: 34914096 NR Description: putative IAA-Ala hydrolase [Oryza sativa
  misc_feature (38)..(439): Homolog of NCBI NO: 27948556 NR Description: IAA-amino acid hydrolase [Oryza sativa (indica
  misc_feature (38)..(439): Homolog of NCBI NO: 34910396 NR Description: putative IAA-Ala hydrolase [Oryza sativa

SEQ ID NO: 94745 - protein, 389 aa, Arabidopsis thaliana; identical to SEQ ID NO: 90989
  peptide (1)..(389): Ceres Seq. ID no. 12726001
  misc_feature (1)..(372): Pfam Name: Peptidase family M20/M25/M40 Pfam Description: Peptidase family M20/M25/M40
  misc_feature (1)..(389): Homolog of NCBI NO: 15241894 NR Description: IAA-amino acid hydrolase (gb|AAC04866.1); protein At5g56660.1, supported by cDNA: gi_18175666, supported by cDNA:
  misc_feature (1)..(389): Homolog of NCBI NO: 18175667 NR Description: IAA-amino acid hydrolase [Arabidopsis thaliana]
  misc_feature (1)..(389): Homolog of NCBI NO: 902791 NR Description: ILL2
  misc_feature (1)..(389): Homolog of NCBI NO: 15241892 NR Description: IAA-amino acid hydrolase homolog 1 precursor protein id: At5g56650.1, supported by cDNA: gi_902788
  misc_feature (1)..(389): Homolog of NCBI NO: 15218027 NR Description: IAA-Ala hydrolase (IAR3); protein id:
  misc_feature (1)..(389): Homolog of NCBI NO: 2181184 NR Description: JR3 protein [Arabidopsis thaliana]
  misc_feature (1)..(378): Homolog of NCBI NO: 15218029 NR Description: auxin conjugate hydrolase (ILL5); protein id: [Arabidopsis thaliana] >gi|25319490|pir||H96556 auxin conjugate
  misc_feature (1)..(389): Homolog of NCBI NO: 34914096 NR Description: putative IAA-Ala hydrolase [Oryza sativa
  misc_feature (1)..(389): Homolog of NCBI NO: 27948556 NR Description: IAA-amino acid hydrolase [Oryza sativa (indica
  misc_feature (1)..(389): Homolog of NCBI NO: 34910396 NR Description: putative IAA-Ala hydrolase [Oryza sativa

SEQ ID NO: 94746 - DNA, 1949 bp, Arabidopsis thaliana; identical to SEQ ID NO: 90990
  misc_feature (1)..(1949): Ceres Seq. ID no. 12726002
  misc_feature: MA Experiment ID: 20000307 Result: Down-regulated in Transcription
  misc_feature: MA Experiment 20000307 PARAMETER Experiment Name: At_Germinating_Seeds_Sub_P Parameter: Age (hr) Value: 24 vs. 0
  misc_feature: MA Experiment 20000307 PARAMETER Experiment Name: At_Germinating_Seeds_Sub_P Parameter: Organism Value: A. thaliana
  misc_feature: MA Experiment 20000307 PARAMETER Experiment Name: At_Germinating_Seeds_Sub_P Parameter: Plant Line Value: WS
  misc_feature: MA Experiment 20000307 PARAMETER Experiment Name: At_Germinating_Seeds_Sub_P Parameter: Tissue Value: Germinating Seeds

SEQ ID NO: 94747 - protein, 572 aa, Arabidopsis thaliana; identical to SEQ ID NO: 90991
  peptide (1)..(572): Ceres Seq. ID no. 12726003
  misc_feature (303)..(568): Pfam Name: tRNA synthetases class II (D, K and N) Pfam Description: tRNA synthetases class II (D, K and N)
  misc_feature (1)..(572): Homolog of NCBI NO: 15241897 NR Description: SYNC1 protein (gb|AAD46681.1); protein id:
  misc_feature (1)..(572): Homolog of NCBI NO: 15223302 NR Description: asparaginyl-tRNA synthetase(SYNC1) protein id: At1g70980.1 [Arabidopsis thaliana]
  misc_feature (1)..(572): Homolog of NCBI NO: 34914792 NR Description: putative asparaginyl-tRNA synthetase [Oryza
  misc_feature (291)..(571): Homolog of NCBI NO: 2664210 NR Description: asparaginyl-tRNA synthetase [Arabidopsis thaliana]
  misc_feature (291)..(571): Homolog of NCBI NO: 20139977 NR Description: Asparaginyl-tRNA synthetase,
  misc_feature (21)..(234): Homolog of NCBI NO: 2664210 NR Description: asparaginyl-tRNA synthetase [Arabidopsis thaliana]
  misc_feature (21)..(234): Homolog of NCBI NO: 20139977 NR Description: Asparaginyl-tRNA synthetase,
  misc_feature (291)..(571): Homolog of NCBI NO: 15236037 NR Description: asparagine--tRNA ligase; protein id: At4g17300.1, by cDNA: gi_19310457 [Arabidopsis thaliana]
  misc_feature (21)..(234): Homolog of NCBI NO: 15236037 NR Description: asparagine--tRNA ligase; protein id: At4g17300.1, by cDNA: gi_19310457 [Arabidopsis thaliana]
  misc_feature (291)..(571): Homolog of NCBI NO: 16332045 NR Description: asparaginyl-tRNA synthetase [Synechocystis sp.

SEQ ID NO: 94748 - protein, 486 aa, Arabidopsis thaliana; identical to SEQ ID NO: 90992
  peptide (1)..(486): Ceres Seq. ID no. 12726004
  misc_feature (217)..(482): Pfam Name: tRNA synthetases class II (D, K and N) Pfam Description: tRNA synthetases class II (D, K and N)
  misc_feature (1)..(486): Homolog of NCBI NO: 15241897 NR Description: SYNC1 protein (gb|AAD46681.1); protein id:
  misc_feature (1)..(486): Homolog of NCBI NO: 15223302 NR Description: asparaginyl-tRNA synthetase(SYNC1) protein id: At1g70980.1 [Arabidopsis thaliana]
  misc_feature (1)..(486): Homolog of NCBI NO: 34914792 NR Description: putative asparaginyl-tRNA synthetase [Oryza
  misc_feature (205)..(485): Homolog of NCBI NO: 2664210 NR Description: asparaginyl-tRNA synthetase [Arabidopsis thaliana]
  misc_feature (205)..(485): Homolog of NCBI NO: 20139977 NR Description: Asparaginyl-tRNA synthetase,
  misc_feature (1)..(148): Homolog of NCBI NO: 2664210 NR Description: asparaginyl-tRNA synthetase [Arabidopsis thaliana]
  misc_feature (1)..(148): Homolog of NCBI NO: 20139977 NR Description: Asparaginyl-tRNA synthetase,
  misc_feature (205)..(485): Homolog of NCBI NO: 15236037 NR Description: asparagine--tRNA ligase; protein id: At4g17300.1, by cDNA: gi_19310457 [Arabidopsis thaliana]
  misc_feature (1)..(148): Homolog of NCBI NO: 15236037 NR Description: asparagine--tRNA ligase; protein id: At4g17300.1, by cDNA: gi_19310457 [Arabidopsis thaliana]
  misc_feature (205)..(485): Homolog of NCBI NO: 16332045 NR Description: asparaginyl-tRNA synthetase [Synechocystis sp.

SEQ ID NO: 94749 - protein, 364 aa, Arabidopsis thaliana; identical to SEQ ID NO: 90993
  peptide (1)..(364): Ceres Seq. ID no. 12726005
  misc_feature (95)..(360): Pfam Name: tRNA synthetases class II (D, K and N) Pfam Description: tRNA synthetases class II (D, K and N)
  misc_feature (1)..(364): Homolog of NCBI NO: 15241897 NR Description: SYNC1 protein (gb|AAD46681.1); protein id:
  misc_feature (1)..(364): Homolog of NCBI NO: 15223302 NR Description: asparaginyl-tRNA synthetase(SYNC1) protein id: At1g70980.1 [Arabidopsis thaliana]
  misc_feature (1)..(364): Homolog of NCBI NO: 34914792 NR Description: putative asparaginyl-tRNA synthetase [Oryza
  misc_feature (83)..(363): Homolog of NCBI NO: 2664210 NR Description: asparaginyl-tRNA synthetase [Arabidopsis thaliana]
  misc_feature (83)..(363): Homolog of NCBI NO: 20139977 NR Description: Asparaginyl-tRNA synthetase,
  misc_feature (1)..(26): Homolog of NCBI NO: 2664210 NR Description: asparaginyl-tRNA synthetase [Arabidopsis thaliana]
  misc_feature (1)..(26): Homolog of NCBI NO: 20139977 NR Description: Asparaginyl-tRNA synthetase,
  misc_feature (83)..(363): Homolog of NCBI NO: 15236037 NR Description: asparagine--tRNA ligase; protein id: At4g17300.1, by cDNA: gi_19310457 [Arabidopsis thaliana]
  misc_feature (1)..(26): Homolog of NCBI NO: 15236037 NR Description: asparagine--tRNA ligase; protein id: At4g17300.1, by cDNA: gi_19310457 [Arabidopsis thaliana]
  misc_feature (83)..(363): Homolog of NCBI NO: 16332045 NR Description: asparaginyl-tRNA synthetase [Synechocystis sp.

SEQ ID NO: 94750 - DNA, 1020 bp, Arabidopsis thaliana; identical to SEQ ID NO: 90994
  misc_feature (1)..(1020): Ceres Seq. ID no. 12726013
  misc_feature: MA Experiment ID: 20000185 Result: Up-regulated in Transcription
  misc_feature: MA Experiment 20000185 PARAMETER Experiment Name: At_Roots__P Parameter: Age (day) Value: 7 vs. 21
  misc_feature: MA Experiment 20000185 PARAMETER Experiment Name: At_Roots__P Parameter: Organism Value: A. thaliana
  misc_feature: MA Experiment 20000185 PARAMETER Experiment Name: At_Roots__P Parameter: Tissue Value: Roots vs. Whole Plant
  misc_feature: MA Experiment ID: 20000439 Result: Up-regulated in Transcription
  misc_feature: MA Experiment 20000439 PARAMETER Experiment Name: At_Roots__P Parameter: Age (day) Value: 14 vs. 21
  misc_feature: MA Experiment 20000439 PARAMETER Experiment Name: At_Roots__P Parameter: Organism Value: A. thaliana
  misc_feature: MA Experiment 20000439 PARAMETER Experiment Name: At_Roots__P Parameter: Tissue Value: Roots vs. Whole Plant
  misc_feature: MA Experiment ID: 20000496 Result: Up-regulated in Transcription
  misc_feature: MA Experiment 20000496 PARAMETER Experiment Name: At_Guard_Cells_P Parameter: Harvest Date Value: 7/19/2002
  misc_feature: MA Experiment 20000496 PARAMETER Experiment Name: At_Guard_Cells_P Parameter: Organism Value: Canola
  misc_feature: MA Experiment 20000496 PARAMETER Experiment Name: At_Guard_Cells_P Parameter: Tissue Value: Guard Cells vs. Leaves

SEQ ID NO: 94751 - protein, 339 aa, Arabidopsis thaliana; identical to SEQ ID NO: 90995
  peptide (1)..(339): Ceres Seq. ID no. 12726014
  misc_feature (163)..(337): Pfam Name: lactate/malate dehydrogenase, alpha/beta Pfam Description: lactate/malate dehydrogenase, alpha/beta
  misc_feature (1)..(339): Homolog of NCBI NO: 15241923 NR Description: cytosolic malate dehydrogenase; protein id: [Arabidopsis thaliana] >gi|10176776|dbj|BAB09890.1| cytosolic
  misc_feature (9)..(338): Homolog of NCBI NO: 10334493 NR Description: cytosolic malate dehydrogenase [Cicer arietinum]
  misc_feature (9)..(338): Homolog of NCBI NO: 11133373 NR Description: Malate dehydrogenase, cytoplasmic
  misc_feature (9)..(338): Homolog of NCBI NO: 37535388 NR Description: cytoplasmic malate dehydrogenase [Oryza sativa
  misc_feature (9)..(337): Homolog of NCBI NO: 18202485 NR Description: Malate dehydrogenase, cytoplasmic
  misc_feature (9)..(338): Homolog of NCBI NO: 27462764 NR Description: malate dehydrogenase [Lupinus albus]
  misc_feature (9)..(338): Homolog of NCBI NO: 15982948 NR Description: NAD-dependent malate dehydrogenase [Prunus
  misc_feature (9)..(337): Homolog of NCBI NO: 10798652 NR Description: malate dehydrogenase [Nicotiana tabacum]
  misc_feature (9)..(337): Homolog of NCBI NO: 27462762 NR Description: malate dehydrogenase [Lupinus albus]
  misc_feature (9)..(338): Homolog of NCBI NO: 39939491 NR Description: malate dehydrogenase [Pinus pinaster]

SEQ ID NO: 94752 - protein, 310 aa, Arabidopsis thaliana; identical to SEQ ID NO: 90996
  peptide (1)..(310): Ceres Seq. ID no. 12726015
  misc_feature (134)..(308): Pfam Name: lactate/malate dehydrogenase, alpha/beta Pfam Description: lactate/malate dehydrogenase, alpha/beta
  misc_feature (1)..(310): Homolog of NCBI NO: 15241923 NR Description: cytosolic malate dehydrogenase; protein id: [Arabidopsis thaliana] >gi|10176776|dbj|BAB09890.1| cytosolic
  misc_feature (1)..(309): Homolog of NCBI NO: 10334493 NR Description: cytosolic malate dehydrogenase [Cicer arietinum]
  misc_feature (1)..(309): Homolog of NCBI NO: 11133373 NR Description: Malate dehydrogenase, cytoplasmic
  misc_feature (1)..(309): Homolog of NCBI NO: 37535388 NR Description: cytoplasmic malate dehydrogenase [Oryza sativa
  misc_feature (1)..(308): Homolog of NCBI NO: 18202485 NR Description: Malate dehydrogenase, cytoplasmic
  misc_feature (1)..(309): Homolog of NCBI NO: 27462764 NR Description: malate dehydrogenase [Lupinus albus]
  misc_feature (1)..(309): Homolog of NCBI NO: 15982948 NR Description: NAD-dependent malate dehydrogenase [Prunus
  misc_feature (1)..(308): Homolog of NCBI NO: 10798652 NR Description: malate dehydrogenase [Nicotiana tabacum]
  misc_feature (1)..(308): Homolog of NCBI NO: 27462762 NR Description: malate dehydrogenase [Lupinus albus]
  misc_feature (1)..(309): Homolog of NCBI NO: 39939491 NR Description: malate dehydrogenase [Pinus pinaster]

SEQ ID NO: 94753 - protein, 304 aa, Arabidopsis thaliana; identical to SEQ ID NO: 90997
  peptide (1)..(304): Ceres Seq. ID no. 12726016
  misc_feature (128)..(302): Pfam Name: lactate/malate dehydrogenase, alpha/beta Pfam Description: lactate/malate dehydrogenase, alpha/beta
  misc_feature (1)..(304): Homolog of NCBI NO: 15241923 NR Description: cytosolic malate dehydrogenase; protein id: [Arabidopsis thaliana] >gi|10176776|dbj|BAB09890.1| cytosolic
  misc_feature (1)..(303): Homolog of NCBI NO: 10334493 NR Description: cytosolic malate dehydrogenase [Cicer arietinum]
  misc_feature (1)..(303): Homolog of NCBI NO: 11133373 NR Description: Malate dehydrogenase, cytoplasmic
  misc_feature (1)..(303): Homolog of NCBI NO: 37535388 NR Description: cytoplasmic malate dehydrogenase [Oryza sativa
  misc_feature (1)..(302): Homolog of NCBI NO: 18202485 NR Description: Malate dehydrogenase, cytoplasmic
  misc_feature (1)..(303): Homolog of NCBI NO: 27462764 NR Description: malate dehydrogenase [Lupinus albus]
  misc_feature (1)..(303): Homolog of NCBI NO: 15982948 NR Description: NAD-dependent malate dehydrogenase [Prunus
  misc_feature (1)..(302): Homolog of NCBI NO: 10798652 NR Description: malate dehydrogenase [Nicotiana tabacum]
  misc_feature (1)..(302): Homolog of NCBI NO: 27462762 NR Description: malate dehydrogenase [Lupinus albus]
  misc_feature (1)..(303): Homolog of NCBI NO: 39939491 NR Description: malate dehydrogenase [Pinus pinaster]

SEQ ID NO: 94754 - DNA, 2818 bp, Arabidopsis thaliana; identical to SEQ ID NO: 90998
  misc_feature (1)..(2818): Ceres Seq. ID no. 12726025
  misc_feature: MA Experiment ID: 20000173 Result: Down-regulated in Transcription
  misc_feature: MA Experiment 20000173 PARAMETER Experiment Name: At_42deg_Heat_P Parameter: Age (day) Value: 14
  misc_feature: MA Experiment 20000173 PARAMETER Experiment Name: At_42deg_Heat_P Parameter: Organism Value: A. thaliana
  misc_feature: MA Experiment 20000173 PARAMETER Experiment Name: At_42deg_Heat_P Parameter: Plant Line Value: WS
  misc_feature: MA Experiment 20000173 PARAMETER Experiment Name: At_42deg_Heat_P Parameter: Temperature (deg C) Value: 42 vs. 22
  misc_feature: MA Experiment 20000173 PARAMETER Experiment Name: At_42deg_Heat_P Parameter: Timepoint (hr) Value: 6
  misc_feature: MA Experiment 20000173 PARAMETER Experiment Name: At_42deg_Heat_P Parameter: Tissue Value: Aerial
  misc_feature: MA Experiment ID: 20000265 Result: Up-regulated in Transcription
  misc_feature: MA Experiment 20000265 PARAMETER Experiment Name: At_Open_Flower_P Parameter: Age (day) Value: 21
  misc_feature: MA Experiment 20000265 PARAMETER Experiment Name: At_Open_Flower_P Parameter: Plant Line Value: WS
  misc_feature: MA Experiment 20000265 PARAMETER Experiment Name: At_Open_Flower_P Parameter: Tissue Value: Closed Flower vs. Whole Plant
  misc_feature: MA Experiment ID: 20000286 Result: Up-regulated in Transcription
  misc_feature: MA Experiment 20000286 PARAMETER Experiment Name: At_Open_Flower_P Parameter: Age (day) Value: 21
  misc_feature: MA Experiment 20000286 PARAMETER Experiment Name: At_Open_Flower_P Parameter: Plant Line Value: WS
  misc_feature: MA Experiment 20000286 PARAMETER Experiment Name: At_Open_Flower_P Parameter: Tissue Value: Half Open vs. Whole Plant
  misc_feature: MA Experiment ID: 20000794 Result: Up-regulated in Transcription
  misc_feature: MA Experiment 20000794 PARAMETER Experiment Name: At_Petals_P Parameter: Age (day) Value: 23-25 days
  misc_feature: MA Experiment 20000794 PARAMETER Experiment Name: At_Petals_P Parameter: Plant Line Value: WS
  misc_feature: MA Experiment 20000794 PARAMETER Experiment Name: At_Petals_P Parameter: Tissue Value: Petals vs. Whole plant
  misc_feature: MA Experiment ID: 20001451 Result: Down-regulated in Transcription
  misc_feature: MA Experiment 20001451 PARAMETER Experiment Name: At_Far-red-induction_P Parameter: Age (day) Value: 7
  misc_feature: MA Experiment 20001451 PARAMETER Experiment Name: At_Far-red-induction_P Parameter: Light Value: Far-red vs. White
  misc_feature: MA Experiment 20001451 PARAMETER Experiment Name: At_Far-red-induction_P Parameter: Organism Value: A. thaliana
  misc_feature: MA Experiment 20001451 PARAMETER Experiment Name: At_Far-red-induction_P Parameter: Plant Line Value: Columbia
  misc_feature: MA Experiment 20001451 PARAMETER Experiment Name: At_Far-red-induction_P Parameter: Timepoint (hr) Value: 24
  misc_feature: MA Experiment 20001451 PARAMETER Experiment Name: At_Far-red-induction_P Parameter: Tissue Value: Whole Plant
  misc_feature: MA Experiment ID: 20001757 Result: Down-regulated in Transcription
  misc_feature: MA Experiment 20001757 PARAMETER Experiment Name: At_50mM_NH4NO3_L-to-H_P Parameter: Timepoint (hr) Value: 6
  misc_feature: MA Experiment 20001757 PARAMETER Experiment Name: At_50mM_NH4NO3_L-to-H_P Parameter: Tissue Value: Leaf
  misc_feature: MA Experiment 20001757 PARAMETER Experiment Name: At_50mM_NH4NO3_L-to-H_P Parameter: Treatment Value: 50mM NH4NO3 vs 100mM Mannitol

SEQ ID NO: 94755 - protein, 669 aa, Arabidopsis thaliana; identical to SEQ ID NO: 90999
  peptide (1)..(669): Ceres Seq. ID no. 12726026
  misc_feature (14)..(133): Pfam Name: Universal stress protein family Pfam Description: Universal stress protein family
  misc_feature (2)..(667): Homolog of NCBI NO: 34912394 NR Description: putative protein kinase APK1B, Serine/Threonine
  misc_feature (15)..(667): Homolog of NCBI NO: 15231330 NR Description: protein kinase, putative; protein id: At3g13690.1 thaliana] >gi|9294015|dbj|BAB01918.1| contains similarity to
  misc_feature (15)..(667): Homolog of NCBI NO: 22655010 NR Description: AT3g13690/MMM17_12 [Arabidopsis thaliana]
  misc_feature (2)..(669): Homolog of NCBI NO: 15222672 NR Description: protein kinase, putative; protein id: supported by cDNA: gi_17381013, supported by cDNA: gi_20465878
  misc_feature (130)..(662): Homolog of NCBI NO: 10880466 NR Description: dual-specific kinase DSK1 [Nicotiana tabacum]
  misc_feature (372)..(664): Homolog of NCBI NO: 15223161 NR Description: putative protein kinase; protein id: At1g70460.1
  misc_feature (378)..(669): Homolog of NCBI NO: 29367569 NR Description: putative receptor protein kinase [Oryza sativa
  misc_feature (373)..(661): Homolog of NCBI NO: 15240947 NR Description: putative protein; protein id: At5g38560.1, by cDNA: gi_15983496, supported by cDNA: gi_18700152 [Arabidopsis >gi|10176824|dbj|BAB10146.1| contains similarity to protein
  misc_feature (367)..(669): Homolog of NCBI NO: 30690042 NR Description: serine threonine protein kinase -related thaliana] >gi|26452004|dbj|BAC43092.1| putative serine/threonine kinase [Arabidopsis thaliana] >gi|29029022|gb|AAO64890.1|
  misc_feature (378)..(669): Homolog of NCBI NO: 13447449 NR Description: receptor protein kinase PERK1 [Brassica napus]

SEQ ID NO: 94756 - protein, 652 aa, Arabidopsis thaliana; identical to SEQ ID NO: 91000
  peptide (1)..(652): Ceres Seq. ID no. 12726027
  misc_feature (1)..(116): Pfam Name: Universal stress protein family Pfam Description: Universal stress protein family
  misc_feature (1)..(650): Homolog of NCBI NO: 34912394 NR Description: putative protein kinase APK1B, Serine/Threonine
  misc_feature (1)..(650): Homolog of NCBI NO: 15231330 NR Description: protein kinase, putative; protein id: At3g13690.1 thaliana] >gi|9294015|dbj|BAB01918.1| contains similarity to
  misc_feature (1)..(650): Homolog of NCBI NO: 22655010 NR Description: AT3g13690/MMM17_12 [Arabidopsis thaliana]
  misc_feature (1)..(652): Homolog of NCBI NO: 15222672 NR Description: protein kinase, putative; protein id: supported by cDNA: gi_17381013, supported by cDNA: gi_20465878
  misc_feature (113)..(645): Homolog of NCBI NO: 10880466 NR Description: dual-specific kinase DSK1 [Nicotiana tabacum]
  misc_feature (355)..(647): Homolog of NCBI NO: 15223161 NR Description: putative protein kinase; protein id: At1g70460.1
  misc_feature (361)..(652): Homolog of NCBI NO: 29367569 NR Description: putative receptor protein kinase [Oryza sativa
  misc_feature (356)..(644): Homolog of NCBI NO: 15240947 NR Description: putative protein; protein id: At5g38560.1, by cDNA: gi_15983496, supported by cDNA: gi_18700152 [Arabidopsis >gi|10176824|dbj|BAB10146.1| contains similarity to protein
  misc_feature (350)..(652): Homolog of NCBI NO: 30690042 NR Description: serine threonine protein kinase -related thaliana] >gi|26452004|dbj|BAC43092.1| putative serine/threonine kinase [Arabidopsis thaliana] >gi|29029022|gb|AAO64890.1|
  misc_feature (361)..(652): Homolog of NCBI NO: 13447449 NR Description: receptor protein kinase PERK1 [Brassica napus]

SEQ ID NO: 94757 - protein, 573 aa, Arabidopsis thaliana; identical to SEQ ID NO: 91001
  peptide (1)..(573): Ceres Seq. ID no. 12726028
  misc_feature (1)..(571): Homolog of NCBI NO: 34912394 NR Description: putative protein kinase APK1B, Serine/Threonine
  misc_feature (1)..(571): Homolog of NCBI NO: 15231330 NR Description: protein kinase, putative; protein id: At3g13690.1 thaliana] >gi|9294015|dbj|BAB01918.1| contains similarity to
  misc_feature (1)..(571): Homolog of NCBI NO: 22655010 NR Description: AT3g13690/MMM17_12 [Arabidopsis thaliana]
  misc_feature (1)..(573): Homolog of NCBI NO: 15222672 NR Description: protein kinase, putative; protein id: supported by cDNA: gi_17381013, supported by cDNA: gi_20465878
  misc_feature (34)..(566): Homolog of NCBI NO: 10880466 NR Description: dual-specific kinase DSK1 [Nicotiana tabacum]
  misc_feature (276)..(568): Homolog of NCBI NO: 15223161 NR Description: putative protein kinase; protein id: At1g70460.1
  misc_feature (282)..(573): Homolog of NCBI NO: 29367569 NR Description: putative receptor protein kinase [Oryza sativa
  misc_feature (277)..(565): Homolog of NCBI NO: 15240947 NR Description: putative protein; protein id: At5g38560.1, by cDNA: gi_15983496, supported by cDNA: gi_18700152 [Arabidopsis >gi|10176824|dbj|BAB10146.1| contains similarity to protein
  misc_feature (271)..(573): Homolog of NCBI NO: 30690042 NR Description: serine threonine protein kinase -related thaliana] >gi|26452004|dbj|BAC43092.1| putative serine/threonine kinase [Arabidopsis thaliana] >gi|29029022|gb|AAO64890.1|
  misc_feature (282)..(573): Homolog of NCBI NO: 13447449 NR Description: receptor protein kinase PERK1 [Brassica napus]

SEQ ID NO: 94758 - DNA, 894 bp, Arabidopsis thaliana; identical to SEQ ID NO: 91002
  misc_feature (1)..(894): Ceres Seq. ID no. 12726064
  misc_feature: MA Experiment ID: 20000180 Result: Down-regulated in Transcription
  misc_feature: MA Experiment 20000180 PARAMETER Experiment Name: At_Germinating_Seeds_P Parameter: Age (hr) Value: 24 vs. 0
  misc_feature: MA Experiment 20000180 PARAMETER Experiment Name: At_Germinating_Seeds_P Parameter: Tissue Value: Germinating Seeds
  misc_feature: MA Experiment ID: 20000182 Result: Up-regulated in Transcription
  misc_feature: MA Experiment 20000182 PARAMETER Experiment Name: At_2mM_SA_P Parameter: Age (day) Value: 14
  misc_feature: MA Experiment 20000182 PARAMETER Experiment Name: At_2mM_SA_P Parameter: Organism Value: A. thaliana
  misc_feature: MA Experiment 20000182 PARAMETER Experiment Name: At_2mM_SA_P Parameter: Plant Line Value: WS
  misc_feature: MA Experiment 20000182 PARAMETER Experiment Name: At_2mM_SA_P Parameter: Timepoint (hr) Value: 6
  misc_feature: MA Experiment 20000182 PARAMETER Experiment Name: At_2mM_SA_P Parameter: Tissue Value: Aerial
  misc_feature: MA Experiment 20000182 PARAMETER Experiment Name: At_2mM_SA_P Parameter: Treatment Value: 2mM SA vs. No Treatment
  misc_feature: MA Experiment ID: 20000265 Result: Up-regulated in Transcription
  misc_feature: MA Experiment 20000265 PARAMETER Experiment Name: At_Open_Flower_P Parameter: Age (day) Value: 21
  misc_feature: MA Experiment 20000265 PARAMETER Experiment Name: At_Open_Flower_P Parameter: Plant Line Value: WS
  misc_feature: MA Experiment 20000265 PARAMETER Experiment Name: At_Open_Flower_P Parameter: Tissue Value: Closed Flower vs. Whole Plant
  misc_feature: MA Experiment ID: 20001451 Result: Down-regulated in Transcription
  misc_feature: MA Experiment 20001451 PARAMETER Experiment Name: At_Far-red-induction_P Parameter: Age (day) Value: 7
  misc_feature: MA Experiment 20001451 PARAMETER Experiment Name: At_Far-red-induction_P Parameter: Light Value: Far-red vs. White
  misc_feature: MA Experiment 20001451 PARAMETER Experiment Name: At_Far-red-induction_P Parameter: Organism Value: A. thaliana
  misc_feature: MA Experiment 20001451 PARAMETER Experiment Name: At_Far-red-induction_P Parameter: Plant Line Value: Columbia
  misc_feature: MA Experiment 20001451 PARAMETER Experiment Name: At_Far-red-induction_P Parameter: Timepoint (hr) Value: 24
  misc_feature: MA Experiment 20001451 PARAMETER Experiment Name: At_Far-red-induction_P Parameter: Tissue Value: Whole Plant

SEQ ID NO: 94759 - protein, 297 aa, Arabidopsis thaliana; identical to SEQ ID NO: 91003
  peptide (1)..(297): Ceres Seq. ID no. 12726065
  misc_feature (143)..(236): Pfam Name: Domain of unknown function (DUF588) Pfam Description: Domain of unknown function (DUF588)
  misc_feature (1)..(297): Homolog of NCBI NO: 15241975 NR Description: putative protein; protein id: At5g62820.1
  misc_feature (1)..(236): Homolog of NCBI NO: 10177460 NR Description: gene_id:MQB2.14~unknown protein [Arabidopsis
  misc_feature (42)..(296): Homolog of NCBI NO: 27754604 NR Description: unknown protein [Arabidopsis thaliana]
  misc_feature (203)..(297): Homolog of NCBI NO: 10177460 NR Description: gene_id:MQB2.14~unknown protein [Arabidopsis
  misc_feature (132)..(291): Homolog of NCBI NO: 15242642 NR Description: putative protein; protein id: At5g40300.1 thaliana] >gi|10178139|dbj|BAB11584.1| gene_id:MPO12.1~unknown
  misc_feature (23)..(236): Homolog of NCBI NO: 15227628 NR Description: hypothetical protein; protein id: At2g36330.1
  misc_feature (142)..(297): Homolog of NCBI NO: 34898210 NR Description: P0034A04.16 [Oryza sativa (japonica >gi|29837176|dbj|BAC75558.1| hypothetical protein [Oryza sativa
  misc_feature (67)..(92): Homolog of NCBI NO: 34898210 NR Description: P0034A04.16 [Oryza sativa (japonica >gi|29837176|dbj|BAC75558.1| hypothetical protein [Oryza sativa
  misc_feature (200)..(296): Homolog of NCBI NO: 15227628 NR Description: hypothetical protein; protein id: At2g36330.1
  misc_feature (183)..(287): Homolog of NCBI NO: 2598569 NR Description: putative start codon [Medicago truncatula]

SEQ ID NO: 94760 - protein, 295 aa, Arabidopsis thaliana; identical to SEQ ID NO: 91004
  peptide (1)..(295): Ceres Seq. ID no. 12726066
  misc_feature (141)..(234): Pfam Name: Domain of unknown function (DUF588) Pfam Description: Domain of unknown function (DUF588)
  misc_feature (1)..(295): Homolog of NCBI NO: 15241975 NR Description: putative protein; protein id: At5g62820.1
  misc_feature (1)..(234): Homolog of NCBI NO: 10177460 NR Description: gene_id:MQB2.14~unknown protein [Arabidopsis
  misc_feature (40)..(294): Homolog of NCBI NO: 27754604 NR Description: unknown protein [Arabidopsis thaliana]
  misc_feature (201)..(295): Homolog of NCBI NO: 10177460 NR Description: gene_id:MQB2.14~unknown protein [Arabidopsis
  misc_feature (130)..(289): Homolog of NCBI NO: 15242642 NR Description: putative protein; protein id: At5g40300.1 thaliana] >gi|10178139|dbj|BAB11584.1| gene_id:MPO12.1~unknown
  misc_feature (21)..(234): Homolog of NCBI NO: 15227628 NR Description: hypothetical protein; protein id: At2g36330.1
  misc_feature (140)..(295): Homolog of NCBI NO: 34898210 NR Description: P0034A04.16 [Oryza sativa (japonica >gi|29837176|dbj|BAC75558.1| hypothetical protein [Oryza sativa
  misc_feature (65)..(90): Homolog of NCBI NO: 34898210 NR Description: P0034A04.16 [Oryza sativa (japonica >gi|29837176|dbj|BAC75558.1| hypothetical protein [Oryza sativa
  misc_feature (198)..(294): Homolog of NCBI NO: 15227628 NR Description: hypothetical protein; protein id: At2g36330.1
  misc_feature (181)..(285): Homolog of NCBI NO: 2598569 NR Description: putative start codon [Medicago truncatula]

SEQ ID NO: 94761 - protein, 205 aa, Arabidopsis thaliana; identical to SEQ ID NO: 91005
  peptide (1)..(205): Ceres Seq. ID no. 12726067
  misc_feature (51)..(144): Pfam Name: Domain of unknown function (DUF588) Pfam Description: Domain of unknown function (DUF588)
  misc_feature (1)..(205): Homolog of NCBI NO: 15241975 NR Description: putative protein; protein id: At5g62820.1
  misc_feature (1)..(144): Homolog of NCBI NO: 10177460 NR Description: gene_id:MQB2.14~unknown protein [Arabidopsis
  misc_feature (1)..(204): Homolog of NCBI NO: 27754604 NR Description: unknown protein [Arabidopsis thaliana]
  misc_feature (111)..(205): Homolog of NCBI NO: 10177460 NR Description: gene_id:MQB2.14~unknown protein [Arabidopsis
  misc_feature (40)..(199): Homolog of NCBI NO: 15242642 NR Description: putative protein; protein id: At5g40300.1 thaliana] >gi|10178139|dbj|BAB11584.1| gene_id:MPO12.1~unknown
  misc_feature (1)..(144): Homolog of NCBI NO: 15227628 NR Description: hypothetical protein; protein id: At2g36330.1
  misc_feature (50)..(205): Homolog of NCBI NO: 34898210 NR Description: P0034A04.16 [Oryza sativa (japonica >gi|29837176|dbj|BAC75558.1| hypothetical protein [Oryza sativa
  misc_feature (108)..(204): Homolog of NCBI NO: 15227628 NR Description: hypothetical protein; protein id: At2g36330.1
  misc_feature (91)..(195): Homolog of NCBI NO: 2598569 NR Description: putative start codon [Medicago truncatula]
  misc_feature (1)..(113): Homolog of NCBI NO: 34911616 NR Description: P0039G05.10 [Oryza sativa (japonica

SEQ ID NO: 94762 - DNA, 942 bp, Arabidopsis thaliana; identical to SEQ ID NO: 91006
  misc_feature (1)..(942): Ceres Seq. ID no. 12726068
  misc_feature: MA Experiment ID: 20000185 Result: Up-regulated in Transcription
  misc_feature: MA Experiment 20000185 PARAMETER Experiment Name: At_Roots__P Parameter: Age (day) Value: 7 vs. 21
  misc_feature: MA Experiment 20000185 PARAMETER Experiment Name: At_Roots__P Parameter: Organism Value: A. thaliana
  misc_feature: MA Experiment 20000185 PARAMETER Experiment Name: At_Roots__P Parameter: Tissue Value: Roots vs. Whole Plant
  misc_feature: MA Experiment ID: 20000213 Result: Up-regulated in Transcription
  misc_feature: MA Experiment 20000213 PARAMETER Experiment Name: At_4deg_Cold_P Parameter: Timepoint (hr) Value: 2
  misc_feature: MA Experiment ID: 20000227 Result: Down-regulated in Transcription
  misc_feature: MA Experiment 20000227 PARAMETER Experiment Name: At_Root-Tips-vs-Tops_P Parameter: Tissue Value: Root Tips vs. Root Tops
  misc_feature: MA Experiment ID: 20000264 Result: Down-regulated in Transcription
  misc_feature: MA Experiment 20000264 PARAMETER Experiment Name: At_Open_Flower_P Parameter: Age (day) Value: 21
  misc_feature: MA Experiment 20000264 PARAMETER Experiment Name: At_Open_Flower_P Parameter: Plant Line Value: WS
  misc_feature: MA Experiment 20000264 PARAMETER Experiment Name: At_Open_Flower_P Parameter: Tissue Value: Open Flower vs. Whole Plant
  misc_feature: MA Experiment ID: 20000439 Result: Up-regulated in Transcription
  misc_feature: MA Experiment 20000439 PARAMETER Experiment Name: At_Roots__P Parameter: Age (day) Value: 14 vs. 21
  misc_feature: MA Experiment 20000439 PARAMETER Experiment Name: At_Roots__P Parameter: Organism Value: A. thaliana
  misc_feature: MA Experiment 20000439 PARAMETER Experiment Name: At_Roots__P Parameter: Tissue Value: Roots vs. Whole Plant
  misc_feature: MA Experiment ID: 20000453 Result: Down-regulated in Transcription
  misc_feature: MA Experiment 20000453 PARAMETER Experiment Name: At_100uM_ABA_P Parameter: Age (day) Value: 15
  misc_feature: MA Experiment 20000453 PARAMETER Experiment Name: At_100uM_ABA_P Parameter: Organism Value: A. thaliana
  misc_feature: MA Experiment 20000453 PARAMETER Experiment Name: At_100uM_ABA_P Parameter: Plant Line Value: WS
  misc_feature: MA Experiment 20000453 PARAMETER Experiment Name: At_100uM_ABA_P Parameter: Timepoint (hr) Value: 24
  misc_feature: MA Experiment 20000453 PARAMETER Experiment Name: At_100uM_ABA_P Parameter: Tissue Value: Aerial
  misc_feature: MA Experiment 20000453 PARAMETER Experiment Name: At_100uM_ABA_P Parameter: Treatment Value: 100uM ABA vs. No Treatment
  misc_feature: MA Experiment ID: 20000456 Result: Up-regulated in Transcription
  misc_feature: MA Experiment 20000456 PARAMETER Experiment Name: At_100uM_BA_P Parameter: Age (day) Value: 14
  misc_feature: MA Experiment 20000456 PARAMETER Experiment Name: At_100uM_BA_P Parameter: Organism Value: A. thaliana
  misc_feature: MA Experiment 20000456 PARAMETER Experiment Name: At_100uM_BA_P Parameter: Plant Line Value: WS
  misc_feature: MA Experiment 20000456 PARAMETER Experiment Name: At_100uM_BA_P Parameter: Timepoint (hr) Value: 6
  misc_feature: MA Experiment 20000456 PARAMETER Experiment Name: At_100uM_BA_P Parameter: Tissue Value: Aerial
  misc_feature: MA Experiment 20000456 PARAMETER Experiment Name: At_100uM_BA_P Parameter: Treatment Value: 100uM BA vs. No Treatment
  misc_feature: MA Experiment ID: 20000573 Result: Up-regulated in Transcription
  misc_feature: MA Experiment 20000573 PARAMETER Experiment Name: At_100uM_ABA_Mutants__P Parameter: Organism Value: A. thaliana
  misc_feature: MA Experiment 20000573 PARAMETER Experiment Name: At_100uM_ABA_Mutants__P Parameter: Plant Line Value: CS22 vs. Ler wt
  misc_feature: MA Experiment 20000573 PARAMETER Experiment Name: At_100uM_ABA_Mutants__P Parameter: Timepoint (hr) Value: N/A
  misc_feature: MA Experiment 20000573 PARAMETER Experiment Name: At_100uM_ABA_Mutants__P Parameter: Tissue Value: Whole Plant
  misc_feature: MA Experiment 20000573 PARAMETER Experiment Name: At_100uM_ABA_Mutants__P Parameter: Treatment Value: None
  misc_feature: MA Experiment ID: 20000709 Result: Up-regulated in Transcription
  misc_feature: MA Experiment 20000709 PARAMETER Experiment Name: At_15mM_NH4NO3_L-to-H_P Parameter: Age (hr) Value: 14
  misc_feature: MA Experiment 20000709 PARAMETER Experiment Name: At_15mM_NH4NO3_L-to-H_P Parameter: Organism Value: A. thaliana
  misc_feature: MA Experiment 20000709 PARAMETER Experiment Name: At_15mM_NH4NO3_L-to-H_P Parameter: Plant Line Value: WS
  misc_feature: MA Experiment 20000709 PARAMETER Experiment Name: At_15mM_NH4NO3_L-to-H_P Parameter: Timepoint (hr) Value: 4
  misc_feature: MA Experiment 20000709 PARAMETER Experiment Name: At_15mM_NH4NO3_L-to-H_P Parameter: Tissue Value: Aerial
  misc_feature: MA Experiment 20000709 PARAMETER Experiment Name: At_15mM_NH4NO3_L-to-H_P Parameter: Treatment Value: 15mM NH4NO3 vs. 30mM Mannitol
  misc_feature: MA Experiment ID: 20001248 Result: Down-regulated in Transcription
  misc_feature: MA Experiment 20001248 PARAMETER Experiment Name: At_Far-red-induction_P Parameter: Age (day) Value: 7
  misc_feature: MA Experiment 20001248 PARAMETER Experiment Name: At_Far-red-induction_P Parameter: Light Value: Far-red vs. White
  misc_feature: MA Experiment 20001248 PARAMETER Experiment Name: At_Far-red-induction_P Parameter: Organism Value: A. thaliana
  misc_feature: MA Experiment 20001248 PARAMETER Experiment Name: At_Far-red-induction_P Parameter: Plant Line Value: Columbia
  misc_feature: MA Experiment 20001248 PARAMETER Experiment Name: At_Far-red-induction_P Parameter: Timepoint (hr) Value: 4
  misc_feature: MA Experiment 20001248 PARAMETER Experiment Name: At_Far-red-induction_P Parameter: Tissue Value: Whole Plant
  misc_feature: MA Experiment ID: 20001450 Result: Down-regulated in Transcription
  misc_feature: MA Experiment 20001450 PARAMETER Experiment Name: At_Far-red-induction_P Parameter: Age (day) Value: 7
  misc_feature: MA Experiment 20001450 PARAMETER Experiment Name: At_Far-red-induction_P Parameter: Light Value: Far-red vs. White
  misc_feature: MA Experiment 20001450 PARAMETER Experiment Name: At_Far-red-induction_P Parameter: Organism Value: A. thaliana
  misc_feature: MA Experiment 20001450 PARAMETER Experiment Name: At_Far-red-induction_P Parameter: Plant Line Value: Columbia
  misc_feature: MA Experiment 20001450 PARAMETER Experiment Name: At_Far-red-induction_P Parameter: Timepoint (hr) Value: 8
  misc_feature: MA Experiment 20001450 PARAMETER Experiment Name: At_Far-red-induction_P Parameter: Tissue Value: Whole Plant
  misc_feature: MA Experiment ID: 20001451 Result: Down-regulated in Transcription
  misc_feature: MA Experiment 20001451 PARAMETER Experiment Name: At_Far-red-induction_P Parameter: Age (day) Value: 7
  misc_feature: MA Experiment 20001451 PARAMETER Experiment Name: At_Far-red-induction_P Parameter: Light Value: Far-red vs. White
  misc_feature: MA Experiment 20001451 PARAMETER Experiment Name: At_Far-red-induction_P Parameter: Organism Value: A. thaliana
  misc_feature: MA Experiment 20001451 PARAMETER Experiment Name: At_Far-red-induction_P Parameter: Plant Line Value: Columbia
  misc_feature: MA Experiment 20001451 PARAMETER Experiment Name: At_Far-red-induction_P Parameter: Timepoint (hr) Value: 24
  misc_feature: MA Experiment 20001451 PARAMETER Experiment Name: At_Far-red-induction_P Parameter: Tissue Value: Whole Plant
  misc_feature: MA Experiment ID: 20001458 Result: Up-regulated in Transcription
  misc_feature: MA Experiment 20001458 PARAMETER Experiment Name: At_50mM_NH4NO3_L-to-H_P Parameter: Age (day) Value: Undefined
  misc_feature: MA Experiment 20001458 PARAMETER Experiment Name: At_50mM_NH4NO3_L-to-H_P Parameter: Organism Value: Undefined
  misc_feature: MA Experiment 20001458 PARAMETER Experiment Name: At_50mM_NH4NO3_L-to-H_P Parameter: Plant Line Value: Undefined
  misc_feature: MA Experiment 20001458 PARAMETER Experiment Name: At_50mM_NH4NO3_L-to-H_P Parameter: Timepoint (hr) Value: 2
  misc_feature: MA Experiment 20001458 PARAMETER Experiment Name: At_50mM_NH4NO3_L-to-H_P Parameter: Tissue Value: Siliques
  misc_feature: MA Experiment 20001458 PARAMETER Experiment Name: At_50mM_NH4NO3_L-to-H_P Parameter: Treatment Value: 50mM NH4NO3 vs. 100mM Manitol
  misc_feature: MA Experiment ID: 20001554 Result: Down-regulated in Transcription
  misc_feature: MA Experiment 20001554 PARAMETER Experiment Name: At_Drought_Soil_Dry_P Parameter: Age (day) Value: 21
  misc_feature: MA Experiment 20001554 PARAMETER Experiment Name: At_Drought_Soil_Dry_P Parameter: Organism Value: A. thaliana
  misc_feature: MA Experiment 20001554 PARAMETER Experiment Name: At_Drought_Soil_Dry_P Parameter: Plant Line Value: WS
  misc_feature: MA Experiment 20001554 PARAMETER Experiment Name: At_Drought_Soil_Dry_P Parameter: Post Timepoint (hr) Value: None
  misc_feature: MA Experiment 20001554 PARAMETER Experiment Name: At_Drought_Soil_Dry_P Parameter: Post-Treatment Value: None
  misc_feature: MA Experiment 20001554 PARAMETER Experiment Name: At_Drought_Soil_Dry_P Parameter: Timepoint (day) Value: 7
  misc_feature: MA Experiment 20001554 PARAMETER Experiment Name: At_Drought_Soil_Dry_P Parameter: Treatment Value: Drought vs. No Drought
  misc_feature: MA Experiment ID: 20001557 Result: Up-regulated in Transcription
  misc_feature: MA Experiment 20001557 PARAMETER Experiment Name: At_Drought_Soil_Dry_P Parameter: Age (day) Value: 27
  misc_feature: MA Experiment 20001557 PARAMETER Experiment Name: At_Drought_Soil_Dry_P Parameter: Organism Value: A. thaliana
  misc_feature: MA Experiment 20001557 PARAMETER Experiment Name: At_Drought_Soil_Dry_P Parameter: Plant Line Value: WS
  misc_feature: MA Experiment 20001557 PARAMETER Experiment Name: At_Drought_Soil_Dry_P Parameter: Post Timepoint (hr) Value: 3
  misc_feature: MA Experiment 20001557 PARAMETER Experiment Name: At_Drought_Soil_Dry_P Parameter: Post-Treatment Value: Re-Water vs. No Drought
  misc_feature: MA Experiment 20001557 PARAMETER Experiment Name: At_Drought_Soil_Dry_P Parameter: Timepoint (day) Value: 13
  misc_feature: MA Experiment 20001557 PARAMETER Experiment Name: At_Drought_Soil_Dry_P Parameter: Treatment Value: Drought vs. No Drought
  misc_feature: MA Experiment ID: 20001558 Result: Up-regulated in Transcription
  misc_feature: MA Experiment 20001558 PARAMETER Experiment Name: At_Drought_Soil_Dry_P Parameter: Age (day) Value: 27
  misc_feature: MA Experiment 20001558 PARAMETER Experiment Name: At_Drought_Soil_Dry_P Parameter: Organism Value: A. thaliana
  misc_feature: MA Experiment 20001558 PARAMETER Experiment Name: At_Drought_Soil_Dry_P Parameter: Plant Line Value: WS
  misc_feature: MA Experiment 20001558 PARAMETER Experiment Name: At_Drought_Soil_Dry_P Parameter: Post Timepoint (hr) Value: 6
  misc_feature: MA Experiment 20001558 PARAMETER Experiment Name: At_Drought_Soil_Dry_P Parameter: Post-Treatment Value: Re-Water vs. No Drought
  misc_feature: MA Experiment 20001558 PARAMETER Experiment Name: At_Drought_Soil_Dry_P Parameter: Timepoint (day) Value: 13
  misc_feature: MA Experiment 20001558 PARAMETER Experiment Name: At_Drought_Soil_Dry_P Parameter: Treatment Value: Drought vs. No Drought
  misc_feature: MA Experiment ID: 20001770 Result: Down-regulated in Transcription
  misc_feature: MA Experiment 20001770 PARAMETER Experiment Name: At_Far-red-enriched-adult_P Parameter: Age (day) Value: 28
  misc_feature: MA Experiment 20001770 PARAMETER Experiment Name: At_Far-red-enriched-adult_P Parameter: Light Value: Far-red enriched vs. White
  misc_feature: MA Experiment 20001770 PARAMETER Experiment Name: At_Far-red-enriched-adult_P Parameter: Organism Value: A. thaliana
  misc_feature: MA Experiment 20001770 PARAMETER Experiment Name: At_Far-red-enriched-adult_P Parameter: Plant Line Value: Columbia
  misc_feature: MA Experiment 20001770 PARAMETER Experiment Name: At_Far-red-enriched-adult_P Parameter: Timepoint (hr) Value: 8
  misc_feature: MA Experiment 20001770 PARAMETER Experiment Name: At_Far-red-enriched-adult_P Parameter: Tissue Value: Aerial

SEQ ID NO: 94763 - protein, 186 aa, Arabidopsis thaliana; identical to SEQ ID NO: 91007
  peptide (1)..(186): Ceres Seq. ID no. 12726069
  misc_feature (25)..(144): Pfam Name: Response regulator receiver domain Pfam Description: Response regulator receiver domain
  misc_feature (1)..(186): Homolog of NCBI NO: 15242000 NR Description: response regulator 6 (ARR6); protein id: supported by cDNA: gi_3953600 [Arabidopsis thaliana]
  misc_feature (1)..(102): Homolog of NCBI NO: 11358765 NR Description: response regulator 6 [imported] - Arabidopsis >gi|3953605|dbj|BAA34730.1| response regulator 6 [Arabidopsis
  misc_feature (115)..(186): Homolog of NCBI NO: 11358765 NR Description: response regulator 6 [imported] - Arabidopsis >gi|3953605|dbj|BAA34730.1| response regulator 6 [Arabidopsis
  misc_feature (1)..(186): Homolog of NCBI NO: 15228338 NR Description: response reactor 2 (ATRR2); protein id: supported by cDNA: gi_18252910, supported by cDNA: gi_3273197, by cDNA: gi_3323580, supported by cDNA: gi_3953598 [Arabidopsis
  misc_feature (1)..(186): Homolog of NCBI NO: 11358763 NR Description: response regulator 5 [imported] - Arabidopsis >gi|3953599|dbj|BAA34727.1| response regulator 5 [Arabidopsis
  misc_feature (1)..(186): Homolog of NCBI NO: 11358906 NR Description: two-component response regulator homolog
  misc_feature (20)..(157): Homolog of NCBI NO: 33330864 NR Description: type-A response regulator [Catharanthus roseus]
  misc_feature (1)..(173): Homolog of NCBI NO: 15221927 NR Description: response regulator 5, putative; protein id: supported by cDNA: gi_3953602 [Arabidopsis thaliana]
  misc_feature (17)..(172): Homolog of NCBI NO: 15222035 NR Description: response regulator 7, putative; protein id: supported by cDNA: gi_11870064 [Arabidopsis thaliana]
  misc_feature (23)..(181): Homolog of NCBI NO: 15218550 NR Description: putative response regulator 3; protein id: supported by cDNA: gi_3273195, supported by cDNA: gi_3323582, by cDNA: gi_3953596 [Arabidopsis thaliana]

SEQ ID NO: 94764 - protein, 182 aa, Arabidopsis thaliana; identical to SEQ ID NO: 91008
  peptide (1)..(182): Ceres Seq. ID no. 12726070
  misc_feature (21)..(140): Pfam Name: Response regulator receiver domain Pfam Description: Response regulator receiver domain
  misc_feature (1)..(182): Homolog of NCBI NO: 15242000 NR Description: response regulator 6 (ARR6); protein id: supported by cDNA: gi_3953600 [Arabidopsis thaliana]
  misc_feature (1)..(98): Homolog of NCBI NO: 11358765 NR Description: response regulator 6 [imported] - Arabidopsis >gi|3953605|dbj|BAA34730.1| response regulator 6 [Arabidopsis
  misc_feature (111)..(182): Homolog of NCBI NO: 11358765 NR Description: response regulator 6 [imported] - Arabidopsis >gi|3953605|dbj|BAA34730.1| response regulator 6 [Arabidopsis
  misc_feature (1)..(182): Homolog of NCBI NO: 15228338 NR Description: response reactor 2 (ATRR2); protein id: supported by cDNA: gi_18252910, supported by cDNA: gi_3273197, by cDNA: gi_3323580, supported by cDNA: gi_3953598 [Arabidopsis
  misc_feature (1)..(182): Homolog of NCBI NO: 11358763 NR Description: response regulator 5 [imported] - Arabidopsis >gi|3953599|dbj|BAA34727.1| response regulator 5 [Arabidopsis
  misc_feature (1)..(182): Homolog of NCBI NO: 11358906 NR Description: two-component response regulator homolog
  misc_feature (16)..(153): Homolog of NCBI NO: 33330864 NR Description: type-A response regulator [Catharanthus roseus]
  misc_feature (1)..(169): Homolog of NCBI NO: 15221927 NR Description: response regulator 5, putative; protein id: supported by cDNA: gi_3953602 [Arabidopsis thaliana]
  misc_feature (13)..(168): Homolog of NCBI NO: 15222035 NR Description: response regulator 7, putative; protein id: supported by cDNA: gi_11870064 [Arabidopsis thaliana]
  misc_feature (19)..(177): Homolog of NCBI NO: 15218550 NR Description: putative response regulator 3; protein id: supported by cDNA: gi_3273195, supported by cDNA: gi_3323582, by cDNA: gi_3953596 [Arabidopsis thaliana]

SEQ ID NO: 94765 - protein, 177 aa, Arabidopsis thaliana; identical to SEQ ID NO: 91009
  peptide (1)..(177): Ceres Seq. ID no. 12726071
  misc_feature (16)..(135): Pfam Name: Response regulator receiver domain Pfam Description: Response regulator receiver domain
  misc_feature (1)..(177): Homolog of NCBI NO: 15242000 NR Description: response regulator 6 (ARR6); protein id: supported by cDNA: gi_3953600 [Arabidopsis thaliana]
  misc_feature (1)..(93): Homolog of NCBI NO: 11358765 NR Description: response regulator 6 [imported] - Arabidopsis >gi|3953605|dbj|BAA34730.1| response regulator 6 [Arabidopsis
  misc_feature (106)..(177): Homolog of NCBI NO: 11358765 NR Description: response regulator 6 [imported] - Arabidopsis >gi|3953605|dbj|BAA34730.1| response regulator 6 [Arabidopsis
  misc_feature (1)..(177): Homolog of NCBI NO: 15228338 NR Description: response reactor 2 (ATRR2); protein id: supported by cDNA: gi_18252910, supported by cDNA: gi_3273197, by cDNA: gi_3323580, supported by cDNA: gi_3953598 [Arabidopsis
  misc_feature (1)..(177): Homolog of NCBI NO: 11358763 NR Description: response regulator 5 [imported] - Arabidopsis >gi|3953599|dbj|BAA34727.1| response regulator 5 [Arabidopsis
  misc_feature (1)..(177): Homolog of NCBI NO: 11358906 NR Description: two-component response regulator homolog
  misc_feature (11)..(148): Homolog of NCBI NO: 33330864 NR Description: type-A response regulator [Catharanthus roseus]
  misc_feature (1)..(164): Homolog of NCBI NO: 15221927 NR Description: response regulator 5, putative; protein id: supported by cDNA: gi_3953602 [Arabidopsis thaliana]
  misc_feature (8)..(163): Homolog of NCBI NO: 15222035 NR Description: response regulator 7, putative; protein id: supported by cDNA: gi_11870064 [Arabidopsis thaliana]
  misc_feature (14)..(172): Homolog of NCBI NO: 15218550 NR Description: putative response regulator 3; protein id: supported by cDNA: gi_3273195, supported by cDNA: gi_3323582, by cDNA: gi_3953596 [Arabidopsis thaliana]

SEQ ID NO: 94766 - DNA, 985 bp, Arabidopsis thaliana; identical to SEQ ID NO: 91010
  misc_feature (1)..(985): Ceres Seq. ID no. 12726116
  misc_feature: MA Experiment ID: 20000306 Result: Up-regulated in Transcription
  misc_feature: MA Experiment 20000306 PARAMETER Experiment Name: At_Germinating_Seeds_Sub_P Parameter: Age (hr) Value: 6 vs. 0
  misc_feature: MA Experiment 20000306 PARAMETER Experiment Name: At_Germinating_Seeds_Sub_P Parameter: Organism Value: A. thaliana
  misc_feature: MA Experiment 20000306 PARAMETER Experiment Name: At_Germinating_Seeds_Sub_P Parameter: Plant Line Value: WS
  misc_feature: MA Experiment 20000306 PARAMETER Experiment Name: At_Germinating_Seeds_Sub_P Parameter: Tissue Value: Germinating Seeds
  misc_feature: MA Experiment ID: 20000307 Result: Up-regulated in Transcription
  misc_feature: MA Experiment 20000307 PARAMETER Experiment Name: At_Germinating_Seeds_Sub_P Parameter: Age (hr) Value: 24 vs. 0
  misc_feature: MA Experiment 20000307 PARAMETER Experiment Name: At_Germinating_Seeds_Sub_P Parameter: Organism Value: A. thaliana
  misc_feature: MA Experiment 20000307 PARAMETER Experiment Name: At_Germinating_Seeds_Sub_P Parameter: Plant Line Value: WS
  misc_feature: MA Experiment 20000307 PARAMETER Experiment Name: At_Germinating_Seeds_Sub_P Parameter: Tissue Value: Germinating Seeds
  misc_feature: MA Experiment ID: 20000314 Result: Down-regulated in Transcription
  misc_feature: MA Experiment 20000314 PARAMETER Experiment Name: At_14day_Shoots-Roots_Sub_P Parameter: Age (day) Value: 14
  misc_feature: MA Experiment 20000314 PARAMETER Experiment Name: At_14day_Shoots-Roots_Sub_P Parameter: Organism Value: A. thaliana
  misc_feature: MA Experiment 20000314 PARAMETER Experiment Name: At_14day_Shoots-Roots_Sub_P Parameter: Plant Line Value: WS
  misc_feature: MA Experiment 20000314 PARAMETER Experiment Name: At_14day_Shoots-Roots_Sub_P Parameter: Tissue Value: Roots vs. Whole Plant

SEQ ID NO: 94767 - protein, 253 aa, Arabidopsis thaliana; identical to SEQ ID NO: 91011
  peptide (1)..(253): Ceres Seq. ID no. 12726117
  misc_feature (4)..(253): Homolog of NCBI NO: 15242784 NR Description: transcription factor Hap5a-like protein; protein At5g63470.1, supported by cDNA: gi_18252934 [Arabidopsis
  misc_feature (9)..(253): Homolog of NCBI NO: 15228405 NR Description: transcription factor Hap5a; protein id: supported by cDNA: 21604., supported by cDNA: gi_20260195
  misc_feature (96)..(253): Homolog of NCBI NO: 2398531 NR Description: Transcription factor [Arabidopsis thaliana]
  misc_feature (49)..(223): Homolog of NCBI NO: 15221912 NR Description: heme activated protein, putative; protein id: [Arabidopsis thaliana] >gi|3776575|gb|AAC64892.1| Similar to
  misc_feature (34)..(230): Homolog of NCBI NO: 15223986 NR Description: putative transcription factor; protein id: supported by cDNA: 1911. [Arabidopsis thaliana] putative transcription factor [Arabidopsis thaliana]
  misc_feature (36)..(230): Homolog of NCBI NO: 25372763 NR Description: hypothetical protein [imported] - Arabidopsis
  misc_feature (34)..(230): Homolog of NCBI NO: 6289057 NR Description: heme activated protein [Arabidopsis thaliana]
  misc_feature (4)..(189): Homolog of NCBI NO: 15223482 NR Description: transcription factor, putative; protein id: supported by cDNA: 26157., supported by cDNA: gi_18252952 thaliana] >gi|18252953|gb|AAL62403.1| transcription putative
  misc_feature (4)..(189): Homolog of NCBI NO: 21554704 NR Description: transcription factor, putative [Arabidopsis
  misc_feature (16)..(189): Homolog of NCBI NO: 5257260 NR Description: Similar to sequence of BAC F7G19 from Arabidopsis

SEQ ID NO: 94768 - protein, 250 aa, Arabidopsis thaliana; identical to SEQ ID NO: 91012
  peptide (1)..(250): Ceres Seq. ID no. 12726118
  misc_feature (1)..(250): Homolog of NCBI NO: 15242784 NR Description: transcription factor Hap5a-like protein; protein At5g63470.1, supported by cDNA: gi_18252934 [Arabidopsis
  misc_feature (6)..(250): Homolog of NCBI NO: 15228405 NR Description: transcription factor Hap5a; protein id: supported by cDNA: 21604., supported by cDNA: gi_20260195
  misc_feature (93)..(250): Homolog of NCBI NO: 2398531 NR Description: Transcription factor [Arabidopsis thaliana]
  misc_feature (46)..(220): Homolog of NCBI NO: 15221912 NR Description: heme activated protein, putative; protein id: [Arabidopsis thaliana] >gi|3776575|gb|AAC64892.1| Similar to
  misc_feature (31)..(227): Homolog of NCBI NO: 15223986 NR Description: putative transcription factor; protein id: supported by cDNA: 1911. [Arabidopsis thaliana] putative transcription factor [Arabidopsis thaliana]
  misc_feature (33)..(227): Homolog of NCBI NO: 25372763 NR Description: hypothetical protein [imported] - Arabidopsis
  misc_feature (31)..(227): Homolog of NCBI NO: 6289057 NR Description: heme activated protein [Arabidopsis thaliana]
  misc_feature (1)..(186): Homolog of NCBI NO: 15223482 NR Description: transcription factor, putative; protein id: supported by cDNA: 26157., supported by cDNA: gi_18252952 thaliana] >gi|18252953|gb|AAL62403.1| transcription putative
  misc_feature (1)..(186): Homolog of NCBI NO: 21554704 NR Description: transcription factor, putative [Arabidopsis
  misc_feature (13)..(186): Homolog of NCBI NO: 5257260 NR Description: Similar to sequence of BAC F7G19 from Arabidopsis

SEQ ID NO: 94769 - protein, 192 aa, Arabidopsis thaliana; identical to SEQ ID NO: 78253
  peptide (1)..(192): Ceres Seq. ID no. 12726119
  misc_feature (1)..(192): Homolog of NCBI NO: 15242784 NR Description: transcription factor Hap5a-like protein; protein At5g63470.1, supported by cDNA: gi_18252934 [Arabidopsis
  misc_feature (1)..(192): Homolog of NCBI NO: 15228405 NR Description: transcription factor Hap5a; protein id: supported by cDNA: 21604., supported by cDNA: gi_20260195
  misc_feature (35)..(192): Homolog of NCBI NO: 2398531 NR Description: Transcription factor [Arabidopsis thaliana]
  misc_feature (1)..(162): Homolog of NCBI NO: 15221912 NR Description: heme activated protein, putative; protein id: [Arabidopsis thaliana] >gi|3776575|gb|AAC64892.1| Similar to
  misc_feature (1)..(169): Homolog of NCBI NO: 15223986 NR Description: putative transcription factor; protein id: supported by cDNA: 1911. [Arabidopsis thaliana] putative transcription factor [Arabidopsis thaliana]
  misc_feature (1)..(169): Homolog of NCBI NO: 25372763 NR Description: hypothetical protein [imported] - Arabidopsis
  misc_feature (1)..(169): Homolog of NCBI NO: 6289057 NR Description: heme activated protein [Arabidopsis thaliana]
  misc_feature (1)..(128): Homolog of NCBI NO: 15223482 NR Description: transcription factor, putative; protein id: supported by cDNA: 26157., supported by cDNA: gi_18252952 thaliana] >gi|18252953|gb|AAL62403.1| transcription putative
  misc_feature (1)..(128): Homolog of NCBI NO: 21554704 NR Description: transcription factor, putative [Arabidopsis
  misc_feature (1)..(128): Homolog of NCBI NO: 5257260 NR Description: Similar to sequence of BAC F7G19 from Arabidopsis

SEQ ID NO: 94770 - DNA, 1533 bp, Arabidopsis thaliana; identical to SEQ ID NO: 91014
  misc_feature (1)..(1533): Ceres Seq. ID no. 12726138
  misc_feature: MA Experiment ID: 20000173 Result: Down-regulated in Transcription
  misc_feature: MA Experiment 20000173 PARAMETER Experiment Name: At_42deg_Heat_P Parameter: Age (day) Value: 14
  misc_feature: MA Experiment 20000173 PARAMETER Experiment Name: At_42deg_Heat_P Parameter: Organism Value: A. thaliana
  misc_feature: MA Experiment 20000173 PARAMETER Experiment Name: At_42deg_Heat_P Parameter: Plant Line Value: WS
  misc_feature: MA Experiment 20000173 PARAMETER Experiment Name: At_42deg_Heat_P Parameter: Temperature (deg C) Value: 42 vs. 22
  misc_feature: MA Experiment 20000173 PARAMETER Experiment Name: At_42deg_Heat_P Parameter: Timepoint (hr) Value: 6
  misc_feature: MA Experiment 20000173 PARAMETER Experiment Name: At_42deg_Heat_P Parameter: Tissue Value: Aerial
  misc_feature: MA Experiment ID: 20000184 Result: Down-regulated in Transcription
  misc_feature: MA Experiment 20000184 PARAMETER Experiment Name: At_Shoots__P Parameter: Age (day) Value: 7
  misc_feature: MA Experiment 20000184 PARAMETER Experiment Name: At_Shoots__P Parameter: Tissue Value: Shoots vs. Whole Plant
  misc_feature: MA Experiment ID: 20000496 Result: Down-regulated in Transcription
  misc_feature: MA Experiment 20000496 PARAMETER Experiment Name: At_Guard_Cells_P Parameter: Harvest Date Value: 7/19/2002
  misc_feature: MA Experiment 20000496 PARAMETER Experiment Name: At_Guard_Cells_P Parameter: Organism Value: Canola
  misc_feature: MA Experiment 20000496 PARAMETER Experiment Name: At_Guard_Cells_P Parameter: Tissue Value: Guard Cells vs. Leaves
  misc_feature: MA Experiment ID: 20000527 Result: Down-regulated in Transcription
  misc_feature: MA Experiment 20000527 PARAMETER Experiment Name: At_10percent_PEG_P Parameter: Age (day) Value: 20
  misc_feature: MA Experiment 20000527 PARAMETER Experiment Name: At_10percent_PEG_P Parameter: Organism Value: A. thaliana
  misc_feature: MA Experiment 20000527 PARAMETER Experiment Name: At_10percent_PEG_P Parameter: Plant Line Value: WS
  misc_feature: MA Experiment 20000527 PARAMETER Experiment Name: At_10percent_PEG_P Parameter: Timepoint (day) Value: 20
  misc_feature: MA Experiment 20000527 PARAMETER Experiment Name: At_10percent_PEG_P Parameter: Tissue Value: Whole Plant
  misc_feature: MA Experiment 20000527 PARAMETER Experiment Name: At_10percent_PEG_P Parameter: Treatment Value: 10percent PEG vs. No Treatment

SEQ ID NO: 94771 - protein, 510 aa, Arabidopsis thaliana; identical to SEQ ID NO: 91015
  peptide (1)..(510): Ceres Seq. ID no. 12726139
  misc_feature (379)..(510): Pfam Name: Pyruvate kinase, alpha/beta domain Pfam Description: Pyruvate kinase, alpha/beta domain
  misc_feature (1)..(510): Homolog of NCBI NO: 15242863 NR Description: pyruvate kinase; protein id: At5g63680.1 thaliana] >gi|10177049|dbj|BAB10461.1| pyruvate kinase
  misc_feature (1)..(510): Homolog of NCBI NO: 15242313 NR Description: pyruvate kinase; protein id: At5g08570.1 thaliana] >gi|9759351|dbj|BAB10006.1| pyruvate kinase

SEQ ID NO: 94772 - protein, 474 aa, Arabidopsis thaliana; identical to SEQ ID NO: 91016
  peptide (1)..(474): Ceres Seq. ID no. 12726140
  misc_feature (343)..(474): Pfam Name: Pyruvate kinase, alpha/beta domain Pfam Description: Pyruvate kinase, alpha/beta domain
  misc_feature (1)..(474): Homolog of NCBI NO: 15242863 NR Description: pyruvate kinase; protein id: At5g63680.1 thaliana] >gi|10177049|dbj|BAB10461.1| pyruvate kinase
  misc_feature (1)..(474): Homolog of NCBI NO: 15242313 NR Description: pyruvate kinase; protein id: At5g08570.1 thaliana] >gi|9759351|dbj|BAB10006.1| pyruvate kinase

SEQ ID NO: 94773 - protein, 465 aa, Arabidopsis thaliana; identical to SEQ ID NO: 91017
  peptide (1)..(465): Ceres Seq. ID no. 12726141
  misc_feature (334)..(465): Pfam Name: Pyruvate kinase, alpha/beta domain Pfam Description: Pyruvate kinase, alpha/beta domain
  misc_feature (1)..(465): Homolog of NCBI NO: 15242863 NR Description: pyruvate kinase; protein id: At5g63680.1 thaliana] >gi|10177049|dbj|BAB10461.1| pyruvate kinase
  misc_feature (1)..(465): Homolog of NCBI NO: 15242313 NR Description: pyruvate kinase; protein id: At5g08570.1 thaliana] >gi|9759351|dbj|BAB10006.1| pyruvate kinase

SEQ ID NO: 94774 - DNA, 420 bp, Arabidopsis thaliana; identical to SEQ ID NO: 91018
  misc_feature (1)..(420): Ceres Seq. ID no. 12726142
  misc_feature: MA Experiment ID: 20000184 Result: Down-regulated in Transcription
  misc_feature: MA Experiment 20000184 PARAMETER Experiment Name: At_Shoots__P Parameter: Age (day) Value: 7
  misc_feature: MA Experiment 20000184 PARAMETER Experiment Name: At_Shoots__P Parameter: Tissue Value: Shoots vs. Whole Plant
  misc_feature: MA Experiment ID: 20000496 Result: Up-regulated in Transcription
  misc_feature: MA Experiment 20000496 PARAMETER Experiment Name: At_Guard_Cells_P Parameter: Harvest Date Value: 7/19/2002
  misc_feature: MA Experiment 20000496 PARAMETER Experiment Name: At_Guard_Cells_P Parameter: Organism Value: Canola
  misc_feature: MA Experiment 20000496 PARAMETER Experiment Name: At_Guard_Cells_P Parameter: Tissue Value: Guard Cells vs. Leaves

SEQ ID NO: 94775 - protein, 139 aa, Arabidopsis thaliana; identical to SEQ ID NO: 91019
  peptide (1)..(139): Ceres Seq. ID no. 12726143
  misc_feature (42)..(107): Pfam Name: OB-fold nucleic acid binding domain Pfam Description: OB-fold nucleic acid binding domain
  misc_feature (1)..(139): Homolog of NCBI NO: 15242865 NR Description: unknown protein; protein id: At5g63690.1 thaliana] >gi|10177050|dbj|BAB10462.1| gene_id:MBK5.17~unknown
  misc_feature (5)..(138): Homolog of NCBI NO: 34898746 NR Description: hypothetical protein~similar to Arabidopsis
  misc_feature (5)..(138): Homolog of NCBI NO: 34898750 NR Description: hypothetical protein~similar to Arabidopsis
  misc_feature (2)..(117): Homolog of NCBI NO: 13129048 NR Description: hypothetical protein MGC2731 [Homo sapiens] Unknown (protein for MGC:2731) [Homo sapiens]
  misc_feature (2)..(117): Homolog of NCBI NO: 28076937 NR Description: RIKEN cDNA 2610036N15 [Mus musculus]
  misc_feature (2)..(117): Homolog of NCBI NO: 34862206 NR Description: similar to RIKEN cDNA 2610036N15 [Rattus
  misc_feature (3)..(117): Homolog of NCBI NO: 30844321 NR Description: RIKEN cDNA 5830411E10 [Mus musculus]
  misc_feature (3)..(117): Homolog of NCBI NO: 26340138 NR Description: unnamed protein product [Mus musculus]
  misc_feature (3)..(117): Homolog of NCBI NO: 16877754 NR Description: Similar to RIKEN cDNA 4930434H03 gene [Homo
  misc_feature (14)..(110): Homolog of NCBI NO: 39585210 NR Description: Hypothetical protein CBG00417 [Caenorhabditis

SEQ ID NO: 94776 - protein, 70 aa, Arabidopsis thaliana; identical to SEQ ID NO: 91020
  peptide (1)..(70): Ceres Seq. ID no. 12726144

SEQ ID NO: 94777 - DNA, 2063 bp, Arabidopsis thaliana; identical to SEQ ID NO: 91021
  misc_feature (1)..(2063): Ceres Seq. ID no. 12726145
  misc_feature: MA Experiment ID: 20000180 Result: Up-regulated in Transcription
  misc_feature: MA Experiment 20000180 PARAMETER Experiment Name: At_Germinating_Seeds_P Parameter: Age (hr) Value: 24 vs. 0
  misc_feature: MA Experiment 20000180 PARAMETER Experiment Name: At_Germinating_Seeds_P Parameter: Tissue Value: Germinating Seeds
  misc_feature: MA Experiment ID: 20000184 Result: Down-regulated in Transcription
  misc_feature: MA Experiment 20000184 PARAMETER Experiment Name: At_Shoots__P Parameter: Age (day) Value: 7
  misc_feature: MA Experiment 20000184 PARAMETER Experiment Name: At_Shoots__P Parameter: Tissue Value: Shoots vs. Whole Plant
  misc_feature: MA Experiment ID: 20000227 Result: Down-regulated in Transcription
  misc_feature: MA Experiment 20000227 PARAMETER Experiment Name: At_Root-Tips-vs-Tops_P Parameter: Tissue Value: Root Tips vs. Root Tops
  misc_feature: MA Experiment ID: 20000234 Result: Down-regulated in Transcription
  misc_feature: MA Experiment 20000234 PARAMETER Experiment Name: At_Siliques_P Parameter: Age (day) Value: 21
  misc_feature: MA Experiment 20000234 PARAMETER Experiment Name: At_Siliques_P Parameter: Organism Value: A. thaliana
  misc_feature: MA Experiment 20000234 PARAMETER Experiment Name: At_Siliques_P Parameter: Plant Line Value: WS
  misc_feature: MA Experiment 20000234 PARAMETER Experiment Name: At_Siliques_P Parameter: Tissue Value: Less Than 5mm Siliques vs. Whole Plant
  misc_feature: MA Experiment ID: 20000235 Result: Down-regulated in Transcription
  misc_feature: MA Experiment 20000235 PARAMETER Experiment Name: At_Siliques_P Parameter: Age (day) Value: 21
  misc_feature: MA Experiment 20000235 PARAMETER Experiment Name: At_Siliques_P Parameter: Organism Value: A. thaliana
  misc_feature: MA Experiment 20000235 PARAMETER Experiment Name: At_Siliques_P Parameter: Plant Line Value: WS
  misc_feature: MA Experiment 20000235 PARAMETER Experiment Name: At_Siliques_P Parameter: Tissue Value: 5-10mm Siliques vs. Whole Plant
  misc_feature: MA Experiment ID: 20000265 Result: Down-regulated in Transcription
  misc_feature: MA Experiment 20000265 PARAMETER Experiment Name: At_Open_Flower_P Parameter: Age (day) Value: 21
  misc_feature: MA Experiment 20000265 PARAMETER Experiment Name: At_Open_Flower_P Parameter: Plant Line Value: WS
  misc_feature: MA Experiment 20000265 PARAMETER Experiment Name: At_Open_Flower_P Parameter: Tissue Value: Closed Flower vs. Whole Plant
  misc_feature: MA Experiment ID: 20000496 Result: Up-regulated in Transcription
  misc_feature: MA Experiment 20000496 PARAMETER Experiment Name: At_Guard_Cells_P Parameter: Harvest Date Value: 7/19/2002
  misc_feature: MA Experiment 20000496 PARAMETER Experiment Name: At_Guard_Cells_P Parameter: Organism Value: Canola
  misc_feature: MA Experiment 20000496 PARAMETER Experiment Name: At_Guard_Cells_P Parameter: Tissue Value: Guard Cells vs. Leaves
  misc_feature: MA Experiment ID: 20001558 Result: Down-regulated in Transcription
  misc_feature: MA Experiment 20001558 PARAMETER Experiment Name: At_Drought_Soil_Dry_P Parameter: Age (day) Value: 27
  misc_feature: MA Experiment 20001558 PARAMETER Experiment Name: At_Drought_Soil_Dry_P Parameter: Organism Value: A. thaliana
  misc_feature: MA Experiment 20001558 PARAMETER Experiment Name: At_Drought_Soil_Dry_P Parameter: Plant Line Value: WS
  misc_feature: MA Experiment 20001558 PARAMETER Experiment Name: At_Drought_Soil_Dry_P Parameter: Post Timepoint (hr) Value: 6
  misc_feature: MA Experiment 20001558 PARAMETER Experiment Name: At_Drought_Soil_Dry_P Parameter: Post-Treatment Value: Re-Water vs. No Drought
  misc_feature: MA Experiment 20001558 PARAMETER Experiment Name: At_Drought_Soil_Dry_P Parameter: Timepoint (day) Value: 13
  misc_feature: MA Experiment 20001558 PARAMETER Experiment Name: At_Drought_Soil_Dry_P Parameter: Treatment Value: Drought vs. No Drought

SEQ ID NO: 94778 - protein, 614 aa, Arabidopsis thaliana; identical to SEQ ID NO: 91022
  peptide (1)..(614): Ceres Seq. ID no. 12726146
  misc_feature (36)..(614): Homolog of NCBI NO: 10177052 NR Description: receptor-like protein kinase [Arabidopsis
  misc_feature (92)..(614): Homolog of NCBI NO: 11358729 NR Description: protein serine/threonine kinase-like protein -
  misc_feature (92)..(614): Homolog of NCBI NO: 22326703 NR Description: protein serine/threonine kinase-like protein; id: At5g10290.1, supported by cDNA: gi_20260259 [Arabidopsis
  misc_feature (92)..(614): Homolog of NCBI NO: 20260260 NR Description: protein serine/threonine kinase-like protein
  misc_feature (97)..(614): Homolog of NCBI NO: 15238386 NR Description: receptor-like protein kinase; protein id:
  misc_feature (51)..(614): Homolog of NCBI NO: 25406123 NR Description: hypothetical protein F14O23.21 [imported] - thaliana >gi|7239510|gb|AAF43236.1|AC012654_20 Contains
  misc_feature (97)..(614): Homolog of NCBI NO: 15217584 NR Description: protein kinase, putative; protein id:
  misc_feature (97)..(614): Homolog of NCBI NO: 15081616 NR Description: At1g71830/F14O23_24 [Arabidopsis thaliana]
  misc_feature (97)..(614): Homolog of NCBI NO: 13897310 NR Description: SERK2 protein [Zea mays]
  misc_feature (97)..(579): Homolog of NCBI NO: 30678986 NR Description: leucine-rich repeat protein kinase family thaliana] >gi|15810409|gb|AAL07092.1| unknown protein

SEQ ID NO: 94779 - protein, 579 aa, Arabidopsis thaliana; identical to SEQ ID NO: 91023
  peptide (1)..(579): Ceres Seq. ID no. 12726147
  misc_feature (1)..(579): Homolog of NCBI NO: 10177052 NR Description: receptor-like protein kinase [Arabidopsis
  misc_feature (57)..(579): Homolog of NCBI NO: 11358729 NR Description: protein serine/threonine kinase-like protein -
  misc_feature (57)..(579): Homolog of NCBI NO: 22326703 NR Description: protein serine/threonine kinase-like protein; id: At5g10290.1, supported by cDNA: gi_20260259 [Arabidopsis
  misc_feature (57)..(579): Homolog of NCBI NO: 20260260 NR Description: protein serine/threonine kinase-like protein
  misc_feature (62)..(579): Homolog of NCBI NO: 15238386 NR Description: receptor-like protein kinase; protein id:
  misc_feature (16)..(579): Homolog of NCBI NO: 25406123 NR Description: hypothetical protein F14O23.21 [imported] - thaliana >gi|7239510|gb|AAF43236.1|AC012654_20 Contains
  misc_feature (62)..(579): Homolog of NCBI NO: 15217584 NR Description: protein kinase, putative; protein id:
  misc_feature (62)..(579): Homolog of NCBI NO: 15081616 NR Description: At1g71830/F14O23_24 [Arabidopsis thaliana]
  misc_feature (62)..(579): Homolog of NCBI NO: 13897310 NR Description: SERK2 protein [Zea mays]
  misc_feature (62)..(544): Homolog of NCBI NO: 30678986 NR Description: leucine-rich repeat protein kinase family thaliana] >gi|15810409|gb|AAL07092.1| unknown protein

SEQ ID NO: 94780 - protein, 476 aa, Arabidopsis thaliana; identical to SEQ ID NO: 91024
  peptide (1)..(476): Ceres Seq. ID no. 12726148
  misc_feature (1)..(476): Homolog of NCBI NO: 10177052 NR Description: receptor-like protein kinase [Arabidopsis
  misc_feature (1)..(476): Homolog of NCBI NO: 11358729 NR Description: protein serine/threonine kinase-like protein -
  misc_feature (1)..(476): Homolog of NCBI NO: 22326703 NR Description: protein serine/threonine kinase-like protein; id: At5g10290.1, supported by cDNA: gi_20260259 [Arabidopsis
  misc_feature (1)..(476): Homolog of NCBI NO: 20260260 NR Description: protein serine/threonine kinase-like protein
  misc_feature (1)..(476): Homolog of NCBI NO: 15238386 NR Description: receptor-like protein kinase; protein id:
  misc_feature (1)..(476): Homolog of NCBI NO: 25406123 NR Description: hypothetical protein F14O23.21 [imported] - thaliana >gi|7239510|gb|AAF43236.1|AC012654_20 Contains
  misc_feature (1)..(476): Homolog of NCBI NO: 15217584 NR Description: protein kinase, putative; protein id:
  misc_feature (1)..(476): Homolog of NCBI NO: 15081616 NR Description: At1g71830/F14O23_24 [Arabidopsis thaliana]
  misc_feature (1)..(476): Homolog of NCBI NO: 13897310 NR Description: SERK2 protein [Zea mays]
  misc_feature (1)..(441): Homolog of NCBI NO: 30678986 NR Description: leucine-rich repeat protein kinase family thaliana] >gi|15810409|gb|AAL07092.1| unknown protein

SEQ ID NO: 94781 - DNA, 2665 bp, Arabidopsis thaliana; identical to SEQ ID NO: 91025
  misc_feature (1)..(2665): Ceres Seq. ID no. 12726173
  misc_feature: MA Experiment ID: 20000179 Result: Down-regulated in Transcription
  misc_feature: MA Experiment 20000179 PARAMETER Experiment Name: At_Germinating_Seeds_P Parameter: Age (hr) Value: 6 vs. 0
  misc_feature: MA Experiment 20000179 PARAMETER Experiment Name: At_Germinating_Seeds_P Parameter: Tissue Value: Germinating Seeds
  misc_feature: MA Experiment ID: 20000180 Result: Down-regulated in Transcription
  misc_feature: MA Experiment 20000180 PARAMETER Experiment Name: At_Germinating_Seeds_P Parameter: Age (hr) Value: 24 vs. 0
  misc_feature: MA Experiment 20000180 PARAMETER Experiment Name: At_Germinating_Seeds_P Parameter: Tissue Value: Germinating Seeds
  misc_feature: MA Experiment ID: 20000235 Result: Down-regulated in Transcription
  misc_feature: MA Experiment 20000235 PARAMETER Experiment Name: At_Siliques_P Parameter: Age (day) Value: 21
  misc_feature: MA Experiment 20000235 PARAMETER Experiment Name: At_Siliques_P Parameter: Organism Value: A. thaliana
  misc_feature: MA Experiment 20000235 PARAMETER Experiment Name: At_Siliques_P Parameter: Plant Line Value: WS
  misc_feature: MA Experiment 20000235 PARAMETER Experiment Name: At_Siliques_P Parameter: Tissue Value: 5-10mm Siliques vs. Whole Plant
  misc_feature: MA Experiment ID: 20000265 Result: Down-regulated in Transcription
  misc_feature: MA Experiment 20000265 PARAMETER Experiment Name: At_Open_Flower_P Parameter: Age (day) Value: 21
  misc_feature: MA Experiment 20000265 PARAMETER Experiment Name: At_Open_Flower_P Parameter: Plant Line Value: WS
  misc_feature: MA Experiment 20000265 PARAMETER Experiment Name: At_Open_Flower_P Parameter: Tissue Value: Closed Flower vs. Whole Plant
  misc_feature: MA Experiment ID: 20000794 Result: Down-regulated in Transcription
  misc_feature: MA Experiment 20000794 PARAMETER Experiment Name: At_Petals_P Parameter: Age (day) Value: 23-25 days
  misc_feature: MA Experiment 20000794 PARAMETER Experiment Name: At_Petals_P Parameter: Plant Line Value: WS
  misc_feature: MA Experiment 20000794 PARAMETER Experiment Name: At_Petals_P Parameter: Tissue Value: Petals vs. Whole plant

SEQ ID NO: 94782 - protein, 847 aa, Arabidopsis thaliana; identical to SEQ ID NO: 91026
  peptide (1)..(847): Ceres Seq. ID no. 12726174
  misc_feature (100)..(210): Pfam Name: D-mannose binding lectin Pfam Description: D-mannose binding lectin
  misc_feature (35)..(847): Homolog of NCBI NO: 18407151 NR Description: expressed protein; protein id: At1g61380.1, by cDNA: 13461., supported by cDNA: gi_19699074 [Arabidopsis >gi|3056592|gb|AAC13903.1|AAC13903 T1F9.13 [Arabidopsis thaliana]
  misc_feature (35)..(847): Homolog of NCBI NO: 21537374 NR Description: receptor kinase, putative [Arabidopsis thaliana]
  misc_feature (30)..(847): Homolog of NCBI NO: 15219917 NR Description: receptor kinase, putative; protein id: At1g61390.1
  misc_feature (32)..(847): Homolog of NCBI NO: 15219933 NR Description: receptor protein kinase (IRK1), putative; protein
  misc_feature (32)..(847): Homolog of NCBI NO: 15219914 NR Description: receptor protein kinase (IRK1), putative; protein
  misc_feature (32)..(847): Homolog of NCBI NO: 15219935 NR Description: receptor kinase, putative; protein id: [Arabidopsis thaliana] >gi|3056580|gb|AAC13891.1|AAC13891 T1F9.1
  misc_feature (278)..(721): Homolog of NCBI NO: 30696575 NR Description: S-locus protein kinase, putative [Arabidopsis
  misc_feature (724)..(847): Homolog of NCBI NO: 30696575 NR Description: S-locus protein kinase, putative [Arabidopsis
  misc_feature (182)..(270): Homolog of NCBI NO: 30696575 NR Description: S-locus protein kinase, putative [Arabidopsis
  misc_feature (64)..(840): Homolog of NCBI NO: 25956275 NR Description: unnamed protein product [Lotus japonicus]

SEQ ID NO: 94783 - protein, 820 aa, Arabidopsis thaliana; identical to SEQ ID NO: 77556
  peptide (1)..(820): Ceres Seq. ID no. 12726175
  misc_feature (73)..(183): Pfam Name: D-mannose binding lectin Pfam Description: D-mannose binding lectin
  misc_feature (8)..(820): Homolog of NCBI NO: 18407151 NR Description: expressed protein; protein id: At1g61380.1, by cDNA: 13461., supported by cDNA: gi_19699074 [Arabidopsis >gi|3056592|gb|AAC13903.1|AAC13903 T1F9.13 [Arabidopsis thaliana]
  misc_feature (8)..(820): Homolog of NCBI NO: 21537374 NR Description: receptor kinase, putative [Arabidopsis thaliana]
  misc_feature (3)..(820): Homolog of NCBI NO: 15219917 NR Description: receptor kinase, putative; protein id: At1g61390.1
  misc_feature (5)..(820): Homolog of NCBI NO: 15219933 NR Description: receptor protein kinase (IRK1), putative; protein
  misc_feature (5)..(820): Homolog of NCBI NO: 15219914 NR Description: receptor protein kinase (IRK1), putative; protein
  misc_feature (5)..(820): Homolog of NCBI NO: 15219935 NR Description: receptor kinase, putative; protein id: [Arabidopsis thaliana] >gi|3056580|gb|AAC13891.1|AAC13891 T1F9.1
  misc_feature (251)..(694): Homolog of NCBI NO: 30696575 NR Description: S-locus protein kinase, putative [Arabidopsis
  misc_feature (697)..(820): Homolog of NCBI NO: 30696575 NR Description: S-locus protein kinase, putative [Arabidopsis
  misc_feature (155)..(243): Homolog of NCBI NO: 30696575 NR Description: S-locus protein kinase, putative [Arabidopsis
  misc_feature (37)..(813): Homolog of NCBI NO: 25956275 NR Description: unnamed protein product [Lotus japonicus]

SEQ ID NO: 94784 - protein, 666 aa, Arabidopsis thaliana; identical to SEQ ID NO: 85276
  peptide (1)..(666): Ceres Seq. ID no. 12726176
  misc_feature (1)..(666): Homolog of NCBI NO: 18407151 NR Description: expressed protein; protein id: At1g61380.1, by cDNA: 13461., supported by cDNA: gi_19699074 [Arabidopsis >gi|3056592|gb|AAC13903.1|AAC13903 T1F9.13 [Arabidopsis thaliana]
  misc_feature (1)..(666): Homolog of NCBI NO: 21537374 NR Description: receptor kinase, putative [Arabidopsis thaliana]
  misc_feature (1)..(666): Homolog of NCBI NO: 15219917 NR Description: receptor kinase, putative; protein id: At1g61390.1
  misc_feature (1)..(666): Homolog of NCBI NO: 15219933 NR Description: receptor protein kinase (IRK1), putative; protein
  misc_feature (1)..(666): Homolog of NCBI NO: 15219914 NR Description: receptor protein kinase (IRK1), putative; protein
  misc_feature (1)..(666): Homolog of NCBI NO: 15219935 NR Description: receptor kinase, putative; protein id: [Arabidopsis thaliana] >gi|3056580|gb|AAC13891.1|AAC13891 T1F9.1
  misc_feature (97)..(540): Homolog of NCBI NO: 30696575 NR Description: S-locus protein kinase, putative [Arabidopsis
  misc_feature (543)..(666): Homolog of NCBI NO: 30696575 NR Description: S-locus protein kinase, putative [Arabidopsis
  misc_feature (1)..(89): Homolog of NCBI NO: 30696575 NR Description: S-locus protein kinase, putative [Arabidopsis
  misc_feature (1)..(659): Homolog of NCBI NO: 25956275 NR Description: unnamed protein product [Lotus japonicus]

SEQ ID NO: 94785 - DNA, 2827 bp, Arabidopsis thaliana; identical to SEQ ID NO: 91029
  misc_feature (1)..(2827): Ceres Seq. ID no. 12726177
  misc_feature: MA Experiment ID: 20000169 Result: Down-regulated in Transcription
  misc_feature: MA Experiment 20000169 PARAMETER Experiment Name: At_100uM_ABA_P Parameter: Age (day) Value: 14
  misc_feature: MA Experiment 20000169 PARAMETER Experiment Name: At_100uM_ABA_P Parameter: Organism Value: A. thaliana
  misc_feature: MA Experiment 20000169 PARAMETER Experiment Name: At_100uM_ABA_P Parameter: Plant Line Value: WS
  misc_feature: MA Experiment 20000169 PARAMETER Experiment Name: At_100uM_ABA_P Parameter: Timepoint (hr) Value: 6
  misc_feature: MA Experiment 20000169 PARAMETER Experiment Name: At_100uM_ABA_P Parameter: Tissue Value: Aerial
  misc_feature: MA Experiment 20000169 PARAMETER Experiment Name: At_100uM_ABA_P Parameter: Treatment Value: 100uM ABA vs. No Treatment
  misc_feature: MA Experiment ID: 20000179 Result: Up-regulated in Transcription
  misc_feature: MA Experiment 20000179 PARAMETER Experiment Name: At_Germinating_Seeds_P Parameter: Age (hr) Value: 6 vs. 0
  misc_feature: MA Experiment 20000179 PARAMETER Experiment Name: At_Germinating_Seeds_P Parameter: Tissue Value: Germinating Seeds
  misc_feature: MA Experiment ID: 20000180 Result: Up-regulated in Transcription
  misc_feature: MA Experiment 20000180 PARAMETER Experiment Name: At_Germinating_Seeds_P Parameter: Age (hr) Value: 24 vs. 0
  misc_feature: MA Experiment 20000180 PARAMETER Experiment Name: At_Germinating_Seeds_P Parameter: Tissue Value: Germinating Seeds
  misc_feature: MA Experiment ID: 20000182 Result: Down-regulated in Transcription
  misc_feature: MA Experiment 20000182 PARAMETER Experiment Name: At_2mM_SA_P Parameter: Age (day) Value: 14
  misc_feature: MA Experiment 20000182 PARAMETER Experiment Name: At_2mM_SA_P Parameter: Organism Value: A. thaliana
  misc_feature: MA Experiment 20000182 PARAMETER Experiment Name: At_2mM_SA_P Parameter: Plant Line Value: WS
  misc_feature: MA Experiment 20000182 PARAMETER Experiment Name: At_2mM_SA_P Parameter: Timepoint (hr) Value: 6
  misc_feature: MA Experiment 20000182 PARAMETER Experiment Name: At_2mM_SA_P Parameter: Tissue Value: Aerial
  misc_feature: MA Experiment 20000182 PARAMETER Experiment Name: At_2mM_SA_P Parameter: Treatment Value: 2mM SA vs. No Treatment
  misc_feature: MA Experiment ID: 20000184 Result: Up-regulated in Transcription
  misc_feature: MA Experiment 20000184 PARAMETER Experiment Name: At_Shoots__P Parameter: Age (day) Value: 7
  misc_feature: MA Experiment 20000184 PARAMETER Experiment Name: At_Shoots__P Parameter: Tissue Value: Shoots vs. Whole Plant
  misc_feature: MA Experiment ID: 20000185 Result: Up-regulated in Transcription
  misc_feature: MA Experiment 20000185 PARAMETER Experiment Name: At_Roots__P Parameter: Age (day) Value: 7 vs. 21
  misc_feature: MA Experiment 20000185 PARAMETER Experiment Name: At_Roots__P Parameter: Organism Value: A. thaliana
  misc_feature: MA Experiment 20000185 PARAMETER Experiment Name: At_Roots__P Parameter: Tissue Value: Roots vs. Whole Plant
  misc_feature: MA Experiment ID: 20000234 Result: Up-regulated in Transcription
  misc_feature: MA Experiment 20000234 PARAMETER Experiment Name: At_Siliques_P Parameter: Age (day) Value: 21
  misc_feature: MA Experiment 20000234 PARAMETER Experiment Name: At_Siliques_P Parameter: Organism Value: A. thaliana
  misc_feature: MA Experiment 20000234 PARAMETER Experiment Name: At_Siliques_P Parameter: Plant Line Value: WS
  misc_feature: MA Experiment 20000234 PARAMETER Experiment Name: At_Siliques_P Parameter: Tissue Value: Less Than 5mm Siliques vs. Whole Plant
  misc_feature: MA Experiment ID: 20000264 Result: Up-regulated in Transcription
  misc_feature: MA Experiment 20000264 PARAMETER Experiment Name: At_Open_Flower_P Parameter: Age (day) Value: 21
  misc_feature: MA Experiment 20000264 PARAMETER Experiment Name: At_Open_Flower_P Parameter: Plant Line Value: WS
  misc_feature: MA Experiment 20000264 PARAMETER Experiment Name: At_Open_Flower_P Parameter: Tissue Value: Open Flower vs. Whole Plant
  misc_feature: MA Experiment ID: 20000265 Result: Up-regulated in Transcription
  misc_feature: MA Experiment 20000265 PARAMETER Experiment Name: At_Open_Flower_P Parameter: Age (day) Value: 21
  misc_feature: MA Experiment 20000265 PARAMETER Experiment Name: At_Open_Flower_P Parameter: Plant Line Value: WS
  misc_feature: MA Experiment 20000265 PARAMETER Experiment Name: At_Open_Flower_P Parameter: Tissue Value: Closed Flower vs. Whole Plant
  misc_feature: MA Experiment ID: 20000286 Result: Up-regulated in Transcription
  misc_feature: MA Experiment 20000286 PARAMETER Experiment Name: At_Open_Flower_P Parameter: Age (day) Value: 21
  misc_feature: MA Experiment 20000286 PARAMETER Experiment Name: At_Open_Flower_P Parameter: Plant Line Value: WS
  misc_feature: MA Experiment 20000286 PARAMETER Experiment Name: At_Open_Flower_P Parameter: Tissue Value: Half Open vs. Whole Plant
  misc_feature: MA Experiment ID: 20000438 Result: Up-regulated in Transcription
  misc_feature: MA Experiment 20000438 PARAMETER Experiment Name: At_Shoots__P Parameter: Age (day) Value: 14
  misc_feature: MA Experiment 20000438 PARAMETER Experiment Name: At_Shoots__P Parameter: Tissue Value: Shoots vs. Whole Plant
  misc_feature: MA Experiment ID: 20000439 Result: Up-regulated in Transcription
  misc_feature: MA Experiment 20000439 PARAMETER Experiment Name: At_Roots__P Parameter: Age (day) Value: 14 vs. 21
  misc_feature: MA Experiment 20000439 PARAMETER Experiment Name: At_Roots__P Parameter: Organism Value: A. thaliana
  misc_feature: MA Experiment 20000439 PARAMETER Experiment Name: At_Roots__P Parameter: Tissue Value: Roots vs. Whole Plant
  misc_feature: MA Experiment ID: 20000496 Result: Up-regulated in Transcription
  misc_feature: MA Experiment 20000496 PARAMETER Experiment Name: At_Guard_Cells_P Parameter: Harvest Date Value: 7/19/2002
  misc_feature: MA Experiment 20000496 PARAMETER Experiment Name: At_Guard_Cells_P Parameter: Organism Value: Canola
  misc_feature: MA Experiment 20000496 PARAMETER Experiment Name: At_Guard_Cells_P Parameter: Tissue Value: Guard Cells vs. Leaves
  misc_feature: MA Experiment ID: 20001247 Result: Down-regulated in Transcription
  misc_feature: MA Experiment 20001247 PARAMETER Experiment Name: At_Far-red-induction_P Parameter: Age (day) Value: 7
  misc_feature: MA Experiment 20001247 PARAMETER Experiment Name: At_Far-red-induction_P Parameter: Light Value: Far-red vs. White
  misc_feature: MA Experiment 20001247 PARAMETER Experiment Name: At_Far-red-induction_P Parameter: Organism Value: A. thaliana
  misc_feature: MA Experiment 20001247 PARAMETER Experiment Name: At_Far-red-induction_P Parameter: Plant Line Value: Columbia
  misc_feature: MA Experiment 20001247 PARAMETER Experiment Name: At_Far-red-induction_P Parameter: Timepoint (hr) Value: 1
  misc_feature: MA Experiment 20001247 PARAMETER Experiment Name: At_Far-red-induction_P Parameter: Tissue Value: Whole Plant
  misc_feature: MA Experiment ID: 20001248 Result: Down-regulated in Transcription
  misc_feature: MA Experiment 20001248 PARAMETER Experiment Name: At_Far-red-induction_P Parameter: Age (day) Value: 7
  misc_feature: MA Experiment 20001248 PARAMETER Experiment Name: At_Far-red-induction_P Parameter: Light Value: Far-red vs. White
  misc_feature: MA Experiment 20001248 PARAMETER Experiment Name: At_Far-red-induction_P Parameter: Organism Value: A. thaliana
  misc_feature: MA Experiment 20001248 PARAMETER Experiment Name: At_Far-red-induction_P Parameter: Plant Line Value: Columbia
  misc_feature: MA Experiment 20001248 PARAMETER Experiment Name: At_Far-red-induction_P Parameter: Timepoint (hr) Value: 4
  misc_feature: MA Experiment 20001248 PARAMETER Experiment Name: At_Far-red-induction_P Parameter: Tissue Value: Whole Plant
  misc_feature: MA Experiment ID: 20001450 Result: Down-regulated in Transcription
  misc_feature: MA Experiment 20001450 PARAMETER Experiment Name: At_Far-red-induction_P Parameter: Age (day) Value: 7
  misc_feature: MA Experiment 20001450 PARAMETER Experiment Name: At_Far-red-induction_P Parameter: Light Value: Far-red vs. White
  misc_feature: MA Experiment 20001450 PARAMETER Experiment Name: At_Far-red-induction_P Parameter: Organism Value: A. thaliana
  misc_feature: MA Experiment 20001450 PARAMETER Experiment Name: At_Far-red-induction_P Parameter: Plant Line Value: Columbia
  misc_feature: MA Experiment 20001450 PARAMETER Experiment Name: At_Far-red-induction_P Parameter: Timepoint (hr) Value: 8
  misc_feature: MA Experiment 20001450 PARAMETER Experiment Name: At_Far-red-induction_P Parameter: Tissue Value: Whole Plant
  misc_feature: MA Experiment ID: 20001451 Result: Down-regulated in Transcription
  misc_feature: MA Experiment 20001451 PARAMETER Experiment Name: At_Far-red-induction_P Parameter: Age (day) Value: 7
  misc_feature: MA Experiment 20001451 PARAMETER Experiment Name: At_Far-red-induction_P Parameter: Light Value: Far-red vs. White
  misc_feature: MA Experiment 20001451 PARAMETER Experiment Name: At_Far-red-induction_P Parameter: Organism Value: A. thaliana
  misc_feature: MA Experiment 20001451 PARAMETER Experiment Name: At_Far-red-induction_P Parameter: Plant Line Value: Columbia
  misc_feature: MA Experiment 20001451 PARAMETER Experiment Name: At_Far-red-induction_P Parameter: Timepoint (hr) Value: 24
  misc_feature: MA Experiment 20001451 PARAMETER Experiment Name: At_Far-red-induction_P Parameter: Tissue Value: Whole Plant
  misc_feature: MA Experiment ID: 20001911 Result: Down-regulated in Transcription
  misc_feature: MA Experiment 20001911 PARAMETER Experiment Name: At_Drought_Reproduction_P Parameter: Age (day) Value: 40
  misc_feature: MA Experiment 20001911 PARAMETER Experiment Name: At_Drought_Reproduction_P Parameter: Organism Value: A. thaliana
  misc_feature: MA Experiment 20001911 PARAMETER Experiment Name: At_Drought_Reproduction_P Parameter: Plant Line Value: WS
  misc_feature: MA Experiment 20001911 PARAMETER Experiment Name: At_Drought_Reproduction_P Parameter: Timepoint (day) Value: 10
  misc_feature: MA Experiment 20001911 PARAMETER Experiment Name: At_Drought_Reproduction_P Parameter: Tissue Value: Flowers
  misc_feature: MA Experiment 20001911 PARAMETER Experiment Name: At_Drought_Reproduction_P Parameter: Treatment Value: Drought vs. No Drought

SEQ ID NO: 94786 - protein, 860 aa, Arabidopsis thaliana; identical to SEQ ID NO: 46832
  peptide (1)..(860): Ceres Seq. ID no. 12726178
  misc_feature (326)..(860): Homolog of NCBI NO: 1931637 NR Description: receptor-associated kinase isolog; 3024-808
  misc_feature (101)..(397): Homolog of NCBI NO: 25411997 NR Description: probable LRR receptor protein kinase [imported] -
  misc_feature (577)..(860): Homolog of NCBI NO: 25411997 NR Description: probable LRR receptor protein kinase [imported] -
  misc_feature (500)..(860): Homolog of NCBI NO: 29367551 NR Description: putative leucine-rich repeat transmembrane
  misc_feature (115)..(355): Homolog of NCBI NO: 29367551 NR Description: putative leucine-rich repeat transmembrane
  misc_feature (537)..(860): Homolog of NCBI NO: 7489783 NR Description: leucine-rich repeat transmembrane protein kinase
  misc_feature (122)..(354): Homolog of NCBI NO: 7489783 NR Description: leucine-rich repeat transmembrane protein kinase
  misc_feature (537)..(860): Homolog of NCBI NO: 7489784 NR Description: leucine-rich repeat transmembrane protein kinase
  misc_feature (113)..(354): Homolog of NCBI NO: 7489784 NR Description: leucine-rich repeat transmembrane protein kinase
  misc_feature (500)..(860): Homolog of NCBI NO: 15217283 NR Description: Putative leucine-rich repeat transmembrane

SEQ ID NO: 94787 - protein, 768 aa, Arabidopsis thaliana; identical to SEQ ID NO: 46833
  peptide (1)..(768): Ceres Seq. ID no. 12726179
  misc_feature (234)..(768): Homolog of NCBI NO: 1931637 NR Description: receptor-associated kinase isolog; 3024-808
  misc_feature (9)..(305): Homolog of NCBI NO: 25411997 NR Description: probable LRR receptor protein kinase [imported] -
  misc_feature (485)..(768): Homolog of NCBI NO: 25411997 NR Description: probable LRR receptor protein kinase [imported] -
  misc_feature (408)..(768): Homolog of NCBI NO: 29367551 NR Description: putative leucine-rich repeat transmembrane
  misc_feature (23)..(263): Homolog of NCBI NO: 29367551 NR Description: putative leucine-rich repeat transmembrane
  misc_feature (445)..(768): Homolog of NCBI NO: 7489783 NR Description: leucine-rich repeat transmembrane protein kinase
  misc_feature (30)..(262): Homolog of NCBI NO: 7489783 NR Description: leucine-rich repeat transmembrane protein kinase
  misc_feature (445)..(768): Homolog of NCBI NO: 7489784 NR Description: leucine-rich repeat transmembrane protein kinase
  misc_feature (21)..(262): Homolog of NCBI NO: 7489784 NR Description: leucine-rich repeat transmembrane protein kinase
  misc_feature (408)..(768): Homolog of NCBI NO: 15217283 NR Description: Putative leucine-rich repeat transmembrane

SEQ ID NO: 94788 - protein, 750 aa, Arabidopsis thaliana; identical to SEQ ID NO: 46834
  peptide (1)..(750): Ceres Seq. ID no. 12726180
  misc_feature (216)..(750): Homolog of NCBI NO: 1931637 NR Description: receptor-associated kinase isolog; 3024-808
  misc_feature (1)..(287): Homolog of NCBI NO: 25411997 NR Description: probable LRR receptor protein kinase [imported] -
  misc_feature (467)..(750): Homolog of NCBI NO: 25411997 NR Description: probable LRR receptor protein kinase [imported] -
  misc_feature (390)..(750): Homolog of NCBI NO: 29367551 NR Description: putative leucine-rich repeat transmembrane
  misc_feature (5)..(245): Homolog of NCBI NO: 29367551 NR Description: putative leucine-rich repeat transmembrane
  misc_feature (427)..(750): Homolog of NCBI NO: 7489783 NR Description: leucine-rich repeat transmembrane protein kinase
  misc_feature (12)..(244): Homolog of NCBI NO: 7489783 NR Description: leucine-rich repeat transmembrane protein kinase
  misc_feature (427)..(750): Homolog of NCBI NO: 7489784 NR Description: leucine-rich repeat transmembrane protein kinase
  misc_feature (3)..(244): Homolog of NCBI NO: 7489784 NR Description: leucine-rich repeat transmembrane protein kinase
  misc_feature (390)..(750): Homolog of NCBI NO: 15217283 NR Description: Putative leucine-rich repeat transmembrane

SEQ ID NO: 94789 - DNA, 562 bp, Arabidopsis thaliana; identical to SEQ ID NO: 91033
  misc_feature (1)..(562): Ceres Seq. ID no. 12726188
  misc_feature: MA Experiment ID: 108433 Result: Down-regulated in Transcription
  misc_feature: MA Experiment 108433 PARAMETER Experiment Name: At_rhl_Mutant2_cDNA_P Parameter: Age (day) Value: 7
  misc_feature: MA Experiment 108433 PARAMETER Experiment Name: At_rhl_Mutant2_cDNA_P Parameter: Organism Value: A. thaliana
  misc_feature: MA Experiment 108433 PARAMETER Experiment Name: At_rhl_Mutant2_cDNA_P Parameter: Plant Line Value: rhl Mutant vs. wt landsburg
  misc_feature: MA Experiment 108433 PARAMETER Experiment Name: At_rhl_Mutant2_cDNA_P Parameter: Tissue Value: Roots
  misc_feature: MA Experiment ID: 108435 Result: Down-regulated in Transcription
  misc_feature: MA Experiment 108435 PARAMETER Experiment Name: At_stm_Mutants_cDNA_P Parameter: Plant Line Value: wt Landsburg vs stm
  misc_feature: MA Experiment 108435 PARAMETER Experiment Name: At_stm_Mutants_cDNA_P Parameter: Tissue Value: Shoot Apical Meristem Region
  misc_feature: MA Experiment ID: 108461 Result: Up-regulated in Transcription
  misc_feature: MA Experiment 108461 PARAMETER Experiment Name: At_Germinating_Seeds_cDNA_P Parameter: Age (day) Value: 1 vs. 0
  misc_feature: MA Experiment 108461 PARAMETER Experiment Name: At_Germinating_Seeds_cDNA_P Parameter: Tissue Value: Germinating Seeds
  misc_feature: MA Experiment ID: 108462 Result: Up-regulated in Transcription
  misc_feature: MA Experiment 108462 PARAMETER Experiment Name: At_Germinating_Seeds_cDNA_P Parameter: Age (day) Value: 2 vs. 0
  misc_feature: MA Experiment 108462 PARAMETER Experiment Name: At_Germinating_Seeds_cDNA_P Parameter: Tissue Value: Germinating Seeds
  misc_feature: MA Experiment ID: 108463 Result: Up-regulated in Transcription
  misc_feature: MA Experiment 108463 PARAMETER Experiment Name: At_Germinating_Seeds_cDNA_P Parameter: Age (day) Value: 3 vs. 0
  misc_feature: MA Experiment 108463 PARAMETER Experiment Name: At_Germinating_Seeds_cDNA_P Parameter: Tissue Value: Germinating Seeds
  misc_feature: MA Experiment ID: 108464 Result: Up-regulated in Transcription
  misc_feature: MA Experiment 108464 PARAMETER Experiment Name: At_Germinating_Seeds_cDNA_P Parameter: Age (day) Value: 4 vs. 0
  misc_feature: MA Experiment 108464 PARAMETER Experiment Name: At_Germinating_Seeds_cDNA_P Parameter: Tissue Value: Germinating Seeds
  misc_feature: MA Experiment ID: 108488 Result: Up-regulated in Transcription
  misc_feature: MA Experiment ID: 108577 Result: Up-regulated in Transcription
  misc_feature: MA Experiment 108577 PARAMETER Experiment Name: At_42deg_Heat_cDNA_P Parameter: Temperature (deg C) Value: 42 vs. 22
  misc_feature: MA Experiment 108577 PARAMETER Experiment Name: At_42deg_Heat_cDNA_P Parameter: Timepoint (hr) Value: 6
  misc_feature: MA Experiment 108577 PARAMETER Experiment Name: At_42deg_Heat_cDNA_P Parameter: Tissue Value: Aerial
  misc_feature: MA Experiment ID: 108579 Result: Up-regulated in Transcription
  misc_feature: MA Experiment 108579 PARAMETER Experiment Name: At_4deg_Cold_cDNA_P Parameter: Temperature (deg C) Value: 4 vs. 22
  misc_feature: MA Experiment 108579 PARAMETER Experiment Name: At_4deg_Cold_cDNA_P Parameter: Timepoint (hr) Value: 6
  misc_feature: MA Experiment 108579 PARAMETER Experiment Name: At_4deg_Cold_cDNA_P Parameter: Tissue Value: Aerial
  misc_feature: MA Experiment ID: 108595 Result: Down-regulated in Transcription
  misc_feature: MA Experiment 108595 PARAMETER Experiment Name: At_Ler-pi_Ovule_cDNA_P Parameter: Plant Line Value: null
  misc_feature: MA Experiment ID: 20000069 Result: Down-regulated in Transcription
  misc_feature: MA Experiment 20000069 PARAMETER Experiment Name: At_100uM_ABA_Mutants_cDNA_P Parameter: Plant Line Value: CS23
  misc_feature: MA Experiment 20000069 PARAMETER Experiment Name: At_100uM_ABA_Mutants_cDNA_P Parameter: Timepoint (hr) Value: 6
  misc_feature: MA Experiment 20000069 PARAMETER Experiment Name: At_100uM_ABA_Mutants_cDNA_P Parameter: Tissue Value: Aerial
  misc_feature: MA Experiment 20000069 PARAMETER Experiment Name: At_100uM_ABA_Mutants_cDNA_P Parameter: Treatment Value: 100uM ABA vs. No Treatment
  misc_feature: MA Experiment ID: 20000070 Result: Down-regulated in Transcription
  misc_feature: MA Experiment 20000070 PARAMETER Experiment Name: At_100uM_ABA_Mutants_cDNA_P Parameter: Plant Line Value: CS24
  misc_feature: MA Experiment 20000070 PARAMETER Experiment Name: At_100uM_ABA_Mutants_cDNA_P Parameter: Timepoint (hr) Value: 6
  misc_feature: MA Experiment 20000070 PARAMETER Experiment Name: At_100uM_ABA_Mutants_cDNA_P Parameter: Tissue Value: Aerial
  misc_feature: MA Experiment 20000070 PARAMETER Experiment Name: At_100uM_ABA_Mutants_cDNA_P Parameter: Treatment Value: 100uM ABA vs. No Treatment
  misc_feature: MA Experiment ID: 20000071 Result: Down-regulated in Transcription
  misc_feature: MA Experiment 20000071 PARAMETER Experiment Name: At_100uM_ABA_Mutants_cDNA_P Parameter: Plant Line Value: CS8104
  misc_feature: MA Experiment 20000071 PARAMETER Experiment Name: At_100uM_ABA_Mutants_cDNA_P Parameter: Timepoint (hr) Value: 6
  misc_feature: MA Experiment 20000071 PARAMETER Experiment Name: At_100uM_ABA_Mutants_cDNA_P Parameter: Tissue Value: Aerial
  misc_feature: MA Experiment 20000071 PARAMETER Experiment Name: At_100uM_ABA_Mutants_cDNA_P Parameter: Treatment Value: 100uM ABA vs. No Treatment
  misc_feature: MA Experiment ID: 20000072 Result: Down-regulated in Transcription
  misc_feature: MA Experiment 20000072 PARAMETER Experiment Name: At_100uM_ABA_Mutants_cDNA_P Parameter: Plant Line Value: CS8105
  misc_feature: MA Experiment 20000072 PARAMETER Experiment Name: At_100uM_ABA_Mutants_cDNA_P Parameter: Timepoint (hr) Value: 6
  misc_feature: MA Experiment 20000072 PARAMETER Experiment Name: At_100uM_ABA_Mutants_cDNA_P Parameter: Tissue Value: Aerial
  misc_feature: MA Experiment 20000072 PARAMETER Experiment Name: At_100uM_ABA_Mutants_cDNA_P Parameter: Treatment Value: 100uM ABA vs. No Treatment
  misc_feature: MA Experiment ID: 20000086 Result: Down-regulated in Transcription
  misc_feature: MA Experiment 20000086 PARAMETER Experiment Name: At_100uM_ABA_Mutants_cDNA_P Parameter: Plant Line Value: CS22
  misc_feature: MA Experiment 20000086 PARAMETER Experiment Name: At_100uM_ABA_Mutants_cDNA_P Parameter: Timepoint (hr) Value: 6
  misc_feature: MA Experiment 20000086 PARAMETER Experiment Name: At_100uM_ABA_Mutants_cDNA_P Parameter: Tissue Value: Aerial
  misc_feature: MA Experiment 20000086 PARAMETER Experiment Name: At_100uM_ABA_Mutants_cDNA_P Parameter: Treatment Value: 100uM ABA vs. No Treatment
  misc_feature: MA Experiment ID: 20000087 Result: Down-regulated in Transcription
  misc_feature: MA Experiment 20000087 PARAMETER Experiment Name: At_100uM_ABA_Mutants_cDNA_P Parameter: Plant Line Value: WS
  misc_feature: MA Experiment 20000087 PARAMETER Experiment Name: At_100uM_ABA_Mutants_cDNA_P Parameter: Timepoint (hr) Value: 6
  misc_feature: MA Experiment 20000087 PARAMETER Experiment Name: At_100uM_ABA_Mutants_cDNA_P Parameter: Tissue Value: Aerial
  misc_feature: MA Experiment 20000087 PARAMETER Experiment Name: At_100uM_ABA_Mutants_cDNA_P Parameter: Treatment Value: 100uM ABA vs. No Treatment
  misc_feature: MA Experiment ID: 20000088 Result: Down-regulated in Transcription
  misc_feature: MA Experiment 20000088 PARAMETER Experiment Name: At_100uM_ABA_Mutants_cDNA_P Parameter: Plant Line Value: Landsberg
  misc_feature: MA Experiment 20000088 PARAMETER Experiment Name: At_100uM_ABA_Mutants_cDNA_P Parameter: Timepoint (hr) Value: 6
  misc_feature: MA Experiment 20000088 PARAMETER Experiment Name: At_100uM_ABA_Mutants_cDNA_P Parameter: Tissue Value: Aerial
  misc_feature: MA Experiment 20000088 PARAMETER Experiment Name: At_100uM_ABA_Mutants_cDNA_P Parameter: Treatment Value: 100uM ABA vs. No Treatment
  misc_feature: MA Experiment ID: 20000089 Result: Down-regulated in Transcription
  misc_feature: MA Experiment ID: 20000090 Result: Down-regulated in Transcription
  misc_feature: MA Experiment ID: 20000093 Result: Up-regulated in Transcription
  misc_feature: MA Experiment 20000093 PARAMETER Experiment Name: At_42deg_Heat_cDNA_P Parameter: Temperature (deg C) Value: 42 vs. 22
  misc_feature: MA Experiment 20000093 PARAMETER Experiment Name: At_42deg_Heat_cDNA_P Parameter: Timepoint (hr) Value: 0.5
  misc_feature: MA Experiment 20000093 PARAMETER Experiment Name: At_42deg_Heat_cDNA_P Parameter: Tissue Value: Aerial
  misc_feature: MA Experiment ID: 20000111 Result: Up-regulated in Transcription
  misc_feature: MA Experiment 20000111 PARAMETER Experiment Name: At_42deg_Heat_cDNA_P Parameter: Temperature (deg C) Value: 42 vs. 22
  misc_feature: MA Experiment 20000111 PARAMETER Experiment Name: At_42deg_Heat_cDNA_P Parameter: Timepoint (hr) Value: 6
  misc_feature: MA Experiment 20000111 PARAMETER Experiment Name: At_42deg_Heat_cDNA_P Parameter: Tissue Value: Aerial
  misc_feature: MA Experiment ID: 20000112 Result: Up-regulated in Transcription
  misc_feature: MA Experiment 20000112 PARAMETER Experiment Name: At_42deg_Heat_cDNA_P Parameter: Temperature (deg C) Value: 42 vs. 22
  misc_feature: MA Experiment 20000112 PARAMETER Experiment Name: At_42deg_Heat_cDNA_P Parameter: Timepoint (hr) Value: 2
  misc_feature: MA Experiment 20000112 PARAMETER Experiment Name: At_42deg_Heat_cDNA_P Parameter: Tissue Value: Aerial
  misc_feature: MA Experiment ID: 20000113 Result: Up-regulated in Transcription
  misc_feature: MA Experiment 20000113 PARAMETER Experiment Name: At_42deg_Heat_cDNA_P Parameter: Temperature (deg C) Value: 42 vs. 22
  misc_feature: MA Experiment 20000113 PARAMETER Experiment Name: At_42deg_Heat_cDNA_P Parameter: Timepoint (hr) Value: 8
  misc_feature: MA Experiment 20000113 PARAMETER Experiment Name: At_42deg_Heat_cDNA_P Parameter: Tissue Value: Aerial
  misc_feature: MA Experiment ID: 20000117 Result: Down-regulated in Transcription
  misc_feature: MA Experiment 20000117 PARAMETER Experiment Name: At_100uM_ABA_Mutants_cDNA_P Parameter: Plant Line Value: Columbia
  misc_feature: MA Experiment 20000117 PARAMETER Experiment Name: At_100uM_ABA_Mutants_cDNA_P Parameter: Timepoint (hr) Value: 6
  misc_feature: MA Experiment 20000117 PARAMETER Experiment Name: At_100uM_ABA_Mutants_cDNA_P Parameter: Tissue Value: Aerial
  misc_feature: MA Experiment 20000117 PARAMETER Experiment Name: At_100uM_ABA_Mutants_cDNA_P Parameter: Treatment Value: 100uM ABA vs. No Treatment
  misc_feature: MA Experiment ID: 20000144 Result: Up-regulated in Transcription
  misc_feature: MA Experiment 20000144 PARAMETER Experiment Name: At_42deg_Heat_cDNA_P Parameter: Temperature (deg C) Value: 42 vs. 22
  misc_feature: MA Experiment 20000144 PARAMETER Experiment Name: At_42deg_Heat_cDNA_P Parameter: Timepoint (hr) Value: 1
  misc_feature: MA Experiment 20000144 PARAMETER Experiment Name: At_42deg_Heat_cDNA_P Parameter: Tissue Value: Aerial
  misc_feature: MA Experiment ID: 20000224 Result: Up-regulated in Transcription

SEQ ID NO: 94790 - protein, 148 aa, Arabidopsis thaliana; identical to SEQ ID NO: 34708
  peptide (1)..(148): Ceres Seq. ID no. 12726189
  misc_feature (60)..(135): Pfam Name: 2Fe-2S iron-sulfur cluster binding domain Pfam Description: 2Fe-2S iron-sulfur cluster binding domain
  misc_feature (1)..(148): Homolog of NCBI NO: 15220256 NR Description: ferredoxin precusor isolog; protein id: supported by cDNA: 20637., supported by cDNA: gi_16604415
  misc_feature (1)..(148): Homolog of NCBI NO: 15219837 NR Description: ferrodoxin precursor; protein id: At1g60950.1, by cDNA: gi_11908075, supported by cDNA: gi_12642889, supported cDNA: gi_13265544, supported by cDNA: gi_20260269 [Arabidopsis
  misc_feature (1)..(118): Homolog of NCBI NO: 16604416 NR Description: At1g10960/T19D16_12 [Arabidopsis thaliana]
  misc_feature (1)..(147): Homolog of NCBI NO: 3023743 NR Description: Ferredoxin I, chloroplast precursor
  misc_feature (1)..(145): Homolog of NCBI NO: 119931 NR Description: Ferredoxin I, chloroplast precursor
  misc_feature (1)..(147): Homolog of NCBI NO: 33520415 NR Description: ferredoxin I [Trifolium pratense]
  misc_feature (2)..(145): Homolog of NCBI NO: 37779195 NR Description: ferredoxin [Helianthus annuus]
  misc_feature (1)..(147): Homolog of NCBI NO: 120026 NR Description: Ferredoxin, chloroplast precursor
  misc_feature (1)..(148): Homolog of NCBI NO: 34921349 NR Description: Ferredoxin, chloroplast precursor (PFLP)
  misc_feature (1)..(147): Homolog of NCBI NO: 119937 NR Description: Ferredoxin I, chloroplast precursor (Fd I)

SEQ ID NO: 94791 - protein, 97 aa, Arabidopsis thaliana; identical to SEQ ID NO: 34709
  peptide (1)..(97): Ceres Seq. ID no. 12726190
  misc_feature (9)..(84): Pfam Name: 2Fe-2S iron-sulfur cluster binding domain Pfam Description: 2Fe-2S iron-sulfur cluster binding domain
  misc_feature (1)..(97): Homolog of NCBI NO: 15220256 NR Description: ferredoxin precusor isolog; protein id: supported by cDNA: 20637., supported by cDNA: gi_16604415
  misc_feature (1)..(97): Homolog of NCBI NO: 15219837 NR Description: ferrodoxin precursor; protein id: At1g60950.1, by cDNA: gi_11908075, supported by cDNA: gi_12642889, supported cDNA: gi_13265544, supported by cDNA: gi_20260269 [Arabidopsis
  misc_feature (1)..(67): Homolog of NCBI NO: 16604416 NR Description: At1g10960/T19D16_12 [Arabidopsis thaliana]
  misc_feature (1)..(96): Homolog of NCBI NO: 3023743 NR Description: Ferredoxin I, chloroplast precursor
  misc_feature (1)..(94): Homolog of NCBI NO: 119931 NR Description: Ferredoxin I, chloroplast precursor
  misc_feature (1)..(96): Homolog of NCBI NO: 33520415 NR Description: ferredoxin I [Trifolium pratense]
  misc_feature (1)..(94): Homolog of NCBI NO: 37779195 NR Description: ferredoxin [Helianthus annuus]
  misc_feature (1)..(96): Homolog of NCBI NO: 120026 NR Description: Ferredoxin, chloroplast precursor
  misc_feature (1)..(97): Homolog of NCBI NO: 34921349 NR Description: Ferredoxin, chloroplast precursor (PFLP)
  misc_feature (1)..(96): Homolog of NCBI NO: 119937 NR Description: Ferredoxin I, chloroplast precursor (Fd I)

SEQ ID NO: 94792 - protein, 81 aa, Arabidopsis thaliana; identical to SEQ ID NO: 91036
  peptide (1)..(81): Ceres Seq. ID no. 12726191

SEQ ID NO: 94793 - DNA, 871 bp, Arabidopsis thaliana; identical to SEQ ID NO: 91037
  misc_feature (1)..(871): Ceres Seq. ID no. 12726254
  misc_feature: MA Experiment ID: 108595 Result: Down-regulated in Transcription
  misc_feature: MA Experiment 108595 PARAMETER Experiment Name: At_Ler-pi_Ovule_cDNA_P Parameter: Plant Line Value: null
  misc_feature: MA Experiment ID: 20000185 Result: Down-regulated in Transcription
  misc_feature: MA Experiment 20000185 PARAMETER Experiment Name: At_Roots__P Parameter: Age (day) Value: 7 vs. 21
  misc_feature: MA Experiment 20000185 PARAMETER Experiment Name: At_Roots__P Parameter: Organism Value: A. thaliana
  misc_feature: MA Experiment 20000185 PARAMETER Experiment Name: At_Roots__P Parameter: Tissue Value: Roots vs. Whole Plant
  misc_feature: MA Experiment ID: 20000439 Result: Down-regulated in Transcription
  misc_feature: MA Experiment 20000439 PARAMETER Experiment Name: At_Roots__P Parameter: Age (day) Value: 14 vs. 21
  misc_feature: MA Experiment 20000439 PARAMETER Experiment Name: At_Roots__P Parameter: Organism Value: A. thaliana
  misc_feature: MA Experiment 20000439 PARAMETER Experiment Name: At_Roots__P Parameter: Tissue Value: Roots vs. Whole Plant

SEQ ID NO: 94794 - protein, 279 aa, Arabidopsis thaliana; identical to SEQ ID NO: 26212
  peptide (1)..(279): Ceres Seq. ID no. 12726255
  misc_feature (79)..(263): Pfam Name: Clp protease Pfam Description: Clp protease
  misc_feature (1)..(279): Homolog of NCBI NO: 18391391 NR Description: ATP-dependent Clp protease proteolytic subunit protein id: At1g12410.1, supported by cDNA: gi_16209711, by cDNA: gi_17065387, supported by cDNA: gi_20148624, supported
  misc_feature (1)..(279): Homolog of NCBI NO: 16209712 NR Description: At1g12410/F5O11_7 [Arabidopsis thaliana]
  misc_feature (68)..(260): Homolog of NCBI NO: 22298615 NR Description: ATP-dependent Clp protease proteolytic subunit 2
  misc_feature (50)..(260): Homolog of NCBI NO: 13812170 NR Description: ATP-dependent Clp protease proteolytic subunit
  misc_feature (68)..(260): Homolog of NCBI NO: 17231849 NR Description: ATP-dependent Clp protease proteolytic subunit
  misc_feature (68)..(260): Homolog of NCBI NO: 23126722 NR Description: hypothetical protein [Nostoc punctiforme]
  misc_feature (68)..(262): Homolog of NCBI NO: 18203213 NR Description: ATP-dependent Clp protease proteolytic subunit 3
  misc_feature (68)..(260): Homolog of NCBI NO: 23043112 NR Description: hypothetical protein [Trichodesmium erythraeum
  misc_feature (68)..(263): Homolog of NCBI NO: 33240837 NR Description: Protease subunit of ATP-dependent Clp protease
  misc_feature (79)..(259): Homolog of NCBI NO: 30023185 NR Description: ATP-dependent Clp protease proteolytic subunit cereus ATCC 14579] >gi|17981472|gb|AAL51030.1|AF454757_1 ClpP1

SEQ ID NO: 94795 - protein, 213 aa, Arabidopsis thaliana; identical to SEQ ID NO: 26213
  peptide (1)..(213): Ceres Seq. ID no. 12726256
  misc_feature (13)..(197): Pfam Name: Clp protease Pfam Description: Clp protease
  misc_feature (1)..(213): Homolog of NCBI NO: 18391391 NR Description: ATP-dependent Clp protease proteolytic subunit protein id: At1g12410.1, supported by cDNA: gi_16209711, by cDNA: gi_17065387, supported by cDNA: gi_20148624, supported
  misc_feature (1)..(213): Homolog of NCBI NO: 16209712 NR Description: At1g12410/F5O11_7 [Arabidopsis thaliana]
  misc_feature (2)..(194): Homolog of NCBI NO: 22298615 NR Description: ATP-dependent Clp protease proteolytic subunit 2
  misc_feature (1)..(194): Homolog of NCBI NO: 13812170 NR Description: ATP-dependent Clp protease proteolytic subunit
  misc_feature (2)..(194): Homolog of NCBI NO: 17231849 NR Description: ATP-dependent Clp protease proteolytic subunit
  misc_feature (2)..(194): Homolog of NCBI NO: 23126722 NR Description: hypothetical protein [Nostoc punctiforme]
  misc_feature (2)..(196): Homolog of NCBI NO: 18203213 NR Description: ATP-dependent Clp protease proteolytic subunit 3
  misc_feature (2)..(194): Homolog of NCBI NO: 23043112 NR Description: hypothetical protein [Trichodesmium erythraeum
  misc_feature (2)..(197): Homolog of NCBI NO: 33240837 NR Description: Protease subunit of ATP-dependent Clp protease
  misc_feature (13)..(193): Homolog of NCBI NO: 30023185 NR Description: ATP-dependent Clp protease proteolytic subunit cereus ATCC 14579] >gi|17981472|gb|AAL51030.1|AF454757_1 ClpP1

SEQ ID NO: 94796 - protein, 212 aa, Arabidopsis thaliana; identical to SEQ ID NO: 27066
  peptide (1)..(212): Ceres Seq. ID no. 12726257
  misc_feature (12)..(196): Pfam Name: Clp protease Pfam Description: Clp protease
  misc_feature (1)..(212): Homolog of NCBI NO: 18391391 NR Description: ATP-dependent Clp protease proteolytic subunit protein id: At1g12410.1, supported by cDNA: gi_16209711, by cDNA: gi_17065387, supported by cDNA: gi_20148624, supported
  misc_feature (1)..(212): Homolog of NCBI NO: 16209712 NR Description: At1g12410/F5O11_7 [Arabidopsis thaliana]
  misc_feature (1)..(193): Homolog of NCBI NO: 22298615 NR Description: ATP-dependent Clp protease proteolytic subunit 2
  misc_feature (1)..(193): Homolog of NCBI NO: 13812170 NR Description: ATP-dependent Clp protease proteolytic subunit
  misc_feature (1)..(193): Homolog of NCBI NO: 17231849 NR Description: ATP-dependent Clp protease proteolytic subunit
  misc_feature (1)..(193): Homolog of NCBI NO: 23126722 NR Description: hypothetical protein [Nostoc punctiforme]
  misc_feature (1)..(195): Homolog of NCBI NO: 18203213 NR Description: ATP-dependent Clp protease proteolytic subunit 3
  misc_feature (1)..(193): Homolog of NCBI NO: 23043112 NR Description: hypothetical protein [Trichodesmium erythraeum
  misc_feature (1)..(196): Homolog of NCBI NO: 33240837 NR Description: Protease subunit of ATP-dependent Clp protease
  misc_feature (12)..(192): Homolog of NCBI NO: 30023185 NR Description: ATP-dependent Clp protease proteolytic subunit cereus ATCC 14579] >gi|17981472|gb|AAL51030.1|AF454757_1 ClpP1

SEQ ID NO: 94797 - DNA, 654 bp, Arabidopsis thaliana; identical to SEQ ID NO: 91041
  misc_feature (1)..(654): Ceres Seq. ID no. 12726274
  misc_feature: MA Experiment ID: 20000180 Result: Up-regulated in Transcription
  misc_feature: MA Experiment 20000180 PARAMETER Experiment Name: At_Germinating_Seeds_P Parameter: Age (hr) Value: 24 vs. 0
  misc_feature: MA Experiment 20000180 PARAMETER Experiment Name: At_Germinating_Seeds_P Parameter: Tissue Value: Germinating Seeds
  misc_feature: MA Experiment ID: 20000265 Result: Up-regulated in Transcription
  misc_feature: MA Experiment 20000265 PARAMETER Experiment Name: At_Open_Flower_P Parameter: Age (day) Value: 21
  misc_feature: MA Experiment 20000265 PARAMETER Experiment Name: At_Open_Flower_P Parameter: Plant Line Value: WS
  misc_feature: MA Experiment 20000265 PARAMETER Experiment Name: At_Open_Flower_P Parameter: Tissue Value: Closed Flower vs. Whole Plant

SEQ ID NO: 94798 - protein, 217 aa, Arabidopsis thaliana; identical to SEQ ID NO: 91042
  peptide (1)..(217): Ceres Seq. ID no. 12726275
  misc_feature (1)..(217): Homolog of NCBI NO: 10177332 NR Description: gene_id:MPA24.9~unknown protein [Arabidopsis
  misc_feature (108)..(217): Homolog of NCBI NO: 30698155 NR Description: expressed protein [Arabidopsis thaliana]
  misc_feature (75)..(108): Homolog of NCBI NO: 30698155 NR Description: expressed protein [Arabidopsis thaliana]
  misc_feature (108)..(217): Homolog of NCBI NO: 39104597 NR Description: unknown protein [Arabidopsis thaliana]
  misc_feature (75)..(108): Homolog of NCBI NO: 39104597 NR Description: unknown protein [Arabidopsis thaliana]
  misc_feature (75)..(217): Homolog of NCBI NO: 12848314 NR Description: unnamed protein product [Mus musculus]
  misc_feature (75)..(217): Homolog of NCBI NO: 8922360 NR Description: hypothetical protein FLJ10335 [Homo sapiens]
  misc_feature (75)..(217): Homolog of NCBI NO: 32493396 NR Description: PHF9 protein [Homo sapiens]
  misc_feature (75)..(217): Homolog of NCBI NO: 13385416 NR Description: proliferation of germ cells protein [Mus >gi|12842891|dbj|BAB25772.1| unnamed protein product [Mus >gi|12847699|dbj|BAB27674.1| unnamed protein product [Mus
  misc_feature (75)..(213): Homolog of NCBI NO: 33416848 NR Description: Unknown (protein for MGC:66144) [Danio rerio]

SEQ ID NO: 94799 - protein, 216 aa, Arabidopsis thaliana; identical to SEQ ID NO: 91043
  peptide (1)..(216): Ceres Seq. ID no. 12726276
  misc_feature (1)..(216): Homolog of NCBI NO: 10177332 NR Description: gene_id:MPA24.9~unknown protein [Arabidopsis
  misc_feature (107)..(216): Homolog of NCBI NO: 30698155 NR Description: expressed protein [Arabidopsis thaliana]
  misc_feature (74)..(107): Homolog of NCBI NO: 30698155 NR Description: expressed protein [Arabidopsis thaliana]
  misc_feature (107)..(216): Homolog of NCBI NO: 39104597 NR Description: unknown protein [Arabidopsis thaliana]
  misc_feature (74)..(107): Homolog of NCBI NO: 39104597 NR Description: unknown protein [Arabidopsis thaliana]
  misc_feature (74)..(216): Homolog of NCBI NO: 12848314 NR Description: unnamed protein product [Mus musculus]
  misc_feature (74)..(216): Homolog of NCBI NO: 8922360 NR Description: hypothetical protein FLJ10335 [Homo sapiens]
  misc_feature (74)..(216): Homolog of NCBI NO: 32493396 NR Description: PHF9 protein [Homo sapiens]
  misc_feature (74)..(216): Homolog of NCBI NO: 13385416 NR Description: proliferation of germ cells protein [Mus >gi|12842891|dbj|BAB25772.1| unnamed protein product [Mus >gi|12847699|dbj|BAB27674.1| unnamed protein product [Mus
  misc_feature (74)..(212): Homolog of NCBI NO: 33416848 NR Description: Unknown (protein for MGC:66144) [Danio rerio]

SEQ ID NO: 94800 - protein, 170 aa, Arabidopsis thaliana; identical to SEQ ID NO: 91044
  peptide (1)..(170): Ceres Seq. ID no. 12726277
  misc_feature (1)..(170): Homolog of NCBI NO: 10177332 NR Description: gene_id:MPA24.9~unknown protein [Arabidopsis
  misc_feature (61)..(170): Homolog of NCBI NO: 30698155 NR Description: expressed protein [Arabidopsis thaliana]
  misc_feature (28)..(61): Homolog of NCBI NO: 30698155 NR Description: expressed protein [Arabidopsis thaliana]
  misc_feature (61)..(170): Homolog of NCBI NO: 39104597 NR Description: unknown protein [Arabidopsis thaliana]
  misc_feature (28)..(61): Homolog of NCBI NO: 39104597 NR Description: unknown protein [Arabidopsis thaliana]
  misc_feature (28)..(170): Homolog of NCBI NO: 12848314 NR Description: unnamed protein product [Mus musculus]
  misc_feature (28)..(170): Homolog of NCBI NO: 8922360 NR Description: hypothetical protein FLJ10335 [Homo sapiens]
  misc_feature (28)..(170): Homolog of NCBI NO: 32493396 NR Description: PHF9 protein [Homo sapiens]
  misc_feature (28)..(170): Homolog of NCBI NO: 13385416 NR Description: proliferation of germ cells protein [Mus >gi|12842891|dbj|BAB25772.1| unnamed protein product [Mus >gi|12847699|dbj|BAB27674.1| unnamed protein product [Mus
  misc_feature (28)..(166): Homolog of NCBI NO: 33416848 NR Description: Unknown (protein for MGC:66144) [Danio rerio]

SEQ ID NO: 94801 - DNA, 1236 bp, Arabidopsis thaliana; identical to SEQ ID NO: 91045
  misc_feature (1)..(1236): Ceres Seq. ID no. 12726282
  misc_feature: MA Experiment ID: 20000185 Result: Up-regulated in Transcription
  misc_feature: MA Experiment 20000185 PARAMETER Experiment Name: At_Roots__P Parameter: Age (day) Value: 7 vs. 21
  misc_feature: MA Experiment 20000185 PARAMETER Experiment Name: At_Roots__P Parameter: Organism Value: A. thaliana
  misc_feature: MA Experiment 20000185 PARAMETER Experiment Name: At_Roots__P Parameter: Tissue Value: Roots vs. Whole Plant
  misc_feature: MA Experiment ID: 20000265 Result: Up-regulated in Transcription
  misc_feature: MA Experiment 20000265 PARAMETER Experiment Name: At_Open_Flower_P Parameter: Age (day) Value: 21
  misc_feature: MA Experiment 20000265 PARAMETER Experiment Name: At_Open_Flower_P Parameter: Plant Line Value: WS
  misc_feature: MA Experiment 20000265 PARAMETER Experiment Name: At_Open_Flower_P Parameter: Tissue Value: Closed Flower vs. Whole Plant
  misc_feature: MA Experiment ID: 20000439 Result: Up-regulated in Transcription
  misc_feature: MA Experiment 20000439 PARAMETER Experiment Name: At_Roots__P Parameter: Age (day) Value: 14 vs. 21
  misc_feature: MA Experiment 20000439 PARAMETER Experiment Name: At_Roots__P Parameter: Organism Value: A. thaliana
  misc_feature: MA Experiment 20000439 PARAMETER Experiment Name: At_Roots__P Parameter: Tissue Value: Roots vs. Whole Plant

SEQ ID NO: 94802 - protein, 374 aa, Arabidopsis thaliana; identical to SEQ ID NO: 91046
  peptide (1)..(374): Ceres Seq. ID no. 12726283
  misc_feature (14)..(62): Pfam Name: Myb-like DNA-binding domain Pfam Description: Myb-like DNA-binding domain
  misc_feature (1)..(374): Homolog of NCBI NO: 15239158 NR Description: myb DNA-binding protein (MYB68); protein id: supported by cDNA: gi_3941493 [Arabidopsis thaliana]
  misc_feature (1)..(374): Homolog of NCBI NO: 11273952 NR Description: myb-related transcription factor MYB68 [imported] Arabidopsis thaliana >gi|3941494|gb|AAC83623.1| putative
  misc_feature (1)..(299): Homolog of NCBI NO: 15229192 NR Description: myb family transcription factor(AtMYB84); protein
  misc_feature (1)..(299): Homolog of NCBI NO: 2832408 NR Description: R2R3-MYB transcription factor [Arabidopsis
  misc_feature (1)..(145): Homolog of NCBI NO: 19073324 NR Description: typical P-type R2R3 Myb protein [Sorghum bicolor]
  misc_feature (1)..(145): Homolog of NCBI NO: 33773103 NR Description: P-type R2R3 Myb protein [Sorghum bicolor]
  misc_feature (1)..(123): Homolog of NCBI NO: 11358686 NR Description: probable transcription factor MYB36 [imported] - thaliana >gi|3941448|gb|AAC83600.1| putative transcription factor
  misc_feature (1)..(123): Homolog of NCBI NO: 15242793 NR Description: myb family transcription factor; protein id: supported by cDNA: gi_3941447 [Arabidopsis thaliana]
  misc_feature (1)..(118): Homolog of NCBI NO: 18419456 NR Description: blind [Lycopersicon esculentum]
  misc_feature (1)..(122): Homolog of NCBI NO: 40253739 NR Description: putative P-type R2R3 Myb protein [Oryza sativa

SEQ ID NO: 94803 - protein, 245 aa, Arabidopsis thaliana; identical to SEQ ID NO: 91047
  peptide (1)..(245): Ceres Seq. ID no. 12726284
  misc_feature (1)..(245): Homolog of NCBI NO: 15239158 NR Description: myb DNA-binding protein (MYB68); protein id: supported by cDNA: gi_3941493 [Arabidopsis thaliana]
  misc_feature (1)..(245): Homolog of NCBI NO: 11273952 NR Description: myb-related transcription factor MYB68 [imported] Arabidopsis thaliana >gi|3941494|gb|AAC83623.1| putative
  misc_feature (1)..(170): Homolog of NCBI NO: 15229192 NR Description: myb family transcription factor(AtMYB84); protein
  misc_feature (1)..(170): Homolog of NCBI NO: 2832408 NR Description: R2R3-MYB transcription factor [Arabidopsis
  misc_feature (1)..(16): Homolog of NCBI NO: 19073324 NR Description: typical P-type R2R3 Myb protein [Sorghum bicolor]
  misc_feature (1)..(16): Homolog of NCBI NO: 33773103 NR Description: P-type R2R3 Myb protein [Sorghum bicolor]
  misc_feature (1)..(93): Homolog of NCBI NO: 15228049 NR Description: light-regulated myb protein, putative; protein At2g36890.1 [Arabidopsis thaliana] >gi|25294087|pir||H84785
  misc_feature (1)..(117): Homolog of NCBI NO: 15233006 NR Description: myb family transcription factor; protein id:
  misc_feature (1)..(43): Homolog of NCBI NO: 7438333 NR Description: myb-related transcription factor THM18 - tomato
  misc_feature (1)..(115): Homolog of NCBI NO: 13346186 NR Description: GHMYB10 [Gossypium hirsutum]

SEQ ID NO: 94804 - protein, 241 aa, Arabidopsis thaliana; identical to SEQ ID NO: 91048
  peptide (1)..(241): Ceres Seq. ID no. 12726285
  misc_feature (1)..(241): Homolog of NCBI NO: 15239158 NR Description: myb DNA-binding protein (MYB68); protein id: supported by cDNA: gi_3941493 [Arabidopsis thaliana]
  misc_feature (1)..(241): Homolog of NCBI NO: 11273952 NR Description: myb-related transcription factor MYB68 [imported] Arabidopsis thaliana >gi|3941494|gb|AAC83623.1| putative
  misc_feature (1)..(166): Homolog of NCBI NO: 15229192 NR Description: myb family transcription factor(AtMYB84); protein
  misc_feature (1)..(166): Homolog of NCBI NO: 2832408 NR Description: R2R3-MYB transcription factor [Arabidopsis
  misc_feature (1)..(12): Homolog of NCBI NO: 19073324 NR Description: typical P-type R2R3 Myb protein [Sorghum bicolor]
  misc_feature (1)..(12): Homolog of NCBI NO: 33773103 NR Description: P-type R2R3 Myb protein [Sorghum bicolor]
  misc_feature (1)..(89): Homolog of NCBI NO: 15228049 NR Description: light-regulated myb protein, putative; protein At2g36890.1 [Arabidopsis thaliana] >gi|25294087|pir||H84785
  misc_feature (1)..(113): Homolog of NCBI NO: 15233006 NR Description: myb family transcription factor; protein id:
  misc_feature (1)..(39): Homolog of NCBI NO: 7438333 NR Description: myb-related transcription factor THM18 - tomato
  misc_feature (1)..(111): Homolog of NCBI NO: 13346186 NR Description: GHMYB10 [Gossypium hirsutum]

SEQ ID NO: 94805 - DNA, 1836 bp, Arabidopsis thaliana; identical to SEQ ID NO: 91049
  misc_feature (1)..(1836): Ceres Seq. ID no. 12726302
  misc_feature: MA Experiment ID: 20000227 Result: Down-regulated in Transcription
  misc_feature: MA Experiment 20000227 PARAMETER Experiment Name: At_Root-Tips-vs-Tops_P Parameter: Tissue Value: Root Tips vs. Root Tops
  misc_feature: MA Experiment ID: 20000439 Result: Up-regulated in Transcription
  misc_feature: MA Experiment 20000439 PARAMETER Experiment Name: At_Roots__P Parameter: Age (day) Value: 14 vs. 21
  misc_feature: MA Experiment 20000439 PARAMETER Experiment Name: At_Roots__P Parameter: Organism Value: A. thaliana
  misc_feature: MA Experiment 20000439 PARAMETER Experiment Name: At_Roots__P Parameter: Tissue Value: Roots vs. Whole Plant
  misc_feature: MA Experiment ID: 20000573 Result: Up-regulated in Transcription
  misc_feature: MA Experiment 20000573 PARAMETER Experiment Name: At_100uM_ABA_Mutants__P Parameter: Organism Value: A. thaliana
  misc_feature: MA Experiment 20000573 PARAMETER Experiment Name: At_100uM_ABA_Mutants__P Parameter: Plant Line Value: CS22 vs. Ler wt
  misc_feature: MA Experiment 20000573 PARAMETER Experiment Name: At_100uM_ABA_Mutants__P Parameter: Timepoint (hr) Value: N/A
  misc_feature: MA Experiment 20000573 PARAMETER Experiment Name: At_100uM_ABA_Mutants__P Parameter: Tissue Value: Whole Plant
  misc_feature: MA Experiment 20000573 PARAMETER Experiment Name: At_100uM_ABA_Mutants__P Parameter: Treatment Value: None

SEQ ID NO: 94806 - protein, 584 aa, Arabidopsis thaliana; identical to SEQ ID NO: 91050
  peptide (1)..(584): Ceres Seq. ID no. 12726303
  misc_feature (46)..(519): Pfam Name: Mlo family Pfam Description: Mlo family
  misc_feature (16)..(584): Homolog of NCBI NO: 15239213 NR Description: Mlo protein-like; protein id: At5g65970.1, by cDNA: gi_14091589 [Arabidopsis thaliana]
  misc_feature (48)..(537): Homolog of NCBI NO: 30679982 NR Description: seven transmembrane MLO protein family (MLO7)
  misc_feature (16)..(81): Homolog of NCBI NO: 30679982 NR Description: seven transmembrane MLO protein family (MLO7)
  misc_feature (9)..(582): Homolog of NCBI NO: 18398444 NR Description: similar to Mlo proteins from H. vulgare; protein At2g17480.1, supported by cDNA: gi_14091585 [Arabidopsis >gi|14091586|gb|AAK53801.1|AF369569_1 membrane protein Mlo8
  misc_feature (9)..(324): Homolog of NCBI NO: 25346302 NR Description: similar to Mlo proteins from H. vulgare
  misc_feature (322)..(582): Homolog of NCBI NO: 25346302 NR Description: similar to Mlo proteins from H. vulgare
  misc_feature (152)..(537): Homolog of NCBI NO: 14091584 NR Description: membrane protein Mlo7 [Arabidopsis thaliana]
  misc_feature (35)..(542): Homolog of NCBI NO: 37536520 NR Description: putative Mlo (pathogen resistance) protein [Oryza
  misc_feature (44)..(541): Homolog of NCBI NO: 13784977 NR Description: seven transmembrane protein Mlo2 [Zea mays]
  misc_feature (150)..(478): Homolog of NCBI NO: 13784985 NR Description: seven transmembrane protein Mlo6 [Zea mays]

SEQ ID NO: 94807 - protein, 569 aa, Arabidopsis thaliana; identical to SEQ ID NO: 91051
  peptide (1)..(569): Ceres Seq. ID no. 12726304
  misc_feature (31)..(504): Pfam Name: Mlo family Pfam Description: Mlo family
  misc_feature (1)..(569): Homolog of NCBI NO: 15239213 NR Description: Mlo protein-like; protein id: At5g65970.1, by cDNA: gi_14091589 [Arabidopsis thaliana]
  misc_feature (33)..(522): Homolog of NCBI NO: 30679982 NR Description: seven transmembrane MLO protein family (MLO7)
  misc_feature (1)..(66): Homolog of NCBI NO: 30679982 NR Description: seven transmembrane MLO protein family (MLO7)
  misc_feature (1)..(567): Homolog of NCBI NO: 18398444 NR Description: similar to Mlo proteins from H. vulgare; protein At2g17480.1, supported by cDNA: gi_14091585 [Arabidopsis >gi|14091586|gb|AAK53801.1|AF369569_1 membrane protein Mlo8
  misc_feature (1)..(309): Homolog of NCBI NO: 25346302 NR Description: similar to Mlo proteins from H. vulgare
  misc_feature (307)..(567): Homolog of NCBI NO: 25346302 NR Description: similar to Mlo proteins from H. vulgare
  misc_feature (137)..(522): Homolog of NCBI NO: 14091584 NR Description: membrane protein Mlo7 [Arabidopsis thaliana]
  misc_feature (20)..(527): Homolog of NCBI NO: 37536520 NR Description: putative Mlo (pathogen resistance) protein [Oryza
  misc_feature (29)..(526): Homolog of NCBI NO: 13784977 NR Description: seven transmembrane protein Mlo2 [Zea mays]
  misc_feature (135)..(463): Homolog of NCBI NO: 13784985 NR Description: seven transmembrane protein Mlo6 [Zea mays]

SEQ ID NO: 94808 - protein, 481 aa, Arabidopsis thaliana; identical to SEQ ID NO: 91052
  peptide (1)..(481): Ceres Seq. ID no. 12726305
  misc_feature (1)..(416): Pfam Name: Mlo family Pfam Description: Mlo family
  misc_feature (1)..(481): Homolog of NCBI NO: 15239213 NR Description: Mlo protein-like; protein id: At5g65970.1, by cDNA: gi_14091589 [Arabidopsis thaliana]
  misc_feature (1)..(434): Homolog of NCBI NO: 30679982 NR Description: seven transmembrane MLO protein family (MLO7)
  misc_feature (1)..(479): Homolog of NCBI NO: 18398444 NR Description: similar to Mlo proteins from H. vulgare; protein At2g17480.1, supported by cDNA: gi_14091585 [Arabidopsis >gi|14091586|gb|AAK53801.1|AF369569_1 membrane protein Mlo8
  misc_feature (1)..(221): Homolog of NCBI NO: 25346302 NR Description: similar to Mlo proteins from H. vulgare
  misc_feature (219)..(479): Homolog of NCBI NO: 25346302 NR Description: similar to Mlo proteins from H. vulgare
  misc_feature (49)..(434): Homolog of NCBI NO: 14091584 NR Description: membrane protein Mlo7 [Arabidopsis thaliana]
  misc_feature (1)..(439): Homolog of NCBI NO: 37536520 NR Description: putative Mlo (pathogen resistance) protein [Oryza
  misc_feature (1)..(438): Homolog of NCBI NO: 13784977 NR Description: seven transmembrane protein Mlo2 [Zea mays]
  misc_feature (47)..(375): Homolog of NCBI NO: 13784985 NR Description: seven transmembrane protein Mlo6 [Zea mays]
  misc_feature (1)..(57): Homolog of NCBI NO: 13784985 NR Description: seven transmembrane protein Mlo6 [Zea mays]

SEQ ID NO: 94809 - DNA, 1188 bp, Arabidopsis thaliana; identical to SEQ ID NO: 91053
  misc_feature (1)..(1188): Ceres Seq. ID no. 12726306
  misc_feature: MA Experiment ID: 20000439 Result: Up-regulated in Transcription
  misc_feature: MA Experiment 20000439 PARAMETER Experiment Name: At_Roots__P Parameter: Age (day) Value: 14 vs. 21
  misc_feature: MA Experiment 20000439 PARAMETER Experiment Name: At_Roots__P Parameter: Organism Value: A. thaliana
  misc_feature: MA Experiment 20000439 PARAMETER Experiment Name: At_Roots__P Parameter: Tissue Value: Roots vs. Whole Plant
  misc_feature: MA Experiment ID: 20000451 Result: Up-regulated in Transcription
  misc_feature: MA Experiment 20000451 PARAMETER Experiment Name: At_CS6879_Shoots-Roots_P Parameter: Age (day) Value: 14
  misc_feature: MA Experiment 20000451 PARAMETER Experiment Name: At_CS6879_Shoots-Roots_P Parameter: Organism Value: A. thaliana
  misc_feature: MA Experiment 20000451 PARAMETER Experiment Name: At_CS6879_Shoots-Roots_P Parameter: Plant Line Value: CS6879 vs. WS
  misc_feature: MA Experiment 20000451 PARAMETER Experiment Name: At_CS6879_Shoots-Roots_P Parameter: Tissue Value: Roots

SEQ ID NO: 94810 - protein, 395 aa, Arabidopsis thaliana; identical to SEQ ID NO: 91054
  peptide (1)..(395): Ceres Seq. ID no. 12726307
  misc_feature (9)..(387): Pfam Name: Auxin Efflux Carrier Pfam Description: Auxin Efflux Carrier
  misc_feature (1)..(395): Homolog of NCBI NO: 15239215 NR Description: putative protein; protein id: At5g65980.1 thaliana] >gi|10177113|dbj|BAB10403.1|
  misc_feature (1)..(394): Homolog of NCBI NO: 18398448 NR Description: expressed protein; protein id: At2g17500.1, by cDNA: 105072. [Arabidopsis thaliana] >gi|25411796|pir||H84552
  misc_feature (1)..(394): Homolog of NCBI NO: 21536598 NR Description: unknown [Arabidopsis thaliana]
  misc_feature (1)..(395): Homolog of NCBI NO: 22329697 NR Description: hypothetical protein; protein id: At1g20925.1
  misc_feature (4)..(395): Homolog of NCBI NO: 18411126 NR Description: expressed protein; protein id: At1g76520.1, by cDNA: 142725., supported by cDNA: gi_20466517 [Arabidopsis
  misc_feature (4)..(395): Homolog of NCBI NO: 21553424 NR Description: unknown [Arabidopsis thaliana]
  misc_feature (218)..(395): Homolog of NCBI NO: 34394344 NR Description: auxin efflux carrier protein family-like protein
  misc_feature (12)..(183): Homolog of NCBI NO: 18409758 NR Description: expressed protein; protein id: At1g71090.1, by cDNA: gi_15028380, supported by cDNA: gi_19310750 [Arabidopsis
  misc_feature (230)..(393): Homolog of NCBI NO: 18409758 NR Description: expressed protein; protein id: At1g71090.1, by cDNA: gi_15028380, supported by cDNA: gi_19310750 [Arabidopsis
  misc_feature (4)..(394): Homolog of NCBI NO: 15241659 NR Description: putative protein; protein id: At5g01990.1

SEQ ID NO: 94811 - protein, 384 aa, Arabidopsis thaliana; identical to SEQ ID NO: 91055
  peptide (1)..(384): Ceres Seq. ID no. 12726308
  misc_feature (1)..(376): Pfam Name: Auxin Efflux Carrier Pfam Description: Auxin Efflux Carrier
  misc_feature (1)..(384): Homolog of NCBI NO: 15239215 NR Description: putative protein; protein id: At5g65980.1 thaliana] >gi|10177113|dbj|BAB10403.1|
  misc_feature (1)..(383): Homolog of NCBI NO: 18398448 NR Description: expressed protein; protein id: At2g17500.1, by cDNA: 105072. [Arabidopsis thaliana] >gi|25411796|pir||H84552
  misc_feature (1)..(383): Homolog of NCBI NO: 21536598 NR Description: unknown [Arabidopsis thaliana]
  misc_feature (1)..(384): Homolog of NCBI NO: 22329697 NR Description: hypothetical protein; protein id: At1g20925.1
  misc_feature (1)..(384): Homolog of NCBI NO: 18411126 NR Description: expressed protein; protein id: At1g76520.1, by cDNA: 142725., supported by cDNA: gi_20466517 [Arabidopsis
  misc_feature (1)..(384): Homolog of NCBI NO: 21553424 NR Description: unknown [Arabidopsis thaliana]
  misc_feature (207)..(384): Homolog of NCBI NO: 34394344 NR Description: auxin efflux carrier protein family-like protein
  misc_feature (1)..(172): Homolog of NCBI NO: 18409758 NR Description: expressed protein; protein id: At1g71090.1, by cDNA: gi_15028380, supported by cDNA: gi_19310750 [Arabidopsis
  misc_feature (219)..(382): Homolog of NCBI NO: 18409758 NR Description: expressed protein; protein id: At1g71090.1, by cDNA: gi_15028380, supported by cDNA: gi_19310750 [Arabidopsis
  misc_feature (1)..(383): Homolog of NCBI NO: 15241659 NR Description: putative protein; protein id: At5g01990.1

SEQ ID NO: 94812 - protein, 340 aa, Arabidopsis thaliana; identical to SEQ ID NO: 91056
  peptide (1)..(340): Ceres Seq. ID no. 12726309
  misc_feature (1)..(332): Pfam Name: Auxin Efflux Carrier Pfam Description: Auxin Efflux Carrier
  misc_feature (1)..(340): Homolog of NCBI NO: 15239215 NR Description: putative protein; protein id: At5g65980.1 thaliana] >gi|10177113|dbj|BAB10403.1|
  misc_feature (1)..(339): Homolog of NCBI NO: 18398448 NR Description: expressed protein; protein id: At2g17500.1, by cDNA: 105072. [Arabidopsis thaliana] >gi|25411796|pir||H84552
  misc_feature (1)..(339): Homolog of NCBI NO: 21536598 NR Description: unknown [Arabidopsis thaliana]
  misc_feature (1)..(340): Homolog of NCBI NO: 22329697 NR Description: hypothetical protein; protein id: At1g20925.1
  misc_feature (1)..(340): Homolog of NCBI NO: 18411126 NR Description: expressed protein; protein id: At1g76520.1, by cDNA: 142725., supported by cDNA: gi_20466517 [Arabidopsis
  misc_feature (1)..(340): Homolog of NCBI NO: 21553424 NR Description: unknown [Arabidopsis thaliana]
  misc_feature (163)..(340): Homolog of NCBI NO: 34394344 NR Description: auxin efflux carrier protein family-like protein
  misc_feature (1)..(128): Homolog of NCBI NO: 18409758 NR Description: expressed protein; protein id: At1g71090.1, by cDNA: gi_15028380, supported by cDNA: gi_19310750 [Arabidopsis
  misc_feature (175)..(338): Homolog of NCBI NO: 18409758 NR Description: expressed protein; protein id: At1g71090.1, by cDNA: gi_15028380, supported by cDNA: gi_19310750 [Arabidopsis
  misc_feature (1)..(339): Homolog of NCBI NO: 15241659 NR Description: putative protein; protein id: At5g01990.1

SEQ ID NO: 94813 - DNA, 366 bp, Arabidopsis thaliana; identical to SEQ ID NO: 91057
  misc_feature (1)..(366): Ceres Seq. ID no. 12726322
  misc_feature: MA Experiment ID: 20000307 Result: Down-regulated in Transcription
  misc_feature: MA Experiment 20000307 PARAMETER Experiment Name: At_Germinating_Seeds_Sub_P Parameter: Age (hr) Value: 24 vs. 0
  misc_feature: MA Experiment 20000307 PARAMETER Experiment Name: At_Germinating_Seeds_Sub_P Parameter: Organism Value: A. thaliana
  misc_feature: MA Experiment 20000307 PARAMETER Experiment Name: At_Germinating_Seeds_Sub_P Parameter: Plant Line Value: WS
  misc_feature: MA Experiment 20000307 PARAMETER Experiment Name: At_Germinating_Seeds_Sub_P Parameter: Tissue Value: Germinating Seeds
  misc_feature: MA Experiment ID: 20000329 Result: Down-regulated in Transcription
  misc_feature: MA Experiment 20000329 PARAMETER Experiment Name: At_4deg_Cold_Sub_P Parameter: Age (day) Value: 14
  misc_feature: MA Experiment 20000329 PARAMETER Experiment Name: At_4deg_Cold_Sub_P Parameter: Organism Value: A. thaliana
  misc_feature: MA Experiment 20000329 PARAMETER Experiment Name: At_4deg_Cold_Sub_P Parameter: Plant Line Value: WS
  misc_feature: MA Experiment 20000329 PARAMETER Experiment Name: At_4deg_Cold_Sub_P Parameter: Temperature (deg C) Value: 4 vs. 22
  misc_feature: MA Experiment 20000329 PARAMETER Experiment Name: At_4deg_Cold_Sub_P Parameter: Timepoint (hr) Value: 6
  misc_feature: MA Experiment 20000329 PARAMETER Experiment Name: At_4deg_Cold_Sub_P Parameter: Tissue Value: Aerial
  misc_feature: MA Experiment ID: 20000332 Result: Down-regulated in Transcription
  misc_feature: MA Experiment 20000332 PARAMETER Experiment Name: At_4deg_Cold_Sub_P Parameter: Age (day) Value: 14
  misc_feature: MA Experiment 20000332 PARAMETER Experiment Name: At_4deg_Cold_Sub_P Parameter: Organism Value: A. thaliana
  misc_feature: MA Experiment 20000332 PARAMETER Experiment Name: At_4deg_Cold_Sub_P Parameter: Plant Line Value: WS
  misc_feature: MA Experiment 20000332 PARAMETER Experiment Name: At_4deg_Cold_Sub_P Parameter: Temperature (deg C) Value: 4 vs. 22
  misc_feature: MA Experiment 20000332 PARAMETER Experiment Name: At_4deg_Cold_Sub_P Parameter: Timepoint (hr) Value: 2
  misc_feature: MA Experiment 20000332 PARAMETER Experiment Name: At_4deg_Cold_Sub_P Parameter: Tissue Value: Aerial
  misc_feature: MA Experiment ID: 20000352 Result: Up-regulated in Transcription
  misc_feature: MA Experiment 20000352 PARAMETER Experiment Name: At_Drought_Sub_P Parameter: Age (day) Value: 7
  misc_feature: MA Experiment 20000352 PARAMETER Experiment Name: At_Drought_Sub_P Parameter: Organism Value: A. thaliana
  misc_feature: MA Experiment 20000352 PARAMETER Experiment Name: At_Drought_Sub_P Parameter: Plant Line Value: WS
  misc_feature: MA Experiment 20000352 PARAMETER Experiment Name: At_Drought_Sub_P Parameter: Timepoint (hr) Value: 6
  misc_feature: MA Experiment 20000352 PARAMETER Experiment Name: At_Drought_Sub_P Parameter: Tissue Value: Whole Plant
  misc_feature: MA Experiment 20000352 PARAMETER Experiment Name: At_Drought_Sub_P Parameter: Treatment Value: Drought vs. No Drought
  misc_feature: MA Experiment ID: 20000355 Result: Down-regulated in Transcription
  misc_feature: MA Experiment 20000355 PARAMETER Experiment Name: At_Siliques_Sub_P Parameter: Age (day) Value: 21
  misc_feature: MA Experiment 20000355 PARAMETER Experiment Name: At_Siliques_Sub_P Parameter: Organism Value: A. thaliana
  misc_feature: MA Experiment 20000355 PARAMETER Experiment Name: At_Siliques_Sub_P Parameter: Plant Line Value: WS
  misc_feature: MA Experiment 20000355 PARAMETER Experiment Name: At_Siliques_Sub_P Parameter: Tissue Value: Less Than 5mm Siliques vs. Whole Plant

SEQ ID NO: 94814 - protein, 121 aa, Arabidopsis thaliana; identical to SEQ ID NO: 91058
  peptide (1)..(121): Ceres Seq. ID no. 12726323
  misc_feature (1)..(57): Pfam Name: Heavy-metal-associated domain Pfam Description: Heavy-metal-associated domain
  misc_feature (1)..(121): Homolog of NCBI NO: 15239266 NR Description: expressed protein; protein id: At5g66110.1

SEQ ID NO: 94815 - protein, 105 aa, Arabidopsis thaliana; identical to SEQ ID NO: 91059
  peptide (1)..(105): Ceres Seq. ID no. 12726324
  misc_feature (1)..(41): Pfam Name: Heavy-metal-associated domain Pfam Description: Heavy-metal-associated domain
  misc_feature (1)..(105): Homolog of NCBI NO: 15239266 NR Description: expressed protein; protein id: At5g66110.1

SEQ ID NO: 94816 - protein, 74 aa, Arabidopsis thaliana; identical to SEQ ID NO: 91060
  peptide (1)..(74): Ceres Seq. ID no. 12726325
  misc_feature (1)..(74): Homolog of NCBI NO: 15239266 NR Description: expressed protein; protein id: At5g66110.1

SEQ ID NO: 94817 - DNA, 978 bp, Arabidopsis thaliana; identical to SEQ ID NO: 91061
  misc_feature (1)..(978): Ceres Seq. ID no. 12726330
  misc_feature: MA Experiment ID: 20000184 Result: Down-regulated in Transcription
  misc_feature: MA Experiment 20000184 PARAMETER Experiment Name: At_Shoots__P Parameter: Age (day) Value: 7
  misc_feature: MA Experiment 20000184 PARAMETER Experiment Name: At_Shoots__P Parameter: Tissue Value: Shoots vs. Whole Plant
  misc_feature: MA Experiment ID: 20001450 Result: Up-regulated in Transcription
  misc_feature: MA Experiment 20001450 PARAMETER Experiment Name: At_Far-red-induction_P Parameter: Age (day) Value: 7
  misc_feature: MA Experiment 20001450 PARAMETER Experiment Name: At_Far-red-induction_P Parameter: Light Value: Far-red vs. White
  misc_feature: MA Experiment 20001450 PARAMETER Experiment Name: At_Far-red-induction_P Parameter: Organism Value: A. thaliana
  misc_feature: MA Experiment 20001450 PARAMETER Experiment Name: At_Far-red-induction_P Parameter: Plant Line Value: Columbia
  misc_feature: MA Experiment 20001450 PARAMETER Experiment Name: At_Far-red-induction_P Parameter: Timepoint (hr) Value: 8
  misc_feature: MA Experiment 20001450 PARAMETER Experiment Name: At_Far-red-induction_P Parameter: Tissue Value: Whole Plant
  misc_feature: MA Experiment ID: 20001451 Result: Up-regulated in Transcription
  misc_feature: MA Experiment 20001451 PARAMETER Experiment Name: At_Far-red-induction_P Parameter: Age (day) Value: 7
  misc_feature: MA Experiment 20001451 PARAMETER Experiment Name: At_Far-red-induction_P Parameter: Light Value: Far-red vs. White
  misc_feature: MA Experiment 20001451 PARAMETER Experiment Name: At_Far-red-induction_P Parameter: Organism Value: A. thaliana
  misc_feature: MA Experiment 20001451 PARAMETER Experiment Name: At_Far-red-induction_P Parameter: Plant Line Value: Columbia
  misc_feature: MA Experiment 20001451 PARAMETER Experiment Name: At_Far-red-induction_P Parameter: Timepoint (hr) Value: 24
  misc_feature: MA Experiment 20001451 PARAMETER Experiment Name: At_Far-red-induction_P Parameter: Tissue Value: Whole Plant

SEQ ID NO: 94818 - protein, 325 aa, Arabidopsis thaliana; identical to SEQ ID NO: 91062
  peptide (1)..(325): Ceres Seq. ID no. 12726331
  misc_feature (233)..(311): Pfam Name: NOL1/NOP2/sun family Pfam Description: NOL1/NOP2/sun family
  misc_feature (1)..(325): Homolog of NCBI NO: 15239280 NR Description: putative protein; protein id: At5g66180.1 thaliana] >gi|10177133|dbj|BAB10423.1| contains similarity to
  misc_feature (117)..(316): Homolog of NCBI NO: 18481712 NR Description: putative nucleolar protein [Sorghum bicolor]
  misc_feature (87)..(117): Homolog of NCBI NO: 18481712 NR Description: putative nucleolar protein [Sorghum bicolor]
  misc_feature (3)..(90): Homolog of NCBI NO: 18481711 NR Description: putative phosphate/phosphoenolpyruvate
  misc_feature (192)..(314): Homolog of NCBI NO: 20094206 NR Description: tRNA/rRNA cytosine-C5-methylase [Methanopyrus
  misc_feature (76)..(120): Homolog of NCBI NO: 20094206 NR Description: tRNA/rRNA cytosine-C5-methylase [Methanopyrus
  misc_feature (170)..(314): Homolog of NCBI NO: 18977637 NR Description: putative nucleolar protein II (nol1-nop2-sun [Pyrococcus furiosus DSM 3638] >gi|18893359|gb|AAL81389.1|
  misc_feature (76)..(117): Homolog of NCBI NO: 18977637 NR Description: putative nucleolar protein II (nol1-nop2-sun [Pyrococcus furiosus DSM 3638] >gi|18893359|gb|AAL81389.1|

SEQ ID NO: 94819 - protein, 240 aa, Arabidopsis thaliana; identical to SEQ ID NO: 91063
  peptide (1)..(240): Ceres Seq. ID no. 12726332
  misc_feature (148)..(226): Pfam Name: NOL1/NOP2/sun family Pfam Description: NOL1/NOP2/sun family
  misc_feature (1)..(240): Homolog of NCBI NO: 15239280 NR Description: putative protein; protein id: At5g66180.1 thaliana] >gi|10177133|dbj|BAB10423.1| contains similarity to
  misc_feature (32)..(231): Homolog of NCBI NO: 18481712 NR Description: putative nucleolar protein [Sorghum bicolor]
  misc_feature (2)..(32): Homolog of NCBI NO: 18481712 NR Description: putative nucleolar protein [Sorghum bicolor]
  misc_feature (107)..(229): Homolog of NCBI NO: 20094206 NR Description: tRNA/rRNA cytosine-C5-methylase [Methanopyrus
  misc_feature (1)..(35): Homolog of NCBI NO: 20094206 NR Description: tRNA/rRNA cytosine-C5-methylase [Methanopyrus
  misc_feature (85)..(229): Homolog of NCBI NO: 18977637 NR Description: putative nucleolar protein II (nol1-nop2-sun [Pyrococcus furiosus DSM 3638] >gi|18893359|gb|AAL81389.1|
  misc_feature (1)..(32): Homolog of NCBI NO: 18977637 NR Description: putative nucleolar protein II (nol1-nop2-sun [Pyrococcus furiosus DSM 3638] >gi|18893359|gb|AAL81389.1|

SEQ ID NO: 94820 - protein, 239 aa, Arabidopsis thaliana; identical to SEQ ID NO: 91064
  peptide (1)..(239): Ceres Seq. ID no. 12726333
  misc_feature (147)..(225): Pfam Name: NOL1/NOP2/sun family Pfam Description: NOL1/NOP2/sun family
  misc_feature (1)..(239): Homolog of NCBI NO: 15239280 NR Description: putative protein; protein id: At5g66180.1 thaliana] >gi|10177133|dbj|BAB10423.1| contains similarity to
  misc_feature (31)..(230): Homolog of NCBI NO: 18481712 NR Description: putative nucleolar protein [Sorghum bicolor]
  misc_feature (1)..(31): Homolog of NCBI NO: 18481712 NR Description: putative nucleolar protein [Sorghum bicolor]
  misc_feature (106)..(228): Homolog of NCBI NO: 20094206 NR Description: tRNA/rRNA cytosine-C5-methylase [Methanopyrus
  misc_feature (1)..(34): Homolog of NCBI NO: 20094206 NR Description: tRNA/rRNA cytosine-C5-methylase [Methanopyrus
  misc_feature (84)..(228): Homolog of NCBI NO: 18977637 NR Description: putative nucleolar protein II (nol1-nop2-sun [Pyrococcus furiosus DSM 3638] >gi|18893359|gb|AAL81389.1|
  misc_feature (1)..(31): Homolog of NCBI NO: 18977637 NR Description: putative nucleolar protein II (nol1-nop2-sun [Pyrococcus furiosus DSM 3638] >gi|18893359|gb|AAL81389.1|

SEQ ID NO: 94821 - DNA, 1776 bp, Arabidopsis thaliana; identical to SEQ ID NO: 91065
  misc_feature (1)..(1776): Ceres Seq. ID no. 12726334
  misc_feature: MA Experiment ID: 20000307 Result: Down-regulated in Transcription
  misc_feature: MA Experiment 20000307 PARAMETER Experiment Name: At_Germinating_Seeds_Sub_P Parameter: Age (hr) Value: 24 vs. 0
  misc_feature: MA Experiment 20000307 PARAMETER Experiment Name: At_Germinating_Seeds_Sub_P Parameter: Organism Value: A. thaliana
  misc_feature: MA Experiment 20000307 PARAMETER Experiment Name: At_Germinating_Seeds_Sub_P Parameter: Plant Line Value: WS
  misc_feature: MA Experiment 20000307 PARAMETER Experiment Name: At_Germinating_Seeds_Sub_P Parameter: Tissue Value: Germinating Seeds
  misc_feature: MA Experiment ID: 20000315 Result: Down-regulated in Transcription
  misc_feature: MA Experiment 20000315 PARAMETER Experiment Name: At_14day_Shoots-Roots_Sub_P Parameter: Age (day) Value: 14
  misc_feature: MA Experiment 20000315 PARAMETER Experiment Name: At_14day_Shoots-Roots_Sub_P Parameter: Organism Value: A. thaliana
  misc_feature: MA Experiment 20000315 PARAMETER Experiment Name: At_14day_Shoots-Roots_Sub_P Parameter: Plant Line Value: WS
  misc_feature: MA Experiment 20000315 PARAMETER Experiment Name: At_14day_Shoots-Roots_Sub_P Parameter: Tissue Value: Shoots vs. Whole Plant
  misc_feature: MA Experiment ID: 20000328 Result: Down-regulated in Transcription
  misc_feature: MA Experiment 20000328 PARAMETER Experiment Name: At_42deg_Heat_Sub_P Parameter: Age (day) Value: 14
  misc_feature: MA Experiment 20000328 PARAMETER Experiment Name: At_42deg_Heat_Sub_P Parameter: Organism Value: A. thaliana
  misc_feature: MA Experiment 20000328 PARAMETER Experiment Name: At_42deg_Heat_Sub_P Parameter: Plant Line Value: WS
  misc_feature: MA Experiment 20000328 PARAMETER Experiment Name: At_42deg_Heat_Sub_P Parameter: Temperature (deg C) Value: 42 vs. 22
  misc_feature: MA Experiment 20000328 PARAMETER Experiment Name: At_42deg_Heat_Sub_P Parameter: Timepoint (hr) Value: 6
  misc_feature: MA Experiment 20000328 PARAMETER Experiment Name: At_42deg_Heat_Sub_P Parameter: Tissue Value: Aerial

SEQ ID NO: 94822 - protein, 591 aa, Arabidopsis thaliana; identical to SEQ ID NO: 91066
  peptide (1)..(591): Ceres Seq. ID no. 12726335
  misc_feature (180)..(214): Pfam Name: PPR repeat Pfam Description: PPR repeat
  misc_feature (149)..(591): Homolog of NCBI NO: 15239745 NR Description: selenium-binding protein-like; protein id:
  misc_feature (27)..(206): Homolog of NCBI NO: 15239745 NR Description: selenium-binding protein-like; protein id:
  misc_feature (14)..(591): Homolog of NCBI NO: 34393394 NR Description: putative pentatricopeptide (PPR)
  misc_feature (81)..(591): Homolog of NCBI NO: 15223099 NR Description: unknown protein; protein id: At1g08070.1 thaliana] >gi|8778839|gb|AAF79838.1|AC026875_18 T6D22.15
  misc_feature (2)..(591): Homolog of NCBI NO: 29124127 NR Description: hypothetical protein [Oryza sativa (japonica
  misc_feature (19)..(576): Homolog of NCBI NO: 7486979 NR Description: hypothetical protein T13K14.230 - Arabidopsis
  misc_feature (27)..(591): Homolog of NCBI NO: 15228954 NR Description: putative protein; protein id: At3g56550.1
  misc_feature (170)..(591): Homolog of NCBI NO: 34910298 NR Description: P0013F10.8 [Oryza sativa (japonica
  misc_feature (100)..(205): Homolog of NCBI NO: 34910298 NR Description: P0013F10.8 [Oryza sativa (japonica
  misc_feature (2)..(591): Homolog of NCBI NO: 8778758 NR Description: T30E16.32 [Arabidopsis thaliana]

SEQ ID NO: 94823 - protein, 509 aa, Arabidopsis thaliana; identical to SEQ ID NO: 91067
  peptide (1)..(509): Ceres Seq. ID no. 12726336
  misc_feature (98)..(132): Pfam Name: PPR repeat Pfam Description: PPR repeat
  misc_feature (67)..(509): Homolog of NCBI NO: 15239745 NR Description: selenium-binding protein-like; protein id:
  misc_feature (1)..(124): Homolog of NCBI NO: 15239745 NR Description: selenium-binding protein-like; protein id:
  misc_feature (1)..(509): Homolog of NCBI NO: 34393394 NR Description: putative pentatricopeptide (PPR)
  misc_feature (1)..(509): Homolog of NCBI NO: 15223099 NR Description: unknown protein; protein id: At1g08070.1 thaliana] >gi|8778839|gb|AAF79838.1|AC026875_18 T6D22.15
  misc_feature (1)..(509): Homolog of NCBI NO: 29124127 NR Description: hypothetical protein [Oryza sativa (japonica
  misc_feature (1)..(494): Homolog of NCBI NO: 7486979 NR Description: hypothetical protein T13K14.230 - Arabidopsis
  misc_feature (1)..(509): Homolog of NCBI NO: 15228954 NR Description: putative protein; protein id: At3g56550.1
  misc_feature (88)..(509): Homolog of NCBI NO: 34910298 NR Description: P0013F10.8 [Oryza sativa (japonica
  misc_feature (18)..(123): Homolog of NCBI NO: 34910298 NR Description: P0013F10.8 [Oryza sativa (japonica
  misc_feature (1)..(509): Homolog of NCBI NO: 8778758 NR Description: T30E16.32 [Arabidopsis thaliana]

SEQ ID NO: 94824 - protein, 441 aa, Arabidopsis thaliana; identical to SEQ ID NO: 91068
  peptide (1)..(441): Ceres Seq. ID no. 12726337
  misc_feature (30)..(64): Pfam Name: PPR repeat Pfam Description: PPR repeat
  misc_feature (1)..(441): Homolog of NCBI NO: 15239745 NR Description: selenium-binding protein-like; protein id:
  misc_feature (1)..(56): Homolog of NCBI NO: 15239745 NR Description: selenium-binding protein-like; protein id:
  misc_feature (1)..(441): Homolog of NCBI NO: 34393394 NR Description: putative pentatricopeptide (PPR)
  misc_feature (1)..(441): Homolog of NCBI NO: 15223099 NR Description: unknown protein; protein id: At1g08070.1 thaliana] >gi|8778839|gb|AAF79838.1|AC026875_18 T6D22.15
  misc_feature (1)..(441): Homolog of NCBI NO: 29124127 NR Description: hypothetical protein [Oryza sativa (japonica
  misc_feature (1)..(426): Homolog of NCBI NO: 7486979 NR Description: hypothetical protein T13K14.230 - Arabidopsis
  misc_feature (1)..(441): Homolog of NCBI NO: 15228954 NR Description: putative protein; protein id: At3g56550.1
  misc_feature (20)..(441): Homolog of NCBI NO: 34910298 NR Description: P0013F10.8 [Oryza sativa (japonica
  misc_feature (1)..(55): Homolog of NCBI NO: 34910298 NR Description: P0013F10.8 [Oryza sativa (japonica
  misc_feature (1)..(441): Homolog of NCBI NO: 8778758 NR Description: T30E16.32 [Arabidopsis thaliana]

SEQ ID NO: 94825 - DNA, 3316 bp, Arabidopsis thaliana; identical to SEQ ID NO: 91069
  misc_feature (1)..(3316): Ceres Seq. ID no. 12726341
  misc_feature: MA Experiment ID: 20000315 Result: Down-regulated in Transcription
  misc_feature: MA Experiment 20000315 PARAMETER Experiment Name: At_14day_Shoots-Roots_Sub_P Parameter: Age (day) Value: 14
  misc_feature: MA Experiment 20000315 PARAMETER Experiment Name: At_14day_Shoots-Roots_Sub_P Parameter: Organism Value: A. thaliana
  misc_feature: MA Experiment 20000315 PARAMETER Experiment Name: At_14day_Shoots-Roots_Sub_P Parameter: Plant Line Value: WS
  misc_feature: MA Experiment 20000315 PARAMETER Experiment Name: At_14day_Shoots-Roots_Sub_P Parameter: Tissue Value: Shoots vs. Whole Plant
  misc_feature: MA Experiment ID: 20000355 Result: Down-regulated in Transcription
  misc_feature: MA Experiment 20000355 PARAMETER Experiment Name: At_Siliques_Sub_P Parameter: Age (day) Value: 21
  misc_feature: MA Experiment 20000355 PARAMETER Experiment Name: At_Siliques_Sub_P Parameter: Organism Value: A. thaliana
  misc_feature: MA Experiment 20000355 PARAMETER Experiment Name: At_Siliques_Sub_P Parameter: Plant Line Value: WS
  misc_feature: MA Experiment 20000355 PARAMETER Experiment Name: At_Siliques_Sub_P Parameter: Tissue Value: Less Than 5mm Siliques vs. Whole Plant
  misc_feature: MA Experiment ID: 20000440 Result: Down-regulated in Transcription
  misc_feature: MA Experiment 20000440 PARAMETER Experiment Name: At_Closed-Flower__Sub_P Parameter: Tissue Value: Closed Flower vs. Whole Plant

SEQ ID NO: 94826 - protein, 1010 aa, Arabidopsis thaliana; identical to SEQ ID NO: 91070
  peptide (1)..(1010): Ceres Seq. ID no. 12726342
  misc_feature (1)..(1008): Homolog of NCBI NO: 15241369 NR Description: leucine-rich repeat transmembrane protein kinase, protein id: At5g20480.1, supported by cDNA: gi_18700170
  misc_feature (1)..(1008): Homolog of NCBI NO: 18700171 NR Description: AT5g20480/F7C8_70 [Arabidopsis thaliana]
  misc_feature (1)..(1007): Homolog of NCBI NO: 15232728 NR Description: leucine-rich repeat transmembrane protein kinase, protein id: At3g47110.1 [Arabidopsis thaliana]
  misc_feature (3)..(999): Homolog of NCBI NO: 2130082 NR Description: protein kinase Xa21 (EC 2.7.1.-), receptor type
  misc_feature (7)..(891): Homolog of NCBI NO: 34895840 NR Description: putative protein kinase Xa21 [Oryza sativa
  misc_feature (25)..(616): Homolog of NCBI NO: 34904254 NR Description: Oryza sativa leucine rich repeat containing
  misc_feature (722)..(1001): Homolog of NCBI NO: 34904254 NR Description: Oryza sativa leucine rich repeat containing
  misc_feature (71)..(890): Homolog of NCBI NO: 5852092 NR Description: zwh15.1 [Oryza sativa (indica cultivar-group)]
  misc_feature (66)..(831): Homolog of NCBI NO: 34904254 NR Description: Oryza sativa leucine rich repeat containing
  misc_feature (64)..(1003): Homolog of NCBI NO: 29119653 NR Description: LRR receptor-like kinase 2 [Arabidopsis thaliana]

SEQ ID NO: 94827 - protein, 998 aa, Arabidopsis thaliana; identical to SEQ ID NO: 91071
  peptide (1)..(998): Ceres Seq. ID no. 12726343
  misc_feature (1)..(996): Homolog of NCBI NO: 15241369 NR Description: leucine-rich repeat transmembrane protein kinase, protein id: At5g20480.1, supported by cDNA: gi_18700170
  misc_feature (1)..(996): Homolog of NCBI NO: 18700171 NR Description: AT5g20480/F7C8_70 [Arabidopsis thaliana]
  misc_feature (1)..(995): Homolog of NCBI NO: 15232728 NR Description: leucine-rich repeat transmembrane protein kinase, protein id: At3g47110.1 [Arabidopsis thaliana]
  misc_feature (1)..(987): Homolog of NCBI NO: 2130082 NR Description: protein kinase Xa21 (EC 2.7.1.-), receptor type
  misc_feature (1)..(879): Homolog of NCBI NO: 34895840 NR Description: putative protein kinase Xa21 [Oryza sativa
  misc_feature (13)..(604): Homolog of NCBI NO: 34904254 NR Description: Oryza sativa leucine rich repeat containing
  misc_feature (710)..(989): Homolog of NCBI NO: 34904254 NR Description: Oryza sativa leucine rich repeat containing
  misc_feature (59)..(878): Homolog of NCBI NO: 5852092 NR Description: zwh15.1 [Oryza sativa (indica cultivar-group)]
  misc_feature (54)..(819): Homolog of NCBI NO: 34904254 NR Description: Oryza sativa leucine rich repeat containing
  misc_feature (52)..(991): Homolog of NCBI NO: 29119653 NR Description: LRR receptor-like kinase 2 [Arabidopsis thaliana]

SEQ ID NO: 94828 - protein, 890 aa, Arabidopsis thaliana; identical to SEQ ID NO: 91072
  peptide (1)..(890): Ceres Seq. ID no. 12726344
  misc_feature (1)..(888): Homolog of NCBI NO: 15241369 NR Description: leucine-rich repeat transmembrane protein kinase, protein id: At5g20480.1, supported by cDNA: gi_18700170
  misc_feature (1)..(888): Homolog of NCBI NO: 18700171 NR Description: AT5g20480/F7C8_70 [Arabidopsis thaliana]
  misc_feature (1)..(887): Homolog of NCBI NO: 15232728 NR Description: leucine-rich repeat transmembrane protein kinase, protein id: At3g47110.1 [Arabidopsis thaliana]
  misc_feature (1)..(879): Homolog of NCBI NO: 2130082 NR Description: protein kinase Xa21 (EC 2.7.1.-), receptor type
  misc_feature (1)..(771): Homolog of NCBI NO: 34895840 NR Description: putative protein kinase Xa21 [Oryza sativa
  misc_feature (1)..(496): Homolog of NCBI NO: 34904254 NR Description: Oryza sativa leucine rich repeat containing
  misc_feature (602)..(881): Homolog of NCBI NO: 34904254 NR Description: Oryza sativa leucine rich repeat containing
  misc_feature (1)..(770): Homolog of NCBI NO: 5852092 NR Description: zwh15.1 [Oryza sativa (indica cultivar-group)]
  misc_feature (1)..(711): Homolog of NCBI NO: 34904254 NR Description: Oryza sativa leucine rich repeat containing
  misc_feature (1)..(883): Homolog of NCBI NO: 29119653 NR Description: LRR receptor-like kinase 2 [Arabidopsis thaliana]

SEQ ID NO: 94829 - DNA, 3312 bp, Arabidopsis thaliana; identical to SEQ ID NO: 91073
  misc_feature (1)..(3312): Ceres Seq. ID no. 12726345
  misc_feature: MA Experiment ID: 20000315 Result: Down-regulated in Transcription
  misc_feature: MA Experiment 20000315 PARAMETER Experiment Name: At_14day_Shoots-Roots_Sub_P Parameter: Age (day) Value: 14
  misc_feature: MA Experiment 20000315 PARAMETER Experiment Name: At_14day_Shoots-Roots_Sub_P Parameter: Organism Value: A. thaliana
  misc_feature: MA Experiment 20000315 PARAMETER Experiment Name: At_14day_Shoots-Roots_Sub_P Parameter: Plant Line Value: WS
  misc_feature: MA Experiment 20000315 PARAMETER Experiment Name: At_14day_Shoots-Roots_Sub_P Parameter: Tissue Value: Shoots vs. Whole Plant
  misc_feature: MA Experiment ID: 20000327 Result: Down-regulated in Transcription
  misc_feature: MA Experiment 20000327 PARAMETER Experiment Name: At_42deg_Heat_Sub_P Parameter: Age (day) Value: 14
  misc_feature: MA Experiment 20000327 PARAMETER Experiment Name: At_42deg_Heat_Sub_P Parameter: Organism Value: A. thaliana
  misc_feature: MA Experiment 20000327 PARAMETER Experiment Name: At_42deg_Heat_Sub_P Parameter: Plant Line Value: WS
  misc_feature: MA Experiment 20000327 PARAMETER Experiment Name: At_42deg_Heat_Sub_P Parameter: Temperature (deg C) Value: 42 vs. 22
  misc_feature: MA Experiment 20000327 PARAMETER Experiment Name: At_42deg_Heat_Sub_P Parameter: Timepoint (hr) Value: 1
  misc_feature: MA Experiment 20000327 PARAMETER Experiment Name: At_42deg_Heat_Sub_P Parameter: Tissue Value: Aerial
  misc_feature: MA Experiment ID: 20000328 Result: Down-regulated in Transcription
  misc_feature: MA Experiment 20000328 PARAMETER Experiment Name: At_42deg_Heat_Sub_P Parameter: Age (day) Value: 14
  misc_feature: MA Experiment 20000328 PARAMETER Experiment Name: At_42deg_Heat_Sub_P Parameter: Organism Value: A. thaliana
  misc_feature: MA Experiment 20000328 PARAMETER Experiment Name: At_42deg_Heat_Sub_P Parameter: Plant Line Value: WS
  misc_feature: MA Experiment 20000328 PARAMETER Experiment Name: At_42deg_Heat_Sub_P Parameter: Temperature (deg C) Value: 42 vs. 22
  misc_feature: MA Experiment 20000328 PARAMETER Experiment Name: At_42deg_Heat_Sub_P Parameter: Timepoint (hr) Value: 6
  misc_feature: MA Experiment 20000328 PARAMETER Experiment Name: At_42deg_Heat_Sub_P Parameter: Tissue Value: Aerial
  misc_feature: MA Experiment ID: 20000347 Result: Up-regulated in Transcription
  misc_feature: MA Experiment 20000347 PARAMETER Experiment Name: At_2mM_SA_Sub_P Parameter: Age (day) Value: 14
  misc_feature: MA Experiment 20000347 PARAMETER Experiment Name: At_2mM_SA_Sub_P Parameter: Organism Value: A. thaliana
  misc_feature: MA Experiment 20000347 PARAMETER Experiment Name: At_2mM_SA_Sub_P Parameter: Plant Line Value: WS
  misc_feature: MA Experiment 20000347 PARAMETER Experiment Name: At_2mM_SA_Sub_P Parameter: Timepoint (hr) Value: 6
  misc_feature: MA Experiment 20000347 PARAMETER Experiment Name: At_2mM_SA_Sub_P Parameter: Tissue Value: Aerial
  misc_feature: MA Experiment 20000347 PARAMETER Experiment Name: At_2mM_SA_Sub_P Parameter: Treatment Value: 2mM SA vs. No Treatment
  misc_feature: MA Experiment ID: 20000348 Result: Up-regulated in Transcription
  misc_feature: MA Experiment 20000348 PARAMETER Experiment Name: At_100uM_ABA_Sub_P Parameter: Age (day) Value: 14
  misc_feature: MA Experiment 20000348 PARAMETER Experiment Name: At_100uM_ABA_Sub_P Parameter: Organism Value: A. thaliana
  misc_feature: MA Experiment 20000348 PARAMETER Experiment Name: At_100uM_ABA_Sub_P Parameter: Plant Line Value: WS
  misc_feature: MA Experiment 20000348 PARAMETER Experiment Name: At_100uM_ABA_Sub_P Parameter: Timepoint (hr) Value: 1
  misc_feature: MA Experiment 20000348 PARAMETER Experiment Name: At_100uM_ABA_Sub_P Parameter: Tissue Value: Aerial
  misc_feature: MA Experiment 20000348 PARAMETER Experiment Name: At_100uM_ABA_Sub_P Parameter: Treatment Value: 100uM ABA vs. No Treatment

SEQ ID NO: 94830 - protein, 1011 aa, Arabidopsis thaliana; identical to SEQ ID NO: 91074
  peptide (1)..(1011): Ceres Seq. ID no. 12726346
  misc_feature (21)..(1008): Homolog of NCBI NO: 15232728 NR Description: leucine-rich repeat transmembrane protein kinase, protein id: At3g47110.1 [Arabidopsis thaliana]
  misc_feature (1)..(1008): Homolog of NCBI NO: 15241369 NR Description: leucine-rich repeat transmembrane protein kinase, protein id: At5g20480.1, supported by cDNA: gi_18700170
  misc_feature (1)..(1008): Homolog of NCBI NO: 18700171 NR Description: AT5g20480/F7C8_70 [Arabidopsis thaliana]
  misc_feature (3)..(1000): Homolog of NCBI NO: 2130082 NR Description: protein kinase Xa21 (EC 2.7.1.-), receptor type
  misc_feature (1)..(892): Homolog of NCBI NO: 34895840 NR Description: putative protein kinase Xa21 [Oryza sativa
  misc_feature (66)..(797): Homolog of NCBI NO: 34904254 NR Description: Oryza sativa leucine rich repeat containing
  misc_feature (776)..(1002): Homolog of NCBI NO: 34904254 NR Description: Oryza sativa leucine rich repeat containing
  misc_feature (25)..(595): Homolog of NCBI NO: 34904254 NR Description: Oryza sativa leucine rich repeat containing
  misc_feature (68)..(923): Homolog of NCBI NO: 15219699 NR Description: leucine-rich repeat transmembrane protein kinase, protein id: At1g35710.1 [Arabidopsis thaliana]
  misc_feature (77)..(891): Homolog of NCBI NO: 5852092 NR Description: zwh15.1 [Oryza sativa (indica cultivar-group)]

SEQ ID NO: 94831 - protein, 891 aa, Arabidopsis thaliana; identical to SEQ ID NO: 91075
  peptide (1)..(891): Ceres Seq. ID no. 12726347
  misc_feature (1)..(888): Homolog of NCBI NO: 15232728 NR Description: leucine-rich repeat transmembrane protein kinase, protein id: At3g47110.1 [Arabidopsis thaliana]
  misc_feature (1)..(888): Homolog of NCBI NO: 15241369 NR Description: leucine-rich repeat transmembrane protein kinase, protein id: At5g20480.1, supported by cDNA: gi_18700170
  misc_feature (1)..(888): Homolog of NCBI NO: 18700171 NR Description: AT5g20480/F7C8_70 [Arabidopsis thaliana]
  misc_feature (1)..(880): Homolog of NCBI NO: 2130082 NR Description: protein kinase Xa21 (EC 2.7.1.-), receptor type
  misc_feature (1)..(772): Homolog of NCBI NO: 34895840 NR Description: putative protein kinase Xa21 [Oryza sativa
  misc_feature (1)..(677): Homolog of NCBI NO: 34904254 NR Description: Oryza sativa leucine rich repeat containing
  misc_feature (656)..(882): Homolog of NCBI NO: 34904254 NR Description: Oryza sativa leucine rich repeat containing
  misc_feature (1)..(475): Homolog of NCBI NO: 34904254 NR Description: Oryza sativa leucine rich repeat containing
  misc_feature (1)..(803): Homolog of NCBI NO: 15219699 NR Description: leucine-rich repeat transmembrane protein kinase, protein id: At1g35710.1 [Arabidopsis thaliana]
  misc_feature (1)..(771): Homolog of NCBI NO: 5852092 NR Description: zwh15.1 [Oryza sativa (indica cultivar-group)]

SEQ ID NO: 94832 - protein, 800 aa, Arabidopsis thaliana; identical to SEQ ID NO: 91076
  peptide (1)..(800): Ceres Seq. ID no. 12726348
  misc_feature (1)..(797): Homolog of NCBI NO: 15232728 NR Description: leucine-rich repeat transmembrane protein kinase, protein id: At3g47110.1 [Arabidopsis thaliana]
  misc_feature (1)..(797): Homolog of NCBI NO: 15241369 NR Description: leucine-rich repeat transmembrane protein kinase, protein id: At5g20480.1, supported by cDNA: gi_18700170
  misc_feature (1)..(797): Homolog of NCBI NO: 18700171 NR Description: AT5g20480/F7C8_70 [Arabidopsis thaliana]
  misc_feature (1)..(789): Homolog of NCBI NO: 2130082 NR Description: protein kinase Xa21 (EC 2.7.1.-), receptor type
  misc_feature (1)..(681): Homolog of NCBI NO: 34895840 NR Description: putative protein kinase Xa21 [Oryza sativa
  misc_feature (1)..(586): Homolog of NCBI NO: 34904254 NR Description: Oryza sativa leucine rich repeat containing
  misc_feature (565)..(791): Homolog of NCBI NO: 34904254 NR Description: Oryza sativa leucine rich repeat containing
  misc_feature (1)..(384): Homolog of NCBI NO: 34904254 NR Description: Oryza sativa leucine rich repeat containing
  misc_feature (1)..(712): Homolog of NCBI NO: 15219699 NR Description: leucine-rich repeat transmembrane protein kinase, protein id: At1g35710.1 [Arabidopsis thaliana]
  misc_feature (1)..(680): Homolog of NCBI NO: 5852092 NR Description: zwh15.1 [Oryza sativa (indica cultivar-group)]

SEQ ID NO: 94833 - DNA, 1754 bp, Arabidopsis thaliana; identical to SEQ ID NO: 91077
  misc_feature (1)..(1754): Ceres Seq. ID no. 12726349
  misc_feature: MA Experiment ID: 20000227 Result: Down-regulated in Transcription
  misc_feature: MA Experiment 20000227 PARAMETER Experiment Name: At_Root-Tips-vs-Tops_P Parameter: Tissue Value: Root Tips vs. Root Tops
  misc_feature: MA Experiment ID: 20000234 Result: Down-regulated in Transcription
  misc_feature: MA Experiment 20000234 PARAMETER Experiment Name: At_Siliques_P Parameter: Age (day) Value: 21
  misc_feature: MA Experiment 20000234 PARAMETER Experiment Name: At_Siliques_P Parameter: Organism Value: A. thaliana
  misc_feature: MA Experiment 20000234 PARAMETER Experiment Name: At_Siliques_P Parameter: Plant Line Value: WS
  misc_feature: MA Experiment 20000234 PARAMETER Experiment Name: At_Siliques_P Parameter: Tissue Value: Less Than 5mm Siliques vs. Whole Plant
  misc_feature: MA Experiment ID: 20000264 Result: Down-regulated in Transcription
  misc_feature: MA Experiment 20000264 PARAMETER Experiment Name: At_Open_Flower_P Parameter: Age (day) Value: 21
  misc_feature: MA Experiment 20000264 PARAMETER Experiment Name: At_Open_Flower_P Parameter: Plant Line Value: WS
  misc_feature: MA Experiment 20000264 PARAMETER Experiment Name: At_Open_Flower_P Parameter: Tissue Value: Open Flower vs. Whole Plant
  misc_feature: MA Experiment ID: 20000265 Result: Down-regulated in Transcription
  misc_feature: MA Experiment 20000265 PARAMETER Experiment Name: At_Open_Flower_P Parameter: Age (day) Value: 21
  misc_feature: MA Experiment 20000265 PARAMETER Experiment Name: At_Open_Flower_P Parameter: Plant Line Value: WS
  misc_feature: MA Experiment 20000265 PARAMETER Experiment Name: At_Open_Flower_P Parameter: Tissue Value: Closed Flower vs. Whole Plant
  misc_feature: MA Experiment ID: 20000286 Result: Down-regulated in Transcription
  misc_feature: MA Experiment 20000286 PARAMETER Experiment Name: At_Open_Flower_P Parameter: Age (day) Value: 21
  misc_feature: MA Experiment 20000286 PARAMETER Experiment Name: At_Open_Flower_P Parameter: Plant Line Value: WS
  misc_feature: MA Experiment 20000286 PARAMETER Experiment Name: At_Open_Flower_P Parameter: Tissue Value: Half Open vs. Whole Plant
  misc_feature: MA Experiment ID: 20000451 Result: Down-regulated in Transcription
  misc_feature: MA Experiment 20000451 PARAMETER Experiment Name: At_CS6879_Shoots-Roots_P Parameter: Age (day) Value: 14
  misc_feature: MA Experiment 20000451 PARAMETER Experiment Name: At_CS6879_Shoots-Roots_P Parameter: Organism Value: A. thaliana
  misc_feature: MA Experiment 20000451 PARAMETER Experiment Name: At_CS6879_Shoots-Roots_P Parameter: Plant Line Value: CS6879 vs. WS
  misc_feature: MA Experiment 20000451 PARAMETER Experiment Name: At_CS6879_Shoots-Roots_P Parameter: Tissue Value: Roots
  misc_feature: MA Experiment ID: 20000794 Result: Down-regulated in Transcription
  misc_feature: MA Experiment 20000794 PARAMETER Experiment Name: At_Petals_P Parameter: Age (day) Value: 23-25 days
  misc_feature: MA Experiment 20000794 PARAMETER Experiment Name: At_Petals_P Parameter: Plant Line Value: WS
  misc_feature: MA Experiment 20000794 PARAMETER Experiment Name: At_Petals_P Parameter: Tissue Value: Petals vs. Whole plant
  misc_feature: MA Experiment ID: 20001247 Result: Up-regulated in Transcription
  misc_feature: MA Experiment 20001247 PARAMETER Experiment Name: At_Far-red-induction_P Parameter: Age (day) Value: 7
  misc_feature: MA Experiment 20001247 PARAMETER Experiment Name: At_Far-red-induction_P Parameter: Light Value: Far-red vs. White
  misc_feature: MA Experiment 20001247 PARAMETER Experiment Name: At_Far-red-induction_P Parameter: Organism Value: A. thaliana
  misc_feature: MA Experiment 20001247 PARAMETER Experiment Name: At_Far-red-induction_P Parameter: Plant Line Value: Columbia
  misc_feature: MA Experiment 20001247 PARAMETER Experiment Name: At_Far-red-induction_P Parameter: Timepoint (hr) Value: 1
  misc_feature: MA Experiment 20001247 PARAMETER Experiment Name: At_Far-red-induction_P Parameter: Tissue Value: Whole Plant
  misc_feature: MA Experiment ID: 20001450 Result: Up-regulated in Transcription
  misc_feature: MA Experiment 20001450 PARAMETER Experiment Name: At_Far-red-induction_P Parameter: Age (day) Value: 7
  misc_feature: MA Experiment 20001450 PARAMETER Experiment Name: At_Far-red-induction_P Parameter: Light Value: Far-red vs. White
  misc_feature: MA Experiment 20001450 PARAMETER Experiment Name: At_Far-red-induction_P Parameter: Organism Value: A. thaliana
  misc_feature: MA Experiment 20001450 PARAMETER Experiment Name: At_Far-red-induction_P Parameter: Plant Line Value: Columbia
  misc_feature: MA Experiment 20001450 PARAMETER Experiment Name: At_Far-red-induction_P Parameter: Timepoint (hr) Value: 8
  misc_feature: MA Experiment 20001450 PARAMETER Experiment Name: At_Far-red-induction_P Parameter: Tissue Value: Whole Plant
  misc_feature: MA Experiment ID: 20001451 Result: Up-regulated in Transcription
  misc_feature: MA Experiment 20001451 PARAMETER Experiment Name: At_Far-red-induction_P Parameter: Age (day) Value: 7
  misc_feature: MA Experiment 20001451 PARAMETER Experiment Name: At_Far-red-induction_P Parameter: Light Value: Far-red vs. White
  misc_feature: MA Experiment 20001451 PARAMETER Experiment Name: At_Far-red-induction_P Parameter: Organism Value: A. thaliana
  misc_feature: MA Experiment 20001451 PARAMETER Experiment Name: At_Far-red-induction_P Parameter: Plant Line Value: Columbia
  misc_feature: MA Experiment 20001451 PARAMETER Experiment Name: At_Far-red-induction_P Parameter: Timepoint (hr) Value: 24
  misc_feature: MA Experiment 20001451 PARAMETER Experiment Name: At_Far-red-induction_P Parameter: Tissue Value: Whole Plant
  misc_feature: MA Experiment ID: 20001560 Result: Down-regulated in Transcription
  misc_feature: MA Experiment 20001560 PARAMETER Experiment Name: At_Drought_Soil_Dry_P Parameter: Age (day) Value: 28
  misc_feature: MA Experiment 20001560 PARAMETER Experiment Name: At_Drought_Soil_Dry_P Parameter: Organism Value: A. thaliana
  misc_feature: MA Experiment 20001560 PARAMETER Experiment Name: At_Drought_Soil_Dry_P Parameter: Plant Line Value: WS
  misc_feature: MA Experiment 20001560 PARAMETER Experiment Name: At_Drought_Soil_Dry_P Parameter: Post Timepoint (hr) Value: None
  misc_feature: MA Experiment 20001560 PARAMETER Experiment Name: At_Drought_Soil_Dry_P Parameter: Post-Treatment Value: None
  misc_feature: MA Experiment 20001560 PARAMETER Experiment Name: At_Drought_Soil_Dry_P Parameter: Timepoint (day) Value: 14
  misc_feature: MA Experiment 20001560 PARAMETER Experiment Name: At_Drought_Soil_Dry_P Parameter: Treatment Value: Drought vs. No Drought
  misc_feature: MA Experiment ID: 20001757 Result: Up-regulated in Transcription
  misc_feature: MA Experiment 20001757 PARAMETER Experiment Name: At_50mM_NH4NO3_L-to-H_P Parameter: Timepoint (hr) Value: 6
  misc_feature: MA Experiment 20001757 PARAMETER Experiment Name: At_50mM_NH4NO3_L-to-H_P Parameter: Tissue Value: Leaf
  misc_feature: MA Experiment 20001757 PARAMETER Experiment Name: At_50mM_NH4NO3_L-to-H_P Parameter: Treatment Value: 50mM NH4NO3 vs 100mM Mannitol

SEQ ID NO: 94834 - protein, 501 aa, Arabidopsis thaliana; identical to SEQ ID NO: 91078
  peptide (1)..(501): Ceres Seq. ID no. 12726350
  misc_feature (113)..(375): Pfam Name: TCP family transcription factor Pfam Description: TCP family transcription factor
  misc_feature (13)..(501): Homolog of NCBI NO: 22331641 NR Description: putative protein; protein id: At3g47620.1, by cDNA: gi_16604510 [Arabidopsis thaliana] AT3g47620/F1P2_170 [Arabidopsis thaliana]
  misc_feature (25)..(501): Homolog of NCBI NO: 11357581 NR Description: hypothetical protein F1P2.170 - Arabidopsis >gi|6522545|emb|CAB61988.1| putative protein [Arabidopsis
  misc_feature (33)..(243): Homolog of NCBI NO: 5731257 NR Description: auxin-induced basic helix-loop-helix
  misc_feature (81)..(235): Homolog of NCBI NO: 18409345 NR Description: expressed protein; protein id: At1g69690.1, by cDNA: gi_15912212, supported by cDNA: gi_19547990 [Arabidopsis
  misc_feature (100)..(461): Homolog of NCBI NO: 15217857 NR Description: auxin-induced basic helix-loop-helix factor, putative; protein id: At1g58100.1, supported by cDNA:
  misc_feature (93)..(452): Homolog of NCBI NO: 15218305 NR Description: unknown protein; protein id: At1g72010.1, by cDNA: gi_19423971 [Arabidopsis thaliana]
  misc_feature (110)..(251): Homolog of NCBI NO: 20975251 NR Description: transcription factor PCF3 [Oryza sativa (japonica
  misc_feature (114)..(210): Homolog of NCBI NO: 15219640 NR Description: DNA binding protein, putative; protein id: supported by cDNA: gi_15912302, supported by cDNA: gi_19548006
  misc_feature (112)..(310): Homolog of NCBI NO: 15237274 NR Description: unknown protein; protein id: At5g23280.1 thaliana] >gi|10177817|dbj|BAB11183.1| gene_id:MKD15.14~unknown
  misc_feature (112)..(310): Homolog of NCBI NO: 26452377 NR Description: unknown protein [Arabidopsis thaliana]

SEQ ID NO: 94835 - protein, 489 aa, Arabidopsis thaliana; identical to SEQ ID NO: 91079
  peptide (1)..(489): Ceres Seq. ID no. 12726351
  misc_feature (101)..(363): Pfam Name: TCP family transcription factor Pfam Description: TCP family transcription factor
  misc_feature (1)..(489): Homolog of NCBI NO: 22331641 NR Description: putative protein; protein id: At3g47620.1, by cDNA: gi_16604510 [Arabidopsis thaliana] AT3g47620/F1P2_170 [Arabidopsis thaliana]
  misc_feature (13)..(489): Homolog of NCBI NO: 11357581 NR Description: hypothetical protein F1P2.170 - Arabidopsis >gi|6522545|emb|CAB61988.1| putative protein [Arabidopsis
  misc_feature (21)..(231): Homolog of NCBI NO: 5731257 NR Description: auxin-induced basic helix-loop-helix
  misc_feature (69)..(223): Homolog of NCBI NO: 18409345 NR Description: expressed protein; protein id: At1g69690.1, by cDNA: gi_15912212, supported by cDNA: gi_19547990 [Arabidopsis
  misc_feature (88)..(449): Homolog of NCBI NO: 15217857 NR Description: auxin-induced basic helix-loop-helix factor, putative; protein id: At1g58100.1, supported by cDNA:
  misc_feature (81)..(440): Homolog of NCBI NO: 15218305 NR Description: unknown protein; protein id: At1g72010.1, by cDNA: gi_19423971 [Arabidopsis thaliana]
  misc_feature (98)..(239): Homolog of NCBI NO: 20975251 NR Description: transcription factor PCF3 [Oryza sativa (japonica
  misc_feature (102)..(198): Homolog of NCBI NO: 15219640 NR Description: DNA binding protein, putative; protein id: supported by cDNA: gi_15912302, supported by cDNA: gi_19548006
  misc_feature (100)..(298): Homolog of NCBI NO: 15237274 NR Description: unknown protein; protein id: At5g23280.1 thaliana] >gi|10177817|dbj|BAB11183.1| gene_id:MKD15.14~unknown
  misc_feature (100)..(298): Homolog of NCBI NO: 26452377 NR Description: unknown protein [Arabidopsis thaliana]

SEQ ID NO: 94836 - protein, 477 aa, Arabidopsis thaliana; identical to SEQ ID NO: 91080
  peptide (1)..(477): Ceres Seq. ID no. 12726352
  misc_feature (89)..(351): Pfam Name: TCP family transcription factor Pfam Description: TCP family transcription factor
  misc_feature (1)..(477): Homolog of NCBI NO: 22331641 NR Description: putative protein; protein id: At3g47620.1, by cDNA: gi_16604510 [Arabidopsis thaliana] AT3g47620/F1P2_170 [Arabidopsis thaliana]
  misc_feature (1)..(477): Homolog of NCBI NO: 11357581 NR Description: hypothetical protein F1P2.170 - Arabidopsis >gi|6522545|emb|CAB61988.1| putative protein [Arabidopsis
  misc_feature (9)..(219): Homolog of NCBI NO: 5731257 NR Description: auxin-induced basic helix-loop-helix
  misc_feature (57)..(211): Homolog of NCBI NO: 18409345 NR Description: expressed protein; protein id: At1g69690.1, by cDNA: gi_15912212, supported by cDNA: gi_19547990 [Arabidopsis
  misc_feature (76)..(437): Homolog of NCBI NO: 15217857 NR Description: auxin-induced basic helix-loop-helix factor, putative; protein id: At1g58100.1, supported by cDNA:
  misc_feature (69)..(428): Homolog of NCBI NO: 15218305 NR Description: unknown protein; protein id: At1g72010.1, by cDNA: gi_19423971 [Arabidopsis thaliana]
  misc_feature (86)..(227): Homolog of NCBI NO: 20975251 NR Description: transcription factor PCF3 [Oryza sativa (japonica
  misc_feature (90)..(186): Homolog of NCBI NO: 15219640 NR Description: DNA binding protein, putative; protein id: supported by cDNA: gi_15912302, supported by cDNA: gi_19548006
  misc_feature (88)..(286): Homolog of NCBI NO: 15237274 NR Description: unknown protein; protein id: At5g23280.1 thaliana] >gi|10177817|dbj|BAB11183.1| gene_id:MKD15.14~unknown
  misc_feature (88)..(286): Homolog of NCBI NO: 26452377 NR Description: unknown protein [Arabidopsis thaliana]

SEQ ID NO: 94837 - DNA, 2121 bp, Arabidopsis thaliana; identical to SEQ ID NO: 91081
  misc_feature (1)..(2121): Ceres Seq. ID no. 12726393
  misc_feature: MA Experiment ID: 20000315 Result: Down-regulated in Transcription
  misc_feature: MA Experiment 20000315 PARAMETER Experiment Name: At_14day_Shoots-Roots_Sub_P Parameter: Age (day) Value: 14
  misc_feature: MA Experiment 20000315 PARAMETER Experiment Name: At_14day_Shoots-Roots_Sub_P Parameter: Organism Value: A. thaliana
  misc_feature: MA Experiment 20000315 PARAMETER Experiment Name: At_14day_Shoots-Roots_Sub_P Parameter: Plant Line Value: WS
  misc_feature: MA Experiment 20000315 PARAMETER Experiment Name: At_14day_Shoots-Roots_Sub_P Parameter: Tissue Value: Shoots vs. Whole Plant

SEQ ID NO: 94838 - protein, 706 aa, Arabidopsis thaliana; identical to SEQ ID NO: 91082
  peptide (1)..(706): Ceres Seq. ID no. 12726394
  misc_feature (377)..(411): Pfam Name: PPR repeat Pfam Description: PPR repeat
  misc_feature (41)..(681): Homolog of NCBI NO: 34894002 NR Description: P0672D08.11 [Oryza sativa (japonica >gi|15128441|dbj|BAB62625.1| hypothetical protein~similar to thaliana chromosome 3, F28J7.34 [Oryza sativa (japonica F28J7.34
  misc_feature (25)..(94): Homolog of NCBI NO: 34894002 NR Description: P0672D08.11 [Oryza sativa (japonica >gi|15128441|dbj|BAB62625.1| hypothetical protein~similar to thaliana chromosome 3, F28J7.34 [Oryza sativa (japonica F28J7.34
  misc_feature (44)..(676): Homolog of NCBI NO: 15232837 NR Description: hypothetical protein; protein id: At3g02010.1 thaliana] >gi|6091739|gb|AAF03451.1|AC010797_27 hypothetical [Arabidopsis thaliana] >gi|6513930|gb|AAF14834.1|AC011664_16
  misc_feature (44)..(97): Homolog of NCBI NO: 15232837 NR Description: hypothetical protein; protein id: At3g02010.1 thaliana] >gi|6091739|gb|AAF03451.1|AC010797_27 hypothetical [Arabidopsis thaliana] >gi|6513930|gb|AAF14834.1|AC011664_16
  misc_feature (15)..(680): Homolog of NCBI NO: 15231798 NR Description: putative protein; protein id: At3g53360.1
  misc_feature (46)..(680): Homolog of NCBI NO: 15226150 NR Description: hypothetical protein; protein id: At2g33680.1
  misc_feature (44)..(681): Homolog of NCBI NO: 15219258 NR Description: hypothetical protein; protein id: At1g16480.1
  misc_feature (44)..(681): Homolog of NCBI NO: 25354624 NR Description: protein F3O9.28 [imported] - Arabidopsis thaliana
  misc_feature (63)..(688): Homolog of NCBI NO: 37536800 NR Description: putative PPR-repeat protein [Oryza sativa
  misc_feature (33)..(97): Homolog of NCBI NO: 37536800 NR Description: putative PPR-repeat protein [Oryza sativa

SEQ ID NO: 94839 - protein, 669 aa, Arabidopsis thaliana; identical to SEQ ID NO: 91083
  peptide (1)..(669): Ceres Seq. ID no. 12726395
  misc_feature (340)..(374): Pfam Name: PPR repeat Pfam Description: PPR repeat
  misc_feature (4)..(644): Homolog of NCBI NO: 34894002 NR Description: P0672D08.11 [Oryza sativa (japonica >gi|15128441|dbj|BAB62625.1| hypothetical protein~similar to thaliana chromosome 3, F28J7.34 [Oryza sativa (japonica F28J7.34
  misc_feature (1)..(57): Homolog of NCBI NO: 34894002 NR Description: P0672D08.11 [Oryza sativa (japonica >gi|15128441|dbj|BAB62625.1| hypothetical protein~similar to thaliana chromosome 3, F28J7.34 [Oryza sativa (japonica F28J7.34
  misc_feature (7)..(639): Homolog of NCBI NO: 15232837 NR Description: hypothetical protein; protein id: At3g02010.1 thaliana] >gi|6091739|gb|AAF03451.1|AC010797_27 hypothetical [Arabidopsis thaliana] >gi|6513930|gb|AAF14834.1|AC011664_16
  misc_feature (7)..(60): Homolog of NCBI NO: 15232837 NR Description: hypothetical protein; protein id: At3g02010.1 thaliana] >gi|6091739|gb|AAF03451.1|AC010797_27 hypothetical [Arabidopsis thaliana] >gi|6513930|gb|AAF14834.1|AC011664_16
  misc_feature (1)..(643): Homolog of NCBI NO: 15231798 NR Description: putative protein; protein id: At3g53360.1
  misc_feature (9)..(643): Homolog of NCBI NO: 15226150 NR Description: hypothetical protein; protein id: At2g33680.1
  misc_feature (7)..(644): Homolog of NCBI NO: 15219258 NR Description: hypothetical protein; protein id: At1g16480.1
  misc_feature (7)..(644): Homolog of NCBI NO: 25354624 NR Description: protein F3O9.28 [imported] - Arabidopsis thaliana
  misc_feature (26)..(651): Homolog of NCBI NO: 37536800 NR Description: putative PPR-repeat protein [Oryza sativa
  misc_feature (1)..(60): Homolog of NCBI NO: 37536800 NR Description: putative PPR-repeat protein [Oryza sativa

SEQ ID NO: 94840 - protein, 641 aa, Arabidopsis thaliana; identical to SEQ ID NO: 91084
  peptide (1)..(641): Ceres Seq. ID no. 12726396
  misc_feature (312)..(346): Pfam Name: PPR repeat Pfam Description: PPR repeat
  misc_feature (1)..(616): Homolog of NCBI NO: 34894002 NR Description: P0672D08.11 [Oryza sativa (japonica >gi|15128441|dbj|BAB62625.1| hypothetical protein~similar to thaliana chromosome 3, F28J7.34 [Oryza sativa (japonica F28J7.34
  misc_feature (1)..(29): Homolog of NCBI NO: 34894002 NR Description: P0672D08.11 [Oryza sativa (japonica >gi|15128441|dbj|BAB62625.1| hypothetical protein~similar to thaliana chromosome 3, F28J7.34 [Oryza sativa (japonica F28J7.34
  misc_feature (1)..(611): Homolog of NCBI NO: 15232837 NR Description: hypothetical protein; protein id: At3g02010.1 thaliana] >gi|6091739|gb|AAF03451.1|AC010797_27 hypothetical [Arabidopsis thaliana] >gi|6513930|gb|AAF14834.1|AC011664_16
  misc_feature (1)..(32): Homolog of NCBI NO: 15232837 NR Description: hypothetical protein; protein id: At3g02010.1 thaliana] >gi|6091739|gb|AAF03451.1|AC010797_27 hypothetical [Arabidopsis thaliana] >gi|6513930|gb|AAF14834.1|AC011664_16
  misc_feature (1)..(615): Homolog of NCBI NO: 15231798 NR Description: putative protein; protein id: At3g53360.1
  misc_feature (1)..(615): Homolog of NCBI NO: 15226150 NR Description: hypothetical protein; protein id: At2g33680.1
  misc_feature (1)..(616): Homolog of NCBI NO: 15219258 NR Description: hypothetical protein; protein id: At1g16480.1
  misc_feature (1)..(616): Homolog of NCBI NO: 25354624 NR Description: protein F3O9.28 [imported] - Arabidopsis thaliana
  misc_feature (1)..(623): Homolog of NCBI NO: 37536800 NR Description: putative PPR-repeat protein [Oryza sativa
  misc_feature (1)..(32): Homolog of NCBI NO: 37536800 NR Description: putative PPR-repeat protein [Oryza sativa

SEQ ID NO: 94841 - DNA, 1470 bp, Arabidopsis thaliana; identical to SEQ ID NO: 91085
  misc_feature (1)..(1470): Ceres Seq. ID no. 12726436
  misc_feature: MA Experiment ID: 20000180 Result: Down-regulated in Transcription
  misc_feature: MA Experiment 20000180 PARAMETER Experiment Name: At_Germinating_Seeds_P Parameter: Age (hr) Value: 24 vs. 0
  misc_feature: MA Experiment 20000180 PARAMETER Experiment Name: At_Germinating_Seeds_P Parameter: Tissue Value: Germinating Seeds
  misc_feature: MA Experiment ID: 20001451 Result: Up-regulated in Transcription
  misc_feature: MA Experiment 20001451 PARAMETER Experiment Name: At_Far-red-induction_P Parameter: Age (day) Value: 7
  misc_feature: MA Experiment 20001451 PARAMETER Experiment Name: At_Far-red-induction_P Parameter: Light Value: Far-red vs. White
  misc_feature: MA Experiment 20001451 PARAMETER Experiment Name: At_Far-red-induction_P Parameter: Organism Value: A. thaliana
  misc_feature: MA Experiment 20001451 PARAMETER Experiment Name: At_Far-red-induction_P Parameter: Plant Line Value: Columbia
  misc_feature: MA Experiment 20001451 PARAMETER Experiment Name: At_Far-red-induction_P Parameter: Timepoint (hr) Value: 24
  misc_feature: MA Experiment 20001451 PARAMETER Experiment Name: At_Far-red-induction_P Parameter: Tissue Value: Whole Plant

SEQ ID NO: 94842 - protein, 489 aa, Arabidopsis thaliana; identical to SEQ ID NO: 91086
  peptide (1)..(489): Ceres Seq. ID no. 12726437
  misc_feature (1)..(489): Homolog of NCBI NO: 22331672 NR Description: similar to cytochrome P450-like protein; protein At3g48270.1 [Arabidopsis thaliana]
  misc_feature (2)..(489): Homolog of NCBI NO: 22331680 NR Description: Expressed protein; protein id: At3g48310.1, by cDNA: gi_20465426 [Arabidopsis thaliana] Cytochrome P450 71A22 >gi|7430647|pir||T06711 probable cytochrome
  misc_feature (1)..(486): Homolog of NCBI NO: 22331676 NR Description: similar to cytochrome P450-like protein; protein At3g48290.1 [Arabidopsis thaliana]
  misc_feature (2)..(489): Homolog of NCBI NO: 22331682 NR Description: similar to cytochrome P450-like protein; protein At3g48320.1 [Arabidopsis thaliana]
  misc_feature (1)..(486): Homolog of NCBI NO: 22331674 NR Description: similar to cytochrome p450 family; protein id: [Arabidopsis thaliana] >gi|13878400|sp|Q9STK8|C71P_ARATH
  misc_feature (1)..(286): Homolog of NCBI NO: 7430651 NR Description: probable cytochrome P450 T29H11.190 - Arabidopsis
  misc_feature (287)..(486): Homolog of NCBI NO: 7430651 NR Description: probable cytochrome P450 T29H11.190 - Arabidopsis
  misc_feature (2)..(489): Homolog of NCBI NO: 13878402 NR Description: Cytochrome P450 71A23 >gi|7430648|pir||T06712
  misc_feature (66)..(489): Homolog of NCBI NO: 22331678 NR Description: similar to cytochrome P450-like protein; protein
  misc_feature (1)..(486): Homolog of NCBI NO: 15238664 NR Description: cytochrome P450-like protein; protein id: [Arabidopsis thaliana] >gi|13878366|sp|P58045|C71E_ARATH

SEQ ID NO: 94843 - protein, 488 aa, Arabidopsis thaliana; identical to SEQ ID NO: 91087
  peptide (1)..(488): Ceres Seq. ID no. 12726438
  misc_feature (1)..(488): Homolog of NCBI NO: 22331672 NR Description: similar to cytochrome P450-like protein; protein At3g48270.1 [Arabidopsis thaliana]
  misc_feature (1)..(488): Homolog of NCBI NO: 22331680 NR Description: Expressed protein; protein id: At3g48310.1, by cDNA: gi_20465426 [Arabidopsis thaliana] Cytochrome P450 71A22 >gi|7430647|pir||T06711 probable cytochrome
  misc_feature (1)..(485): Homolog of NCBI NO: 22331676 NR Description: similar to cytochrome P450-like protein; protein At3g48290.1 [Arabidopsis thaliana]
  misc_feature (1)..(488): Homolog of NCBI NO: 22331682 NR Description: similar to cytochrome P450-like protein; protein At3g48320.1 [Arabidopsis thaliana]
  misc_feature (1)..(485): Homolog of NCBI NO: 22331674 NR Description: similar to cytochrome p450 family; protein id: [Arabidopsis thaliana] >gi|13878400|sp|Q9STK8|C71P_ARATH
  misc_feature (1)..(285): Homolog of NCBI NO: 7430651 NR Description: probable cytochrome P450 T29H11.190 - Arabidopsis
  misc_feature (286)..(485): Homolog of NCBI NO: 7430651 NR Description: probable cytochrome P450 T29H11.190 - Arabidopsis
  misc_feature (1)..(488): Homolog of NCBI NO: 13878402 NR Description: Cytochrome P450 71A23 >gi|7430648|pir||T06712
  misc_feature (65)..(488): Homolog of NCBI NO: 22331678 NR Description: similar to cytochrome P450-like protein; protein
  misc_feature (1)..(485): Homolog of NCBI NO: 15238664 NR Description: cytochrome P450-like protein; protein id: [Arabidopsis thaliana] >gi|13878366|sp|P58045|C71E_ARATH

SEQ ID NO: 94844 - protein, 486 aa, Arabidopsis thaliana; identical to SEQ ID NO: 91088
  peptide (1)..(486): Ceres Seq. ID no. 12726439
  misc_feature (1)..(486): Homolog of NCBI NO: 22331672 NR Description: similar to cytochrome P450-like protein; protein At3g48270.1 [Arabidopsis thaliana]
  misc_feature (1)..(486): Homolog of NCBI NO: 22331680 NR Description: Expressed protein; protein id: At3g48310.1, by cDNA: gi_20465426 [Arabidopsis thaliana] Cytochrome P450 71A22 >gi|7430647|pir||T06711 probable cytochrome
  misc_feature (1)..(483): Homolog of NCBI NO: 22331676 NR Description: similar to cytochrome P450-like protein; protein At3g48290.1 [Arabidopsis thaliana]
  misc_feature (1)..(486): Homolog of NCBI NO: 22331682 NR Description: similar to cytochrome P450-like protein; protein At3g48320.1 [Arabidopsis thaliana]
  misc_feature (1)..(483): Homolog of NCBI NO: 22331674 NR Description: similar to cytochrome p450 family; protein id: [Arabidopsis thaliana] >gi|13878400|sp|Q9STK8|C71P_ARATH
  misc_feature (1)..(283): Homolog of NCBI NO: 7430651 NR Description: probable cytochrome P450 T29H11.190 - Arabidopsis
  misc_feature (284)..(483): Homolog of NCBI NO: 7430651 NR Description: probable cytochrome P450 T29H11.190 - Arabidopsis
  misc_feature (1)..(486): Homolog of NCBI NO: 13878402 NR Description: Cytochrome P450 71A23 >gi|7430648|pir||T06712
  misc_feature (63)..(486): Homolog of NCBI NO: 22331678 NR Description: similar to cytochrome P450-like protein; protein
  misc_feature (1)..(483): Homolog of NCBI NO: 15238664 NR Description: cytochrome P450-like protein; protein id: [Arabidopsis thaliana] >gi|13878366|sp|P58045|C71E_ARATH

SEQ ID NO: 94845 - DNA, 1461 bp, Arabidopsis thaliana; identical to SEQ ID NO: 91089
  misc_feature (1)..(1461): Ceres Seq. ID no. 12726440
  misc_feature: MA Experiment ID: 20000184 Result: Up-regulated in Transcription
  misc_feature: MA Experiment 20000184 PARAMETER Experiment Name: At_Shoots__P Parameter: Age (day) Value: 7
  misc_feature: MA Experiment 20000184 PARAMETER Experiment Name: At_Shoots__P Parameter: Tissue Value: Shoots vs. Whole Plant
  misc_feature: MA Experiment ID: 20000185 Result: Up-regulated in Transcription
  misc_feature: MA Experiment 20000185 PARAMETER Experiment Name: At_Roots__P Parameter: Age (day) Value: 7 vs. 21
  misc_feature: MA Experiment 20000185 PARAMETER Experiment Name: At_Roots__P Parameter: Organism Value: A. thaliana
  misc_feature: MA Experiment 20000185 PARAMETER Experiment Name: At_Roots__P Parameter: Tissue Value: Roots vs. Whole Plant
  misc_feature: MA Experiment ID: 20000269 Result: Down-regulated in Transcription
  misc_feature: MA Experiment 20000269 PARAMETER Experiment Name: At_1mM_KNO3_L-vs-H_Roots_P Parameter: Age (day) Value: 7,10,12
  misc_feature: MA Experiment 20000269 PARAMETER Experiment Name: At_1mM_KNO3_L-vs-H_Roots_P Parameter: Organism Value: A. thaliana
  misc_feature: MA Experiment 20000269 PARAMETER Experiment Name: At_1mM_KNO3_L-vs-H_Roots_P Parameter: Plant Line Value: WS
  misc_feature: MA Experiment 20000269 PARAMETER Experiment Name: At_1mM_KNO3_L-vs-H_Roots_P Parameter: Timepoint (day) Value: 7,10,12
  misc_feature: MA Experiment 20000269 PARAMETER Experiment Name: At_1mM_KNO3_L-vs-H_Roots_P Parameter: Tissue Value: Roots
  misc_feature: MA Experiment 20000269 PARAMETER Experiment Name: At_1mM_KNO3_L-vs-H_Roots_P Parameter: Treatment Value: 1mM KNO3 vs. 50mM KNO3
  misc_feature: MA Experiment ID: 20000437 Result: Up-regulated in Transcription
  misc_feature: MA Experiment 20000437 PARAMETER Experiment Name: At_Drought_P Parameter: Age (day) Value: 8
  misc_feature: MA Experiment 20000437 PARAMETER Experiment Name: At_Drought_P Parameter: Organism Value: A. thaliana
  misc_feature: MA Experiment 20000437 PARAMETER Experiment Name: At_Drought_P Parameter: Plant Line Value: WS
  misc_feature: MA Experiment 20000437 PARAMETER Experiment Name: At_Drought_P Parameter: Timepoint (hr) Value: 24
  misc_feature: MA Experiment 20000437 PARAMETER Experiment Name: At_Drought_P Parameter: Tissue Value: Whole Plant
  misc_feature: MA Experiment 20000437 PARAMETER Experiment Name: At_Drought_P Parameter: Treatment Value: Drought vs. No Drought
  misc_feature: MA Experiment ID: 20000438 Result: Up-regulated in Transcription
  misc_feature: MA Experiment 20000438 PARAMETER Experiment Name: At_Shoots__P Parameter: Age (day) Value: 14
  misc_feature: MA Experiment 20000438 PARAMETER Experiment Name: At_Shoots__P Parameter: Tissue Value: Shoots vs. Whole Plant
  misc_feature: MA Experiment ID: 20000439 Result: Up-regulated in Transcription
  misc_feature: MA Experiment 20000439 PARAMETER Experiment Name: At_Roots__P Parameter: Age (day) Value: 14 vs. 21
  misc_feature: MA Experiment 20000439 PARAMETER Experiment Name: At_Roots__P Parameter: Organism Value: A. thaliana
  misc_feature: MA Experiment 20000439 PARAMETER Experiment Name: At_Roots__P Parameter: Tissue Value: Roots vs. Whole Plant
  misc_feature: MA Experiment ID: 20000453 Result: Up-regulated in Transcription
  misc_feature: MA Experiment 20000453 PARAMETER Experiment Name: At_100uM_ABA_P Parameter: Age (day) Value: 15
  misc_feature: MA Experiment 20000453 PARAMETER Experiment Name: At_100uM_ABA_P Parameter: Organism Value: A. thaliana
  misc_feature: MA Experiment 20000453 PARAMETER Experiment Name: At_100uM_ABA_P Parameter: Plant Line Value: WS
  misc_feature: MA Experiment 20000453 PARAMETER Experiment Name: At_100uM_ABA_P Parameter: Timepoint (hr) Value: 24
  misc_feature: MA Experiment 20000453 PARAMETER Experiment Name: At_100uM_ABA_P Parameter: Tissue Value: Aerial
  misc_feature: MA Experiment 20000453 PARAMETER Experiment Name: At_100uM_ABA_P Parameter: Treatment Value: 100uM ABA vs. No Treatment

SEQ ID NO: 94846 - protein, 486 aa, Arabidopsis thaliana; identical to SEQ ID NO: 91090
  peptide (1)..(486): Ceres Seq. ID no. 12726441
  misc_feature (1)..(486): Homolog of NCBI NO: 22331676 NR Description: similar to cytochrome P450-like protein; protein At3g48290.1 [Arabidopsis thaliana]
  misc_feature (1)..(286): Homolog of NCBI NO: 7430651 NR Description: probable cytochrome P450 T29H11.190 - Arabidopsis
  misc_feature (287)..(486): Homolog of NCBI NO: 7430651 NR Description: probable cytochrome P450 T29H11.190 - Arabidopsis
  misc_feature (3)..(486): Homolog of NCBI NO: 22331680 NR Description: Expressed protein; protein id: At3g48310.1, by cDNA: gi_20465426 [Arabidopsis thaliana] Cytochrome P450 71A22 >gi|7430647|pir||T06711 probable cytochrome
  misc_feature (2)..(486): Homolog of NCBI NO: 22331672 NR Description: similar to cytochrome P450-like protein; protein At3g48270.1 [Arabidopsis thaliana]
  misc_feature (3)..(486): Homolog of NCBI NO: 22331682 NR Description: similar to cytochrome P450-like protein; protein At3g48320.1 [Arabidopsis thaliana]
  misc_feature (2)..(486): Homolog of NCBI NO: 22331674 NR Description: similar to cytochrome p450 family; protein id: [Arabidopsis thaliana] >gi|13878400|sp|Q9STK8|C71P_ARATH
  misc_feature (5)..(484): Homolog of NCBI NO: 13878402 NR Description: Cytochrome P450 71A23 >gi|7430648|pir||T06712
  misc_feature (66)..(484): Homolog of NCBI NO: 22331678 NR Description: similar to cytochrome P450-like protein; protein
  misc_feature (2)..(481): Homolog of NCBI NO: 15238664 NR Description: cytochrome P450-like protein; protein id: [Arabidopsis thaliana] >gi|13878366|sp|P58045|C71E_ARATH

SEQ ID NO: 94847 - protein, 485 aa, Arabidopsis thaliana; identical to SEQ ID NO: 91091
  peptide (1)..(485): Ceres Seq. ID no. 12726442
  misc_feature (1)..(485): Homolog of NCBI NO: 22331676 NR Description: similar to cytochrome P450-like protein; protein At3g48290.1 [Arabidopsis thaliana]
  misc_feature (1)..(285): Homolog of NCBI NO: 7430651 NR Description: probable cytochrome P450 T29H11.190 - Arabidopsis
  misc_feature (286)..(485): Homolog of NCBI NO: 7430651 NR Description: probable cytochrome P450 T29H11.190 - Arabidopsis
  misc_feature (2)..(485): Homolog of NCBI NO: 22331680 NR Description: Expressed protein; protein id: At3g48310.1, by cDNA: gi_20465426 [Arabidopsis thaliana] Cytochrome P450 71A22 >gi|7430647|pir||T06711 probable cytochrome
  misc_feature (1)..(485): Homolog of NCBI NO: 22331672 NR Description: similar to cytochrome P450-like protein; protein At3g48270.1 [Arabidopsis thaliana]
  misc_feature (2)..(485): Homolog of NCBI NO: 22331682 NR Description: similar to cytochrome P450-like protein; protein At3g48320.1 [Arabidopsis thaliana]
  misc_feature (1)..(485): Homolog of NCBI NO: 22331674 NR Description: similar to cytochrome p450 family; protein id: [Arabidopsis thaliana] >gi|13878400|sp|Q9STK8|C71P_ARATH
  misc_feature (4)..(483): Homolog of NCBI NO: 13878402 NR Description: Cytochrome P450 71A23 >gi|7430648|pir||T06712
  misc_feature (65)..(483): Homolog of NCBI NO: 22331678 NR Description: similar to cytochrome P450-like protein; protein
  misc_feature (1)..(480): Homolog of NCBI NO: 15238664 NR Description: cytochrome P450-like protein; protein id: [Arabidopsis thaliana] >gi|13878366|sp|P58045|C71E_ARATH

SEQ ID NO: 94848 - protein, 484 aa, Arabidopsis thaliana; identical to SEQ ID NO: 91092
  peptide (1)..(484): Ceres Seq. ID no. 12726443
  misc_feature (1)..(484): Homolog of NCBI NO: 22331676 NR Description: similar to cytochrome P450-like protein; protein At3g48290.1 [Arabidopsis thaliana]
  misc_feature (1)..(284): Homolog of NCBI NO: 7430651 NR Description: probable cytochrome P450 T29H11.190 - Arabidopsis
  misc_feature (285)..(484): Homolog of NCBI NO: 7430651 NR Description: probable cytochrome P450 T29H11.190 - Arabidopsis
  misc_feature (1)..(484): Homolog of NCBI NO: 22331680 NR Description: Expressed protein; protein id: At3g48310.1, by cDNA: gi_20465426 [Arabidopsis thaliana] Cytochrome P450 71A22 >gi|7430647|pir||T06711 probable cytochrome
  misc_feature (1)..(484): Homolog of NCBI NO: 22331672 NR Description: similar to cytochrome P450-like protein; protein At3g48270.1 [Arabidopsis thaliana]
  misc_feature (1)..(484): Homolog of NCBI NO: 22331682 NR Description: similar to cytochrome P450-like protein; protein At3g48320.1 [Arabidopsis thaliana]
  misc_feature (1)..(484): Homolog of NCBI NO: 22331674 NR Description: similar to cytochrome p450 family; protein id: [Arabidopsis thaliana] >gi|13878400|sp|Q9STK8|C71P_ARATH
  misc_feature (3)..(482): Homolog of NCBI NO: 13878402 NR Description: Cytochrome P450 71A23 >gi|7430648|pir||T06712
  misc_feature (64)..(482): Homolog of NCBI NO: 22331678 NR Description: similar to cytochrome P450-like protein; protein
  misc_feature (1)..(479): Homolog of NCBI NO: 15238664 NR Description: cytochrome P450-like protein; protein id: [Arabidopsis thaliana] >gi|13878366|sp|P58045|C71E_ARATH

SEQ ID NO: 94849 - DNA, 1263 bp, Arabidopsis thaliana; identical to SEQ ID NO: 91093
  misc_feature (1)..(1263): Ceres Seq. ID no. 12726444
  misc_feature: MA Experiment ID: 20001905 Result: Up-regulated in Transcription
  misc_feature: MA Experiment 20001905 PARAMETER Experiment Name: At_Drought_Reproduction_P Parameter: Age (day) Value: 40
  misc_feature: MA Experiment 20001905 PARAMETER Experiment Name: At_Drought_Reproduction_P Parameter: Organism Value: A. thaliana
  misc_feature: MA Experiment 20001905 PARAMETER Experiment Name: At_Drought_Reproduction_P Parameter: Plant Line Value: WS
  misc_feature: MA Experiment 20001905 PARAMETER Experiment Name: At_Drought_Reproduction_P Parameter: Timepoint (day) Value: 10
  misc_feature: MA Experiment 20001905 PARAMETER Experiment Name: At_Drought_Reproduction_P Parameter: Tissue Value: Rosettes
  misc_feature: MA Experiment 20001905 PARAMETER Experiment Name: At_Drought_Reproduction_P Parameter: Treatment Value: Drought vs. No Drought
  misc_feature: MA Experiment ID: 20001906 Result: Up-regulated in Transcription
  misc_feature: MA Experiment 20001906 PARAMETER Experiment Name: At_Drought_Reproduction_P Parameter: Age (day) Value: 35
  misc_feature: MA Experiment 20001906 PARAMETER Experiment Name: At_Drought_Reproduction_P Parameter: Organism Value: A. thaliana
  misc_feature: MA Experiment 20001906 PARAMETER Experiment Name: At_Drought_Reproduction_P Parameter: Plant Line Value: WS
  misc_feature: MA Experiment 20001906 PARAMETER Experiment Name: At_Drought_Reproduction_P Parameter: Timepoint (day) Value: 5
  misc_feature: MA Experiment 20001906 PARAMETER Experiment Name: At_Drought_Reproduction_P Parameter: Tissue Value: Siliques
  misc_feature: MA Experiment 20001906 PARAMETER Experiment Name: At_Drought_Reproduction_P Parameter: Treatment Value: Drought vs. No Drought
  misc_feature: MA Experiment ID: 20001908 Result: Up-regulated in Transcription
  misc_feature: MA Experiment 20001908 PARAMETER Experiment Name: At_Drought_Reproduction_P Parameter: Age (day) Value: 40
  misc_feature: MA Experiment 20001908 PARAMETER Experiment Name: At_Drought_Reproduction_P Parameter: Organism Value: A. thaliana
  misc_feature: MA Experiment 20001908 PARAMETER Experiment Name: At_Drought_Reproduction_P Parameter: Plant Line Value: WS
  misc_feature: MA Experiment 20001908 PARAMETER Experiment Name: At_Drought_Reproduction_P Parameter: Timepoint (day) Value: 10
  misc_feature: MA Experiment 20001908 PARAMETER Experiment Name: At_Drought_Reproduction_P Parameter: Tissue Value: Siliques
  misc_feature: MA Experiment 20001908 PARAMETER Experiment Name: At_Drought_Reproduction_P Parameter: Treatment Value: Drought vs. No Drought
  misc_feature: Pfam Name: p450 Pfam Description: Cytochrome P450

SEQ ID NO: 94850 - protein, 420 aa, Arabidopsis thaliana; identical to SEQ ID NO: 86699
  peptide (1)..(420): Ceres Seq. ID no. 12726445
  misc_feature: Pfam Name: p450 Pfam Description: Cytochrome P450
  misc_feature (1)..(420): Homolog of NCBI NO: 13878402 NR Description: Cytochrome P450 71A23 >gi|7430648|pir||T06712
  misc_feature (1)..(420): Homolog of NCBI NO: 22331678 NR Description: similar to cytochrome P450-like protein; protein
  misc_feature (1)..(420): Homolog of NCBI NO: 22331672 NR Description: similar to cytochrome P450-like protein; protein At3g48270.1 [Arabidopsis thaliana]
  misc_feature (1)..(420): Homolog of NCBI NO: 22331680 NR Description: Expressed protein; protein id: At3g48310.1, by cDNA: gi_20465426 [Arabidopsis thaliana] Cytochrome P450 71A22 >gi|7430647|pir||T06711 probable cytochrome
  misc_feature (1)..(417): Homolog of NCBI NO: 22331674 NR Description: similar to cytochrome p450 family; protein id: [Arabidopsis thaliana] >gi|13878400|sp|Q9STK8|C71P_ARATH
  misc_feature (1)..(415): Homolog of NCBI NO: 22331676 NR Description: similar to cytochrome P450-like protein; protein At3g48290.1 [Arabidopsis thaliana]
  misc_feature (1)..(420): Homolog of NCBI NO: 22331682 NR Description: similar to cytochrome P450-like protein; protein At3g48320.1 [Arabidopsis thaliana]
  misc_feature (1)..(417): Homolog of NCBI NO: 15238664 NR Description: cytochrome P450-like protein; protein id: [Arabidopsis thaliana] >gi|13878366|sp|P58045|C71E_ARATH
  misc_feature (1)..(418): Homolog of NCBI NO: 13878406 NR Description: Cytochrome P450 71A20 >gi|7430641|pir||T06288
  misc_feature (1)..(418): Homolog of NCBI NO: 15224570 NR Description: cytochrome p450 family; protein id: At2g30770.1

SEQ ID NO: 94851 - protein, 372 aa, Arabidopsis thaliana; identical to SEQ ID NO: 86700
  peptide (1)..(372): Ceres Seq. ID no. 12726446
  misc_feature: Pfam Name: p450 Pfam Description: Cytochrome P450
  misc_feature (1)..(372): Homolog of NCBI NO: 13878402 NR Description: Cytochrome P450 71A23 >gi|7430648|pir||T06712
  misc_feature (1)..(372): Homolog of NCBI NO: 22331678 NR Description: similar to cytochrome P450-like protein; protein
  misc_feature (1)..(372): Homolog of NCBI NO: 22331672 NR Description: similar to cytochrome P450-like protein; protein At3g48270.1 [Arabidopsis thaliana]
  misc_feature (1)..(372): Homolog of NCBI NO: 22331680 NR Description: Expressed protein; protein id: At3g48310.1, by cDNA: gi_20465426 [Arabidopsis thaliana] Cytochrome P450 71A22 >gi|7430647|pir||T06711 probable cytochrome
  misc_feature (1)..(369): Homolog of NCBI NO: 22331674 NR Description: similar to cytochrome p450 family; protein id: [Arabidopsis thaliana] >gi|13878400|sp|Q9STK8|C71P_ARATH
  misc_feature (1)..(367): Homolog of NCBI NO: 22331676 NR Description: similar to cytochrome P450-like protein; protein At3g48290.1 [Arabidopsis thaliana]
  misc_feature (1)..(372): Homolog of NCBI NO: 22331682 NR Description: similar to cytochrome P450-like protein; protein At3g48320.1 [Arabidopsis thaliana]
  misc_feature (1)..(369): Homolog of NCBI NO: 15238664 NR Description: cytochrome P450-like protein; protein id: [Arabidopsis thaliana] >gi|13878366|sp|P58045|C71E_ARATH
  misc_feature (1)..(370): Homolog of NCBI NO: 13878406 NR Description: Cytochrome P450 71A20 >gi|7430641|pir||T06288
  misc_feature (1)..(370): Homolog of NCBI NO: 15224570 NR Description: cytochrome p450 family; protein id: At2g30770.1

SEQ ID NO: 94852 - protein, 360 aa, Arabidopsis thaliana; identical to SEQ ID NO: 91096
  peptide (1)..(360): Ceres Seq. ID no. 12726447
  misc_feature: Pfam Name: p450 Pfam Description: Cytochrome P450
  misc_feature (1)..(360): Homolog of NCBI NO: 13878402 NR Description: Cytochrome P450 71A23 >gi|7430648|pir||T06712
  misc_feature (1)..(360): Homolog of NCBI NO: 22331678 NR Description: similar to cytochrome P450-like protein; protein
  misc_feature (1)..(360): Homolog of NCBI NO: 22331672 NR Description: similar to cytochrome P450-like protein; protein At3g48270.1 [Arabidopsis thaliana]
  misc_feature (1)..(360): Homolog of NCBI NO: 22331680 NR Description: Expressed protein; protein id: At3g48310.1, by cDNA: gi_20465426 [Arabidopsis thaliana] Cytochrome P450 71A22 >gi|7430647|pir||T06711 probable cytochrome
  misc_feature (1)..(357): Homolog of NCBI NO: 22331674 NR Description: similar to cytochrome p450 family; protein id: [Arabidopsis thaliana] >gi|13878400|sp|Q9STK8|C71P_ARATH
  misc_feature (1)..(355): Homolog of NCBI NO: 22331676 NR Description: similar to cytochrome P450-like protein; protein At3g48290.1 [Arabidopsis thaliana]
  misc_feature (1)..(360): Homolog of NCBI NO: 22331682 NR Description: similar to cytochrome P450-like protein; protein At3g48320.1 [Arabidopsis thaliana]
  misc_feature (1)..(357): Homolog of NCBI NO: 15238664 NR Description: cytochrome P450-like protein; protein id: [Arabidopsis thaliana] >gi|13878366|sp|P58045|C71E_ARATH
  misc_feature (1)..(358): Homolog of NCBI NO: 13878406 NR Description: Cytochrome P450 71A20 >gi|7430641|pir||T06288
  misc_feature (1)..(358): Homolog of NCBI NO: 15224570 NR Description: cytochrome p450 family; protein id: At2g30770.1

SEQ ID NO: 94853 - DNA, 1605 bp, Arabidopsis thaliana; identical to SEQ ID NO: 91097
  misc_feature (1)..(1605): Ceres Seq. ID no. 12726448
  misc_feature: MA Experiment ID: 20000235 Result: Down-regulated in Transcription
  misc_feature: MA Experiment 20000235 PARAMETER Experiment Name: At_Siliques_P Parameter: Age (day) Value: 21
  misc_feature: MA Experiment 20000235 PARAMETER Experiment Name: At_Siliques_P Parameter: Organism Value: A. thaliana
  misc_feature: MA Experiment 20000235 PARAMETER Experiment Name: At_Siliques_P Parameter: Plant Line Value: WS
  misc_feature: MA Experiment 20000235 PARAMETER Experiment Name: At_Siliques_P Parameter: Tissue Value: 5-10mm Siliques vs. Whole Plant
  misc_feature: MA Experiment ID: 20000437 Result: Down-regulated in Transcription
  misc_feature: MA Experiment 20000437 PARAMETER Experiment Name: At_Drought_P Parameter: Age (day) Value: 8
  misc_feature: MA Experiment 20000437 PARAMETER Experiment Name: At_Drought_P Parameter: Organism Value: A. thaliana
  misc_feature: MA Experiment 20000437 PARAMETER Experiment Name: At_Drought_P Parameter: Plant Line Value: WS
  misc_feature: MA Experiment 20000437 PARAMETER Experiment Name: At_Drought_P Parameter: Timepoint (hr) Value: 24
  misc_feature: MA Experiment 20000437 PARAMETER Experiment Name: At_Drought_P Parameter: Tissue Value: Whole Plant
  misc_feature: MA Experiment 20000437 PARAMETER Experiment Name: At_Drought_P Parameter: Treatment Value: Drought vs. No Drought
  misc_feature: MA Experiment ID: 20000495 Result: Down-regulated in Transcription
  misc_feature: MA Experiment 20000495 PARAMETER Experiment Name: At_Guard_Cells_P Parameter: Harvest Date Value: 8/2/2002
  misc_feature: MA Experiment 20000495 PARAMETER Experiment Name: At_Guard_Cells_P Parameter: Organism Value: A. thaliana
  misc_feature: MA Experiment 20000495 PARAMETER Experiment Name: At_Guard_Cells_P Parameter: Tissue Value: Guard Cells vs. Leaves
  misc_feature: MA Experiment ID: 20000574 Result: Up-regulated in Transcription
  misc_feature: MA Experiment 20000574 PARAMETER Experiment Name: At_100uM_ABA_Mutants__P Parameter: Organism Value: A. thaliana
  misc_feature: MA Experiment 20000574 PARAMETER Experiment Name: At_100uM_ABA_Mutants__P Parameter: Plant Line Value: CS23 vs. Ler wt
  misc_feature: MA Experiment 20000574 PARAMETER Experiment Name: At_100uM_ABA_Mutants__P Parameter: Timepoint (hr) Value: N/A
  misc_feature: MA Experiment 20000574 PARAMETER Experiment Name: At_100uM_ABA_Mutants__P Parameter: Tissue Value: Whole Plant
  misc_feature: MA Experiment 20000574 PARAMETER Experiment Name: At_100uM_ABA_Mutants__P Parameter: Treatment Value: None
  misc_feature: MA Experiment ID: 20001248 Result: Down-regulated in Transcription
  misc_feature: MA Experiment 20001248 PARAMETER Experiment Name: At_Far-red-induction_P Parameter: Age (day) Value: 7
  misc_feature: MA Experiment 20001248 PARAMETER Experiment Name: At_Far-red-induction_P Parameter: Light Value: Far-red vs. White
  misc_feature: MA Experiment 20001248 PARAMETER Experiment Name: At_Far-red-induction_P Parameter: Organism Value: A. thaliana
  misc_feature: MA Experiment 20001248 PARAMETER Experiment Name: At_Far-red-induction_P Parameter: Plant Line Value: Columbia
  misc_feature: MA Experiment 20001248 PARAMETER Experiment Name: At_Far-red-induction_P Parameter: Timepoint (hr) Value: 4
  misc_feature: MA Experiment 20001248 PARAMETER Experiment Name: At_Far-red-induction_P Parameter: Tissue Value: Whole Plant
  misc_feature: MA Experiment ID: 20001560 Result: Down-regulated in Transcription
  misc_feature: MA Experiment 20001560 PARAMETER Experiment Name: At_Drought_Soil_Dry_P Parameter: Age (day) Value: 28
  misc_feature: MA Experiment 20001560 PARAMETER Experiment Name: At_Drought_Soil_Dry_P Parameter: Organism Value: A. thaliana
  misc_feature: MA Experiment 20001560 PARAMETER Experiment Name: At_Drought_Soil_Dry_P Parameter: Plant Line Value: WS
  misc_feature: MA Experiment 20001560 PARAMETER Experiment Name: At_Drought_Soil_Dry_P Parameter: Post Timepoint (hr) Value: None
  misc_feature: MA Experiment 20001560 PARAMETER Experiment Name: At_Drought_Soil_Dry_P Parameter: Post-Treatment Value: None
  misc_feature: MA Experiment 20001560 PARAMETER Experiment Name: At_Drought_Soil_Dry_P Parameter: Timepoint (day) Value: 14
  misc_feature: MA Experiment 20001560 PARAMETER Experiment Name: At_Drought_Soil_Dry_P Parameter: Treatment Value: Drought vs. No Drought

SEQ ID NO: 94854 - protein, 490 aa, Arabidopsis thaliana; identical to SEQ ID NO: 91098
  peptide (1)..(490): Ceres Seq. ID no. 12726449
  misc_feature (33)..(460): Pfam Name: Cytochrome P450 Pfam Description: Cytochrome P450
  misc_feature (1)..(490): Homolog of NCBI NO: 22331680 NR Description: Expressed protein; protein id: At3g48310.1, by cDNA: gi_20465426 [Arabidopsis thaliana] Cytochrome P450 71A22 >gi|7430647|pir||T06711 probable cytochrome
  misc_feature (1)..(490): Homolog of NCBI NO: 22331682 NR Description: similar to cytochrome P450-like protein; protein At3g48320.1 [Arabidopsis thaliana]
  misc_feature (4)..(487): Homolog of NCBI NO: 22331676 NR Description: similar to cytochrome P450-like protein; protein At3g48290.1 [Arabidopsis thaliana]
  misc_feature (4)..(490): Homolog of NCBI NO: 22331672 NR Description: similar to cytochrome P450-like protein; protein At3g48270.1 [Arabidopsis thaliana]
  misc_feature (4)..(287): Homolog of NCBI NO: 7430651 NR Description: probable cytochrome P450 T29H11.190 - Arabidopsis
  misc_feature (288)..(487): Homolog of NCBI NO: 7430651 NR Description: probable cytochrome P450 T29H11.190 - Arabidopsis
  misc_feature (4)..(487): Homolog of NCBI NO: 22331674 NR Description: similar to cytochrome p450 family; protein id: [Arabidopsis thaliana] >gi|13878400|sp|Q9STK8|C71P_ARATH
  misc_feature (4)..(490): Homolog of NCBI NO: 13878402 NR Description: Cytochrome P450 71A23 >gi|7430648|pir||T06712
  misc_feature (67)..(490): Homolog of NCBI NO: 22331678 NR Description: similar to cytochrome P450-like protein; protein
  misc_feature (1)..(487): Homolog of NCBI NO: 15238664 NR Description: cytochrome P450-like protein; protein id: [Arabidopsis thaliana] >gi|13878366|sp|P58045|C71E_ARATH

SEQ ID NO: 94855 - protein, 487 aa, Arabidopsis thaliana; identical to SEQ ID NO: 91099
  peptide (1)..(487): Ceres Seq. ID no. 12726450
  misc_feature (30)..(457): Pfam Name: Cytochrome P450 Pfam Description: Cytochrome P450
  misc_feature (1)..(487): Homolog of NCBI NO: 22331680 NR Description: Expressed protein; protein id: At3g48310.1, by cDNA: gi_20465426 [Arabidopsis thaliana] Cytochrome P450 71A22 >gi|7430647|pir||T06711 probable cytochrome
  misc_feature (1)..(487): Homolog of NCBI NO: 22331682 NR Description: similar to cytochrome P450-like protein; protein At3g48320.1 [Arabidopsis thaliana]
  misc_feature (1)..(484): Homolog of NCBI NO: 22331676 NR Description: similar to cytochrome P450-like protein; protein At3g48290.1 [Arabidopsis thaliana]
  misc_feature (1)..(487): Homolog of NCBI NO: 22331672 NR Description: similar to cytochrome P450-like protein; protein At3g48270.1 [Arabidopsis thaliana]
  misc_feature (1)..(284): Homolog of NCBI NO: 7430651 NR Description: probable cytochrome P450 T29H11.190 - Arabidopsis
  misc_feature (285)..(484): Homolog of NCBI NO: 7430651 NR Description: probable cytochrome P450 T29H11.190 - Arabidopsis
  misc_feature (1)..(484): Homolog of NCBI NO: 22331674 NR Description: similar to cytochrome p450 family; protein id: [Arabidopsis thaliana] >gi|13878400|sp|Q9STK8|C71P_ARATH
  misc_feature (1)..(487): Homolog of NCBI NO: 13878402 NR Description: Cytochrome P450 71A23 >gi|7430648|pir||T06712
  misc_feature (64)..(487): Homolog of NCBI NO: 22331678 NR Description: similar to cytochrome P450-like protein; protein
  misc_feature (1)..(484): Homolog of NCBI NO: 15238664 NR Description: cytochrome P450-like protein; protein id: [Arabidopsis thaliana] >gi|13878366|sp|P58045|C71E_ARATH

SEQ ID NO: 94856 - protein, 424 aa, Arabidopsis thaliana; identical to SEQ ID NO: 91100
  peptide (1)..(424): Ceres Seq. ID no. 12726451
  misc_feature (1)..(394): Pfam Name: Cytochrome P450 Pfam Description: Cytochrome P450
  misc_feature (1)..(424): Homolog of NCBI NO: 22331680 NR Description: Expressed protein; protein id: At3g48310.1, by cDNA: gi_20465426 [Arabidopsis thaliana] Cytochrome P450 71A22 >gi|7430647|pir||T06711 probable cytochrome
  misc_feature (1)..(424): Homolog of NCBI NO: 22331682 NR Description: similar to cytochrome P450-like protein; protein At3g48320.1 [Arabidopsis thaliana]
  misc_feature (1)..(421): Homolog of NCBI NO: 22331676 NR Description: similar to cytochrome P450-like protein; protein At3g48290.1 [Arabidopsis thaliana]
  misc_feature (1)..(424): Homolog of NCBI NO: 22331672 NR Description: similar to cytochrome P450-like protein; protein At3g48270.1 [Arabidopsis thaliana]
  misc_feature (1)..(221): Homolog of NCBI NO: 7430651 NR Description: probable cytochrome P450 T29H11.190 - Arabidopsis
  misc_feature (222)..(421): Homolog of NCBI NO: 7430651 NR Description: probable cytochrome P450 T29H11.190 - Arabidopsis
  misc_feature (1)..(421): Homolog of NCBI NO: 22331674 NR Description: similar to cytochrome p450 family; protein id: [Arabidopsis thaliana] >gi|13878400|sp|Q9STK8|C71P_ARATH
  misc_feature (1)..(424): Homolog of NCBI NO: 13878402 NR Description: Cytochrome P450 71A23 >gi|7430648|pir||T06712
  misc_feature (1)..(424): Homolog of NCBI NO: 22331678 NR Description: similar to cytochrome P450-like protein; protein
  misc_feature (1)..(421): Homolog of NCBI NO: 15238664 NR Description: cytochrome P450-like protein; protein id: [Arabidopsis thaliana] >gi|13878366|sp|P58045|C71E_ARATH

SEQ ID NO: 94857 - DNA, 693 bp, Arabidopsis thaliana; identical to SEQ ID NO: 91101
  misc_feature (1)..(693): Ceres Seq. ID no. 12726452
  misc_feature: MA Experiment ID: 20000179 Result: Up-regulated in Transcription
  misc_feature: MA Experiment 20000179 PARAMETER Experiment Name: At_Germinating_Seeds_P Parameter: Age (hr) Value: 6 vs. 0
  misc_feature: MA Experiment 20000179 PARAMETER Experiment Name: At_Germinating_Seeds_P Parameter: Tissue Value: Germinating Seeds
  misc_feature: MA Experiment ID: 20000495 Result: Up-regulated in Transcription
  misc_feature: MA Experiment 20000495 PARAMETER Experiment Name: At_Guard_Cells_P Parameter: Harvest Date Value: 8/2/2002
  misc_feature: MA Experiment 20000495 PARAMETER Experiment Name: At_Guard_Cells_P Parameter: Organism Value: A. thaliana
  misc_feature: MA Experiment 20000495 PARAMETER Experiment Name: At_Guard_Cells_P Parameter: Tissue Value: Guard Cells vs. Leaves
  misc_feature: MA Experiment ID: 20000794 Result: Up-regulated in Transcription
  misc_feature: MA Experiment 20000794 PARAMETER Experiment Name: At_Petals_P Parameter: Age (day) Value: 23-25 days
  misc_feature: MA Experiment 20000794 PARAMETER Experiment Name: At_Petals_P Parameter: Plant Line Value: WS
  misc_feature: MA Experiment 20000794 PARAMETER Experiment Name: At_Petals_P Parameter: Tissue Value: Petals vs. Whole plant

SEQ ID NO: 94858 - protein, 230 aa, Arabidopsis thaliana; identical to SEQ ID NO: 91102
  peptide (1)..(230): Ceres Seq. ID no. 12726453
  misc_feature (11)..(225): Pfam Name: Protein-L-isoaspartate(D-aspartate) Pfam Description: Protein-L-isoaspartate(D-aspartate)
  misc_feature (1)..(230): Homolog of NCBI NO: 22331684 NR Description: similar to protein-L-isoaspartate(D-aspartate);
  misc_feature (1)..(230): Homolog of NCBI NO: 1322021 NR Description: L-isoaspartyl methyltransferase
  misc_feature (1)..(228): Homolog of NCBI NO: 38345249 NR Description: OSJNBb0011N17.10 [Oryza sativa (japonica
  misc_feature (14)..(229): Homolog of NCBI NO: 26451260 NR Description: unknown protein [Arabidopsis thaliana]
  misc_feature (1)..(228): Homolog of NCBI NO: 2499570 NR Description: PROTEIN-L-ISOASPARTATE O-METHYLTRANSFERASE
  misc_feature (5)..(230): Homolog of NCBI NO: 37589722 NR Description: Unknown (protein for MGC:73268) [Danio rerio]
  misc_feature (5)..(230): Homolog of NCBI NO: 29436595 NR Description: protein-L-isoaspartate (D-aspartate)
  misc_feature (5)..(226): Homolog of NCBI NO: 417489 NR Description: PROTEIN-L-ISOASPARTATE(D-ASPARTATE)
  misc_feature (5)..(230): Homolog of NCBI NO: 88512 NR Description: protein-L-isoaspartate(D-aspartate)
  misc_feature (16)..(230): Homolog of NCBI NO: 18859221 NR Description: l-isoaspartyl protein carboxyl methyltransferase

SEQ ID NO: 94859 - protein, 215 aa, Arabidopsis thaliana; identical to SEQ ID NO: 91103
  peptide (1)..(215): Ceres Seq. ID no. 12726454
  misc_feature (1)..(210): Pfam Name: Protein-L-isoaspartate(D-aspartate) Pfam Description: Protein-L-isoaspartate(D-aspartate)
  misc_feature (1)..(215): Homolog of NCBI NO: 22331684 NR Description: similar to protein-L-isoaspartate(D-aspartate);
  misc_feature (1)..(215): Homolog of NCBI NO: 1322021 NR Description: L-isoaspartyl methyltransferase
  misc_feature (1)..(213): Homolog of NCBI NO: 38345249 NR Description: OSJNBb0011N17.10 [Oryza sativa (japonica
  misc_feature (1)..(214): Homolog of NCBI NO: 26451260 NR Description: unknown protein [Arabidopsis thaliana]
  misc_feature (1)..(213): Homolog of NCBI NO: 2499570 NR Description: PROTEIN-L-ISOASPARTATE O-METHYLTRANSFERASE
  misc_feature (1)..(215): Homolog of NCBI NO: 37589722 NR Description: Unknown (protein for MGC:73268) [Danio rerio]
  misc_feature (1)..(215): Homolog of NCBI NO: 29436595 NR Description: protein-L-isoaspartate (D-aspartate)
  misc_feature (1)..(211): Homolog of NCBI NO: 417489 NR Description: PROTEIN-L-ISOASPARTATE(D-ASPARTATE)
  misc_feature (1)..(215): Homolog of NCBI NO: 88512 NR Description: protein-L-isoaspartate(D-aspartate)
  misc_feature (1)..(215): Homolog of NCBI NO: 18859221 NR Description: l-isoaspartyl protein carboxyl methyltransferase

SEQ ID NO: 94860 - protein, 196 aa, Arabidopsis thaliana; identical to SEQ ID NO: 91104
  peptide (1)..(196): Ceres Seq. ID no. 12726455
  misc_feature (1)..(191): Pfam Name: Protein-L-isoaspartate(D-aspartate) Pfam Description: Protein-L-isoaspartate(D-aspartate)
  misc_feature (1)..(196): Homolog of NCBI NO: 22331684 NR Description: similar to protein-L-isoaspartate(D-aspartate);
  misc_feature (1)..(196): Homolog of NCBI NO: 1322021 NR Description: L-isoaspartyl methyltransferase
  misc_feature (1)..(194): Homolog of NCBI NO: 38345249 NR Description: OSJNBb0011N17.10 [Oryza sativa (japonica
  misc_feature (1)..(195): Homolog of NCBI NO: 26451260 NR Description: unknown protein [Arabidopsis thaliana]
  misc_feature (1)..(194): Homolog of NCBI NO: 2499570 NR Description: PROTEIN-L-ISOASPARTATE O-METHYLTRANSFERASE
  misc_feature (1)..(196): Homolog of NCBI NO: 37589722 NR Description: Unknown (protein for MGC:73268) [Danio rerio]
  misc_feature (1)..(196): Homolog of NCBI NO: 29436595 NR Description: protein-L-isoaspartate (D-aspartate)
  misc_feature (1)..(192): Homolog of NCBI NO: 417489 NR Description: PROTEIN-L-ISOASPARTATE(D-ASPARTATE)
  misc_feature (1)..(196): Homolog of NCBI NO: 88512 NR Description: protein-L-isoaspartate(D-aspartate)
  misc_feature (1)..(196): Homolog of NCBI NO: 18859221 NR Description: l-isoaspartyl protein carboxyl methyltransferase

SEQ ID NO: 94861 - DNA, 1056 bp, Arabidopsis thaliana; identical to SEQ ID NO: 91105
  misc_feature (1)..(1056): Ceres Seq. ID no. 12726456
  misc_feature: MA Experiment ID: 20000180 Result: Up-regulated in Transcription
  misc_feature: MA Experiment 20000180 PARAMETER Experiment Name: At_Germinating_Seeds_P Parameter: Age (hr) Value: 24 vs. 0
  misc_feature: MA Experiment 20000180 PARAMETER Experiment Name: At_Germinating_Seeds_P Parameter: Tissue Value: Germinating Seeds
  misc_feature: MA Experiment ID: 20000184 Result: Down-regulated in Transcription
  misc_feature: MA Experiment 20000184 PARAMETER Experiment Name: At_Shoots__P Parameter: Age (day) Value: 7
  misc_feature: MA Experiment 20000184 PARAMETER Experiment Name: At_Shoots__P Parameter: Tissue Value: Shoots vs. Whole Plant
  misc_feature: MA Experiment ID: 20000185 Result: Up-regulated in Transcription
  misc_feature: MA Experiment 20000185 PARAMETER Experiment Name: At_Roots__P Parameter: Age (day) Value: 7 vs. 21
  misc_feature: MA Experiment 20000185 PARAMETER Experiment Name: At_Roots__P Parameter: Organism Value: A. thaliana
  misc_feature: MA Experiment 20000185 PARAMETER Experiment Name: At_Roots__P Parameter: Tissue Value: Roots vs. Whole Plant
  misc_feature: MA Experiment ID: 20000227 Result: Up-regulated in Transcription
  misc_feature: MA Experiment 20000227 PARAMETER Experiment Name: At_Root-Tips-vs-Tops_P Parameter: Tissue Value: Root Tips vs. Root Tops
  misc_feature: MA Experiment ID: 20000264 Result: Up-regulated in Transcription
  misc_feature: MA Experiment 20000264 PARAMETER Experiment Name: At_Open_Flower_P Parameter: Age (day) Value: 21
  misc_feature: MA Experiment 20000264 PARAMETER Experiment Name: At_Open_Flower_P Parameter: Plant Line Value: WS
  misc_feature: MA Experiment 20000264 PARAMETER Experiment Name: At_Open_Flower_P Parameter: Tissue Value: Open Flower vs. Whole Plant
  misc_feature: MA Experiment ID: 20000265 Result: Down-regulated in Transcription
  misc_feature: MA Experiment 20000265 PARAMETER Experiment Name: At_Open_Flower_P Parameter: Age (day) Value: 21
  misc_feature: MA Experiment 20000265 PARAMETER Experiment Name: At_Open_Flower_P Parameter: Plant Line Value: WS
  misc_feature: MA Experiment 20000265 PARAMETER Experiment Name: At_Open_Flower_P Parameter: Tissue Value: Closed Flower vs. Whole Plant
  misc_feature: MA Experiment ID: 20000286 Result: Up-regulated in Transcription
  misc_feature: MA Experiment 20000286 PARAMETER Experiment Name: At_Open_Flower_P Parameter: Age (day) Value: 21
  misc_feature: MA Experiment 20000286 PARAMETER Experiment Name: At_Open_Flower_P Parameter: Plant Line Value: WS
  misc_feature: MA Experiment 20000286 PARAMETER Experiment Name: At_Open_Flower_P Parameter: Tissue Value: Half Open vs. Whole Plant
  misc_feature: MA Experiment ID: 20000438 Result: Down-regulated in Transcription
  misc_feature: MA Experiment 20000438 PARAMETER Experiment Name: At_Shoots__P Parameter: Age (day) Value: 14
  misc_feature: MA Experiment 20000438 PARAMETER Experiment Name: At_Shoots__P Parameter: Tissue Value: Shoots vs. Whole Plant
  misc_feature: MA Experiment ID: 20000439 Result: Up-regulated in Transcription
  misc_feature: MA Experiment 20000439 PARAMETER Experiment Name: At_Roots__P Parameter: Age (day) Value: 14 vs. 21
  misc_feature: MA Experiment 20000439 PARAMETER Experiment Name: At_Roots__P Parameter: Organism Value: A. thaliana
  misc_feature: MA Experiment 20000439 PARAMETER Experiment Name: At_Roots__P Parameter: Tissue Value: Roots vs. Whole Plant
  misc_feature: MA Experiment ID: 20000527 Result: Down-regulated in Transcription
  misc_feature: MA Experiment 20000527 PARAMETER Experiment Name: At_10percent_PEG_P Parameter: Age (day) Value: 20
  misc_feature: MA Experiment 20000527 PARAMETER Experiment Name: At_10percent_PEG_P Parameter: Organism Value: A. thaliana
  misc_feature: MA Experiment 20000527 PARAMETER Experiment Name: At_10percent_PEG_P Parameter: Plant Line Value: WS
  misc_feature: MA Experiment 20000527 PARAMETER Experiment Name: At_10percent_PEG_P Parameter: Timepoint (day) Value: 20
  misc_feature: MA Experiment 20000527 PARAMETER Experiment Name: At_10percent_PEG_P Parameter: Tissue Value: Whole Plant
  misc_feature: MA Experiment 20000527 PARAMETER Experiment Name: At_10percent_PEG_P Parameter: Treatment Value: 10percent PEG vs. No Treatment
  misc_feature: MA Experiment ID: 20000794 Result: Up-regulated in Transcription
  misc_feature: MA Experiment 20000794 PARAMETER Experiment Name: At_Petals_P Parameter: Age (day) Value: 23-25 days
  misc_feature: MA Experiment 20000794 PARAMETER Experiment Name: At_Petals_P Parameter: Plant Line Value: WS
  misc_feature: MA Experiment 20000794 PARAMETER Experiment Name: At_Petals_P Parameter: Tissue Value: Petals vs. Whole plant
  misc_feature: MA Experiment ID: 20001451 Result: Up-regulated in Transcription
  misc_feature: MA Experiment 20001451 PARAMETER Experiment Name: At_Far-red-induction_P Parameter: Age (day) Value: 7
  misc_feature: MA Experiment 20001451 PARAMETER Experiment Name: At_Far-red-induction_P Parameter: Light Value: Far-red vs. White
  misc_feature: MA Experiment 20001451 PARAMETER Experiment Name: At_Far-red-induction_P Parameter: Organism Value: A. thaliana
  misc_feature: MA Experiment 20001451 PARAMETER Experiment Name: At_Far-red-induction_P Parameter: Plant Line Value: Columbia
  misc_feature: MA Experiment 20001451 PARAMETER Experiment Name: At_Far-red-induction_P Parameter: Timepoint (hr) Value: 24
  misc_feature: MA Experiment 20001451 PARAMETER Experiment Name: At_Far-red-induction_P Parameter: Tissue Value: Whole Plant
  misc_feature: MA Experiment ID: 20001554 Result: Up-regulated in Transcription
  misc_feature: MA Experiment 20001554 PARAMETER Experiment Name: At_Drought_Soil_Dry_P Parameter: Age (day) Value: 21
  misc_feature: MA Experiment 20001554 PARAMETER Experiment Name: At_Drought_Soil_Dry_P Parameter: Organism Value: A. thaliana
  misc_feature: MA Experiment 20001554 PARAMETER Experiment Name: At_Drought_Soil_Dry_P Parameter: Plant Line Value: WS
  misc_feature: MA Experiment 20001554 PARAMETER Experiment Name: At_Drought_Soil_Dry_P Parameter: Post Timepoint (hr) Value: None
  misc_feature: MA Experiment 20001554 PARAMETER Experiment Name: At_Drought_Soil_Dry_P Parameter: Post-Treatment Value: None
  misc_feature: MA Experiment 20001554 PARAMETER Experiment Name: At_Drought_Soil_Dry_P Parameter: Timepoint (day) Value: 7
  misc_feature: MA Experiment 20001554 PARAMETER Experiment Name: At_Drought_Soil_Dry_P Parameter: Treatment Value: Drought vs. No Drought
  misc_feature: MA Experiment ID: 20001556 Result: Up-regulated in Transcription
  misc_feature: MA Experiment 20001556 PARAMETER Experiment Name: At_Drought_Soil_Dry_P Parameter: Age (day) Value: 26
  misc_feature: MA Experiment 20001556 PARAMETER Experiment Name: At_Drought_Soil_Dry_P Parameter: Organism Value: A. thaliana
  misc_feature: MA Experiment 20001556 PARAMETER Experiment Name: At_Drought_Soil_Dry_P Parameter: Plant Line Value: WS
  misc_feature: MA Experiment 20001556 PARAMETER Experiment Name: At_Drought_Soil_Dry_P Parameter: Post Timepoint (hr) Value: None
  misc_feature: MA Experiment 20001556 PARAMETER Experiment Name: At_Drought_Soil_Dry_P Parameter: Post-Treatment Value: None
  misc_feature: MA Experiment 20001556 PARAMETER Experiment Name: At_Drought_Soil_Dry_P Parameter: Timepoint (day) Value: 12
  misc_feature: MA Experiment 20001556 PARAMETER Experiment Name: At_Drought_Soil_Dry_P Parameter: Treatment Value: Drought vs. No Drought
  misc_feature: MA Experiment ID: 20001558 Result: Up-regulated in Transcription
  misc_feature: MA Experiment 20001558 PARAMETER Experiment Name: At_Drought_Soil_Dry_P Parameter: Age (day) Value: 27
  misc_feature: MA Experiment 20001558 PARAMETER Experiment Name: At_Drought_Soil_Dry_P Parameter: Organism Value: A. thaliana
  misc_feature: MA Experiment 20001558 PARAMETER Experiment Name: At_Drought_Soil_Dry_P Parameter: Plant Line Value: WS
  misc_feature: MA Experiment 20001558 PARAMETER Experiment Name: At_Drought_Soil_Dry_P Parameter: Post Timepoint (hr) Value: 6
  misc_feature: MA Experiment 20001558 PARAMETER Experiment Name: At_Drought_Soil_Dry_P Parameter: Post-Treatment Value: Re-Water vs. No Drought
  misc_feature: MA Experiment 20001558 PARAMETER Experiment Name: At_Drought_Soil_Dry_P Parameter: Timepoint (day) Value: 13
  misc_feature: MA Experiment 20001558 PARAMETER Experiment Name: At_Drought_Soil_Dry_P Parameter: Treatment Value: Drought vs. No Drought
  misc_feature: MA Experiment ID: 20001904 Result: Up-regulated in Transcription
  misc_feature: MA Experiment 20001904 PARAMETER Experiment Name: At_Drought_Reproduction_P Parameter: Age (day) Value: 37
  misc_feature: MA Experiment 20001904 PARAMETER Experiment Name: At_Drought_Reproduction_P Parameter: Organism Value: A. thaliana
  misc_feature: MA Experiment 20001904 PARAMETER Experiment Name: At_Drought_Reproduction_P Parameter: Plant Line Value: WS
  misc_feature: MA Experiment 20001904 PARAMETER Experiment Name: At_Drought_Reproduction_P Parameter: Timepoint (day) Value: 7
  misc_feature: MA Experiment 20001904 PARAMETER Experiment Name: At_Drought_Reproduction_P Parameter: Tissue Value: Rosettes
  misc_feature: MA Experiment 20001904 PARAMETER Experiment Name: At_Drought_Reproduction_P Parameter: Treatment Value: Drought vs. No Drought
  misc_feature: MA Experiment ID: 20001905 Result: Up-regulated in Transcription
  misc_feature: MA Experiment 20001905 PARAMETER Experiment Name: At_Drought_Reproduction_P Parameter: Age (day) Value: 40
  misc_feature: MA Experiment 20001905 PARAMETER Experiment Name: At_Drought_Reproduction_P Parameter: Organism Value: A. thaliana
  misc_feature: MA Experiment 20001905 PARAMETER Experiment Name: At_Drought_Reproduction_P Parameter: Plant Line Value: WS
  misc_feature: MA Experiment 20001905 PARAMETER Experiment Name: At_Drought_Reproduction_P Parameter: Timepoint (day) Value: 10
  misc_feature: MA Experiment 20001905 PARAMETER Experiment Name: At_Drought_Reproduction_P Parameter: Tissue Value: Rosettes
  misc_feature: MA Experiment 20001905 PARAMETER Experiment Name: At_Drought_Reproduction_P Parameter: Treatment Value: Drought vs. No Drought
  misc_feature: MA Experiment ID: 20001906 Result: Up-regulated in Transcription
  misc_feature: MA Experiment 20001906 PARAMETER Experiment Name: At_Drought_Reproduction_P Parameter: Age (day) Value: 35
  misc_feature: MA Experiment 20001906 PARAMETER Experiment Name: At_Drought_Reproduction_P Parameter: Organism Value: A. thaliana
  misc_feature: MA Experiment 20001906 PARAMETER Experiment Name: At_Drought_Reproduction_P Parameter: Plant Line Value: WS
  misc_feature: MA Experiment 20001906 PARAMETER Experiment Name: At_Drought_Reproduction_P Parameter: Timepoint (day) Value: 5
  misc_feature: MA Experiment 20001906 PARAMETER Experiment Name: At_Drought_Reproduction_P Parameter: Tissue Value: Siliques
  misc_feature: MA Experiment 20001906 PARAMETER Experiment Name: At_Drought_Reproduction_P Parameter: Treatment Value: Drought vs. No Drought

SEQ ID NO: 94862 - protein, 351 aa, Arabidopsis thaliana; identical to SEQ ID NO: 91106
  peptide (1)..(351): Ceres Seq. ID no. 12726457
  misc_feature (128)..(333): Pfam Name: Papain family cysteine protease Pfam Description: Papain family cysteine protease
  misc_feature (1)..(351): Homolog of NCBI NO: 22331686 NR Description: similar to cysteine proteinase; protein id:
  misc_feature (1)..(351): Homolog of NCBI NO: 7435811 NR Description: cysteine proteinase (EC 3.4.22.-) T29H11.140 -
  misc_feature (1)..(351): Homolog of NCBI NO: 7435817 NR Description: cysteine endopeptidase (EC 3.4.22.-) precursor - bean >gi|2944446|gb|AAC62396.1| cysteine endopeptidase precursor
  misc_feature (3)..(351): Homolog of NCBI NO: 18408616 NR Description: Expressed protein; protein id: At3g48350.1, by cDNA: 151603. [Arabidopsis thaliana] >gi|7435810|pir||T06707

SEQ ID NO: 94863 - protein, 286 aa, Arabidopsis thaliana; identical to SEQ ID NO: 91107
  peptide (1)..(286): Ceres Seq. ID no. 12726458
  misc_feature (63)..(268): Pfam Name: Papain family cysteine protease Pfam Description: Papain family cysteine protease
  misc_feature (1)..(286): Homolog of NCBI NO: 22331686 NR Description: similar to cysteine proteinase; protein id:
  misc_feature (1)..(286): Homolog of NCBI NO: 7435811 NR Description: cysteine proteinase (EC 3.4.22.-) T29H11.140 -
  misc_feature (1)..(286): Homolog of NCBI NO: 7435817 NR Description: cysteine endopeptidase (EC 3.4.22.-) precursor - bean >gi|2944446|gb|AAC62396.1| cysteine endopeptidase precursor
  misc_feature (1)..(286): Homolog of NCBI NO: 18408616 NR Description: Expressed protein; protein id: At3g48350.1, by cDNA: 151603. [Arabidopsis thaliana] >gi|7435810|pir||T06707

SEQ ID NO: 94864 - protein, 245 aa, Arabidopsis thaliana; identical to SEQ ID NO: 91108
  peptide (1)..(245): Ceres Seq. ID no. 12726459
  misc_feature (22)..(227): Pfam Name: Papain family cysteine protease Pfam Description: Papain family cysteine protease
  misc_feature (1)..(245): Homolog of NCBI NO: 22331686 NR Description: similar to cysteine proteinase; protein id:
  misc_feature (1)..(245): Homolog of NCBI NO: 7435811 NR Description: cysteine proteinase (EC 3.4.22.-) T29H11.140 -
  misc_feature (1)..(245): Homolog of NCBI NO: 7435817 NR Description: cysteine endopeptidase (EC 3.4.22.-) precursor - bean >gi|2944446|gb|AAC62396.1| cysteine endopeptidase precursor
  misc_feature (1)..(245): Homolog of NCBI NO: 18408616 NR Description: Expressed protein; protein id: At3g48350.1, by cDNA: 151603. [Arabidopsis thaliana] >gi|7435810|pir||T06707

SEQ ID NO: 94865 - DNA, 4065 bp, Arabidopsis thaliana; identical to SEQ ID NO: 91109
  misc_feature (1)..(4065): Ceres Seq. ID no. 12726468
  misc_feature: MA Experiment ID: 20000180 Result: Down-regulated in Transcription
  misc_feature: MA Experiment 20000180 PARAMETER Experiment Name: At_Germinating_Seeds_P Parameter: Age (hr) Value: 24 vs. 0
  misc_feature: MA Experiment 20000180 PARAMETER Experiment Name: At_Germinating_Seeds_P Parameter: Tissue Value: Germinating Seeds
  misc_feature: MA Experiment ID: 20000234 Result: Up-regulated in Transcription
  misc_feature: MA Experiment 20000234 PARAMETER Experiment Name: At_Siliques_P Parameter: Age (day) Value: 21
  misc_feature: MA Experiment 20000234 PARAMETER Experiment Name: At_Siliques_P Parameter: Organism Value: A. thaliana
  misc_feature: MA Experiment 20000234 PARAMETER Experiment Name: At_Siliques_P Parameter: Plant Line Value: WS
  misc_feature: MA Experiment 20000234 PARAMETER Experiment Name: At_Siliques_P Parameter: Tissue Value: Less Than 5mm Siliques vs. Whole Plant
  misc_feature: MA Experiment ID: 20000264 Result: Up-regulated in Transcription
  misc_feature: MA Experiment 20000264 PARAMETER Experiment Name: At_Open_Flower_P Parameter: Age (day) Value: 21
  misc_feature: MA Experiment 20000264 PARAMETER Experiment Name: At_Open_Flower_P Parameter: Plant Line Value: WS
  misc_feature: MA Experiment 20000264 PARAMETER Experiment Name: At_Open_Flower_P Parameter: Tissue Value: Open Flower vs. Whole Plant
  misc_feature: MA Experiment ID: 20000265 Result: Up-regulated in Transcription
  misc_feature: MA Experiment 20000265 PARAMETER Experiment Name: At_Open_Flower_P Parameter: Age (day) Value: 21
  misc_feature: MA Experiment 20000265 PARAMETER Experiment Name: At_Open_Flower_P Parameter: Plant Line Value: WS
  misc_feature: MA Experiment 20000265 PARAMETER Experiment Name: At_Open_Flower_P Parameter: Tissue Value: Closed Flower vs. Whole Plant
  misc_feature: MA Experiment ID: 20000286 Result: Up-regulated in Transcription
  misc_feature: MA Experiment 20000286 PARAMETER Experiment Name: At_Open_Flower_P Parameter: Age (day) Value: 21
  misc_feature: MA Experiment 20000286 PARAMETER Experiment Name: At_Open_Flower_P Parameter: Plant Line Value: WS
  misc_feature: MA Experiment 20000286 PARAMETER Experiment Name: At_Open_Flower_P Parameter: Tissue Value: Half Open vs. Whole Plant
  misc_feature: MA Experiment ID: 20000439 Result: Up-regulated in Transcription
  misc_feature: MA Experiment 20000439 PARAMETER Experiment Name: At_Roots__P Parameter: Age (day) Value: 14 vs. 21
  misc_feature: MA Experiment 20000439 PARAMETER Experiment Name: At_Roots__P Parameter: Organism Value: A. thaliana
  misc_feature: MA Experiment 20000439 PARAMETER Experiment Name: At_Roots__P Parameter: Tissue Value: Roots vs. Whole Plant
  misc_feature: MA Experiment ID: 20000794 Result: Up-regulated in Transcription
  misc_feature: MA Experiment 20000794 PARAMETER Experiment Name: At_Petals_P Parameter: Age (day) Value: 23-25 days
  misc_feature: MA Experiment 20000794 PARAMETER Experiment Name: At_Petals_P Parameter: Plant Line Value: WS
  misc_feature: MA Experiment 20000794 PARAMETER Experiment Name: At_Petals_P Parameter: Tissue Value: Petals vs. Whole plant
  misc_feature: MA Experiment ID: 20001451 Result: Down-regulated in Transcription
  misc_feature: MA Experiment 20001451 PARAMETER Experiment Name: At_Far-red-induction_P Parameter: Age (day) Value: 7
  misc_feature: MA Experiment 20001451 PARAMETER Experiment Name: At_Far-red-induction_P Parameter: Light Value: Far-red vs. White
  misc_feature: MA Experiment 20001451 PARAMETER Experiment Name: At_Far-red-induction_P Parameter: Organism Value: A. thaliana
  misc_feature: MA Experiment 20001451 PARAMETER Experiment Name: At_Far-red-induction_P Parameter: Plant Line Value: Columbia
  misc_feature: MA Experiment 20001451 PARAMETER Experiment Name: At_Far-red-induction_P Parameter: Timepoint (hr) Value: 24
  misc_feature: MA Experiment 20001451 PARAMETER Experiment Name: At_Far-red-induction_P Parameter: Tissue Value: Whole Plant

SEQ ID NO: 94866 - protein, 1354 aa, Arabidopsis thaliana; identical to SEQ ID NO: 91110
  peptide (1)..(1354): Ceres Seq. ID no. 12726469
  misc_feature (233)..(352): Pfam Name: jmjC domain Pfam Description: jmjC domain
  misc_feature (7)..(460): Homolog of NCBI NO: 20804883 NR Description: putative zinc finger protein [Oryza sativa
  misc_feature (616)..(932): Homolog of NCBI NO: 20804883 NR Description: putative zinc finger protein [Oryza sativa
  misc_feature (1095)..(1353): Homolog of NCBI NO: 20804883 NR Description: putative zinc finger protein [Oryza sativa
  misc_feature (510)..(594): Homolog of NCBI NO: 20804883 NR Description: putative zinc finger protein [Oryza sativa
  misc_feature (195)..(437): Homolog of NCBI NO: 15237652 NR Description: zinc finger protein - like; protein id:
  misc_feature (13)..(181): Homolog of NCBI NO: 15237652 NR Description: zinc finger protein - like; protein id:
  misc_feature (1238)..(1348): Homolog of NCBI NO: 15237652 NR Description: zinc finger protein - like; protein id:
  misc_feature (734)..(836): Homolog of NCBI NO: 15237652 NR Description: zinc finger protein - like; protein id:
  misc_feature (118)..(506): Homolog of NCBI NO: 15237976 NR Description: putative protein; protein id: At5g46910.1 thaliana] >gi|9759433|dbj|BAB10230.1|
  misc_feature (3)..(56): Homolog of NCBI NO: 15237976 NR Description: putative protein; protein id: At5g46910.1 thaliana] >gi|9759433|dbj|BAB10230.1|

SEQ ID NO: 94867 - protein, 1179 aa, Arabidopsis thaliana; identical to SEQ ID NO: 91111
  peptide (1)..(1179): Ceres Seq. ID no. 12726470
  misc_feature (58)..(177): Pfam Name: jmjC domain Pfam Description: jmjC domain
  misc_feature (1)..(285): Homolog of NCBI NO: 20804883 NR Description: putative zinc finger protein [Oryza sativa
  misc_feature (441)..(757): Homolog of NCBI NO: 20804883 NR Description: putative zinc finger protein [Oryza sativa
  misc_feature (920)..(1178): Homolog of NCBI NO: 20804883 NR Description: putative zinc finger protein [Oryza sativa
  misc_feature (335)..(419): Homolog of NCBI NO: 20804883 NR Description: putative zinc finger protein [Oryza sativa
  misc_feature (20)..(262): Homolog of NCBI NO: 15237652 NR Description: zinc finger protein - like; protein id:
  misc_feature (1063)..(1173): Homolog of NCBI NO: 15237652 NR Description: zinc finger protein - like; protein id:
  misc_feature (559)..(661): Homolog of NCBI NO: 15237652 NR Description: zinc finger protein - like; protein id:
  misc_feature (1)..(331): Homolog of NCBI NO: 15237976 NR Description: putative protein; protein id: At5g46910.1 thaliana] >gi|9759433|dbj|BAB10230.1|
  misc_feature (1)..(285): Homolog of NCBI NO: 37537146 NR Description: putative retinoblastoma binding protein [Oryza
  misc_feature (1)..(189): Homolog of NCBI NO: 15226853 NR Description: unknown protein; protein id: At2g34880.1

SEQ ID NO: 94868 - protein, 1147 aa, Arabidopsis thaliana; identical to SEQ ID NO: 91112
  peptide (1)..(1147): Ceres Seq. ID no. 12726471
  misc_feature (26)..(145): Pfam Name: jmjC domain Pfam Description: jmjC domain
  misc_feature (1)..(253): Homolog of NCBI NO: 20804883 NR Description: putative zinc finger protein [Oryza sativa
  misc_feature (409)..(725): Homolog of NCBI NO: 20804883 NR Description: putative zinc finger protein [Oryza sativa
  misc_feature (888)..(1146): Homolog of NCBI NO: 20804883 NR Description: putative zinc finger protein [Oryza sativa
  misc_feature (303)..(387): Homolog of NCBI NO: 20804883 NR Description: putative zinc finger protein [Oryza sativa
  misc_feature (1)..(230): Homolog of NCBI NO: 15237652 NR Description: zinc finger protein - like; protein id:
  misc_feature (1031)..(1141): Homolog of NCBI NO: 15237652 NR Description: zinc finger protein - like; protein id:
  misc_feature (527)..(629): Homolog of NCBI NO: 15237652 NR Description: zinc finger protein - like; protein id:
  misc_feature (1)..(299): Homolog of NCBI NO: 15237976 NR Description: putative protein; protein id: At5g46910.1 thaliana] >gi|9759433|dbj|BAB10230.1|
  misc_feature (1)..(253): Homolog of NCBI NO: 37537146 NR Description: putative retinoblastoma binding protein [Oryza
  misc_feature (1)..(157): Homolog of NCBI NO: 15226853 NR Description: unknown protein; protein id: At2g34880.1

SEQ ID NO: 94869 - DNA, 1521 bp, Arabidopsis thaliana; identical to SEQ ID NO: 91113
  misc_feature (1)..(1521): Ceres Seq. ID no. 12726480
  misc_feature: MA Experiment ID: 20000182 Result: Up-regulated in Transcription
  misc_feature: MA Experiment 20000182 PARAMETER Experiment Name: At_2mM_SA_P Parameter: Age (day) Value: 14
  misc_feature: MA Experiment 20000182 PARAMETER Experiment Name: At_2mM_SA_P Parameter: Organism Value: A. thaliana
  misc_feature: MA Experiment 20000182 PARAMETER Experiment Name: At_2mM_SA_P Parameter: Plant Line Value: WS
  misc_feature: MA Experiment 20000182 PARAMETER Experiment Name: At_2mM_SA_P Parameter: Timepoint (hr) Value: 6
  misc_feature: MA Experiment 20000182 PARAMETER Experiment Name: At_2mM_SA_P Parameter: Tissue Value: Aerial
  misc_feature: MA Experiment 20000182 PARAMETER Experiment Name: At_2mM_SA_P Parameter: Treatment Value: 2mM SA vs. No Treatment
  misc_feature: MA Experiment ID: 20000211 Result: Up-regulated in Transcription
  misc_feature: MA Experiment 20000211 PARAMETER Experiment Name: At_0.001percent_MeJA__P Parameter: Age (day) Value: 14
  misc_feature: MA Experiment 20000211 PARAMETER Experiment Name: At_0.001percent_MeJA__P Parameter: Organism Value: A. thaliana
  misc_feature: MA Experiment 20000211 PARAMETER Experiment Name: At_0.001percent_MeJA__P Parameter: Plant Line Value: WS
  misc_feature: MA Experiment 20000211 PARAMETER Experiment Name: At_0.001percent_MeJA__P Parameter: Timepoint (hr) Value: 1
  misc_feature: MA Experiment 20000211 PARAMETER Experiment Name: At_0.001percent_MeJA__P Parameter: Tissue Value: Aerial
  misc_feature: MA Experiment 20000211 PARAMETER Experiment Name: At_0.001percent_MeJA__P Parameter: Treatment Value: 0.001percent MeJA vs. No Treatment
  misc_feature: MA Experiment ID: 20000234 Result: Down-regulated in Transcription
  misc_feature: MA Experiment 20000234 PARAMETER Experiment Name: At_Siliques_P Parameter: Age (day) Value: 21
  misc_feature: MA Experiment 20000234 PARAMETER Experiment Name: At_Siliques_P Parameter: Organism Value: A. thaliana
  misc_feature: MA Experiment 20000234 PARAMETER Experiment Name: At_Siliques_P Parameter: Plant Line Value: WS
  misc_feature: MA Experiment 20000234 PARAMETER Experiment Name: At_Siliques_P Parameter: Tissue Value: Less Than 5mm Siliques vs. Whole Plant
  misc_feature: MA Experiment ID: 20000235 Result: Down-regulated in Transcription
  misc_feature: MA Experiment 20000235 PARAMETER Experiment Name: At_Siliques_P Parameter: Age (day) Value: 21
  misc_feature: MA Experiment 20000235 PARAMETER Experiment Name: At_Siliques_P Parameter: Organism Value: A. thaliana
  misc_feature: MA Experiment 20000235 PARAMETER Experiment Name: At_Siliques_P Parameter: Plant Line Value: WS
  misc_feature: MA Experiment 20000235 PARAMETER Experiment Name: At_Siliques_P Parameter: Tissue Value: 5-10mm Siliques vs. Whole Plant
  misc_feature: MA Experiment ID: 20000265 Result: Down-regulated in Transcription
  misc_feature: MA Experiment 20000265 PARAMETER Experiment Name: At_Open_Flower_P Parameter: Age (day) Value: 21
  misc_feature: MA Experiment 20000265 PARAMETER Experiment Name: At_Open_Flower_P Parameter: Plant Line Value: WS
  misc_feature: MA Experiment 20000265 PARAMETER Experiment Name: At_Open_Flower_P Parameter: Tissue Value: Closed Flower vs. Whole Plant
  misc_feature: MA Experiment ID: 20000267 Result: Up-regulated in Transcription
  misc_feature: MA Experiment 20000267 PARAMETER Experiment Name: At_Drought_P Parameter: Age (day) Value: 7
  misc_feature: MA Experiment 20000267 PARAMETER Experiment Name: At_Drought_P Parameter: Organism Value: A. thaliana
  misc_feature: MA Experiment 20000267 PARAMETER Experiment Name: At_Drought_P Parameter: Plant Line Value: WS
  misc_feature: MA Experiment 20000267 PARAMETER Experiment Name: At_Drought_P Parameter: Timepoint (hr) Value: 6
  misc_feature: MA Experiment 20000267 PARAMETER Experiment Name: At_Drought_P Parameter: Tissue Value: Whole Plant
  misc_feature: MA Experiment 20000267 PARAMETER Experiment Name: At_Drought_P Parameter: Treatment Value: Drought vs. No Drought
  misc_feature: MA Experiment ID: 20000286 Result: Down-regulated in Transcription
  misc_feature: MA Experiment 20000286 PARAMETER Experiment Name: At_Open_Flower_P Parameter: Age (day) Value: 21
  misc_feature: MA Experiment 20000286 PARAMETER Experiment Name: At_Open_Flower_P Parameter: Plant Line Value: WS
  misc_feature: MA Experiment 20000286 PARAMETER Experiment Name: At_Open_Flower_P Parameter: Tissue Value: Half Open vs. Whole Plant
  misc_feature: MA Experiment ID: 20000436 Result: Up-regulated in Transcription
  misc_feature: MA Experiment 20000436 PARAMETER Experiment Name: At_Drought_P Parameter: Age (day) Value: 7
  misc_feature: MA Experiment 20000436 PARAMETER Experiment Name: At_Drought_P Parameter: Organism Value: A. thaliana
  misc_feature: MA Experiment 20000436 PARAMETER Experiment Name: At_Drought_P Parameter: Plant Line Value: WS
  misc_feature: MA Experiment 20000436 PARAMETER Experiment Name: At_Drought_P Parameter: Timepoint (hr) Value: 12
  misc_feature: MA Experiment 20000436 PARAMETER Experiment Name: At_Drought_P Parameter: Tissue Value: Whole Plant
  misc_feature: MA Experiment 20000436 PARAMETER Experiment Name: At_Drought_P Parameter: Treatment Value: Drought vs. No Drought
  misc_feature: MA Experiment ID: 20000437 Result: Up-regulated in Transcription
  misc_feature: MA Experiment 20000437 PARAMETER Experiment Name: At_Drought_P Parameter: Age (day) Value: 8
  misc_feature: MA Experiment 20000437 PARAMETER Experiment Name: At_Drought_P Parameter: Organism Value: A. thaliana
  misc_feature: MA Experiment 20000437 PARAMETER Experiment Name: At_Drought_P Parameter: Plant Line Value: WS
  misc_feature: MA Experiment 20000437 PARAMETER Experiment Name: At_Drought_P Parameter: Timepoint (hr) Value: 24
  misc_feature: MA Experiment 20000437 PARAMETER Experiment Name: At_Drought_P Parameter: Tissue Value: Whole Plant
  misc_feature: MA Experiment 20000437 PARAMETER Experiment Name: At_Drought_P Parameter: Treatment Value: Drought vs. No Drought
  misc_feature: MA Experiment ID: 20000438 Result: Down-regulated in Transcription
  misc_feature: MA Experiment 20000438 PARAMETER Experiment Name: At_Shoots__P Parameter: Age (day) Value: 14
  misc_feature: MA Experiment 20000438 PARAMETER Experiment Name: At_Shoots__P Parameter: Tissue Value: Shoots vs. Whole Plant
  misc_feature: MA Experiment ID: 20000453 Result: Up-regulated in Transcription
  misc_feature: MA Experiment 20000453 PARAMETER Experiment Name: At_100uM_ABA_P Parameter: Age (day) Value: 15
  misc_feature: MA Experiment 20000453 PARAMETER Experiment Name: At_100uM_ABA_P Parameter: Organism Value: A. thaliana
  misc_feature: MA Experiment 20000453 PARAMETER Experiment Name: At_100uM_ABA_P Parameter: Plant Line Value: WS
  misc_feature: MA Experiment 20000453 PARAMETER Experiment Name: At_100uM_ABA_P Parameter: Timepoint (hr) Value: 24
  misc_feature: MA Experiment 20000453 PARAMETER Experiment Name: At_100uM_ABA_P Parameter: Tissue Value: Aerial
  misc_feature: MA Experiment 20000453 PARAMETER Experiment Name: At_100uM_ABA_P Parameter: Treatment Value: 100uM ABA vs. No Treatment
  misc_feature: MA Experiment ID: 20000495 Result: Down-regulated in Transcription
  misc_feature: MA Experiment 20000495 PARAMETER Experiment Name: At_Guard_Cells_P Parameter: Harvest Date Value: 8/2/2002
  misc_feature: MA Experiment 20000495 PARAMETER Experiment Name: At_Guard_Cells_P Parameter: Organism Value: A. thaliana
  misc_feature: MA Experiment 20000495 PARAMETER Experiment Name: At_Guard_Cells_P Parameter: Tissue Value: Guard Cells vs. Leaves
  misc_feature: MA Experiment ID: 20000496 Result: Down-regulated in Transcription
  misc_feature: MA Experiment 20000496 PARAMETER Experiment Name: At_Guard_Cells_P Parameter: Harvest Date Value: 7/19/2002
  misc_feature: MA Experiment 20000496 PARAMETER Experiment Name: At_Guard_Cells_P Parameter: Organism Value: Canola
  misc_feature: MA Experiment 20000496 PARAMETER Experiment Name: At_Guard_Cells_P Parameter: Tissue Value: Guard Cells vs. Leaves
  misc_feature: MA Experiment ID: 20000506 Result: Up-regulated in Transcription
  misc_feature: MA Experiment 20000506 PARAMETER Experiment Name: At_Wounding_P Parameter: Organism Value: A. thaliana
  misc_feature: MA Experiment 20000506 PARAMETER Experiment Name: At_Wounding_P Parameter: Plant Line Value: WS
  misc_feature: MA Experiment 20000506 PARAMETER Experiment Name: At_Wounding_P Parameter: Timepoint (hr) Value: 6
  misc_feature: MA Experiment 20000506 PARAMETER Experiment Name: At_Wounding_P Parameter: Tissue Value: Aerial
  misc_feature: MA Experiment 20000506 PARAMETER Experiment Name: At_Wounding_P Parameter: Treatment Value: Wounding vs. No Wounding
  misc_feature: MA Experiment ID: 20001759 Result: Down-regulated in Transcription
  misc_feature: MA Experiment 20001759 PARAMETER Experiment Name: At_50mM_NH4NO3_L-to-H_P Parameter: Timepoint (hr) Value: 1
  misc_feature: MA Experiment 20001759 PARAMETER Experiment Name: At_50mM_NH4NO3_L-to-H_P Parameter: Tissue Value: Siliques
  misc_feature: MA Experiment 20001759 PARAMETER Experiment Name: At_50mM_NH4NO3_L-to-H_P Parameter: Treatment Value: 50mM NH4NO3 vs 100mM Mannitol
  misc_feature: MA Experiment ID: 20001761 Result: Down-regulated in Transcription
  misc_feature: MA Experiment 20001761 PARAMETER Experiment Name: At_50mM_NH4NO3_L-to-H_P Parameter: Timepoint (hr) Value: 4
  misc_feature: MA Experiment 20001761 PARAMETER Experiment Name: At_50mM_NH4NO3_L-to-H_P Parameter: Tissue Value: Siliques
  misc_feature: MA Experiment 20001761 PARAMETER Experiment Name: At_50mM_NH4NO3_L-to-H_P Parameter: Treatment Value: 50mM NH4NO3 vs 100mM Mannitol
  misc_feature: MA Experiment ID: 20001905 Result: Up-regulated in Transcription
  misc_feature: MA Experiment 20001905 PARAMETER Experiment Name: At_Drought_Reproduction_P Parameter: Age (day) Value: 40
  misc_feature: MA Experiment 20001905 PARAMETER Experiment Name: At_Drought_Reproduction_P Parameter: Organism Value: A. thaliana
  misc_feature: MA Experiment 20001905 PARAMETER Experiment Name: At_Drought_Reproduction_P Parameter: Plant Line Value: WS
  misc_feature: MA Experiment 20001905 PARAMETER Experiment Name: At_Drought_Reproduction_P Parameter: Timepoint (day) Value: 10
  misc_feature: MA Experiment 20001905 PARAMETER Experiment Name: At_Drought_Reproduction_P Parameter: Tissue Value: Rosettes
  misc_feature: MA Experiment 20001905 PARAMETER Experiment Name: At_Drought_Reproduction_P Parameter: Treatment Value: Drought vs. No Drought
  misc_feature: MA Experiment ID: 20001911 Result: Up-regulated in Transcription
  misc_feature: MA Experiment 20001911 PARAMETER Experiment Name: At_Drought_Reproduction_P Parameter: Age (day) Value: 40
  misc_feature: MA Experiment 20001911 PARAMETER Experiment Name: At_Drought_Reproduction_P Parameter: Organism Value: A. thaliana
  misc_feature: MA Experiment 20001911 PARAMETER Experiment Name: At_Drought_Reproduction_P Parameter: Plant Line Value: WS
  misc_feature: MA Experiment 20001911 PARAMETER Experiment Name: At_Drought_Reproduction_P Parameter: Timepoint (day) Value: 10
  misc_feature: MA Experiment 20001911 PARAMETER Experiment Name: At_Drought_Reproduction_P Parameter: Tissue Value: Flowers
  misc_feature: MA Experiment 20001911 PARAMETER Experiment Name: At_Drought_Reproduction_P Parameter: Treatment Value: Drought vs. No Drought

SEQ ID NO: 94870 - protein, 506 aa, Arabidopsis thaliana; identical to SEQ ID NO: 91114
  peptide (1)..(506): Ceres Seq. ID no. 12726481
  misc_feature (35)..(494): Pfam Name: Cytochrome P450 Pfam Description: Cytochrome P450
  misc_feature (1)..(506): Homolog of NCBI NO: 15228396 NR Description: cytochrome p450, putative; protein id: At3g48520.1
  misc_feature (4)..(499): Homolog of NCBI NO: 21536522 NR Description: cytochrome P450-like protein [Arabidopsis
  misc_feature (4)..(499): Homolog of NCBI NO: 15242759 NR Description: cytochrome P450, putative; protein id: supported by cDNA: 101598. [Arabidopsis thaliana]
  misc_feature (4)..(499): Homolog of NCBI NO: 26452145 NR Description: putative cytochrome P450 [Arabidopsis thaliana]
  misc_feature (13)..(504): Homolog of NCBI NO: 18395978 NR Description: cytochrome p450, putative; protein id: [Arabidopsis thaliana] >gi|6091730|gb|AAF03442.1|AC010797_18 cytochrome P450 [Arabidopsis thaliana]
  misc_feature (1)..(499): Homolog of NCBI NO: 17366212 NR Description: Cytochrome P450 94A1 (P450-dependent fatty acid
  misc_feature (4)..(499): Homolog of NCBI NO: 18000072 NR Description: cytochrome P450-dependent fatty acid hydroxylase
  misc_feature (4)..(503): Homolog of NCBI NO: 17366433 NR Description: Cytochrome P450 94A2 (P450-dependent fatty acid
  misc_feature (1)..(501): Homolog of NCBI NO: 18000068 NR Description: cytochrome P450-dependent fatty acid hydroxylase
  misc_feature (4)..(499): Homolog of NCBI NO: 18000066 NR Description: cytochrome P450-dependent fatty acid hydroxylase

SEQ ID NO: 94871 - DNA, 2549 bp, Arabidopsis thaliana; identical to SEQ ID NO: 91115
  misc_feature (1)..(2549): Ceres Seq. ID no. 12726490
  misc_feature: MA Experiment ID: 20000306 Result: Down-regulated in Transcription
  misc_feature: MA Experiment 20000306 PARAMETER Experiment Name: At_Germinating_Seeds_Sub_P Parameter: Age (hr) Value: 6 vs. 0
  misc_feature: MA Experiment 20000306 PARAMETER Experiment Name: At_Germinating_Seeds_Sub_P Parameter: Organism Value: A. thaliana
  misc_feature: MA Experiment 20000306 PARAMETER Experiment Name: At_Germinating_Seeds_Sub_P Parameter: Plant Line Value: WS
  misc_feature: MA Experiment 20000306 PARAMETER Experiment Name: At_Germinating_Seeds_Sub_P Parameter: Tissue Value: Germinating Seeds
  misc_feature: MA Experiment ID: 20000307 Result: Down-regulated in Transcription
  misc_feature: MA Experiment 20000307 PARAMETER Experiment Name: At_Germinating_Seeds_Sub_P Parameter: Age (hr) Value: 24 vs. 0
  misc_feature: MA Experiment 20000307 PARAMETER Experiment Name: At_Germinating_Seeds_Sub_P Parameter: Organism Value: A. thaliana
  misc_feature: MA Experiment 20000307 PARAMETER Experiment Name: At_Germinating_Seeds_Sub_P Parameter: Plant Line Value: WS
  misc_feature: MA Experiment 20000307 PARAMETER Experiment Name: At_Germinating_Seeds_Sub_P Parameter: Tissue Value: Germinating Seeds
  misc_feature: MA Experiment ID: 20000328 Result: Down-regulated in Transcription
  misc_feature: MA Experiment 20000328 PARAMETER Experiment Name: At_42deg_Heat_Sub_P Parameter: Age (day) Value: 14
  misc_feature: MA Experiment 20000328 PARAMETER Experiment Name: At_42deg_Heat_Sub_P Parameter: Organism Value: A. thaliana
  misc_feature: MA Experiment 20000328 PARAMETER Experiment Name: At_42deg_Heat_Sub_P Parameter: Plant Line Value: WS
  misc_feature: MA Experiment 20000328 PARAMETER Experiment Name: At_42deg_Heat_Sub_P Parameter: Temperature (deg C) Value: 42 vs. 22
  misc_feature: MA Experiment 20000328 PARAMETER Experiment Name: At_42deg_Heat_Sub_P Parameter: Timepoint (hr) Value: 6
  misc_feature: MA Experiment 20000328 PARAMETER Experiment Name: At_42deg_Heat_Sub_P Parameter: Tissue Value: Aerial

SEQ ID NO: 94872 - protein, 769 aa, Arabidopsis thaliana; identical to SEQ ID NO: 91116
  peptide (1)..(769): Ceres Seq. ID no. 12726491
  misc_feature (433)..(700): Pfam Name: Protein kinase domain Pfam Description: Protein kinase domain
  misc_feature (1)..(768): Homolog of NCBI NO: 15222427 NR Description: WAK-like kinase (WLK); protein id: At1g69730.1
  misc_feature (3)..(768): Homolog of NCBI NO: 15223546 NR Description: WAK-like kinase (WLK); protein id: At1g19390.1
  misc_feature (3)..(752): Homolog of NCBI NO: 25287654 NR Description: protein F18O14.11 [imported] - Arabidopsis >gi|8778443|gb|AAF79451.1|AC025808_33 F18O14.11 [Arabidopsis
  misc_feature (4)..(768): Homolog of NCBI NO: 22329045 NR Description: WAK-like kinase (WLK); protein id: At4g31100.1
  misc_feature (188)..(769): Homolog of NCBI NO: 15219445 NR Description: WAK-like kinase (WLK); protein id: At1g79670.1, by cDNA: gi_19310446 [Arabidopsis thaliana]
  misc_feature (24)..(153): Homolog of NCBI NO: 15219445 NR Description: WAK-like kinase (WLK); protein id: At1g79670.1, by cDNA: gi_19310446 [Arabidopsis thaliana]
  misc_feature (178)..(735): Homolog of NCBI NO: 15219132 NR Description: WAK-like kinase (WLK); protein id: At1g16120.1
  misc_feature (24)..(200): Homolog of NCBI NO: 15219132 NR Description: WAK-like kinase (WLK); protein id: At1g16120.1
  misc_feature (62)..(728): Homolog of NCBI NO: 15220882 NR Description: WAK-like kinase (WLK); protein id: At1g17910.1
  misc_feature (197)..(769): Homolog of NCBI NO: 30699443 NR Description: WAK-like kinase (WLK) [Arabidopsis thaliana]

SEQ ID NO: 94873 - protein, 691 aa, Arabidopsis thaliana; identical to SEQ ID NO: 91117
  peptide (1)..(691): Ceres Seq. ID no. 12726492
  misc_feature (355)..(622): Pfam Name: Protein kinase domain Pfam Description: Protein kinase domain
  misc_feature (1)..(690): Homolog of NCBI NO: 15222427 NR Description: WAK-like kinase (WLK); protein id: At1g69730.1
  misc_feature (1)..(690): Homolog of NCBI NO: 15223546 NR Description: WAK-like kinase (WLK); protein id: At1g19390.1
  misc_feature (1)..(674): Homolog of NCBI NO: 25287654 NR Description: protein F18O14.11 [imported] - Arabidopsis >gi|8778443|gb|AAF79451.1|AC025808_33 F18O14.11 [Arabidopsis
  misc_feature (1)..(690): Homolog of NCBI NO: 22329045 NR Description: WAK-like kinase (WLK); protein id: At4g31100.1
  misc_feature (110)..(691): Homolog of NCBI NO: 15219445 NR Description: WAK-like kinase (WLK); protein id: At1g79670.1, by cDNA: gi_19310446 [Arabidopsis thaliana]
  misc_feature (1)..(75): Homolog of NCBI NO: 15219445 NR Description: WAK-like kinase (WLK); protein id: At1g79670.1, by cDNA: gi_19310446 [Arabidopsis thaliana]
  misc_feature (100)..(657): Homolog of NCBI NO: 15219132 NR Description: WAK-like kinase (WLK); protein id: At1g16120.1
  misc_feature (1)..(122): Homolog of NCBI NO: 15219132 NR Description: WAK-like kinase (WLK); protein id: At1g16120.1
  misc_feature (1)..(650): Homolog of NCBI NO: 15220882 NR Description: WAK-like kinase (WLK); protein id: At1g17910.1
  misc_feature (119)..(691): Homolog of NCBI NO: 30699443 NR Description: WAK-like kinase (WLK) [Arabidopsis thaliana]

SEQ ID NO: 94874 - protein, 655 aa, Arabidopsis thaliana; identical to SEQ ID NO: 91118
  peptide (1)..(655): Ceres Seq. ID no. 12726493
  misc_feature (319)..(586): Pfam Name: Protein kinase domain Pfam Description: Protein kinase domain
  misc_feature (1)..(654): Homolog of NCBI NO: 15222427 NR Description: WAK-like kinase (WLK); protein id: At1g69730.1
  misc_feature (1)..(654): Homolog of NCBI NO: 15223546 NR Description: WAK-like kinase (WLK); protein id: At1g19390.1
  misc_feature (1)..(638): Homolog of NCBI NO: 25287654 NR Description: protein F18O14.11 [imported] - Arabidopsis >gi|8778443|gb|AAF79451.1|AC025808_33 F18O14.11 [Arabidopsis
  misc_feature (1)..(654): Homolog of NCBI NO: 22329045 NR Description: WAK-like kinase (WLK); protein id: At4g31100.1
  misc_feature (74)..(655): Homolog of NCBI NO: 15219445 NR Description: WAK-like kinase (WLK); protein id: At1g79670.1, by cDNA: gi_19310446 [Arabidopsis thaliana]
  misc_feature (1)..(39): Homolog of NCBI NO: 15219445 NR Description: WAK-like kinase (WLK); protein id: At1g79670.1, by cDNA: gi_19310446 [Arabidopsis thaliana]
  misc_feature (64)..(621): Homolog of NCBI NO: 15219132 NR Description: WAK-like kinase (WLK); protein id: At1g16120.1
  misc_feature (1)..(86): Homolog of NCBI NO: 15219132 NR Description: WAK-like kinase (WLK); protein id: At1g16120.1
  misc_feature (1)..(614): Homolog of NCBI NO: 15220882 NR Description: WAK-like kinase (WLK); protein id: At1g17910.1
  misc_feature (83)..(655): Homolog of NCBI NO: 30699443 NR Description: WAK-like kinase (WLK) [Arabidopsis thaliana]

SEQ ID NO: 94875 - DNA, 1988 bp, Arabidopsis thaliana; identical to SEQ ID NO: 91119
  misc_feature (1)..(1988): Ceres Seq. ID no. 12726505
  misc_feature: MA Experiment ID: 20000171 Result: Up-regulated in Transcription
  misc_feature: MA Experiment 20000171 PARAMETER Experiment Name: At_42deg_Heat_P Parameter: Age (day) Value: 14
  misc_feature: MA Experiment 20000171 PARAMETER Experiment Name: At_42deg_Heat_P Parameter: Organism Value: A. thaliana
  misc_feature: MA Experiment 20000171 PARAMETER Experiment Name: At_42deg_Heat_P Parameter: Plant Line Value: WS
  misc_feature: MA Experiment 20000171 PARAMETER Experiment Name: At_42deg_Heat_P Parameter: Temperature (deg C) Value: 42 vs. 22
  misc_feature: MA Experiment 20000171 PARAMETER Experiment Name: At_42deg_Heat_P Parameter: Timepoint (hr) Value: 1
  misc_feature: MA Experiment 20000171 PARAMETER Experiment Name: At_42deg_Heat_P Parameter: Tissue Value: Aerial
  misc_feature: MA Experiment ID: 20000234 Result: Up-regulated in Transcription
  misc_feature: MA Experiment 20000234 PARAMETER Experiment Name: At_Siliques_P Parameter: Age (day) Value: 21
  misc_feature: MA Experiment 20000234 PARAMETER Experiment Name: At_Siliques_P Parameter: Organism Value: A. thaliana
  misc_feature: MA Experiment 20000234 PARAMETER Experiment Name: At_Siliques_P Parameter: Plant Line Value: WS
  misc_feature: MA Experiment 20000234 PARAMETER Experiment Name: At_Siliques_P Parameter: Tissue Value: Less Than 5mm Siliques vs. Whole Plant
  misc_feature: MA Experiment ID: 20000235 Result: Up-regulated in Transcription
  misc_feature: MA Experiment 20000235 PARAMETER Experiment Name: At_Siliques_P Parameter: Age (day) Value: 21
  misc_feature: MA Experiment 20000235 PARAMETER Experiment Name: At_Siliques_P Parameter: Organism Value: A. thaliana
  misc_feature: MA Experiment 20000235 PARAMETER Experiment Name: At_Siliques_P Parameter: Plant Line Value: WS
  misc_feature: MA Experiment 20000235 PARAMETER Experiment Name: At_Siliques_P Parameter: Tissue Value: 5-10mm Siliques vs. Whole Plant
  misc_feature: MA Experiment ID: 20000264 Result: Up-regulated in Transcription
  misc_feature: MA Experiment 20000264 PARAMETER Experiment Name: At_Open_Flower_P Parameter: Age (day) Value: 21
  misc_feature: MA Experiment 20000264 PARAMETER Experiment Name: At_Open_Flower_P Parameter: Plant Line Value: WS
  misc_feature: MA Experiment 20000264 PARAMETER Experiment Name: At_Open_Flower_P Parameter: Tissue Value: Open Flower vs. Whole Plant
  misc_feature: MA Experiment ID: 20000265 Result: Up-regulated in Transcription
  misc_feature: MA Experiment 20000265 PARAMETER Experiment Name: At_Open_Flower_P Parameter: Age (day) Value: 21
  misc_feature: MA Experiment 20000265 PARAMETER Experiment Name: At_Open_Flower_P Parameter: Plant Line Value: WS
  misc_feature: MA Experiment 20000265 PARAMETER Experiment Name: At_Open_Flower_P Parameter: Tissue Value: Closed Flower vs. Whole Plant
  misc_feature: MA Experiment ID: 20000286 Result: Up-regulated in Transcription
  misc_feature: MA Experiment 20000286 PARAMETER Experiment Name: At_Open_Flower_P Parameter: Age (day) Value: 21
  misc_feature: MA Experiment 20000286 PARAMETER Experiment Name: At_Open_Flower_P Parameter: Plant Line Value: WS
  misc_feature: MA Experiment 20000286 PARAMETER Experiment Name: At_Open_Flower_P Parameter: Tissue Value: Half Open vs. Whole Plant
  misc_feature: MA Experiment ID: 20000495 Result: Up-regulated in Transcription
  misc_feature: MA Experiment 20000495 PARAMETER Experiment Name: At_Guard_Cells_P Parameter: Harvest Date Value: 8/2/2002
  misc_feature: MA Experiment 20000495 PARAMETER Experiment Name: At_Guard_Cells_P Parameter: Organism Value: A. thaliana
  misc_feature: MA Experiment 20000495 PARAMETER Experiment Name: At_Guard_Cells_P Parameter: Tissue Value: Guard Cells vs. Leaves
  misc_feature: MA Experiment ID: 20001560 Result: Up-regulated in Transcription
  misc_feature: MA Experiment 20001560 PARAMETER Experiment Name: At_Drought_Soil_Dry_P Parameter: Age (day) Value: 28
  misc_feature: MA Experiment 20001560 PARAMETER Experiment Name: At_Drought_Soil_Dry_P Parameter: Organism Value: A. thaliana
  misc_feature: MA Experiment 20001560 PARAMETER Experiment Name: At_Drought_Soil_Dry_P Parameter: Plant Line Value: WS
  misc_feature: MA Experiment 20001560 PARAMETER Experiment Name: At_Drought_Soil_Dry_P Parameter: Post Timepoint (hr) Value: None
  misc_feature: MA Experiment 20001560 PARAMETER Experiment Name: At_Drought_Soil_Dry_P Parameter: Post-Treatment Value: None
  misc_feature: MA Experiment 20001560 PARAMETER Experiment Name: At_Drought_Soil_Dry_P Parameter: Timepoint (day) Value: 14
  misc_feature: MA Experiment 20001560 PARAMETER Experiment Name: At_Drought_Soil_Dry_P Parameter: Treatment Value: Drought vs. No Drought

SEQ ID NO: 94876 - protein, 363 aa, Arabidopsis thaliana; identical to SEQ ID NO: 88973
  peptide (1)..(363): Ceres Seq. ID no. 12726506
  misc_feature (1)..(358): Pfam Name: Sugar (and other) transporter Pfam Description: Sugar (and other) transporter
  misc_feature (1)..(363): Homolog of NCBI NO: 30699453 NR Description: hexose transporter, putative [Arabidopsis >gi|30699455|ref|NP_178100.3| hexose transporter, putative
  misc_feature (1)..(363): Homolog of NCBI NO: 25308946 NR Description: probable sugar transporter, 77409-81599 - Arabidopsis thaliana >gi|12324590|gb|AAG52251.1|AC011717_19
  misc_feature (1)..(363): Homolog of NCBI NO: 7715596 NR Description: F20B17.24 [Arabidopsis thaliana]
  misc_feature (1)..(363): Homolog of NCBI NO: 19347894 NR Description: putative hexose transporter protein [Arabidopsis
  misc_feature (1)..(164): Homolog of NCBI NO: 30793849 NR Description: putative hexose transporter protein [Arabidopsis >gi|30794114|gb|AAP40499.1| putative hexose transporter protein
  misc_feature (1)..(359): Homolog of NCBI NO: 27261731 NR Description: sugar transporter [Citrus unshiu]
  misc_feature (1)..(360): Homolog of NCBI NO: 15220399 NR Description: integral membrane protein, putative; protein id:
  misc_feature (1)..(358): Homolog of NCBI NO: 8347246 NR Description: hexose transporter [Solanum tuberosum]
  misc_feature (1)..(358): Homolog of NCBI NO: 9858106 NR Description: putative glucose translocator [Mesembryanthemum
  misc_feature (1)..(360): Homolog of NCBI NO: 18417892 NR Description: sugar transporter-like protein; protein id: supported by cDNA: gi_16648752, supported by cDNA: gi_20259505 thaliana] >gi|16648753|gb|AAL25568.1| AT5g16150/T21H19_70

SEQ ID NO: 94877 - protein, 349 aa, Arabidopsis thaliana; identical to SEQ ID NO: 88974
  peptide (1)..(349): Ceres Seq. ID no. 12726507
  misc_feature (1)..(344): Pfam Name: Sugar (and other) transporter Pfam Description: Sugar (and other) transporter
  misc_feature (1)..(349): Homolog of NCBI NO: 30699453 NR Description: hexose transporter, putative [Arabidopsis >gi|30699455|ref|NP_178100.3| hexose transporter, putative
  misc_feature (1)..(349): Homolog of NCBI NO: 25308946 NR Description: probable sugar transporter, 77409-81599 - Arabidopsis thaliana >gi|12324590|gb|AAG52251.1|AC011717_19
  misc_feature (1)..(349): Homolog of NCBI NO: 7715596 NR Description: F20B17.24 [Arabidopsis thaliana]
  misc_feature (1)..(349): Homolog of NCBI NO: 19347894 NR Description: putative hexose transporter protein [Arabidopsis
  misc_feature (1)..(150): Homolog of NCBI NO: 30793849 NR Description: putative hexose transporter protein [Arabidopsis >gi|30794114|gb|AAP40499.1| putative hexose transporter protein
  misc_feature (1)..(345): Homolog of NCBI NO: 27261731 NR Description: sugar transporter [Citrus unshiu]
  misc_feature (1)..(346): Homolog of NCBI NO: 15220399 NR Description: integral membrane protein, putative; protein id:
  misc_feature (1)..(344): Homolog of NCBI NO: 8347246 NR Description: hexose transporter [Solanum tuberosum]
  misc_feature (1)..(344): Homolog of NCBI NO: 9858106 NR Description: putative glucose translocator [Mesembryanthemum
  misc_feature (1)..(346): Homolog of NCBI NO: 18417892 NR Description: sugar transporter-like protein; protein id: supported by cDNA: gi_16648752, supported by cDNA: gi_20259505 thaliana] >gi|16648753|gb|AAL25568.1| AT5g16150/T21H19_70

SEQ ID NO: 94878 - protein, 347 aa, Arabidopsis thaliana; identical to SEQ ID NO: 91122
  peptide (1)..(347): Ceres Seq. ID no. 12726508
  misc_feature (1)..(342): Pfam Name: Sugar (and other) transporter Pfam Description: Sugar (and other) transporter
  misc_feature (1)..(347): Homolog of NCBI NO: 30699453 NR Description: hexose transporter, putative [Arabidopsis >gi|30699455|ref|NP_178100.3| hexose transporter, putative
  misc_feature (1)..(347): Homolog of NCBI NO: 25308946 NR Description: probable sugar transporter, 77409-81599 - Arabidopsis thaliana >gi|12324590|gb|AAG52251.1|AC011717_19
  misc_feature (1)..(347): Homolog of NCBI NO: 7715596 NR Description: F20B17.24 [Arabidopsis thaliana]
  misc_feature (1)..(347): Homolog of NCBI NO: 19347894 NR Description: putative hexose transporter protein [Arabidopsis
  misc_feature (1)..(148): Homolog of NCBI NO: 30793849 NR Description: putative hexose transporter protein [Arabidopsis >gi|30794114|gb|AAP40499.1| putative hexose transporter protein
  misc_feature (1)..(343): Homolog of NCBI NO: 27261731 NR Description: sugar transporter [Citrus unshiu]
  misc_feature (1)..(344): Homolog of NCBI NO: 15220399 NR Description: integral membrane protein, putative; protein id:
  misc_feature (1)..(342): Homolog of NCBI NO: 8347246 NR Description: hexose transporter [Solanum tuberosum]
  misc_feature (1)..(342): Homolog of NCBI NO: 9858106 NR Description: putative glucose translocator [Mesembryanthemum
  misc_feature (1)..(344): Homolog of NCBI NO: 18417892 NR Description: sugar transporter-like protein; protein id: supported by cDNA: gi_16648752, supported by cDNA: gi_20259505 thaliana] >gi|16648753|gb|AAL25568.1| AT5g16150/T21H19_70

SEQ ID NO: 94879 - DNA, 1920 bp, Arabidopsis thaliana; identical to SEQ ID NO: 91123
  misc_feature (1)..(1920): Ceres Seq. ID no. 12726542
  misc_feature: MA Experiment ID: 20000438 Result: Up-regulated in Transcription
  misc_feature: MA Experiment 20000438 PARAMETER Experiment Name: At_Shoots__P Parameter: Age (day) Value: 14
  misc_feature: MA Experiment 20000438 PARAMETER Experiment Name: At_Shoots__P Parameter: Tissue Value: Shoots vs. Whole Plant
  misc_feature: MA Experiment ID: 20000527 Result: Up-regulated in Transcription
  misc_feature: MA Experiment 20000527 PARAMETER Experiment Name: At_10percent_PEG_P Parameter: Age (day) Value: 20
  misc_feature: MA Experiment 20000527 PARAMETER Experiment Name: At_10percent_PEG_P Parameter: Organism Value: A. thaliana
  misc_feature: MA Experiment 20000527 PARAMETER Experiment Name: At_10percent_PEG_P Parameter: Plant Line Value: WS
  misc_feature: MA Experiment 20000527 PARAMETER Experiment Name: At_10percent_PEG_P Parameter: Timepoint (day) Value: 20
  misc_feature: MA Experiment 20000527 PARAMETER Experiment Name: At_10percent_PEG_P Parameter: Tissue Value: Whole Plant
  misc_feature: MA Experiment 20000527 PARAMETER Experiment Name: At_10percent_PEG_P Parameter: Treatment Value: 10percent PEG vs. No Treatment
  misc_feature: MA Experiment ID: 20001248 Result: Down-regulated in Transcription
  misc_feature: MA Experiment 20001248 PARAMETER Experiment Name: At_Far-red-induction_P Parameter: Age (day) Value: 7
  misc_feature: MA Experiment 20001248 PARAMETER Experiment Name: At_Far-red-induction_P Parameter: Light Value: Far-red vs. White
  misc_feature: MA Experiment 20001248 PARAMETER Experiment Name: At_Far-red-induction_P Parameter: Organism Value: A. thaliana
  misc_feature: MA Experiment 20001248 PARAMETER Experiment Name: At_Far-red-induction_P Parameter: Plant Line Value: Columbia
  misc_feature: MA Experiment 20001248 PARAMETER Experiment Name: At_Far-red-induction_P Parameter: Timepoint (hr) Value: 4
  misc_feature: MA Experiment 20001248 PARAMETER Experiment Name: At_Far-red-induction_P Parameter: Tissue Value: Whole Plant

SEQ ID NO: 94880 - protein, 525 aa, Arabidopsis thaliana; identical to SEQ ID NO: 91124
  peptide (1)..(525): Ceres Seq. ID no. 12726543
  misc_feature (331)..(453): Pfam Name: DnaJ C terminal region Pfam Description: DnaJ C terminal region
  misc_feature (26)..(525): Homolog of NCBI NO: 18412605 NR Description: DnaJ protein, putative; protein id: At1g80030.1,
  misc_feature (26)..(525): Homolog of NCBI NO: 14326568 NR Description: At1g80030/F18B13_37 [Arabidopsis thaliana]
  misc_feature (26)..(511): Homolog of NCBI NO: 25296044 NR Description: hypothetical protein F18B13.12 [imported] - thaliana >gi|5902381|gb|AAD55483.1|AC009322_23 Similar to DNAJ
  misc_feature (52)..(525): Homolog of NCBI NO: 7441921 NR Description: heat shock protein dnaJ - garden pea
  misc_feature (32)..(454): Homolog of NCBI NO: 16326131 NR Description: DNAJ homologue [Oryza sativa]
  misc_feature (90)..(465): Homolog of NCBI NO: 9294487 NR Description: DnaJ homolog [Arabidopsis thaliana]
  misc_feature (90)..(496): Homolog of NCBI NO: 15229531 NR Description: DnaJ, putative; protein id: At3g17830.1
  misc_feature (99)..(462): Homolog of NCBI NO: 16332061 NR Description: DnaJ protein [Synechocystis sp. PCC 6803]
  misc_feature (96)..(456): Homolog of NCBI NO: 22298332 NR Description: heat shock protein [Thermosynechococcus elongatus >gi|22294511|dbj|BAC08341.1| heat shock protein
  misc_feature (52)..(466): Homolog of NCBI NO: 18399949 NR Description: putative DnaJ protein; protein id: At2g22360.1, by cDNA: 10312. [Arabidopsis thaliana]

SEQ ID NO: 94881 - protein, 500 aa, Arabidopsis thaliana; identical to SEQ ID NO: 91125
  peptide (1)..(500): Ceres Seq. ID no. 12726544
  misc_feature (306)..(428): Pfam Name: DnaJ C terminal region Pfam Description: DnaJ C terminal region
  misc_feature (1)..(500): Homolog of NCBI NO: 18412605 NR Description: DnaJ protein, putative; protein id: At1g80030.1,
  misc_feature (1)..(500): Homolog of NCBI NO: 14326568 NR Description: At1g80030/F18B13_37 [Arabidopsis thaliana]
  misc_feature (1)..(486): Homolog of NCBI NO: 25296044 NR Description: hypothetical protein F18B13.12 [imported] - thaliana >gi|5902381|gb|AAD55483.1|AC009322_23 Similar to DNAJ
  misc_feature (27)..(500): Homolog of NCBI NO: 7441921 NR Description: heat shock protein dnaJ - garden pea
  misc_feature (7)..(429): Homolog of NCBI NO: 16326131 NR Description: DNAJ homologue [Oryza sativa]
  misc_feature (65)..(440): Homolog of NCBI NO: 9294487 NR Description: DnaJ homolog [Arabidopsis thaliana]
  misc_feature (65)..(471): Homolog of NCBI NO: 15229531 NR Description: DnaJ, putative; protein id: At3g17830.1
  misc_feature (74)..(437): Homolog of NCBI NO: 16332061 NR Description: DnaJ protein [Synechocystis sp. PCC 6803]
  misc_feature (71)..(431): Homolog of NCBI NO: 22298332 NR Description: heat shock protein [Thermosynechococcus elongatus >gi|22294511|dbj|BAC08341.1| heat shock protein
  misc_feature (27)..(441): Homolog of NCBI NO: 18399949 NR Description: putative DnaJ protein; protein id: At2g22360.1, by cDNA: 10312. [Arabidopsis thaliana]

SEQ ID NO: 94882 - protein, 331 aa, Arabidopsis thaliana; identical to SEQ ID NO: 91126
  peptide (1)..(331): Ceres Seq. ID no. 12726545
  misc_feature (137)..(259): Pfam Name: DnaJ C terminal region Pfam Description: DnaJ C terminal region
  misc_feature (1)..(331): Homolog of NCBI NO: 18412605 NR Description: DnaJ protein, putative; protein id: At1g80030.1,
  misc_feature (1)..(331): Homolog of NCBI NO: 14326568 NR Description: At1g80030/F18B13_37 [Arabidopsis thaliana]
  misc_feature (1)..(317): Homolog of NCBI NO: 25296044 NR Description: hypothetical protein F18B13.12 [imported] - thaliana >gi|5902381|gb|AAD55483.1|AC009322_23 Similar to DNAJ
  misc_feature (1)..(331): Homolog of NCBI NO: 7441921 NR Description: heat shock protein dnaJ - garden pea
  misc_feature (1)..(260): Homolog of NCBI NO: 16326131 NR Description: DNAJ homologue [Oryza sativa]
  misc_feature (1)..(271): Homolog of NCBI NO: 9294487 NR Description: DnaJ homolog [Arabidopsis thaliana]
  misc_feature (1)..(302): Homolog of NCBI NO: 15229531 NR Description: DnaJ, putative; protein id: At3g17830.1
  misc_feature (1)..(268): Homolog of NCBI NO: 16332061 NR Description: DnaJ protein [Synechocystis sp. PCC 6803]
  misc_feature (1)..(262): Homolog of NCBI NO: 22298332 NR Description: heat shock protein [Thermosynechococcus elongatus >gi|22294511|dbj|BAC08341.1| heat shock protein
  misc_feature (1)..(272): Homolog of NCBI NO: 18399949 NR Description: putative DnaJ protein; protein id: At2g22360.1, by cDNA: 10312. [Arabidopsis thaliana]

SEQ ID NO: 94883 - DNA, 1113 bp, Arabidopsis thaliana; identical to SEQ ID NO: 91127
  misc_feature (1)..(1113): Ceres Seq. ID no. 12726564
  misc_feature: MA Experiment ID: 20000314 Result: Up-regulated in Transcription
  misc_feature: MA Experiment 20000314 PARAMETER Experiment Name: At_14day_Shoots-Roots_Sub_P Parameter: Age (day) Value: 14
  misc_feature: MA Experiment 20000314 PARAMETER Experiment Name: At_14day_Shoots-Roots_Sub_P Parameter: Organism Value: A. thaliana
  misc_feature: MA Experiment 20000314 PARAMETER Experiment Name: At_14day_Shoots-Roots_Sub_P Parameter: Plant Line Value: WS
  misc_feature: MA Experiment 20000314 PARAMETER Experiment Name: At_14day_Shoots-Roots_Sub_P Parameter: Tissue Value: Roots vs. Whole Plant
  misc_feature: MA Experiment ID: 20000315 Result: Up-regulated in Transcription
  misc_feature: MA Experiment 20000315 PARAMETER Experiment Name: At_14day_Shoots-Roots_Sub_P Parameter: Age (day) Value: 14
  misc_feature: MA Experiment 20000315 PARAMETER Experiment Name: At_14day_Shoots-Roots_Sub_P Parameter: Organism Value: A. thaliana
  misc_feature: MA Experiment 20000315 PARAMETER Experiment Name: At_14day_Shoots-Roots_Sub_P Parameter: Plant Line Value: WS
  misc_feature: MA Experiment 20000315 PARAMETER Experiment Name: At_14day_Shoots-Roots_Sub_P Parameter: Tissue Value: Shoots vs. Whole Plant

SEQ ID NO: 94884 - protein, 370 aa, Arabidopsis thaliana; identical to SEQ ID NO: 91128
  peptide (1)..(370): Ceres Seq. ID no. 12726565
  misc_feature (44)..(366): Pfam Name: Protein of unknown function, DUF642 Pfam Description: Protein of unknown function, DUF642
  misc_feature (1)..(370): Homolog of NCBI NO: 15220093 NR Description: hypothetical protein; protein id: At1g80240.1
  misc_feature (8)..(367): Homolog of NCBI NO: 7488898 NR Description: hypothetical protein - castor bean
  misc_feature (12)..(367): Homolog of NCBI NO: 15239438 NR Description: putative protein; protein id: At5g25460.1, by cDNA: 1351., supported by cDNA: gi_14423449, supported by gi_15809821 [Arabidopsis thaliana]
  misc_feature (12)..(367): Homolog of NCBI NO: 21537379 NR Description: unknown [Arabidopsis thaliana]
  misc_feature (12)..(367): Homolog of NCBI NO: 15809822 NR Description: AT5g25460/F18G18_200 [Arabidopsis thaliana]
  misc_feature (10)..(367): Homolog of NCBI NO: 15239049 NR Description: putative protein; protein id: At5g11420.1, by cDNA: 25522., supported by cDNA: gi_15028264, supported by
  misc_feature (10)..(367): Homolog of NCBI NO: 21554402 NR Description: unknown [Arabidopsis thaliana]
  misc_feature (10)..(367): Homolog of NCBI NO: 23397043 NR Description: unknown protein [Arabidopsis thaliana]
  misc_feature (8)..(367): Homolog of NCBI NO: 7488741 NR Description: hypothetical protein precursor - alfalfa
  misc_feature (9)..(364): Homolog of NCBI NO: 18418018 NR Description: putative protein; protein id: At4g32460.1, by cDNA: 37529. [Arabidopsis thaliana]

SEQ ID NO: 94885 - protein, 369 aa, Arabidopsis thaliana; identical to SEQ ID NO: 91129
  peptide (1)..(369): Ceres Seq. ID no. 12726566
  misc_feature (43)..(365): Pfam Name: Protein of unknown function, DUF642 Pfam Description: Protein of unknown function, DUF642
  misc_feature (1)..(369): Homolog of NCBI NO: 15220093 NR Description: hypothetical protein; protein id: At1g80240.1
  misc_feature (7)..(366): Homolog of NCBI NO: 7488898 NR Description: hypothetical protein - castor bean
  misc_feature (11)..(366): Homolog of NCBI NO: 15239438 NR Description: putative protein; protein id: At5g25460.1, by cDNA: 1351., supported by cDNA: gi_14423449, supported by gi_15809821 [Arabidopsis thaliana]
  misc_feature (11)..(366): Homolog of NCBI NO: 21537379 NR Description: unknown [Arabidopsis thaliana]
  misc_feature (11)..(366): Homolog of NCBI NO: 15809822 NR Description: AT5g25460/F18G18_200 [Arabidopsis thaliana]
  misc_feature (9)..(366): Homolog of NCBI NO: 15239049 NR Description: putative protein; protein id: At5g11420.1, by cDNA: 25522., supported by cDNA: gi_15028264, supported by
  misc_feature (9)..(366): Homolog of NCBI NO: 21554402 NR Description: unknown [Arabidopsis thaliana]
  misc_feature (9)..(366): Homolog of NCBI NO: 23397043 NR Description: unknown protein [Arabidopsis thaliana]
  misc_feature (7)..(366): Homolog of NCBI NO: 7488741 NR Description: hypothetical protein precursor - alfalfa
  misc_feature (8)..(363): Homolog of NCBI NO: 18418018 NR Description: putative protein; protein id: At4g32460.1, by cDNA: 37529. [Arabidopsis thaliana]

SEQ ID NO: 94886 - protein, 327 aa, Arabidopsis thaliana; identical to SEQ ID NO: 91130
  peptide (1)..(327): Ceres Seq. ID no. 12726567
  misc_feature (1)..(323): Pfam Name: Protein of unknown function, DUF642 Pfam Description: Protein of unknown function, DUF642
  misc_feature (1)..(327): Homolog of NCBI NO: 15220093 NR Description: hypothetical protein; protein id: At1g80240.1
  misc_feature (1)..(324): Homolog of NCBI NO: 7488898 NR Description: hypothetical protein - castor bean
  misc_feature (1)..(324): Homolog of NCBI NO: 15239438 NR Description: putative protein; protein id: At5g25460.1, by cDNA: 1351., supported by cDNA: gi_14423449, supported by gi_15809821 [Arabidopsis thaliana]
  misc_feature (1)..(324): Homolog of NCBI NO: 21537379 NR Description: unknown [Arabidopsis thaliana]
  misc_feature (1)..(324): Homolog of NCBI NO: 15809822 NR Description: AT5g25460/F18G18_200 [Arabidopsis thaliana]
  misc_feature (1)..(324): Homolog of NCBI NO: 15239049 NR Description: putative protein; protein id: At5g11420.1, by cDNA: 25522., supported by cDNA: gi_15028264, supported by
  misc_feature (1)..(324): Homolog of NCBI NO: 21554402 NR Description: unknown [Arabidopsis thaliana]
  misc_feature (1)..(324): Homolog of NCBI NO: 23397043 NR Description: unknown protein [Arabidopsis thaliana]
  misc_feature (1)..(324): Homolog of NCBI NO: 7488741 NR Description: hypothetical protein precursor - alfalfa
  misc_feature (1)..(321): Homolog of NCBI NO: 18418018 NR Description: putative protein; protein id: At4g32460.1, by cDNA: 37529. [Arabidopsis thaliana]

SEQ ID NO: 94887 - DNA, 1068 bp, Arabidopsis thaliana; identical to SEQ ID NO: 91131
  misc_feature (1)..(1068): Ceres Seq. ID no. 12726580
  misc_feature: MA Experiment ID: 20000235 Result: Up-regulated in Transcription
  misc_feature: MA Experiment 20000235 PARAMETER Experiment Name: At_Siliques_P Parameter: Age (day) Value: 21
  misc_feature: MA Experiment 20000235 PARAMETER Experiment Name: At_Siliques_P Parameter: Organism Value: A. thaliana
  misc_feature: MA Experiment 20000235 PARAMETER Experiment Name: At_Siliques_P Parameter: Plant Line Value: WS
  misc_feature: MA Experiment 20000235 PARAMETER Experiment Name: At_Siliques_P Parameter: Tissue Value: 5-10mm Siliques vs. Whole Plant

SEQ ID NO: 94888 - protein, 355 aa, Arabidopsis thaliana; identical to SEQ ID NO: 91132
  peptide (1)..(355): Ceres Seq. ID no. 12726581
  misc_feature (203)..(303): Pfam Name: 2OG-Fe(II) oxygenase superfamily Pfam Description: 2OG-Fe(II) oxygenase superfamily
  misc_feature (1)..(355): Homolog of NCBI NO: 15220116 NR Description: putative gibberellin 3 beta-hydroxylase; protein At1g80330.1 [Arabidopsis thaliana] >gi|25285691|pir||H96834
  misc_feature (10)..(349): Homolog of NCBI NO: 15218223 NR Description: gibberellin 3 beta-hydroxylase, putative; protein
  misc_feature (8)..(349): Homolog of NCBI NO: 11255836 NR Description: gibberellin 3 beta-hydroxylase [imported] -
  misc_feature (12)..(355): Homolog of NCBI NO: 3834350 NR Description: 3b-hydroxylase [Lycopersicon esculentum]
  misc_feature (8)..(349): Homolog of NCBI NO: 15220117 NR Description: gibberellin 3 beta-hydroxylase; protein id: supported by cDNA: gi_3982752 [Arabidopsis thaliana]
  misc_feature (12)..(353): Homolog of NCBI NO: 6691485 NR Description: gibberellin 3beta-hydroxylase [Nicotiana tabacum]
  misc_feature (12)..(353): Homolog of NCBI NO: 20149245 NR Description: gibberellin 3-oxidase 2 [Nicotiana sylvestris]
  misc_feature (12)..(355): Homolog of NCBI NO: 15418964 NR Description: gibberellin 3-beta-hydroxylase 1 [Solanum
  misc_feature (12)..(353): Homolog of NCBI NO: 20149243 NR Description: gibberellin 3-oxidase 1 [Nicotiana sylvestris]
  misc_feature (1)..(353): Homolog of NCBI NO: 15418962 NR Description: gibberellin 3-beta-hydroxylase 2 [Solanum

SEQ ID NO: 94889 - protein, 258 aa, Arabidopsis thaliana; identical to SEQ ID NO: 91133
  peptide (1)..(258): Ceres Seq. ID no. 12726582
  misc_feature (106)..(206): Pfam Name: 2OG-Fe(II) oxygenase superfamily Pfam Description: 2OG-Fe(II) oxygenase superfamily
  misc_feature (1)..(258): Homolog of NCBI NO: 15220116 NR Description: putative gibberellin 3 beta-hydroxylase; protein At1g80330.1 [Arabidopsis thaliana] >gi|25285691|pir||H96834
  misc_feature (1)..(252): Homolog of NCBI NO: 15218223 NR Description: gibberellin 3 beta-hydroxylase, putative; protein
  misc_feature (1)..(252): Homolog of NCBI NO: 11255836 NR Description: gibberellin 3 beta-hydroxylase [imported] -
  misc_feature (1)..(258): Homolog of NCBI NO: 3834350 NR Description: 3b-hydroxylase [Lycopersicon esculentum]
  misc_feature (1)..(252): Homolog of NCBI NO: 15220117 NR Description: gibberellin 3 beta-hydroxylase; protein id: supported by cDNA: gi_3982752 [Arabidopsis thaliana]
  misc_feature (1)..(256): Homolog of NCBI NO: 6691485 NR Description: gibberellin 3beta-hydroxylase [Nicotiana tabacum]
  misc_feature (1)..(256): Homolog of NCBI NO: 20149245 NR Description: gibberellin 3-oxidase 2 [Nicotiana sylvestris]
  misc_feature (1)..(258): Homolog of NCBI NO: 15418964 NR Description: gibberellin 3-beta-hydroxylase 1 [Solanum
  misc_feature (1)..(256): Homolog of NCBI NO: 20149243 NR Description: gibberellin 3-oxidase 1 [Nicotiana sylvestris]
  misc_feature (1)..(256): Homolog of NCBI NO: 15418962 NR Description: gibberellin 3-beta-hydroxylase 2 [Solanum

SEQ ID NO: 94890 - protein, 227 aa, Arabidopsis thaliana; identical to SEQ ID NO: 91134
  peptide (1)..(227): Ceres Seq. ID no. 12726583
  misc_feature (75)..(175): Pfam Name: 2OG-Fe(II) oxygenase superfamily Pfam Description: 2OG-Fe(II) oxygenase superfamily
  misc_feature (1)..(227): Homolog of NCBI NO: 15220116 NR Description: putative gibberellin 3 beta-hydroxylase; protein At1g80330.1 [Arabidopsis thaliana] >gi|25285691|pir||H96834
  misc_feature (1)..(221): Homolog of NCBI NO: 15218223 NR Description: gibberellin 3 beta-hydroxylase, putative; protein
  misc_feature (1)..(221): Homolog of NCBI NO: 11255836 NR Description: gibberellin 3 beta-hydroxylase [imported] -
  misc_feature (1)..(227): Homolog of NCBI NO: 3834350 NR Description: 3b-hydroxylase [Lycopersicon esculentum]
  misc_feature (1)..(221): Homolog of NCBI NO: 15220117 NR Description: gibberellin 3 beta-hydroxylase; protein id: supported by cDNA: gi_3982752 [Arabidopsis thaliana]
  misc_feature (1)..(225): Homolog of NCBI NO: 6691485 NR Description: gibberellin 3beta-hydroxylase [Nicotiana tabacum]
  misc_feature (1)..(225): Homolog of NCBI NO: 20149245 NR Description: gibberellin 3-oxidase 2 [Nicotiana sylvestris]
  misc_feature (1)..(227): Homolog of NCBI NO: 15418964 NR Description: gibberellin 3-beta-hydroxylase 1 [Solanum
  misc_feature (1)..(225): Homolog of NCBI NO: 20149243 NR Description: gibberellin 3-oxidase 1 [Nicotiana sylvestris]
  misc_feature (1)..(225): Homolog of NCBI NO: 15418962 NR Description: gibberellin 3-beta-hydroxylase 2 [Solanum

SEQ ID NO: 94891 - DNA, 1083 bp, Arabidopsis thaliana; identical to SEQ ID NO: 91135
  misc_feature (1)..(1083): Ceres Seq. ID no. 12726584
  misc_feature: MA Experiment ID: 20000439 Result: Up-regulated in Transcription
  misc_feature: MA Experiment 20000439 PARAMETER Experiment Name: At_Roots__P Parameter: Age (day) Value: 14 vs. 21
  misc_feature: MA Experiment 20000439 PARAMETER Experiment Name: At_Roots__P Parameter: Organism Value: A. thaliana
  misc_feature: MA Experiment 20000439 PARAMETER Experiment Name: At_Roots__P Parameter: Tissue Value: Roots vs. Whole Plant

SEQ ID NO: 94892 - protein, 347 aa, Arabidopsis thaliana; identical to SEQ ID NO: 91136
  peptide (1)..(347): Ceres Seq. ID no. 12726585
  misc_feature (201)..(301): Pfam Name: 2OG-Fe(II) oxygenase superfamily Pfam Description: 2OG-Fe(II) oxygenase superfamily
  misc_feature (1)..(347): Homolog of NCBI NO: 15220117 NR Description: gibberellin 3 beta-hydroxylase; protein id: supported by cDNA: gi_3982752 [Arabidopsis thaliana]
  misc_feature (1)..(347): Homolog of NCBI NO: 11255836 NR Description: gibberellin 3 beta-hydroxylase [imported] -
  misc_feature (1)..(347): Homolog of NCBI NO: 15218223 NR Description: gibberellin 3 beta-hydroxylase, putative; protein
  misc_feature (1)..(346): Homolog of NCBI NO: 4164145 NR Description: gibberelin 3beta-hydroxylase [Lactuca sativa]
  misc_feature (1)..(346): Homolog of NCBI NO: 6691485 NR Description: gibberellin 3beta-hydroxylase [Nicotiana tabacum]
  misc_feature (1)..(346): Homolog of NCBI NO: 20149245 NR Description: gibberellin 3-oxidase 2 [Nicotiana sylvestris]
  misc_feature (4)..(346): Homolog of NCBI NO: 2314805 NR Description: 2-oxoglutarate-dependent dioxygenase [Pisum
  misc_feature (4)..(346): Homolog of NCBI NO: 7433212 NR Description: gibberellin 3 beta-hydroxylase (EC 1.4.99.-)
  misc_feature (4)..(346): Homolog of NCBI NO: 2291080 NR Description: defective gibberellin 3B-hydroxylase [Pisum
  misc_feature (4)..(346): Homolog of NCBI NO: 7433213 NR Description: gibberellin 3 beta-hydroxylase (EC 1.4.99.-)

SEQ ID NO: 94893 - protein, 218 aa, Arabidopsis thaliana; identical to SEQ ID NO: 91137
  peptide (1)..(218): Ceres Seq. ID no. 12726586
  misc_feature (72)..(172): Pfam Name: 2OG-Fe(II) oxygenase superfamily Pfam Description: 2OG-Fe(II) oxygenase superfamily
  misc_feature (1)..(218): Homolog of NCBI NO: 15220117 NR Description: gibberellin 3 beta-hydroxylase; protein id: supported by cDNA: gi_3982752 [Arabidopsis thaliana]
  misc_feature (1)..(218): Homolog of NCBI NO: 11255836 NR Description: gibberellin 3 beta-hydroxylase [imported] -
  misc_feature (1)..(218): Homolog of NCBI NO: 15218223 NR Description: gibberellin 3 beta-hydroxylase, putative; protein
  misc_feature (1)..(217): Homolog of NCBI NO: 4164145 NR Description: gibberelin 3beta-hydroxylase [Lactuca sativa]
  misc_feature (1)..(217): Homolog of NCBI NO: 6691485 NR Description: gibberellin 3beta-hydroxylase [Nicotiana tabacum]
  misc_feature (1)..(217): Homolog of NCBI NO: 20149245 NR Description: gibberellin 3-oxidase 2 [Nicotiana sylvestris]
  misc_feature (1)..(217): Homolog of NCBI NO: 2314805 NR Description: 2-oxoglutarate-dependent dioxygenase [Pisum
  misc_feature (1)..(217): Homolog of NCBI NO: 7433212 NR Description: gibberellin 3 beta-hydroxylase (EC 1.4.99.-)
  misc_feature (1)..(217): Homolog of NCBI NO: 2291080 NR Description: defective gibberellin 3B-hydroxylase [Pisum
  misc_feature (1)..(217): Homolog of NCBI NO: 7433213 NR Description: gibberellin 3 beta-hydroxylase (EC 1.4.99.-)

SEQ ID NO: 94894 - protein, 181 aa, Arabidopsis thaliana; identical to SEQ ID NO: 91138
  peptide (1)..(181): Ceres Seq. ID no. 12726587
  misc_feature (35)..(135): Pfam Name: 2OG-Fe(II) oxygenase superfamily Pfam Description: 2OG-Fe(II) oxygenase superfamily
  misc_feature (1)..(181): Homolog of NCBI NO: 15220117 NR Description: gibberellin 3 beta-hydroxylase; protein id: supported by cDNA: gi_3982752 [Arabidopsis thaliana]
  misc_feature (1)..(181): Homolog of NCBI NO: 11255836 NR Description: gibberellin 3 beta-hydroxylase [imported] -
  misc_feature (1)..(181): Homolog of NCBI NO: 15218223 NR Description: gibberellin 3 beta-hydroxylase, putative; protein
  misc_feature (1)..(180): Homolog of NCBI NO: 4164145 NR Description: gibberelin 3beta-hydroxylase [Lactuca sativa]
  misc_feature (1)..(180): Homolog of NCBI NO: 6691485 NR Description: gibberellin 3beta-hydroxylase [Nicotiana tabacum]
  misc_feature (1)..(180): Homolog of NCBI NO: 20149245 NR Description: gibberellin 3-oxidase 2 [Nicotiana sylvestris]
  misc_feature (1)..(180): Homolog of NCBI NO: 2314805 NR Description: 2-oxoglutarate-dependent dioxygenase [Pisum
  misc_feature (1)..(180): Homolog of NCBI NO: 7433212 NR Description: gibberellin 3 beta-hydroxylase (EC 1.4.99.-)
  misc_feature (1)..(180): Homolog of NCBI NO: 2291080 NR Description: defective gibberellin 3B-hydroxylase [Pisum
  misc_feature (1)..(180): Homolog of NCBI NO: 7433213 NR Description: gibberellin 3 beta-hydroxylase (EC 1.4.99.-)

SEQ ID NO: 94895 - DNA, 1885 bp, Arabidopsis thaliana; identical to SEQ ID NO: 91139
  misc_feature (1)..(1885): Ceres Seq. ID no. 12726588
  misc_feature: MA Experiment ID: 20000286 Result: Up-regulated in Transcription
  misc_feature: MA Experiment 20000286 PARAMETER Experiment Name: At_Open_Flower_P Parameter: Age (day) Value: 21
  misc_feature: MA Experiment 20000286 PARAMETER Experiment Name: At_Open_Flower_P Parameter: Plant Line Value: WS
  misc_feature: MA Experiment 20000286 PARAMETER Experiment Name: At_Open_Flower_P Parameter: Tissue Value: Half Open vs. Whole Plant

SEQ ID NO: 94896 - protein, 523 aa, Arabidopsis thaliana; identical to SEQ ID NO: 91140
  peptide (1)..(523): Ceres Seq. ID no. 12726589
  misc_feature (274)..(465): Pfam Name: ATPase family associated with various cellular Pfam Description: ATPase family associated with various cellular
  misc_feature (1)..(523): Homolog of NCBI NO: 15220118 NR Description: CAD ATPase (AAA1); protein id: At1g80350.1, by cDNA: gi_13958984, supported by cDNA: gi_16649098, supported cDNA: gi_19909895, supported by cDNA: gi_6648605 [Arabidopsis
  misc_feature (1)..(523): Homolog of NCBI NO: 19909896 NR Description: katanin [Arabidopsis thaliana]
  misc_feature (1)..(523): Homolog of NCBI NO: 32478841 NR Description: katanin [Gossypium hirsutum]
  misc_feature (1)..(523): Homolog of NCBI NO: 34421682 NR Description: katanin-like protein [Gossypium hirsutum]
  misc_feature (1)..(523): Homolog of NCBI NO: 32478843 NR Description: katanin [Gossypium barbadense]
  misc_feature (6)..(523): Homolog of NCBI NO: 34911210 NR Description: putative CAD ATPase [Oryza sativa (japonica >gi|19386661|dbj|BAB86043.1| putative CAD ATPase [Oryza sativa
  misc_feature (13)..(522): Homolog of NCBI NO: 3098603 NR Description: katanin p60 subunit [Strongylocentrotus
  misc_feature (106)..(521): Homolog of NCBI NO: 5825592 NR Description: katanin p60 [Xenopus laevis]
  misc_feature (7)..(82): Homolog of NCBI NO: 5825592 NR Description: katanin p60 [Xenopus laevis]
  misc_feature (136)..(522): Homolog of NCBI NO: 5901990 NR Description: katanin p60 subunit A 1 [Homo sapiens]

SEQ ID NO: 94897 - protein, 466 aa, Arabidopsis thaliana; identical to SEQ ID NO: 91141
  peptide (1)..(466): Ceres Seq. ID no. 12726590
  misc_feature (217)..(408): Pfam Name: ATPase family associated with various cellular Pfam Description: ATPase family associated with various cellular
  misc_feature (1)..(466): Homolog of NCBI NO: 15220118 NR Description: CAD ATPase (AAA1); protein id: At1g80350.1, by cDNA: gi_13958984, supported by cDNA: gi_16649098, supported cDNA: gi_19909895, supported by cDNA: gi_6648605 [Arabidopsis
  misc_feature (1)..(466): Homolog of NCBI NO: 19909896 NR Description: katanin [Arabidopsis thaliana]
  misc_feature (1)..(466): Homolog of NCBI NO: 32478841 NR Description: katanin [Gossypium hirsutum]
  misc_feature (1)..(466): Homolog of NCBI NO: 34421682 NR Description: katanin-like protein [Gossypium hirsutum]
  misc_feature (1)..(466): Homolog of NCBI NO: 32478843 NR Description: katanin [Gossypium barbadense]
  misc_feature (1)..(466): Homolog of NCBI NO: 34911210 NR Description: putative CAD ATPase [Oryza sativa (japonica >gi|19386661|dbj|BAB86043.1| putative CAD ATPase [Oryza sativa
  misc_feature (1)..(465): Homolog of NCBI NO: 3098603 NR Description: katanin p60 subunit [Strongylocentrotus
  misc_feature (49)..(464): Homolog of NCBI NO: 5825592 NR Description: katanin p60 [Xenopus laevis]
  misc_feature (1)..(25): Homolog of NCBI NO: 5825592 NR Description: katanin p60 [Xenopus laevis]
  misc_feature (79)..(465): Homolog of NCBI NO: 5901990 NR Description: katanin p60 subunit A 1 [Homo sapiens]

SEQ ID NO: 94898 - protein, 459 aa, Arabidopsis thaliana; identical to SEQ ID NO: 91142
  peptide (1)..(459): Ceres Seq. ID no. 12726591
  misc_feature (210)..(401): Pfam Name: ATPase family associated with various cellular Pfam Description: ATPase family associated with various cellular
  misc_feature (1)..(459): Homolog of NCBI NO: 15220118 NR Description: CAD ATPase (AAA1); protein id: At1g80350.1, by cDNA: gi_13958984, supported by cDNA: gi_16649098, supported cDNA: gi_19909895, supported by cDNA: gi_6648605 [Arabidopsis
  misc_feature (1)..(459): Homolog of NCBI NO: 19909896 NR Description: katanin [Arabidopsis thaliana]
  misc_feature (1)..(459): Homolog of NCBI NO: 32478841 NR Description: katanin [Gossypium hirsutum]
  misc_feature (1)..(459): Homolog of NCBI NO: 34421682 NR Description: katanin-like protein [Gossypium hirsutum]
  misc_feature (1)..(459): Homolog of NCBI NO: 32478843 NR Description: katanin [Gossypium barbadense]
  misc_feature (1)..(459): Homolog of NCBI NO: 34911210 NR Description: putative CAD ATPase [Oryza sativa (japonica >gi|19386661|dbj|BAB86043.1| putative CAD ATPase [Oryza sativa
  misc_feature (1)..(458): Homolog of NCBI NO: 3098603 NR Description: katanin p60 subunit [Strongylocentrotus
  misc_feature (42)..(457): Homolog of NCBI NO: 5825592 NR Description: katanin p60 [Xenopus laevis]
  misc_feature (1)..(18): Homolog of NCBI NO: 5825592 NR Description: katanin p60 [Xenopus laevis]
  misc_feature (72)..(458): Homolog of NCBI NO: 5901990 NR Description: katanin p60 subunit A 1 [Homo sapiens]

SEQ ID NO: 94899 - DNA, 1386 bp, Arabidopsis thaliana; identical to SEQ ID NO: 91143
  misc_feature (1)..(1386): Ceres Seq. ID no. 12726592
  misc_feature: MA Experiment ID: 20000307 Result: Up-regulated in Transcription
  misc_feature: MA Experiment 20000307 PARAMETER Experiment Name: At_Germinating_Seeds_Sub_P Parameter: Age (hr) Value: 24 vs. 0
  misc_feature: MA Experiment 20000307 PARAMETER Experiment Name: At_Germinating_Seeds_Sub_P Parameter: Organism Value: A. thaliana
  misc_feature: MA Experiment 20000307 PARAMETER Experiment Name: At_Germinating_Seeds_Sub_P Parameter: Plant Line Value: WS
  misc_feature: MA Experiment 20000307 PARAMETER Experiment Name: At_Germinating_Seeds_Sub_P Parameter: Tissue Value: Germinating Seeds

SEQ ID NO: 94900 - protein, 461 aa, Arabidopsis thaliana; identical to SEQ ID NO: 91144
  peptide (1)..(461): Ceres Seq. ID no. 12726593
  misc_feature (200)..(327): Pfam Name: Cyclin, N-terminal domain Pfam Description: Cyclin, N-terminal domain
  misc_feature (1)..(461): Homolog of NCBI NO: 15220120 NR Description: Cyclin A2;4; protein id: At1g80370.1 [Arabidopsis
  misc_feature (1)..(459): Homolog of NCBI NO: 15218225 NR Description: Cyclin A2;3; protein id: At1g15570.1, supported cDNA: gi_18175784, supported by cDNA: gi_20465756 [Arabidopsis >gi|18175785|gb|AAL59927.1| putative cyclin [Arabidopsis
  misc_feature (1)..(442): Homolog of NCBI NO: 25294181 NR Description: probable cyclin [imported] - Arabidopsis thaliana
  misc_feature (28)..(459): Homolog of NCBI NO: 1076444 NR Description: mitosis-specific cyclin CYC1 - rape
  misc_feature (175)..(459): Homolog of NCBI NO: 5420276 NR Description: cyclin A2 [Lycopersicon esculentum]
  misc_feature (19)..(131): Homolog of NCBI NO: 5420276 NR Description: cyclin A2 [Lycopersicon esculentum]

SEQ ID NO: 94901 - protein, 243 aa, Arabidopsis thaliana; identical to SEQ ID NO: 91145
  peptide (1)..(243): Ceres Seq. ID no. 12726594
  misc_feature (1)..(109): Pfam Name: Cyclin, N-terminal domain Pfam Description: Cyclin, N-terminal domain
  misc_feature (1)..(243): Homolog of NCBI NO: 15220120 NR Description: Cyclin A2;4; protein id: At1g80370.1 [Arabidopsis
  misc_feature (1)..(241): Homolog of NCBI NO: 15218225 NR Description: Cyclin A2;3; protein id: At1g15570.1, supported cDNA: gi_18175784, supported by cDNA: gi_20465756 [Arabidopsis >gi|18175785|gb|AAL59927.1| putative cyclin [Arabidopsis
  misc_feature (1)..(224): Homolog of NCBI NO: 25294181 NR Description: probable cyclin [imported] - Arabidopsis thaliana
  misc_feature (1)..(241): Homolog of NCBI NO: 1076444 NR Description: mitosis-specific cyclin CYC1 - rape
  misc_feature (1)..(241): Homolog of NCBI NO: 5420276 NR Description: cyclin A2 [Lycopersicon esculentum]

SEQ ID NO: 94902 - protein, 232 aa, Arabidopsis thaliana; identical to SEQ ID NO: 91146
  peptide (1)..(232): Ceres Seq. ID no. 12726595
  misc_feature (1)..(98): Pfam Name: Cyclin, N-terminal domain Pfam Description: Cyclin, N-terminal domain
  misc_feature (1)..(232): Homolog of NCBI NO: 15220120 NR Description: Cyclin A2;4; protein id: At1g80370.1 [Arabidopsis
  misc_feature (1)..(230): Homolog of NCBI NO: 15218225 NR Description: Cyclin A2;3; protein id: At1g15570.1, supported cDNA: gi_18175784, supported by cDNA: gi_20465756 [Arabidopsis >gi|18175785|gb|AAL59927.1| putative cyclin [Arabidopsis
  misc_feature (1)..(213): Homolog of NCBI NO: 25294181 NR Description: probable cyclin [imported] - Arabidopsis thaliana
  misc_feature (1)..(230): Homolog of NCBI NO: 1076444 NR Description: mitosis-specific cyclin CYC1 - rape
  misc_feature (1)..(230): Homolog of NCBI NO: 5420276 NR Description: cyclin A2 [Lycopersicon esculentum]

SEQ ID NO: 94903 - DNA, 1945 bp, Arabidopsis thaliana; identical to SEQ ID NO: 91147
  misc_feature (1)..(1945): Ceres Seq. ID no. 12726607
  misc_feature: MA Experiment ID: 20000171 Result: Down-regulated in Transcription
  misc_feature: MA Experiment 20000171 PARAMETER Experiment Name: At_42deg_Heat_P Parameter: Age (day) Value: 14
  misc_feature: MA Experiment 20000171 PARAMETER Experiment Name: At_42deg_Heat_P Parameter: Organism Value: A. thaliana
  misc_feature: MA Experiment 20000171 PARAMETER Experiment Name: At_42deg_Heat_P Parameter: Plant Line Value: WS
  misc_feature: MA Experiment 20000171 PARAMETER Experiment Name: At_42deg_Heat_P Parameter: Temperature (deg C) Value: 42 vs. 22
  misc_feature: MA Experiment 20000171 PARAMETER Experiment Name: At_42deg_Heat_P Parameter: Timepoint (hr) Value: 1
  misc_feature: MA Experiment 20000171 PARAMETER Experiment Name: At_42deg_Heat_P Parameter: Tissue Value: Aerial
  misc_feature: MA Experiment ID: 20000184 Result: Up-regulated in Transcription
  misc_feature: MA Experiment 20000184 PARAMETER Experiment Name: At_Shoots__P Parameter: Age (day) Value: 7
  misc_feature: MA Experiment 20000184 PARAMETER Experiment Name: At_Shoots__P Parameter: Tissue Value: Shoots vs. Whole Plant
  misc_feature: MA Experiment ID: 20000794 Result: Down-regulated in Transcription
  misc_feature: MA Experiment 20000794 PARAMETER Experiment Name: At_Petals_P Parameter: Age (day) Value: 23-25 days
  misc_feature: MA Experiment 20000794 PARAMETER Experiment Name: At_Petals_P Parameter: Plant Line Value: WS
  misc_feature: MA Experiment 20000794 PARAMETER Experiment Name: At_Petals_P Parameter: Tissue Value: Petals vs. Whole plant

SEQ ID NO: 94904 - protein, 489 aa, Arabidopsis thaliana; identical to SEQ ID NO: 91148
  peptide (1)..(489): Ceres Seq. ID no. 12726608
  misc_feature (1)..(489): Homolog of NCBI NO: 18412864 NR Description: expressed protein; protein id: At1g80510.1, by cDNA: gi_16226718 [Arabidopsis thaliana]
  misc_feature (1)..(359): Homolog of NCBI NO: 24461850 NR Description: CTV.3 [Poncirus trifoliata]
  misc_feature (380)..(489): Homolog of NCBI NO: 24461850 NR Description: CTV.3 [Poncirus trifoliata]
  misc_feature (64)..(484): Homolog of NCBI NO: 34898706 NR Description: hypothetical protein [Oryza sativa (japonica group)] >gi|11862972|dbj|BAB19353.1| hypothetical protein [Oryza
  misc_feature (51)..(487): Homolog of NCBI NO: 9758059 NR Description: amino acid transporter-like protein [Arabidopsis
  misc_feature (51)..(487): Homolog of NCBI NO: 15241555 NR Description: transporter -like protein; protein id:
  misc_feature (74)..(488): Homolog of NCBI NO: 18406463 NR Description: expressed protein; protein id: At3g30390.1, by cDNA: gi_15529154, supported by cDNA: gi_16226266 [Arabidopsis >gi|9294342|dbj|BAB02239.1|
  misc_feature (70)..(484): Homolog of NCBI NO: 15228851 NR Description: putative protein; protein id: At3g56200.1, by cDNA: gi_20453044 [Arabidopsis thaliana]
  misc_feature (75)..(446): Homolog of NCBI NO: 34907894 NR Description: P0439E11.11 [Oryza sativa (japonica
  misc_feature (70)..(489): Homolog of NCBI NO: 30688270 NR Description: amino acid transporter family [Arabidopsis

SEQ ID NO: 94905 - protein, 396 aa, Arabidopsis thaliana; identical to SEQ ID NO: 91149
  peptide (1)..(396): Ceres Seq. ID no. 12726609
  misc_feature (1)..(396): Homolog of NCBI NO: 18412864 NR Description: expressed protein; protein id: At1g80510.1, by cDNA: gi_16226718 [Arabidopsis thaliana]
  misc_feature (1)..(266): Homolog of NCBI NO: 24461850 NR Description: CTV.3 [Poncirus trifoliata]
  misc_feature (287)..(396): Homolog of NCBI NO: 24461850 NR Description: CTV.3 [Poncirus trifoliata]
  misc_feature (1)..(391): Homolog of NCBI NO: 34898706 NR Description: hypothetical protein [Oryza sativa (japonica group)] >gi|11862972|dbj|BAB19353.1| hypothetical protein [Oryza
  misc_feature (1)..(394): Homolog of NCBI NO: 9758059 NR Description: amino acid transporter-like protein [Arabidopsis
  misc_feature (1)..(394): Homolog of NCBI NO: 15241555 NR Description: transporter -like protein; protein id:
  misc_feature (1)..(395): Homolog of NCBI NO: 18406463 NR Description: expressed protein; protein id: At3g30390.1, by cDNA: gi_15529154, supported by cDNA: gi_16226266 [Arabidopsis >gi|9294342|dbj|BAB02239.1|
  misc_feature (1)..(391): Homolog of NCBI NO: 15228851 NR Description: putative protein; protein id: At3g56200.1, by cDNA: gi_20453044 [Arabidopsis thaliana]
  misc_feature (1)..(353): Homolog of NCBI NO: 34907894 NR Description: P0439E11.11 [Oryza sativa (japonica
  misc_feature (1)..(396): Homolog of NCBI NO: 30688270 NR Description: amino acid transporter family [Arabidopsis

SEQ ID NO: 94906 - protein, 390 aa, Arabidopsis thaliana; identical to SEQ ID NO: 91150
  peptide (1)..(390): Ceres Seq. ID no. 12726610
  misc_feature (1)..(390): Homolog of NCBI NO: 18412864 NR Description: expressed protein; protein id: At1g80510.1, by cDNA: gi_16226718 [Arabidopsis thaliana]
  misc_feature (1)..(260): Homolog of NCBI NO: 24461850 NR Description: CTV.3 [Poncirus trifoliata]
  misc_feature (281)..(390): Homolog of NCBI NO: 24461850 NR Description: CTV.3 [Poncirus trifoliata]
  misc_feature (1)..(385): Homolog of NCBI NO: 34898706 NR Description: hypothetical protein [Oryza sativa (japonica group)] >gi|11862972|dbj|BAB19353.1| hypothetical protein [Oryza
  misc_feature (1)..(388): Homolog of NCBI NO: 9758059 NR Description: amino acid transporter-like protein [Arabidopsis
  misc_feature (1)..(388): Homolog of NCBI NO: 15241555 NR Description: transporter -like protein; protein id:
  misc_feature (1)..(389): Homolog of NCBI NO: 18406463 NR Description: expressed protein; protein id: At3g30390.1, by cDNA: gi_15529154, supported by cDNA: gi_16226266 [Arabidopsis >gi|9294342|dbj|BAB02239.1|
  misc_feature (1)..(385): Homolog of NCBI NO: 15228851 NR Description: putative protein; protein id: At3g56200.1, by cDNA: gi_20453044 [Arabidopsis thaliana]
  misc_feature (1)..(347): Homolog of NCBI NO: 34907894 NR Description: P0439E11.11 [Oryza sativa (japonica
  misc_feature (1)..(390): Homolog of NCBI NO: 30688270 NR Description: amino acid transporter family [Arabidopsis

SEQ ID NO: 94907 - DNA, 2007 bp, Arabidopsis thaliana; identical to SEQ ID NO: 91151
  misc_feature (1)..(2007): Ceres Seq. ID no. 12726614
  misc_feature: MA Experiment ID: 20000184 Result: Up-regulated in Transcription
  misc_feature: MA Experiment 20000184 PARAMETER Experiment Name: At_Shoots__P Parameter: Age (day) Value: 7
  misc_feature: MA Experiment 20000184 PARAMETER Experiment Name: At_Shoots__P Parameter: Tissue Value: Shoots vs. Whole Plant
  misc_feature: MA Experiment ID: 20000227 Result: Down-regulated in Transcription
  misc_feature: MA Experiment 20000227 PARAMETER Experiment Name: At_Root-Tips-vs-Tops_P Parameter: Tissue Value: Root Tips vs. Root Tops
  misc_feature: MA Experiment ID: 20001451 Result: Down-regulated in Transcription
  misc_feature: MA Experiment 20001451 PARAMETER Experiment Name: At_Far-red-induction_P Parameter: Age (day) Value: 7
  misc_feature: MA Experiment 20001451 PARAMETER Experiment Name: At_Far-red-induction_P Parameter: Light Value: Far-red vs. White
  misc_feature: MA Experiment 20001451 PARAMETER Experiment Name: At_Far-red-induction_P Parameter: Organism Value: A. thaliana
  misc_feature: MA Experiment 20001451 PARAMETER Experiment Name: At_Far-red-induction_P Parameter: Plant Line Value: Columbia
  misc_feature: MA Experiment 20001451 PARAMETER Experiment Name: At_Far-red-induction_P Parameter: Timepoint (hr) Value: 24
  misc_feature: MA Experiment 20001451 PARAMETER Experiment Name: At_Far-red-induction_P Parameter: Tissue Value: Whole Plant
  misc_feature: MA Experiment ID: 20001557 Result: Up-regulated in Transcription
  misc_feature: MA Experiment 20001557 PARAMETER Experiment Name: At_Drought_Soil_Dry_P Parameter: Age (day) Value: 27
  misc_feature: MA Experiment 20001557 PARAMETER Experiment Name: At_Drought_Soil_Dry_P Parameter: Organism Value: A. thaliana
  misc_feature: MA Experiment 20001557 PARAMETER Experiment Name: At_Drought_Soil_Dry_P Parameter: Plant Line Value: WS
  misc_feature: MA Experiment 20001557 PARAMETER Experiment Name: At_Drought_Soil_Dry_P Parameter: Post Timepoint (hr) Value: 3
  misc_feature: MA Experiment 20001557 PARAMETER Experiment Name: At_Drought_Soil_Dry_P Parameter: Post-Treatment Value: Re-Water vs. No Drought
  misc_feature: MA Experiment 20001557 PARAMETER Experiment Name: At_Drought_Soil_Dry_P Parameter: Timepoint (day) Value: 13
  misc_feature: MA Experiment 20001557 PARAMETER Experiment Name: At_Drought_Soil_Dry_P Parameter: Treatment Value: Drought vs. No Drought

SEQ ID NO: 94908 - protein, 561 aa, Arabidopsis thaliana; identical to SEQ ID NO: 91152
  peptide (1)..(561): Ceres Seq. ID no. 12726615
  misc_feature (320)..(503): Pfam Name: Sugar (and other) transporter Pfam Description: Sugar (and other) transporter
  misc_feature (1)..(561): Homolog of NCBI NO: 15220164 NR Description: nodulin-like protein; protein id: At1g80530.1, by cDNA: gi_14334879, supported by cDNA: gi_15810606 [Arabidopsis
  misc_feature (1)..(559): Homolog of NCBI NO: 24461856 NR Description: nodulin-like protein [Poncirus trifoliata]
  misc_feature (4)..(561): Homolog of NCBI NO: 24413989 NR Description: nodulin-like protein [Oryza sativa (japonica
  misc_feature (7)..(558): Homolog of NCBI NO: 38345150 NR Description: OSJNBa0014K14.4 [Oryza sativa (japonica
  misc_feature (7)..(561): Homolog of NCBI NO: 37572921 NR Description: nodulin-like protein [Oryza sativa (japonica
  misc_feature (2)..(549): Homolog of NCBI NO: 15236224 NR Description: putative protein; protein id: At4g34950.1
  misc_feature (14)..(284): Homolog of NCBI NO: 18423161 NR Description: nodulin-like protein; protein id: At5g50520.1,
  misc_feature (309)..(547): Homolog of NCBI NO: 18423161 NR Description: nodulin-like protein; protein id: At5g50520.1,
  misc_feature (14)..(512): Homolog of NCBI NO: 15241312 NR Description: nodulin-like protein; protein id: At5g14120.1
  misc_feature (11)..(258): Homolog of NCBI NO: 29824365 NR Description: unknown protein [Arabidopsis thaliana]

SEQ ID NO: 94909 - protein, 498 aa, Arabidopsis thaliana; identical to SEQ ID NO: 91153
  peptide (1)..(498): Ceres Seq. ID no. 12726616
  misc_feature (257)..(440): Pfam Name: Sugar (and other) transporter Pfam Description: Sugar (and other) transporter
  misc_feature (1)..(498): Homolog of NCBI NO: 15220164 NR Description: nodulin-like protein; protein id: At1g80530.1, by cDNA: gi_14334879, supported by cDNA: gi_15810606 [Arabidopsis
  misc_feature (1)..(496): Homolog of NCBI NO: 24461856 NR Description: nodulin-like protein [Poncirus trifoliata]
  misc_feature (1)..(498): Homolog of NCBI NO: 24413989 NR Description: nodulin-like protein [Oryza sativa (japonica
  misc_feature (1)..(495): Homolog of NCBI NO: 38345150 NR Description: OSJNBa0014K14.4 [Oryza sativa (japonica
  misc_feature (1)..(498): Homolog of NCBI NO: 37572921 NR Description: nodulin-like protein [Oryza sativa (japonica
  misc_feature (1)..(486): Homolog of NCBI NO: 15236224 NR Description: putative protein; protein id: At4g34950.1
  misc_feature (1)..(221): Homolog of NCBI NO: 18423161 NR Description: nodulin-like protein; protein id: At5g50520.1,
  misc_feature (246)..(484): Homolog of NCBI NO: 18423161 NR Description: nodulin-like protein; protein id: At5g50520.1,
  misc_feature (1)..(449): Homolog of NCBI NO: 15241312 NR Description: nodulin-like protein; protein id: At5g14120.1
  misc_feature (1)..(195): Homolog of NCBI NO: 29824365 NR Description: unknown protein [Arabidopsis thaliana]

SEQ ID NO: 94910 - protein, 482 aa, Arabidopsis thaliana; identical to SEQ ID NO: 91154
  peptide (1)..(482): Ceres Seq. ID no. 12726617
  misc_feature (241)..(424): Pfam Name: Sugar (and other) transporter Pfam Description: Sugar (and other) transporter
  misc_feature (1)..(482): Homolog of NCBI NO: 15220164 NR Description: nodulin-like protein; protein id: At1g80530.1, by cDNA: gi_14334879, supported by cDNA: gi_15810606 [Arabidopsis
  misc_feature (1)..(480): Homolog of NCBI NO: 24461856 NR Description: nodulin-like protein [Poncirus trifoliata]
  misc_feature (1)..(482): Homolog of NCBI NO: 24413989 NR Description: nodulin-like protein [Oryza sativa (japonica
  misc_feature (1)..(479): Homolog of NCBI NO: 38345150 NR Description: OSJNBa0014K14.4 [Oryza sativa (japonica
  misc_feature (1)..(482): Homolog of NCBI NO: 37572921 NR Description: nodulin-like protein [Oryza sativa (japonica
  misc_feature (1)..(470): Homolog of NCBI NO: 15236224 NR Description: putative protein; protein id: At4g34950.1
  misc_feature (1)..(205): Homolog of NCBI NO: 18423161 NR Description: nodulin-like protein; protein id: At5g50520.1,
  misc_feature (230)..(468): Homolog of NCBI NO: 18423161 NR Description: nodulin-like protein; protein id: At5g50520.1,
  misc_feature (1)..(433): Homolog of NCBI NO: 15241312 NR Description: nodulin-like protein; protein id: At5g14120.1
  misc_feature (1)..(179): Homolog of NCBI NO: 29824365 NR Description: unknown protein [Arabidopsis thaliana]

SEQ ID NO: 94911 - DNA, 1233 bp, Arabidopsis thaliana; identical to SEQ ID NO: 91155
  misc_feature (1)..(1233): Ceres Seq. ID no. 12726693
  misc_feature: MA Experiment ID: 20001904 Result: Up-regulated in Transcription
  misc_feature: MA Experiment 20001904 PARAMETER Experiment Name: At_Drought_Reproduction_P Parameter: Age (day) Value: 37
  misc_feature: MA Experiment 20001904 PARAMETER Experiment Name: At_Drought_Reproduction_P Parameter: Organism Value: A. thaliana
  misc_feature: MA Experiment 20001904 PARAMETER Experiment Name: At_Drought_Reproduction_P Parameter: Plant Line Value: WS
  misc_feature: MA Experiment 20001904 PARAMETER Experiment Name: At_Drought_Reproduction_P Parameter: Timepoint (day) Value: 7
  misc_feature: MA Experiment 20001904 PARAMETER Experiment Name: At_Drought_Reproduction_P Parameter: Tissue Value: Rosettes
  misc_feature: MA Experiment 20001904 PARAMETER Experiment Name: At_Drought_Reproduction_P Parameter: Treatment Value: Drought vs. No Drought
  misc_feature: MA Experiment ID: 20001906 Result: Up-regulated in Transcription
  misc_feature: MA Experiment 20001906 PARAMETER Experiment Name: At_Drought_Reproduction_P Parameter: Age (day) Value: 35
  misc_feature: MA Experiment 20001906 PARAMETER Experiment Name: At_Drought_Reproduction_P Parameter: Organism Value: A. thaliana
  misc_feature: MA Experiment 20001906 PARAMETER Experiment Name: At_Drought_Reproduction_P Parameter: Plant Line Value: WS
  misc_feature: MA Experiment 20001906 PARAMETER Experiment Name: At_Drought_Reproduction_P Parameter: Timepoint (day) Value: 5
  misc_feature: MA Experiment 20001906 PARAMETER Experiment Name: At_Drought_Reproduction_P Parameter: Tissue Value: Siliques
  misc_feature: MA Experiment 20001906 PARAMETER Experiment Name: At_Drought_Reproduction_P Parameter: Treatment Value: Drought vs. No Drought

SEQ ID NO: 94912 - protein, 410 aa, Arabidopsis thaliana; identical to SEQ ID NO: 91156
  peptide (1)..(410): Ceres Seq. ID no. 12726694
  misc_feature (3)..(410): Pfam Name: Caspase domain Pfam Description: Caspase domain
  misc_feature (1)..(410): Homolog of NCBI NO: 15219342 NR Description: hypothetical protein common family; protein id:
  misc_feature (1)..(410): Homolog of NCBI NO: 15219345 NR Description: hypothetical protein common family; protein id: supported by cDNA: gi_19347868 [Arabidopsis thaliana]
  misc_feature (1)..(410): Homolog of NCBI NO: 33304380 NR Description: metacaspase 7 [Arabidopsis thaliana]
  misc_feature (1)..(410): Homolog of NCBI NO: 4235430 NR Description: latex-abundant protein [Hevea brasiliensis]
  misc_feature (8)..(410): Homolog of NCBI NO: 23343885 NR Description: metacaspase 1 [Lycopersicon esculentum]
  misc_feature (180)..(410): Homolog of NCBI NO: 15219340 NR Description: hypothetical protein common family; protein id:
  misc_feature (1)..(181): Homolog of NCBI NO: 15219340 NR Description: hypothetical protein common family; protein id:
  misc_feature (1)..(410): Homolog of NCBI NO: 40644374 NR Description: metacaspase type II [Picea abies]
  misc_feature (1)..(410): Homolog of NCBI NO: 32482818 NR Description: metacaspase 4 [Arabidopsis thaliana]
  misc_feature (1)..(410): Homolog of NCBI NO: 37788557 NR Description: metacaspase 7 [Arabidopsis thaliana]

SEQ ID NO: 94913 - protein, 300 aa, Arabidopsis thaliana; identical to SEQ ID NO: 91157
  peptide (1)..(300): Ceres Seq. ID no. 12726695
  misc_feature (1)..(300): Pfam Name: Caspase domain Pfam Description: Caspase domain
  misc_feature (1)..(300): Homolog of NCBI NO: 15219342 NR Description: hypothetical protein common family; protein id:
  misc_feature (1)..(300): Homolog of NCBI NO: 15219345 NR Description: hypothetical protein common family; protein id: supported by cDNA: gi_19347868 [Arabidopsis thaliana]
  misc_feature (1)..(300): Homolog of NCBI NO: 33304380 NR Description: metacaspase 7 [Arabidopsis thaliana]
  misc_feature (1)..(300): Homolog of NCBI NO: 4235430 NR Description: latex-abundant protein [Hevea brasiliensis]
  misc_feature (1)..(300): Homolog of NCBI NO: 23343885 NR Description: metacaspase 1 [Lycopersicon esculentum]
  misc_feature (70)..(300): Homolog of NCBI NO: 15219340 NR Description: hypothetical protein common family; protein id:
  misc_feature (1)..(71): Homolog of NCBI NO: 15219340 NR Description: hypothetical protein common family; protein id:
  misc_feature (1)..(300): Homolog of NCBI NO: 40644374 NR Description: metacaspase type II [Picea abies]
  misc_feature (1)..(300): Homolog of NCBI NO: 32482818 NR Description: metacaspase 4 [Arabidopsis thaliana]
  misc_feature (1)..(300): Homolog of NCBI NO: 37788557 NR Description: metacaspase 7 [Arabidopsis thaliana]

SEQ ID NO: 94914 - DNA, 1641 bp, Arabidopsis thaliana; identical to SEQ ID NO: 91158
  misc_feature (1)..(1641): Ceres Seq. ID no. 12726700
  misc_feature: MA Experiment ID: 20001451 Result: Up-regulated in Transcription
  misc_feature: MA Experiment 20001451 PARAMETER Experiment Name: At_Far-red-induction_P Parameter: Age (day) Value: 7
  misc_feature: MA Experiment 20001451 PARAMETER Experiment Name: At_Far-red-induction_P Parameter: Light Value: Far-red vs. White
  misc_feature: MA Experiment 20001451 PARAMETER Experiment Name: At_Far-red-induction_P Parameter: Organism Value: A. thaliana
  misc_feature: MA Experiment 20001451 PARAMETER Experiment Name: At_Far-red-induction_P Parameter: Plant Line Value: Columbia
  misc_feature: MA Experiment 20001451 PARAMETER Experiment Name: At_Far-red-induction_P Parameter: Timepoint (hr) Value: 24
  misc_feature: MA Experiment 20001451 PARAMETER Experiment Name: At_Far-red-induction_P Parameter: Tissue Value: Whole Plant

SEQ ID NO: 94915 - protein, 546 aa, Arabidopsis thaliana; identical to SEQ ID NO: 91159
  peptide (1)..(546): Ceres Seq. ID no. 12726701
  misc_feature (1)..(546): Homolog of NCBI NO: 22330739 NR Description: cytochrome p450 family; protein id: At1g79370.1
  misc_feature (1)..(424): Homolog of NCBI NO: 7484901 NR Description: cytochrome P450tyr homolog YUP8H12R.1 - thaliana >gi|3152575|gb|AAC17056.1| Similar to cytochrome P450tyr from Sorghum bicolor. Gene is cut off at exon 3. [Arabidopsis
  misc_feature (13)..(541): Homolog of NCBI NO: 30696238 NR Description: cytochrome P450 family [Arabidopsis thaliana]
  misc_feature (10)..(540): Homolog of NCBI NO: 25518479 NR Description: hypothetical protein F3O9.21 - Arabidopsis >gi|4966362|gb|AAD34693.1|AC006341_21 Similar to gb|AF069494 P450 from Sinapis alba and is a member of the PF|00067 Cytochrome
  misc_feature (10)..(540): Homolog of NCBI NO: 30684842 NR Description: cytochrome P450, putative [Arabidopsis thaliana] putative cytochrome P450 protein [Arabidopsis thaliana]
  misc_feature (7)..(540): Homolog of NCBI NO: 10946208 NR Description: cytochrome P450 CYP79F2 [Arabidopsis thaliana]
  misc_feature (7)..(540): Homolog of NCBI NO: 30684835 NR Description: cytochrome P450 family [Arabidopsis thaliana]
  misc_feature (40)..(541): Homolog of NCBI NO: 5915822 NR Description: CYTOCHROME P450 79A1 (CYTOCHROME P450TYR)
  misc_feature (7)..(540): Homolog of NCBI NO: 25518051 NR Description: F3O9.20 protein - Arabidopsis thaliana Similar to gb|AF069494 cytochrome P450 from Sinapis alba and is a
  misc_feature (35)..(538): Homolog of NCBI NO: 34896662 NR Description: putative cytochrome p450tyr [Oryza sativa]

SEQ ID NO: 94916 - protein, 491 aa, Arabidopsis thaliana; identical to SEQ ID NO: 91160
  peptide (1)..(491): Ceres Seq. ID no. 12726702
  misc_feature (1)..(491): Homolog of NCBI NO: 22330739 NR Description: cytochrome p450 family; protein id: At1g79370.1
  misc_feature (1)..(369): Homolog of NCBI NO: 7484901 NR Description: cytochrome P450tyr homolog YUP8H12R.1 - thaliana >gi|3152575|gb|AAC17056.1| Similar to cytochrome P450tyr from Sorghum bicolor. Gene is cut off at exon 3. [Arabidopsis
  misc_feature (1)..(486): Homolog of NCBI NO: 30696238 NR Description: cytochrome P450 family [Arabidopsis thaliana]
  misc_feature (1)..(485): Homolog of NCBI NO: 25518479 NR Description: hypothetical protein F3O9.21 - Arabidopsis >gi|4966362|gb|AAD34693.1|AC006341_21 Similar to gb|AF069494 P450 from Sinapis alba and is a member of the PF|00067 Cytochrome
  misc_feature (1)..(485): Homolog of NCBI NO: 30684842 NR Description: cytochrome P450, putative [Arabidopsis thaliana] putative cytochrome P450 protein [Arabidopsis thaliana]
  misc_feature (1)..(485): Homolog of NCBI NO: 10946208 NR Description: cytochrome P450 CYP79F2 [Arabidopsis thaliana]
  misc_feature (1)..(485): Homolog of NCBI NO: 30684835 NR Description: cytochrome P450 family [Arabidopsis thaliana]
  misc_feature (1)..(486): Homolog of NCBI NO: 5915822 NR Description: CYTOCHROME P450 79A1 (CYTOCHROME P450TYR)
  misc_feature (1)..(485): Homolog of NCBI NO: 25518051 NR Description: F3O9.20 protein - Arabidopsis thaliana Similar to gb|AF069494 cytochrome P450 from Sinapis alba and is a
  misc_feature (1)..(483): Homolog of NCBI NO: 34896662 NR Description: putative cytochrome p450tyr [Oryza sativa]

SEQ ID NO: 94917 - protein, 477 aa, Arabidopsis thaliana; identical to SEQ ID NO: 91161
  peptide (1)..(477): Ceres Seq. ID no. 12726703
  misc_feature (1)..(477): Homolog of NCBI NO: 22330739 NR Description: cytochrome p450 family; protein id: At1g79370.1
  misc_feature (1)..(355): Homolog of NCBI NO: 7484901 NR Description: cytochrome P450tyr homolog YUP8H12R.1 - thaliana >gi|3152575|gb|AAC17056.1| Similar to cytochrome P450tyr from Sorghum bicolor. Gene is cut off at exon 3. [Arabidopsis
  misc_feature (1)..(472): Homolog of NCBI NO: 30696238 NR Description: cytochrome P450 family [Arabidopsis thaliana]
  misc_feature (1)..(471): Homolog of NCBI NO: 25518479 NR Description: hypothetical protein F3O9.21 - Arabidopsis >gi|4966362|gb|AAD34693.1|AC006341_21 Similar to gb|AF069494 P450 from Sinapis alba and is a member of the PF|00067 Cytochrome
  misc_feature (1)..(471): Homolog of NCBI NO: 30684842 NR Description: cytochrome P450, putative [Arabidopsis thaliana] putative cytochrome P450 protein [Arabidopsis thaliana]
  misc_feature (1)..(471): Homolog of NCBI NO: 10946208 NR Description: cytochrome P450 CYP79F2 [Arabidopsis thaliana]
  misc_feature (1)..(471): Homolog of NCBI NO: 30684835 NR Description: cytochrome P450 family [Arabidopsis thaliana]
  misc_feature (1)..(472): Homolog of NCBI NO: 5915822 NR Description: CYTOCHROME P450 79A1 (CYTOCHROME P450TYR)
  misc_feature (1)..(471): Homolog of NCBI NO: 25518051 NR Description: F3O9.20 protein - Arabidopsis thaliana Similar to gb|AF069494 cytochrome P450 from Sinapis alba and is a
  misc_feature (1)..(469): Homolog of NCBI NO: 34896662 NR Description: putative cytochrome p450tyr [Oryza sativa]

SEQ ID NO: 94918 - DNA, 3747 bp, Arabidopsis thaliana; identical to SEQ ID NO: 91162
  misc_feature (1)..(3747): Ceres Seq. ID no. 12726712
  misc_feature: MA Experiment ID: 20000314 Result: Up-regulated in Transcription
  misc_feature: MA Experiment 20000314 PARAMETER Experiment Name: At_14day_Shoots-Roots_Sub_P Parameter: Age (day) Value: 14
  misc_feature: MA Experiment 20000314 PARAMETER Experiment Name: At_14day_Shoots-Roots_Sub_P Parameter: Organism Value: A. thaliana
  misc_feature: MA Experiment 20000314 PARAMETER Experiment Name: At_14day_Shoots-Roots_Sub_P Parameter: Plant Line Value: WS
  misc_feature: MA Experiment 20000314 PARAMETER Experiment Name: At_14day_Shoots-Roots_Sub_P Parameter: Tissue Value: Roots vs. Whole Plant
  misc_feature: MA Experiment ID: 20000315 Result: Down-regulated in Transcription
  misc_feature: MA Experiment 20000315 PARAMETER Experiment Name: At_14day_Shoots-Roots_Sub_P Parameter: Age (day) Value: 14
  misc_feature: MA Experiment 20000315 PARAMETER Experiment Name: At_14day_Shoots-Roots_Sub_P Parameter: Organism Value: A. thaliana
  misc_feature: MA Experiment 20000315 PARAMETER Experiment Name: At_14day_Shoots-Roots_Sub_P Parameter: Plant Line Value: WS
  misc_feature: MA Experiment 20000315 PARAMETER Experiment Name: At_14day_Shoots-Roots_Sub_P Parameter: Tissue Value: Shoots vs. Whole Plant
  misc_feature: MA Experiment ID: 20000327 Result: Down-regulated in Transcription
  misc_feature: MA Experiment 20000327 PARAMETER Experiment Name: At_42deg_Heat_Sub_P Parameter: Age (day) Value: 14
  misc_feature: MA Experiment 20000327 PARAMETER Experiment Name: At_42deg_Heat_Sub_P Parameter: Organism Value: A. thaliana
  misc_feature: MA Experiment 20000327 PARAMETER Experiment Name: At_42deg_Heat_Sub_P Parameter: Plant Line Value: WS
  misc_feature: MA Experiment 20000327 PARAMETER Experiment Name: At_42deg_Heat_Sub_P Parameter: Temperature (deg C) Value: 42 vs. 22
  misc_feature: MA Experiment 20000327 PARAMETER Experiment Name: At_42deg_Heat_Sub_P Parameter: Timepoint (hr) Value: 1
  misc_feature: MA Experiment 20000327 PARAMETER Experiment Name: At_42deg_Heat_Sub_P Parameter: Tissue Value: Aerial
  misc_feature: MA Experiment ID: 20000328 Result: Down-regulated in Transcription
  misc_feature: MA Experiment 20000328 PARAMETER Experiment Name: At_42deg_Heat_Sub_P Parameter: Age (day) Value: 14
  misc_feature: MA Experiment 20000328 PARAMETER Experiment Name: At_42deg_Heat_Sub_P Parameter: Organism Value: A. thaliana
  misc_feature: MA Experiment 20000328 PARAMETER Experiment Name: At_42deg_Heat_Sub_P Parameter: Plant Line Value: WS
  misc_feature: MA Experiment 20000328 PARAMETER Experiment Name: At_42deg_Heat_Sub_P Parameter: Temperature (deg C) Value: 42 vs. 22
  misc_feature: MA Experiment 20000328 PARAMETER Experiment Name: At_42deg_Heat_Sub_P Parameter: Timepoint (hr) Value: 6
  misc_feature: MA Experiment 20000328 PARAMETER Experiment Name: At_42deg_Heat_Sub_P Parameter: Tissue Value: Aerial

SEQ ID NO: 94919 - protein, 1248 aa, Arabidopsis thaliana; identical to SEQ ID NO: 91163
  peptide (1)..(1248): Ceres Seq. ID no. 12726713
  misc_feature (191)..(278): Pfam Name: PB1 domain Pfam Description: PB1 domain
  misc_feature (373)..(719): Homolog of NCBI NO: 15219183 NR Description: putative Ser/Thr protein kinase; protein id:
  misc_feature (1)..(1248): Homolog of NCBI NO: 15226883 NR Description: putative protein kinase; protein id: At2g35050.1
  misc_feature (409)..(875): Homolog of NCBI NO: 15219183 NR Description: putative Ser/Thr protein kinase; protein id:
  misc_feature (851)..(1233): Homolog of NCBI NO: 15219796 NR Description: putative Ser/Thr protein kinase; protein id:
  misc_feature (177)..(315): Homolog of NCBI NO: 15219796 NR Description: putative Ser/Thr protein kinase; protein id:
  misc_feature (900)..(1238): Homolog of NCBI NO: 15232679 NR Description: protein kinase - like protein; protein id:
  misc_feature (150)..(426): Homolog of NCBI NO: 15232679 NR Description: protein kinase - like protein; protein id:
  misc_feature (933)..(1233): Homolog of NCBI NO: 25406805 NR Description: hypothetical protein [imported] - Arabidopsis >gi|2494111|gb|AAB80620.1| Contains similarity to Glycine protein
  misc_feature (84)..(315): Homolog of NCBI NO: 25406805 NR Description: hypothetical protein [imported] - Arabidopsis >gi|2494111|gb|AAB80620.1| Contains similarity to Glycine protein
  misc_feature (914)..(1233): Homolog of NCBI NO: 15242791 NR Description: putative protein; protein id: At5g57610.1 thaliana] >gi|9758322|dbj|BAB08796.1| contains similarity to

SEQ ID NO: 94920 - protein, 1235 aa, Arabidopsis thaliana; identical to SEQ ID NO: 91164
  peptide (1)..(1235): Ceres Seq. ID no. 12726714
  misc_feature (178)..(265): Pfam Name: PB1 domain Pfam Description: PB1 domain
  misc_feature (360)..(706): Homolog of NCBI NO: 15219183 NR Description: putative Ser/Thr protein kinase; protein id:
  misc_feature (1)..(1235): Homolog of NCBI NO: 15226883 NR Description: putative protein kinase; protein id: At2g35050.1
  misc_feature (396)..(862): Homolog of NCBI NO: 15219183 NR Description: putative Ser/Thr protein kinase; protein id:
  misc_feature (838)..(1220): Homolog of NCBI NO: 15219796 NR Description: putative Ser/Thr protein kinase; protein id:
  misc_feature (164)..(302): Homolog of NCBI NO: 15219796 NR Description: putative Ser/Thr protein kinase; protein id:
  misc_feature (887)..(1225): Homolog of NCBI NO: 15232679 NR Description: protein kinase - like protein; protein id:
  misc_feature (137)..(413): Homolog of NCBI NO: 15232679 NR Description: protein kinase - like protein; protein id:
  misc_feature (920)..(1220): Homolog of NCBI NO: 25406805 NR Description: hypothetical protein [imported] - Arabidopsis >gi|2494111|gb|AAB80620.1| Contains similarity to Glycine protein
  misc_feature (71)..(302): Homolog of NCBI NO: 25406805 NR Description: hypothetical protein [imported] - Arabidopsis >gi|2494111|gb|AAB80620.1| Contains similarity to Glycine protein
  misc_feature (901)..(1220): Homolog of NCBI NO: 15242791 NR Description: putative protein; protein id: At5g57610.1 thaliana] >gi|9758322|dbj|BAB08796.1| contains similarity to

SEQ ID NO: 94921 - protein, 1221 aa, Arabidopsis thaliana; identical to SEQ ID NO: 91165
  peptide (1)..(1221): Ceres Seq. ID no. 12726715
  misc_feature (164)..(251): Pfam Name: PB1 domain Pfam Description: PB1 domain
  misc_feature (346)..(692): Homolog of NCBI NO: 15219183 NR Description: putative Ser/Thr protein kinase; protein id:
  misc_feature (1)..(1221): Homolog of NCBI NO: 15226883 NR Description: putative protein kinase; protein id: At2g35050.1
  misc_feature (382)..(848): Homolog of NCBI NO: 15219183 NR Description: putative Ser/Thr protein kinase; protein id:
  misc_feature (824)..(1206): Homolog of NCBI NO: 15219796 NR Description: putative Ser/Thr protein kinase; protein id:
  misc_feature (150)..(288): Homolog of NCBI NO: 15219796 NR Description: putative Ser/Thr protein kinase; protein id:
  misc_feature (873)..(1211): Homolog of NCBI NO: 15232679 NR Description: protein kinase - like protein; protein id:
  misc_feature (123)..(399): Homolog of NCBI NO: 15232679 NR Description: protein kinase - like protein; protein id:
  misc_feature (906)..(1206): Homolog of NCBI NO: 25406805 NR Description: hypothetical protein [imported] - Arabidopsis >gi|2494111|gb|AAB80620.1| Contains similarity to Glycine protein
  misc_feature (57)..(288): Homolog of NCBI NO: 25406805 NR Description: hypothetical protein [imported] - Arabidopsis >gi|2494111|gb|AAB80620.1| Contains similarity to Glycine protein
  misc_feature (887)..(1206): Homolog of NCBI NO: 15242791 NR Description: putative protein; protein id: At5g57610.1 thaliana] >gi|9758322|dbj|BAB08796.1| contains similarity to

SEQ ID NO: 94922 - DNA, 1941 bp, Arabidopsis thaliana; identical to SEQ ID NO: 91166
  misc_feature (1)..(1941): Ceres Seq. ID no. 12726723
  misc_feature: MA Experiment ID: 20000171 Result: Down-regulated in Transcription
  misc_feature: MA Experiment 20000171 PARAMETER Experiment Name: At_42deg_Heat_P Parameter: Age (day) Value: 14
  misc_feature: MA Experiment 20000171 PARAMETER Experiment Name: At_42deg_Heat_P Parameter: Organism Value: A. thaliana
  misc_feature: MA Experiment 20000171 PARAMETER Experiment Name: At_42deg_Heat_P Parameter: Plant Line Value: WS
  misc_feature: MA Experiment 20000171 PARAMETER Experiment Name: At_42deg_Heat_P Parameter: Temperature (deg C) Value: 42 vs. 22
  misc_feature: MA Experiment 20000171 PARAMETER Experiment Name: At_42deg_Heat_P Parameter: Timepoint (hr) Value: 1
  misc_feature: MA Experiment 20000171 PARAMETER Experiment Name: At_42deg_Heat_P Parameter: Tissue Value: Aerial
  misc_feature: MA Experiment ID: 20000173 Result: Down-regulated in Transcription
  misc_feature: MA Experiment 20000173 PARAMETER Experiment Name: At_42deg_Heat_P Parameter: Age (day) Value: 14
  misc_feature: MA Experiment 20000173 PARAMETER Experiment Name: At_42deg_Heat_P Parameter: Organism Value: A. thaliana
  misc_feature: MA Experiment 20000173 PARAMETER Experiment Name: At_42deg_Heat_P Parameter: Plant Line Value: WS
  misc_feature: MA Experiment 20000173 PARAMETER Experiment Name: At_42deg_Heat_P Parameter: Temperature (deg C) Value: 42 vs. 22
  misc_feature: MA Experiment 20000173 PARAMETER Experiment Name: At_42deg_Heat_P Parameter: Timepoint (hr) Value: 6
  misc_feature: MA Experiment 20000173 PARAMETER Experiment Name: At_42deg_Heat_P Parameter: Tissue Value: Aerial
  misc_feature: MA Experiment ID: 20000184 Result: Down-regulated in Transcription
  misc_feature: MA Experiment 20000184 PARAMETER Experiment Name: At_Shoots__P Parameter: Age (day) Value: 7
  misc_feature: MA Experiment 20000184 PARAMETER Experiment Name: At_Shoots__P Parameter: Tissue Value: Shoots vs. Whole Plant
  misc_feature: MA Experiment ID: 20000234 Result: Down-regulated in Transcription
  misc_feature: MA Experiment 20000234 PARAMETER Experiment Name: At_Siliques_P Parameter: Age (day) Value: 21
  misc_feature: MA Experiment 20000234 PARAMETER Experiment Name: At_Siliques_P Parameter: Organism Value: A. thaliana
  misc_feature: MA Experiment 20000234 PARAMETER Experiment Name: At_Siliques_P Parameter: Plant Line Value: WS
  misc_feature: MA Experiment 20000234 PARAMETER Experiment Name: At_Siliques_P Parameter: Tissue Value: Less Than 5mm Siliques vs. Whole Plant
  misc_feature: MA Experiment ID: 20000235 Result: Down-regulated in Transcription
  misc_feature: MA Experiment 20000235 PARAMETER Experiment Name: At_Siliques_P Parameter: Age (day) Value: 21
  misc_feature: MA Experiment 20000235 PARAMETER Experiment Name: At_Siliques_P Parameter: Organism Value: A. thaliana
  misc_feature: MA Experiment 20000235 PARAMETER Experiment Name: At_Siliques_P Parameter: Plant Line Value: WS
  misc_feature: MA Experiment 20000235 PARAMETER Experiment Name: At_Siliques_P Parameter: Tissue Value: 5-10mm Siliques vs. Whole Plant
  misc_feature: MA Experiment ID: 20000264 Result: Down-regulated in Transcription
  misc_feature: MA Experiment 20000264 PARAMETER Experiment Name: At_Open_Flower_P Parameter: Age (day) Value: 21
  misc_feature: MA Experiment 20000264 PARAMETER Experiment Name: At_Open_Flower_P Parameter: Plant Line Value: WS
  misc_feature: MA Experiment 20000264 PARAMETER Experiment Name: At_Open_Flower_P Parameter: Tissue Value: Open Flower vs. Whole Plant
  misc_feature: MA Experiment ID: 20000265 Result: Down-regulated in Transcription
  misc_feature: MA Experiment 20000265 PARAMETER Experiment Name: At_Open_Flower_P Parameter: Age (day) Value: 21
  misc_feature: MA Experiment 20000265 PARAMETER Experiment Name: At_Open_Flower_P Parameter: Plant Line Value: WS
  misc_feature: MA Experiment 20000265 PARAMETER Experiment Name: At_Open_Flower_P Parameter: Tissue Value: Closed Flower vs. Whole Plant
  misc_feature: MA Experiment ID: 20000286 Result: Down-regulated in Transcription
  misc_feature: MA Experiment 20000286 PARAMETER Experiment Name: At_Open_Flower_P Parameter: Age (day) Value: 21
  misc_feature: MA Experiment 20000286 PARAMETER Experiment Name: At_Open_Flower_P Parameter: Plant Line Value: WS
  misc_feature: MA Experiment 20000286 PARAMETER Experiment Name: At_Open_Flower_P Parameter: Tissue Value: Half Open vs. Whole Plant
  misc_feature: MA Experiment ID: 20000794 Result: Down-regulated in Transcription
  misc_feature: MA Experiment 20000794 PARAMETER Experiment Name: At_Petals_P Parameter: Age (day) Value: 23-25 days
  misc_feature: MA Experiment 20000794 PARAMETER Experiment Name: At_Petals_P Parameter: Plant Line Value: WS
  misc_feature: MA Experiment 20000794 PARAMETER Experiment Name: At_Petals_P Parameter: Tissue Value: Petals vs. Whole plant
  misc_feature: MA Experiment ID: 20001451 Result: Down-regulated in Transcription
  misc_feature: MA Experiment 20001451 PARAMETER Experiment Name: At_Far-red-induction_P Parameter: Age (day) Value: 7
  misc_feature: MA Experiment 20001451 PARAMETER Experiment Name: At_Far-red-induction_P Parameter: Light Value: Far-red vs. White
  misc_feature: MA Experiment 20001451 PARAMETER Experiment Name: At_Far-red-induction_P Parameter: Organism Value: A. thaliana
  misc_feature: MA Experiment 20001451 PARAMETER Experiment Name: At_Far-red-induction_P Parameter: Plant Line Value: Columbia
  misc_feature: MA Experiment 20001451 PARAMETER Experiment Name: At_Far-red-induction_P Parameter: Timepoint (hr) Value: 24
  misc_feature: MA Experiment 20001451 PARAMETER Experiment Name: At_Far-red-induction_P Parameter: Tissue Value: Whole Plant

SEQ ID NO: 94923 - protein, 646 aa, Arabidopsis thaliana; identical to SEQ ID NO: 91167
  peptide (1)..(646): Ceres Seq. ID no. 12726724
  misc_feature (75)..(642): Homolog of NCBI NO: 10178148 NR Description: receptor-like serine/threonine kinase
  misc_feature (300)..(642): Homolog of NCBI NO: 15242677 NR Description: receptor-like protein kinase; protein id:
  misc_feature (14)..(279): Homolog of NCBI NO: 15242677 NR Description: receptor-like protein kinase; protein id:
  misc_feature (3)..(643): Homolog of NCBI NO: 15223169 NR Description: putative protein kinase; protein id: At1g70520.1
  misc_feature (48)..(607): Homolog of NCBI NO: 2465925 NR Description: receptor-like serine/threonine kinase
  misc_feature (48)..(334): Homolog of NCBI NO: 8778283 NR Description: F14D16.24 [Arabidopsis thaliana]
  misc_feature (311)..(607): Homolog of NCBI NO: 8778283 NR Description: F14D16.24 [Arabidopsis thaliana]
  misc_feature (3)..(641): Homolog of NCBI NO: 34913832 NR Description: putative protein kinase [Oryza sativa (japonica group)] >gi|20161899|dbj|BAB90811.1| putative protein kinase
  misc_feature (3)..(607): Homolog of NCBI NO: 15235391 NR Description: serine/threonine kinase-like protein; protein id:
  misc_feature (247)..(641): Homolog of NCBI NO: 15234659 NR Description: receptor protein kinase - like protein; protein At4g05200.1 [Arabidopsis thaliana] >gi|25387047|pir||D85065

SEQ ID NO: 94924 - protein, 595 aa, Arabidopsis thaliana; identical to SEQ ID NO: 91168
  peptide (1)..(595): Ceres Seq. ID no. 12726725
  misc_feature (24)..(591): Homolog of NCBI NO: 10178148 NR Description: receptor-like serine/threonine kinase
  misc_feature (249)..(591): Homolog of NCBI NO: 15242677 NR Description: receptor-like protein kinase; protein id:
  misc_feature (1)..(228): Homolog of NCBI NO: 15242677 NR Description: receptor-like protein kinase; protein id:
  misc_feature (1)..(592): Homolog of NCBI NO: 15223169 NR Description: putative protein kinase; protein id: At1g70520.1
  misc_feature (1)..(556): Homolog of NCBI NO: 2465925 NR Description: receptor-like serine/threonine kinase
  misc_feature (1)..(283): Homolog of NCBI NO: 8778283 NR Description: F14D16.24 [Arabidopsis thaliana]
  misc_feature (260)..(556): Homolog of NCBI NO: 8778283 NR Description: F14D16.24 [Arabidopsis thaliana]
  misc_feature (1)..(590): Homolog of NCBI NO: 34913832 NR Description: putative protein kinase [Oryza sativa (japonica group)] >gi|20161899|dbj|BAB90811.1| putative protein kinase
  misc_feature (1)..(556): Homolog of NCBI NO: 15235391 NR Description: serine/threonine kinase-like protein; protein id:
  misc_feature (196)..(590): Homolog of NCBI NO: 15234659 NR Description: receptor protein kinase - like protein; protein At4g05200.1 [Arabidopsis thaliana] >gi|25387047|pir||D85065

SEQ ID NO: 94925 - protein, 479 aa, Arabidopsis thaliana; identical to SEQ ID NO: 91169
  peptide (1)..(479): Ceres Seq. ID no. 12726726
  misc_feature (1)..(475): Homolog of NCBI NO: 10178148 NR Description: receptor-like serine/threonine kinase
  misc_feature (133)..(475): Homolog of NCBI NO: 15242677 NR Description: receptor-like protein kinase; protein id:
  misc_feature (1)..(112): Homolog of NCBI NO: 15242677 NR Description: receptor-like protein kinase; protein id:
  misc_feature (1)..(476): Homolog of NCBI NO: 15223169 NR Description: putative protein kinase; protein id: At1g70520.1
  misc_feature (1)..(440): Homolog of NCBI NO: 2465925 NR Description: receptor-like serine/threonine kinase
  misc_feature (1)..(167): Homolog of NCBI NO: 8778283 NR Description: F14D16.24 [Arabidopsis thaliana]
  misc_feature (144)..(440): Homolog of NCBI NO: 8778283 NR Description: F14D16.24 [Arabidopsis thaliana]
  misc_feature (1)..(474): Homolog of NCBI NO: 34913832 NR Description: putative protein kinase [Oryza sativa (japonica group)] >gi|20161899|dbj|BAB90811.1| putative protein kinase
  misc_feature (1)..(440): Homolog of NCBI NO: 15235391 NR Description: serine/threonine kinase-like protein; protein id:
  misc_feature (80)..(474): Homolog of NCBI NO: 15234659 NR Description: receptor protein kinase - like protein; protein At4g05200.1 [Arabidopsis thaliana] >gi|25387047|pir||D85065

SEQ ID NO: 94926 - DNA, 1233 bp, Arabidopsis thaliana; identical to SEQ ID NO: 91170
  misc_feature (1)..(1233): Ceres Seq. ID no. 12726727
  misc_feature: MA Experiment ID: 20000355 Result: Up-regulated in Transcription
  misc_feature: MA Experiment 20000355 PARAMETER Experiment Name: At_Siliques_Sub_P Parameter: Age (day) Value: 21
  misc_feature: MA Experiment 20000355 PARAMETER Experiment Name: At_Siliques_Sub_P Parameter: Organism Value: A. thaliana
  misc_feature: MA Experiment 20000355 PARAMETER Experiment Name: At_Siliques_Sub_P Parameter: Plant Line Value: WS
  misc_feature: MA Experiment 20000355 PARAMETER Experiment Name: At_Siliques_Sub_P Parameter: Tissue Value: Less Than 5mm Siliques vs. Whole Plant
  misc_feature: MA Experiment ID: 20000440 Result: Up-regulated in Transcription
  misc_feature: MA Experiment 20000440 PARAMETER Experiment Name: At_Closed-Flower__Sub_P Parameter: Tissue Value: Closed Flower vs. Whole Plant

SEQ ID NO: 94927 - protein, 410 aa, Arabidopsis thaliana; identical to SEQ ID NO: 91171
  peptide (1)..(410): Ceres Seq. ID no. 12726728
  misc_feature (174)..(368): Pfam Name: Arabidopsis proteins of unknown function Pfam Description: Arabidopsis proteins of unknown function
  misc_feature (1)..(410): Homolog of NCBI NO: 25345697 NR Description: unknown protein F5A18.27 [imported] - Arabidopsis
  misc_feature (1)..(410): Homolog of NCBI NO: 30698726 NR Description: expressed protein [Arabidopsis thaliana]
  misc_feature (1)..(410): Homolog of NCBI NO: 28416687 NR Description: At1g70550 [Arabidopsis thaliana]
  misc_feature (3)..(410): Homolog of NCBI NO: 30688348 NR Description: expressed protein [Arabidopsis thaliana] unknown protein [Arabidopsis thaliana]
  misc_feature (3)..(410): Homolog of NCBI NO: 25345695 NR Description: protein F26F24.22 [imported] - Arabidopsis >gi|9295704|gb|AAF87010.1|AC005292_19 F26F24.22 [Arabidopsis
  misc_feature (3)..(410): Homolog of NCBI NO: 21389708 NR Description: putative carboxyl-terminal proteinase [Gossypium
  misc_feature (9)..(410): Homolog of NCBI NO: 15220207 NR Description: putative carboxyl-terminal peptidase; protein id:
  misc_feature (3)..(410): Homolog of NCBI NO: 15240622 NR Description: putative protein; protein id: At5g50150.1, by cDNA: gi_15529144, supported by cDNA: gi_17386117 [Arabidopsis >gi|15529145|gb|AAK97667.1| AT5g50150/MPF21_17 [Arabidopsis
  misc_feature (3)..(409): Homolog of NCBI NO: 34913794 NR Description: OSJNBa0026J14.25 [Oryza sativa (japonica
  misc_feature (119)..(410): Homolog of NCBI NO: 25345706 NR Description: hypothetical protein [imported] - Arabidopsis >gi|4874273|gb|AAD31338.1|AC007354_11 Similar to gi|3128199

SEQ ID NO: 94928 - protein, 274 aa, Arabidopsis thaliana; identical to SEQ ID NO: 91172
  peptide (1)..(274): Ceres Seq. ID no. 12726729
  misc_feature (38)..(232): Pfam Name: Arabidopsis proteins of unknown function Pfam Description: Arabidopsis proteins of unknown function
  misc_feature (1)..(274): Homolog of NCBI NO: 25345697 NR Description: unknown protein F5A18.27 [imported] - Arabidopsis
  misc_feature (1)..(274): Homolog of NCBI NO: 30698726 NR Description: expressed protein [Arabidopsis thaliana]
  misc_feature (1)..(274): Homolog of NCBI NO: 28416687 NR Description: At1g70550 [Arabidopsis thaliana]
  misc_feature (1)..(274): Homolog of NCBI NO: 30688348 NR Description: expressed protein [Arabidopsis thaliana] unknown protein [Arabidopsis thaliana]
  misc_feature (1)..(274): Homolog of NCBI NO: 25345695 NR Description: protein F26F24.22 [imported] - Arabidopsis >gi|9295704|gb|AAF87010.1|AC005292_19 F26F24.22 [Arabidopsis
  misc_feature (1)..(274): Homolog of NCBI NO: 21389708 NR Description: putative carboxyl-terminal proteinase [Gossypium
  misc_feature (1)..(274): Homolog of NCBI NO: 15220207 NR Description: putative carboxyl-terminal peptidase; protein id:
  misc_feature (1)..(274): Homolog of NCBI NO: 15240622 NR Description: putative protein; protein id: At5g50150.1, by cDNA: gi_15529144, supported by cDNA: gi_17386117 [Arabidopsis >gi|15529145|gb|AAK97667.1| AT5g50150/MPF21_17 [Arabidopsis
  misc_feature (1)..(273): Homolog of NCBI NO: 34913794 NR Description: OSJNBa0026J14.25 [Oryza sativa (japonica
  misc_feature (1)..(274): Homolog of NCBI NO: 25345706 NR Description: hypothetical protein [imported] - Arabidopsis >gi|4874273|gb|AAD31338.1|AC007354_11 Similar to gi|3128199

SEQ ID NO: 94929 - DNA, 1782 bp, Arabidopsis thaliana; identical to SEQ ID NO: 91173
  misc_feature (1)..(1782): Ceres Seq. ID no. 12726730
  misc_feature: MA Experiment ID: 108435 Result: Down-regulated in Transcription
  misc_feature: MA Experiment 108435 PARAMETER Experiment Name: At_stm_Mutants_cDNA_P Parameter: Plant Line Value: wt Landsburg vs stm
  misc_feature: MA Experiment 108435 PARAMETER Experiment Name: At_stm_Mutants_cDNA_P Parameter: Tissue Value: Shoot Apical Meristem Region
  misc_feature: MA Experiment ID: 108462 Result: Up-regulated in Transcription
  misc_feature: MA Experiment 108462 PARAMETER Experiment Name: At_Germinating_Seeds_cDNA_P Parameter: Age (day) Value: 2 vs. 0
  misc_feature: MA Experiment 108462 PARAMETER Experiment Name: At_Germinating_Seeds_cDNA_P Parameter: Tissue Value: Germinating Seeds
  misc_feature: MA Experiment ID: 108463 Result: Up-regulated in Transcription
  misc_feature: MA Experiment 108463 PARAMETER Experiment Name: At_Germinating_Seeds_cDNA_P Parameter: Age (day) Value: 3 vs. 0
  misc_feature: MA Experiment 108463 PARAMETER Experiment Name: At_Germinating_Seeds_cDNA_P Parameter: Tissue Value: Germinating Seeds
  misc_feature: MA Experiment ID: 108464 Result: Up-regulated in Transcription
  misc_feature: MA Experiment 108464 PARAMETER Experiment Name: At_Germinating_Seeds_cDNA_P Parameter: Age (day) Value: 4 vs. 0
  misc_feature: MA Experiment 108464 PARAMETER Experiment Name: At_Germinating_Seeds_cDNA_P Parameter: Tissue Value: Germinating Seeds
  misc_feature: MA Experiment ID: 108488 Result: Up-regulated in Transcription
  misc_feature: MA Experiment ID: 108573 Result: Up-regulated in Transcription
  misc_feature: MA Experiment 108573 PARAMETER Experiment Name: At_Drought_cDNA_P Parameter: Timepoint (hr) Value: 6
  misc_feature: MA Experiment 108573 PARAMETER Experiment Name: At_Drought_cDNA_P Parameter: Tissue Value: Aerial
  misc_feature: MA Experiment 108573 PARAMETER Experiment Name: At_Drought_cDNA_P Parameter: Treatment Value: Drought vs. No Drought
  misc_feature: MA Experiment ID: 108577 Result: Up-regulated in Transcription
  misc_feature: MA Experiment 108577 PARAMETER Experiment Name: At_42deg_Heat_cDNA_P Parameter: Temperature (deg C) Value: 42 vs. 22
  misc_feature: MA Experiment 108577 PARAMETER Experiment Name: At_42deg_Heat_cDNA_P Parameter: Timepoint (hr) Value: 6
  misc_feature: MA Experiment 108577 PARAMETER Experiment Name: At_42deg_Heat_cDNA_P Parameter: Tissue Value: Aerial
  misc_feature: MA Experiment ID: 108595 Result: Down-regulated in Transcription
  misc_feature: MA Experiment 108595 PARAMETER Experiment Name: At_Ler-pi_Ovule_cDNA_P Parameter: Plant Line Value: null
  misc_feature: MA Experiment ID: 20000072 Result: Down-regulated in Transcription
  misc_feature: MA Experiment 20000072 PARAMETER Experiment Name: At_100uM_ABA_Mutants_cDNA_P Parameter: Plant Line Value: CS8105
  misc_feature: MA Experiment 20000072 PARAMETER Experiment Name: At_100uM_ABA_Mutants_cDNA_P Parameter: Timepoint (hr) Value: 6
  misc_feature: MA Experiment 20000072 PARAMETER Experiment Name: At_100uM_ABA_Mutants_cDNA_P Parameter: Tissue Value: Aerial
  misc_feature: MA Experiment 20000072 PARAMETER Experiment Name: At_100uM_ABA_Mutants_cDNA_P Parameter: Treatment Value: 100uM ABA vs. No Treatment
  misc_feature: MA Experiment ID: 20000086 Result: Down-regulated in Transcription
  misc_feature: MA Experiment 20000086 PARAMETER Experiment Name: At_100uM_ABA_Mutants_cDNA_P Parameter: Plant Line Value: CS22
  misc_feature: MA Experiment 20000086 PARAMETER Experiment Name: At_100uM_ABA_Mutants_cDNA_P Parameter: Timepoint (hr) Value: 6
  misc_feature: MA Experiment 20000086 PARAMETER Experiment Name: At_100uM_ABA_Mutants_cDNA_P Parameter: Tissue Value: Aerial
  misc_feature: MA Experiment 20000086 PARAMETER Experiment Name: At_100uM_ABA_Mutants_cDNA_P Parameter: Treatment Value: 100uM ABA vs. No Treatment
  misc_feature: MA Experiment ID: 20000087 Result: Down-regulated in Transcription
  misc_feature: MA Experiment 20000087 PARAMETER Experiment Name: At_100uM_ABA_Mutants_cDNA_P Parameter: Plant Line Value: WS
  misc_feature: MA Experiment 20000087 PARAMETER Experiment Name: At_100uM_ABA_Mutants_cDNA_P Parameter: Timepoint (hr) Value: 6
  misc_feature: MA Experiment 20000087 PARAMETER Experiment Name: At_100uM_ABA_Mutants_cDNA_P Parameter: Tissue Value: Aerial
  misc_feature: MA Experiment 20000087 PARAMETER Experiment Name: At_100uM_ABA_Mutants_cDNA_P Parameter: Treatment Value: 100uM ABA vs. No Treatment
  misc_feature: MA Experiment ID: 20000089 Result: Down-regulated in Transcription
  misc_feature: MA Experiment ID: 20000090 Result: Down-regulated in Transcription
  misc_feature: MA Experiment ID: 20001248 Result: Down-regulated in Transcription
  misc_feature: MA Experiment 20001248 PARAMETER Experiment Name: At_Far-red-induction_P Parameter: Age (day) Value: 7
  misc_feature: MA Experiment 20001248 PARAMETER Experiment Name: At_Far-red-induction_P Parameter: Light Value: Far-red vs. White
  misc_feature: MA Experiment 20001248 PARAMETER Experiment Name: At_Far-red-induction_P Parameter: Organism Value: A. thaliana
  misc_feature: MA Experiment 20001248 PARAMETER Experiment Name: At_Far-red-induction_P Parameter: Plant Line Value: Columbia
  misc_feature: MA Experiment 20001248 PARAMETER Experiment Name: At_Far-red-induction_P Parameter: Timepoint (hr) Value: 4
  misc_feature: MA Experiment 20001248 PARAMETER Experiment Name: At_Far-red-induction_P Parameter: Tissue Value: Whole Plant

SEQ ID NO: 94930 - protein, 481 aa, Arabidopsis thaliana; identical to SEQ ID NO: 41378
  peptide (1)..(481): Ceres Seq. ID no. 12726731
  misc_feature (118)..(465): Pfam Name: Aminotransferase class I and II Pfam Description: Aminotransferase class I and II
  misc_feature (1)..(481): Homolog of NCBI NO: 15223186 NR Description: putative alanine aminotransferase; protein id: supported by cDNA: 120310., supported by cDNA: gi_14334913, by cDNA: gi_17104534 [Arabidopsis thaliana]
  misc_feature (1)..(481): Homolog of NCBI NO: 21537112 NR Description: putative alanine aminotransferase [Arabidopsis
  misc_feature (1)..(481): Homolog of NCBI NO: 30688330 NR Description: alanine aminotransferase -related [Arabidopsis
  misc_feature (1)..(481): Homolog of NCBI NO: 16604499 NR Description: At1g23310/F26F24_4 [Arabidopsis thaliana]
  misc_feature (1)..(481): Homolog of NCBI NO: 13430566 NR Description: putative alanine aminotransferase [Arabidopsis
  misc_feature (4)..(481): Homolog of NCBI NO: 29569153 NR Description: alanine aminotransferase [Oryza sativa (indica
  misc_feature (4)..(481): Homolog of NCBI NO: 34899390 NR Description: putative alanine aminotransferase [Oryza sativa
  misc_feature (103)..(481): Homolog of NCBI NO: 14596229 NR Description: alanine aminotransferase-like protein
  misc_feature (4)..(473): Homolog of NCBI NO: 7434113 NR Description: alanine transaminase (EC 2.6.1.2) - Chlamydomonas
  misc_feature (1)..(474): Homolog of NCBI NO: 37533928 NR Description: putative alanine aminotransferase [Oryza sativa

SEQ ID NO: 94931 - protein, 403 aa, Arabidopsis thaliana; identical to SEQ ID NO: 41379
  peptide (1)..(403): Ceres Seq. ID no. 12726732
  misc_feature (40)..(387): Pfam Name: Aminotransferase class I and II Pfam Description: Aminotransferase class I and II
  misc_feature (1)..(403): Homolog of NCBI NO: 15223186 NR Description: putative alanine aminotransferase; protein id: supported by cDNA: 120310., supported by cDNA: gi_14334913, by cDNA: gi_17104534 [Arabidopsis thaliana]
  misc_feature (1)..(403): Homolog of NCBI NO: 21537112 NR Description: putative alanine aminotransferase [Arabidopsis
  misc_feature (1)..(403): Homolog of NCBI NO: 30688330 NR Description: alanine aminotransferase -related [Arabidopsis
  misc_feature (1)..(403): Homolog of NCBI NO: 16604499 NR Description: At1g23310/F26F24_4 [Arabidopsis thaliana]
  misc_feature (1)..(403): Homolog of NCBI NO: 13430566 NR Description: putative alanine aminotransferase [Arabidopsis
  misc_feature (1)..(403): Homolog of NCBI NO: 29569153 NR Description: alanine aminotransferase [Oryza sativa (indica
  misc_feature (1)..(403): Homolog of NCBI NO: 34899390 NR Description: putative alanine aminotransferase [Oryza sativa
  misc_feature (25)..(403): Homolog of NCBI NO: 14596229 NR Description: alanine aminotransferase-like protein
  misc_feature (1)..(395): Homolog of NCBI NO: 7434113 NR Description: alanine transaminase (EC 2.6.1.2) - Chlamydomonas
  misc_feature (1)..(396): Homolog of NCBI NO: 37533928 NR Description: putative alanine aminotransferase [Oryza sativa

SEQ ID NO: 94932 - protein, 338 aa, Arabidopsis thaliana; identical to SEQ ID NO: 41380
  peptide (1)..(338): Ceres Seq. ID no. 12726733
  misc_feature (1)..(322): Pfam Name: Aminotransferase class I and II Pfam Description: Aminotransferase class I and II
  misc_feature (1)..(338): Homolog of NCBI NO: 15223186 NR Description: putative alanine aminotransferase; protein id: supported by cDNA: 120310., supported by cDNA: gi_14334913, by cDNA: gi_17104534 [Arabidopsis thaliana]
  misc_feature (1)..(338): Homolog of NCBI NO: 21537112 NR Description: putative alanine aminotransferase [Arabidopsis
  misc_feature (1)..(338): Homolog of NCBI NO: 30688330 NR Description: alanine aminotransferase -related [Arabidopsis
  misc_feature (1)..(338): Homolog of NCBI NO: 16604499 NR Description: At1g23310/F26F24_4 [Arabidopsis thaliana]
  misc_feature (1)..(338): Homolog of NCBI NO: 13430566 NR Description: putative alanine aminotransferase [Arabidopsis
  misc_feature (1)..(338): Homolog of NCBI NO: 29569153 NR Description: alanine aminotransferase [Oryza sativa (indica
  misc_feature (1)..(338): Homolog of NCBI NO: 34899390 NR Description: putative alanine aminotransferase [Oryza sativa
  misc_feature (1)..(338): Homolog of NCBI NO: 14596229 NR Description: alanine aminotransferase-like protein
  misc_feature (1)..(330): Homolog of NCBI NO: 7434113 NR Description: alanine transaminase (EC 2.6.1.2) - Chlamydomonas
  misc_feature (1)..(331): Homolog of NCBI NO: 37533928 NR Description: putative alanine aminotransferase [Oryza sativa

SEQ ID NO: 94933 - DNA, 1329 bp, Arabidopsis thaliana; identical to SEQ ID NO: 91177
  misc_feature (1)..(1329): Ceres Seq. ID no. 12726744
  misc_feature: MA Experiment ID: 20000184 Result: Down-regulated in Transcription
  misc_feature: MA Experiment 20000184 PARAMETER Experiment Name: At_Shoots__P Parameter: Age (day) Value: 7
  misc_feature: MA Experiment 20000184 PARAMETER Experiment Name: At_Shoots__P Parameter: Tissue Value: Shoots vs. Whole Plant
  misc_feature: MA Experiment ID: 20000227 Result: Up-regulated in Transcription
  misc_feature: MA Experiment 20000227 PARAMETER Experiment Name: At_Root-Tips-vs-Tops_P Parameter: Tissue Value: Root Tips vs. Root Tops
  misc_feature: MA Experiment ID: 20000495 Result: Down-regulated in Transcription
  misc_feature: MA Experiment 20000495 PARAMETER Experiment Name: At_Guard_Cells_P Parameter: Harvest Date Value: 8/2/2002
  misc_feature: MA Experiment 20000495 PARAMETER Experiment Name: At_Guard_Cells_P Parameter: Organism Value: A. thaliana
  misc_feature: MA Experiment 20000495 PARAMETER Experiment Name: At_Guard_Cells_P Parameter: Tissue Value: Guard Cells vs. Leaves
  misc_feature: MA Experiment ID: 20001247 Result: Up-regulated in Transcription
  misc_feature: MA Experiment 20001247 PARAMETER Experiment Name: At_Far-red-induction_P Parameter: Age (day) Value: 7
  misc_feature: MA Experiment 20001247 PARAMETER Experiment Name: At_Far-red-induction_P Parameter: Light Value: Far-red vs. White
  misc_feature: MA Experiment 20001247 PARAMETER Experiment Name: At_Far-red-induction_P Parameter: Organism Value: A. thaliana
  misc_feature: MA Experiment 20001247 PARAMETER Experiment Name: At_Far-red-induction_P Parameter: Plant Line Value: Columbia
  misc_feature: MA Experiment 20001247 PARAMETER Experiment Name: At_Far-red-induction_P Parameter: Timepoint (hr) Value: 1
  misc_feature: MA Experiment 20001247 PARAMETER Experiment Name: At_Far-red-induction_P Parameter: Tissue Value: Whole Plant
  misc_feature: MA Experiment ID: 20001451 Result: Down-regulated in Transcription
  misc_feature: MA Experiment 20001451 PARAMETER Experiment Name: At_Far-red-induction_P Parameter: Age (day) Value: 7
  misc_feature: MA Experiment 20001451 PARAMETER Experiment Name: At_Far-red-induction_P Parameter: Light Value: Far-red vs. White
  misc_feature: MA Experiment 20001451 PARAMETER Experiment Name: At_Far-red-induction_P Parameter: Organism Value: A. thaliana
  misc_feature: MA Experiment 20001451 PARAMETER Experiment Name: At_Far-red-induction_P Parameter: Plant Line Value: Columbia
  misc_feature: MA Experiment 20001451 PARAMETER Experiment Name: At_Far-red-induction_P Parameter: Timepoint (hr) Value: 24
  misc_feature: MA Experiment 20001451 PARAMETER Experiment Name: At_Far-red-induction_P Parameter: Tissue Value: Whole Plant

SEQ ID NO: 94934 - protein, 442 aa, Arabidopsis thaliana; identical to SEQ ID NO: 71516
  peptide (1)..(442): Ceres Seq. ID no. 12726745
  misc_feature (106)..(199): Pfam Name: Protein of unknown function, DUF593 Pfam Description: Protein of unknown function, DUF593
  misc_feature (1)..(442): Homolog of NCBI NO: 18409667 NR Description: expressed protein; protein id: At1g70750.1,
  misc_feature (1)..(442): Homolog of NCBI NO: 25406071 NR Description: unknown protein F5A18.7 [imported] - Arabidopsis
  misc_feature (1)..(251): Homolog of NCBI NO: 4101564 NR Description: IFA-binding protein [Arabidopsis thaliana]
  misc_feature (82)..(385): Homolog of NCBI NO: 13702818 NR Description: unknown protein [Oryza sativa]
  misc_feature (6)..(390): Homolog of NCBI NO: 11357812 NR Description: hypothetical protein F5E19_60 - Arabidopsis >gi|9755724|emb|CAC01836.1| putative protein [Arabidopsis
  misc_feature (6)..(390): Homolog of NCBI NO: 30685989 NR Description: expressed protein [Arabidopsis thaliana]
  misc_feature (64)..(437): Homolog of NCBI NO: 11357812 NR Description: hypothetical protein F5E19_60 - Arabidopsis >gi|9755724|emb|CAC01836.1| putative protein [Arabidopsis
  misc_feature (64)..(437): Homolog of NCBI NO: 30685989 NR Description: expressed protein [Arabidopsis thaliana]
  misc_feature (70)..(305): Homolog of NCBI NO: 25406384 NR Description: hypothetical protein F9E10.32 [imported] - thaliana >gi|5882740|gb|AAD55293.1|AC008263_24 F25A4.20
  misc_feature (70)..(305): Homolog of NCBI NO: 26451391 NR Description: unknown protein [Arabidopsis thaliana]

SEQ ID NO: 94935 - protein, 386 aa, Arabidopsis thaliana; identical to SEQ ID NO: 71517
  peptide (1)..(386): Ceres Seq. ID no. 12726746
  misc_feature (50)..(143): Pfam Name: Protein of unknown function, DUF593 Pfam Description: Protein of unknown function, DUF593
  misc_feature (1)..(386): Homolog of NCBI NO: 18409667 NR Description: expressed protein; protein id: At1g70750.1,
  misc_feature (1)..(386): Homolog of NCBI NO: 25406071 NR Description: unknown protein F5A18.7 [imported] - Arabidopsis
  misc_feature (1)..(195): Homolog of NCBI NO: 4101564 NR Description: IFA-binding protein [Arabidopsis thaliana]
  misc_feature (26)..(329): Homolog of NCBI NO: 13702818 NR Description: unknown protein [Oryza sativa]
  misc_feature (1)..(334): Homolog of NCBI NO: 11357812 NR Description: hypothetical protein F5E19_60 - Arabidopsis >gi|9755724|emb|CAC01836.1| putative protein [Arabidopsis
  misc_feature (1)..(334): Homolog of NCBI NO: 30685989 NR Description: expressed protein [Arabidopsis thaliana]
  misc_feature (8)..(381): Homolog of NCBI NO: 11357812 NR Description: hypothetical protein F5E19_60 - Arabidopsis >gi|9755724|emb|CAC01836.1| putative protein [Arabidopsis
  misc_feature (8)..(381): Homolog of NCBI NO: 30685989 NR Description: expressed protein [Arabidopsis thaliana]
  misc_feature (14)..(249): Homolog of NCBI NO: 25406384 NR Description: hypothetical protein F9E10.32 [imported] - thaliana >gi|5882740|gb|AAD55293.1|AC008263_24 F25A4.20
  misc_feature (14)..(249): Homolog of NCBI NO: 26451391 NR Description: unknown protein [Arabidopsis thaliana]

SEQ ID NO: 94936 - protein, 369 aa, Arabidopsis thaliana; identical to SEQ ID NO: 91180
  peptide (1)..(369): Ceres Seq. ID no. 12726747
  misc_feature (33)..(126): Pfam Name: Protein of unknown function, DUF593 Pfam Description: Protein of unknown function, DUF593
  misc_feature (1)..(369): Homolog of NCBI NO: 18409667 NR Description: expressed protein; protein id: At1g70750.1,
  misc_feature (1)..(369): Homolog of NCBI NO: 25406071 NR Description: unknown protein F5A18.7 [imported] - Arabidopsis
  misc_feature (1)..(178): Homolog of NCBI NO: 4101564 NR Description: IFA-binding protein [Arabidopsis thaliana]
  misc_feature (9)..(312): Homolog of NCBI NO: 13702818 NR Description: unknown protein [Oryza sativa]
  misc_feature (1)..(317): Homolog of NCBI NO: 11357812 NR Description: hypothetical protein F5E19_60 - Arabidopsis >gi|9755724|emb|CAC01836.1| putative protein [Arabidopsis
  misc_feature (1)..(317): Homolog of NCBI NO: 30685989 NR Description: expressed protein [Arabidopsis thaliana]
  misc_feature (1)..(364): Homolog of NCBI NO: 11357812 NR Description: hypothetical protein F5E19_60 - Arabidopsis >gi|9755724|emb|CAC01836.1| putative protein [Arabidopsis
  misc_feature (1)..(364): Homolog of NCBI NO: 30685989 NR Description: expressed protein [Arabidopsis thaliana]
  misc_feature (1)..(232): Homolog of NCBI NO: 25406384 NR Description: hypothetical protein F9E10.32 [imported] - thaliana >gi|5882740|gb|AAD55293.1|AC008263_24 F25A4.20
  misc_feature (1)..(232): Homolog of NCBI NO: 26451391 NR Description: unknown protein [Arabidopsis thaliana]

SEQ ID NO: 94937 - DNA, 525 bp, Arabidopsis thaliana; identical to SEQ ID NO: 91181
  misc_feature (1)..(525): Ceres Seq. ID no. 12726748
  misc_feature: MA Experiment ID: 20000179 Result: Down-regulated in Transcription
  misc_feature: MA Experiment 20000179 PARAMETER Experiment Name: At_Germinating_Seeds_P Parameter: Age (hr) Value: 6 vs. 0
  misc_feature: MA Experiment 20000179 PARAMETER Experiment Name: At_Germinating_Seeds_P Parameter: Tissue Value: Germinating Seeds
  misc_feature: MA Experiment ID: 20000180 Result: Down-regulated in Transcription
  misc_feature: MA Experiment 20000180 PARAMETER Experiment Name: At_Germinating_Seeds_P Parameter: Age (hr) Value: 24 vs. 0
  misc_feature: MA Experiment 20000180 PARAMETER Experiment Name: At_Germinating_Seeds_P Parameter: Tissue Value: Germinating Seeds
  misc_feature: MA Experiment ID: 20000184 Result: Down-regulated in Transcription
  misc_feature: MA Experiment 20000184 PARAMETER Experiment Name: At_Shoots__P Parameter: Age (day) Value: 7
  misc_feature: MA Experiment 20000184 PARAMETER Experiment Name: At_Shoots__P Parameter: Tissue Value: Shoots vs. Whole Plant
  misc_feature: MA Experiment ID: 20000185 Result: Down-regulated in Transcription
  misc_feature: MA Experiment 20000185 PARAMETER Experiment Name: At_Roots__P Parameter: Age (day) Value: 7 vs. 21
  misc_feature: MA Experiment 20000185 PARAMETER Experiment Name: At_Roots__P Parameter: Organism Value: A. thaliana
  misc_feature: MA Experiment 20000185 PARAMETER Experiment Name: At_Roots__P Parameter: Tissue Value: Roots vs. Whole Plant
  misc_feature: MA Experiment ID: 20000227 Result: Down-regulated in Transcription
  misc_feature: MA Experiment 20000227 PARAMETER Experiment Name: At_Root-Tips-vs-Tops_P Parameter: Tissue Value: Root Tips vs. Root Tops
  misc_feature: MA Experiment ID: 20000264 Result: Down-regulated in Transcription
  misc_feature: MA Experiment 20000264 PARAMETER Experiment Name: At_Open_Flower_P Parameter: Age (day) Value: 21
  misc_feature: MA Experiment 20000264 PARAMETER Experiment Name: At_Open_Flower_P Parameter: Plant Line Value: WS
  misc_feature: MA Experiment 20000264 PARAMETER Experiment Name: At_Open_Flower_P Parameter: Tissue Value: Open Flower vs. Whole Plant
  misc_feature: MA Experiment ID: 20000437 Result: Up-regulated in Transcription
  misc_feature: MA Experiment 20000437 PARAMETER Experiment Name: At_Drought_P Parameter: Age (day) Value: 8
  misc_feature: MA Experiment 20000437 PARAMETER Experiment Name: At_Drought_P Parameter: Organism Value: A. thaliana
  misc_feature: MA Experiment 20000437 PARAMETER Experiment Name: At_Drought_P Parameter: Plant Line Value: WS
  misc_feature: MA Experiment 20000437 PARAMETER Experiment Name: At_Drought_P Parameter: Timepoint (hr) Value: 24
  misc_feature: MA Experiment 20000437 PARAMETER Experiment Name: At_Drought_P Parameter: Tissue Value: Whole Plant
  misc_feature: MA Experiment 20000437 PARAMETER Experiment Name: At_Drought_P Parameter: Treatment Value: Drought vs. No Drought
  misc_feature: MA Experiment ID: 20000438 Result: Down-regulated in Transcription
  misc_feature: MA Experiment 20000438 PARAMETER Experiment Name: At_Shoots__P Parameter: Age (day) Value: 14
  misc_feature: MA Experiment 20000438 PARAMETER Experiment Name: At_Shoots__P Parameter: Tissue Value: Shoots vs. Whole Plant
  misc_feature: MA Experiment ID: 20000439 Result: Down-regulated in Transcription
  misc_feature: MA Experiment 20000439 PARAMETER Experiment Name: At_Roots__P Parameter: Age (day) Value: 14 vs. 21
  misc_feature: MA Experiment 20000439 PARAMETER Experiment Name: At_Roots__P Parameter: Organism Value: A. thaliana
  misc_feature: MA Experiment 20000439 PARAMETER Experiment Name: At_Roots__P Parameter: Tissue Value: Roots vs. Whole Plant
  misc_feature: MA Experiment ID: 20000441 Result: Down-regulated in Transcription
  misc_feature: MA Experiment 20000441 PARAMETER Experiment Name: At_1uM_BR-BRZ__P Parameter: Tissue Value: Shoot Apices
  misc_feature: MA Experiment 20000441 PARAMETER Experiment Name: At_1uM_BR-BRZ__P Parameter: Treatment Value: 1uM BR vs. No Treatment
  misc_feature: MA Experiment ID: 20000495 Result: Down-regulated in Transcription
  misc_feature: MA Experiment 20000495 PARAMETER Experiment Name: At_Guard_Cells_P Parameter: Harvest Date Value: 8/2/2002
  misc_feature: MA Experiment 20000495 PARAMETER Experiment Name: At_Guard_Cells_P Parameter: Organism Value: A. thaliana
  misc_feature: MA Experiment 20000495 PARAMETER Experiment Name: At_Guard_Cells_P Parameter: Tissue Value: Guard Cells vs. Leaves
  misc_feature: MA Experiment ID: 20001450 Result: Down-regulated in Transcription
  misc_feature: MA Experiment 20001450 PARAMETER Experiment Name: At_Far-red-induction_P Parameter: Age (day) Value: 7
  misc_feature: MA Experiment 20001450 PARAMETER Experiment Name: At_Far-red-induction_P Parameter: Light Value: Far-red vs. White
  misc_feature: MA Experiment 20001450 PARAMETER Experiment Name: At_Far-red-induction_P Parameter: Organism Value: A. thaliana
  misc_feature: MA Experiment 20001450 PARAMETER Experiment Name: At_Far-red-induction_P Parameter: Plant Line Value: Columbia
  misc_feature: MA Experiment 20001450 PARAMETER Experiment Name: At_Far-red-induction_P Parameter: Timepoint (hr) Value: 8
  misc_feature: MA Experiment 20001450 PARAMETER Experiment Name: At_Far-red-induction_P Parameter: Tissue Value: Whole Plant
  misc_feature: MA Experiment ID: 20001451 Result: Down-regulated in Transcription
  misc_feature: MA Experiment 20001451 PARAMETER Experiment Name: At_Far-red-induction_P Parameter: Age (day) Value: 7
  misc_feature: MA Experiment 20001451 PARAMETER Experiment Name: At_Far-red-induction_P Parameter: Light Value: Far-red vs. White
  misc_feature: MA Experiment 20001451 PARAMETER Experiment Name: At_Far-red-induction_P Parameter: Organism Value: A. thaliana
  misc_feature: MA Experiment 20001451 PARAMETER Experiment Name: At_Far-red-induction_P Parameter: Plant Line Value: Columbia
  misc_feature: MA Experiment 20001451 PARAMETER Experiment Name: At_Far-red-induction_P Parameter: Timepoint (hr) Value: 24
  misc_feature: MA Experiment 20001451 PARAMETER Experiment Name: At_Far-red-induction_P Parameter: Tissue Value: Whole Plant

SEQ ID NO: 94938 - protein, 174 aa, Arabidopsis thaliana; identical to SEQ ID NO: 91182
  peptide (1)..(174): Ceres Seq. ID no. 12726749
  misc_feature (17)..(96): Pfam Name: C2 domain Pfam Description: C2 domain
  misc_feature (1)..(174): Homolog of NCBI NO: 15223248 NR Description: unknown protein; protein id: At1g70800.1
  misc_feature (10)..(174): Homolog of NCBI NO: 18409682 NR Description: expressed protein; protein id: At1g70810.1, by cDNA: 23322., supported by cDNA: gi_13430459 [Arabidopsis
  misc_feature (10)..(174): Homolog of NCBI NO: 13430460 NR Description: unknown protein [Arabidopsis thaliana]
  misc_feature (10)..(172): Homolog of NCBI NO: 15220022 NR Description: unknown protein; protein id: At1g23140.1
  misc_feature (8)..(174): Homolog of NCBI NO: 18409675 NR Description: zinc finger and C2 domain protein, putative; id: At1g70790.1, supported by cDNA: 148076. [Arabidopsis
  misc_feature (8)..(174): Homolog of NCBI NO: 15226306 NR Description: hypothetical protein; protein id: At2g01540.1, by cDNA: gi_17065055, supported by cDNA: gi_20260029 [Arabidopsis >gi|25410912|pir||A84426 hypothetical protein At2g01540
  misc_feature (10)..(174): Homolog of NCBI NO: 15240322 NR Description: putative protein; protein id: At5g37740.1, by cDNA: gi_18377800, supported by cDNA: gi_21281220 [Arabidopsis
  misc_feature (10)..(174): Homolog of NCBI NO: 15221907 NR Description: unknown protein; protein id: At1g48590.1
  misc_feature (10)..(174): Homolog of NCBI NO: 25405940 NR Description: protein T1N15.21 [imported] - Arabidopsis >gi|8778695|gb|AAF79703.1|AC020889_11 T1N15.21 [Arabidopsis
  misc_feature (10)..(174): Homolog of NCBI NO: 30684739 NR Description: C2 domain-containing protein [Arabidopsis

SEQ ID NO: 94939 - protein, 165 aa, Arabidopsis thaliana; identical to SEQ ID NO: 91183
  peptide (1)..(165): Ceres Seq. ID no. 12726750
  misc_feature (8)..(87): Pfam Name: C2 domain Pfam Description: C2 domain
  misc_feature (1)..(165): Homolog of NCBI NO: 15223248 NR Description: unknown protein; protein id: At1g70800.1
  misc_feature (1)..(165): Homolog of NCBI NO: 18409682 NR Description: expressed protein; protein id: At1g70810.1, by cDNA: 23322., supported by cDNA: gi_13430459 [Arabidopsis
  misc_feature (1)..(165): Homolog of NCBI NO: 13430460 NR Description: unknown protein [Arabidopsis thaliana]
  misc_feature (1)..(163): Homolog of NCBI NO: 15220022 NR Description: unknown protein; protein id: At1g23140.1
  misc_feature (1)..(165): Homolog of NCBI NO: 18409675 NR Description: zinc finger and C2 domain protein, putative; id: At1g70790.1, supported by cDNA: 148076. [Arabidopsis
  misc_feature (1)..(165): Homolog of NCBI NO: 15226306 NR Description: hypothetical protein; protein id: At2g01540.1, by cDNA: gi_17065055, supported by cDNA: gi_20260029 [Arabidopsis >gi|25410912|pir||A84426 hypothetical protein At2g01540
  misc_feature (1)..(165): Homolog of NCBI NO: 15240322 NR Description: putative protein; protein id: At5g37740.1, by cDNA: gi_18377800, supported by cDNA: gi_21281220 [Arabidopsis
  misc_feature (1)..(165): Homolog of NCBI NO: 15221907 NR Description: unknown protein; protein id: At1g48590.1
  misc_feature (1)..(165): Homolog of NCBI NO: 25405940 NR Description: protein T1N15.21 [imported] - Arabidopsis >gi|8778695|gb|AAF79703.1|AC020889_11 T1N15.21 [Arabidopsis
  misc_feature (1)..(165): Homolog of NCBI NO: 30684739 NR Description: C2 domain-containing protein [Arabidopsis

SEQ ID NO: 94940 - protein, 132 aa, Arabidopsis thaliana; identical to SEQ ID NO: 91184
  peptide (1)..(132): Ceres Seq. ID no. 12726751
  misc_feature (1)..(54): Pfam Name: C2 domain Pfam Description: C2 domain
  misc_feature (1)..(132): Homolog of NCBI NO: 15223248 NR Description: unknown protein; protein id: At1g70800.1
  misc_feature (1)..(132): Homolog of NCBI NO: 18409682 NR Description: expressed protein; protein id: At1g70810.1, by cDNA: 23322., supported by cDNA: gi_13430459 [Arabidopsis
  misc_feature (1)..(132): Homolog of NCBI NO: 13430460 NR Description: unknown protein [Arabidopsis thaliana]
  misc_feature (1)..(130): Homolog of NCBI NO: 15220022 NR Description: unknown protein; protein id: At1g23140.1
  misc_feature (1)..(132): Homolog of NCBI NO: 18409675 NR Description: zinc finger and C2 domain protein, putative; id: At1g70790.1, supported by cDNA: 148076. [Arabidopsis
  misc_feature (1)..(132): Homolog of NCBI NO: 15226306 NR Description: hypothetical protein; protein id: At2g01540.1, by cDNA: gi_17065055, supported by cDNA: gi_20260029 [Arabidopsis >gi|25410912|pir||A84426 hypothetical protein At2g01540
  misc_feature (1)..(132): Homolog of NCBI NO: 15240322 NR Description: putative protein; protein id: At5g37740.1, by cDNA: gi_18377800, supported by cDNA: gi_21281220 [Arabidopsis
  misc_feature (1)..(132): Homolog of NCBI NO: 15221907 NR Description: unknown protein; protein id: At1g48590.1
  misc_feature (1)..(132): Homolog of NCBI NO: 25405940 NR Description: protein T1N15.21 [imported] - Arabidopsis >gi|8778695|gb|AAF79703.1|AC020889_11 T1N15.21 [Arabidopsis
  misc_feature (1)..(132): Homolog of NCBI NO: 30684739 NR Description: C2 domain-containing protein [Arabidopsis

SEQ ID NO: 94941 - DNA, 531 bp, Arabidopsis thaliana; identical to SEQ ID NO: 91185
  misc_feature (1)..(531): Ceres Seq. ID no. 12726771
  misc_feature: MA Experiment ID: 20000184 Result: Down-regulated in Transcription
  misc_feature: MA Experiment 20000184 PARAMETER Experiment Name: At_Shoots__P Parameter: Age (day) Value: 7
  misc_feature: MA Experiment 20000184 PARAMETER Experiment Name: At_Shoots__P Parameter: Tissue Value: Shoots vs. Whole Plant
  misc_feature: MA Experiment ID: 20000437 Result: Up-regulated in Transcription
  misc_feature: MA Experiment 20000437 PARAMETER Experiment Name: At_Drought_P Parameter: Age (day) Value: 8
  misc_feature: MA Experiment 20000437 PARAMETER Experiment Name: At_Drought_P Parameter: Organism Value: A. thaliana
  misc_feature: MA Experiment 20000437 PARAMETER Experiment Name: At_Drought_P Parameter: Plant Line Value: WS
  misc_feature: MA Experiment 20000437 PARAMETER Experiment Name: At_Drought_P Parameter: Timepoint (hr) Value: 24
  misc_feature: MA Experiment 20000437 PARAMETER Experiment Name: At_Drought_P Parameter: Tissue Value: Whole Plant
  misc_feature: MA Experiment 20000437 PARAMETER Experiment Name: At_Drought_P Parameter: Treatment Value: Drought vs. No Drought
  misc_feature: MA Experiment ID: 20000794 Result: Down-regulated in Transcription
  misc_feature: MA Experiment 20000794 PARAMETER Experiment Name: At_Petals_P Parameter: Age (day) Value: 23-25 days
  misc_feature: MA Experiment 20000794 PARAMETER Experiment Name: At_Petals_P Parameter: Plant Line Value: WS
  misc_feature: MA Experiment 20000794 PARAMETER Experiment Name: At_Petals_P Parameter: Tissue Value: Petals vs. Whole plant

SEQ ID NO: 94942 - protein, 176 aa, Arabidopsis thaliana; identical to SEQ ID NO: 44157
  peptide (1)..(176): Ceres Seq. ID no. 12726772
  misc_feature (37)..(93): Pfam Name: Homeobox domain Pfam Description: Homeobox domain
  misc_feature (1)..(176): Homolog of NCBI NO: 30698765 NR Description: homeodomain-leucine zipper protein, putative thaliana] >gi|26451347|dbj|BAC42774.1| unknown protein thaliana] >gi|28973379|gb|AAO64014.1| putative homeodomain
  misc_feature (1)..(147): Homolog of NCBI NO: 5006851 NR Description: homeodomain leucine zipper protein [Oryza sativa]
  misc_feature (1)..(147): Homolog of NCBI NO: 34911664 NR Description: putative homeodomain-leucine zipper [Oryza sativa
  misc_feature (5)..(155): Homolog of NCBI NO: 30677923 NR Description: homeodomain-leucine zipper protein ATHB-17
  misc_feature (6)..(155): Homolog of NCBI NO: 25386214 NR Description: probable homeodomain transcription factor - Arabidopsis thaliana >gi|3785973|gb|AAC67320.1| putative
  misc_feature (11)..(169): Homolog of NCBI NO: 12230908 NR Description: Homeobox-leucine zipper protein HAT14 (HD-ZIP leucine zipper protein~gene_id:MPH15.6 [Arabidopsis thaliana]
  misc_feature (11)..(169): Homolog of NCBI NO: 22326632 NR Description: homeobox-leucine zipper protein HAT14 (HD-Zip
  misc_feature (27)..(169): Homolog of NCBI NO: 25386203 NR Description: homeobox protein HAT14 [imported] - Arabidopsis
  misc_feature (11)..(169): Homolog of NCBI NO: 29028870 NR Description: At5g06710 [Arabidopsis thaliana]
  misc_feature (11)..(155): Homolog of NCBI NO: 25457630 NR Description: homeobox protein THOM1 [imported] - tomato

SEQ ID NO: 94943 - protein, 158 aa, Arabidopsis thaliana; identical to SEQ ID NO: 44158
  peptide (1)..(158): Ceres Seq. ID no. 12726773
  misc_feature (19)..(75): Pfam Name: Homeobox domain Pfam Description: Homeobox domain
  misc_feature (1)..(158): Homolog of NCBI NO: 30698765 NR Description: homeodomain-leucine zipper protein, putative thaliana] >gi|26451347|dbj|BAC42774.1| unknown protein thaliana] >gi|28973379|gb|AAO64014.1| putative homeodomain
  misc_feature (1)..(129): Homolog of NCBI NO: 5006851 NR Description: homeodomain leucine zipper protein [Oryza sativa]
  misc_feature (1)..(129): Homolog of NCBI NO: 34911664 NR Description: putative homeodomain-leucine zipper [Oryza sativa
  misc_feature (1)..(137): Homolog of NCBI NO: 30677923 NR Description: homeodomain-leucine zipper protein ATHB-17
  misc_feature (1)..(137): Homolog of NCBI NO: 25386214 NR Description: probable homeodomain transcription factor - Arabidopsis thaliana >gi|3785973|gb|AAC67320.1| putative
  misc_feature (1)..(151): Homolog of NCBI NO: 12230908 NR Description: Homeobox-leucine zipper protein HAT14 (HD-ZIP leucine zipper protein~gene_id:MPH15.6 [Arabidopsis thaliana]
  misc_feature (1)..(151): Homolog of NCBI NO: 22326632 NR Description: homeobox-leucine zipper protein HAT14 (HD-Zip
  misc_feature (9)..(151): Homolog of NCBI NO: 25386203 NR Description: homeobox protein HAT14 [imported] - Arabidopsis
  misc_feature (1)..(151): Homolog of NCBI NO: 29028870 NR Description: At5g06710 [Arabidopsis thaliana]
  misc_feature (1)..(137): Homolog of NCBI NO: 25457630 NR Description: homeobox protein THOM1 [imported] - tomato

SEQ ID NO: 94944 - DNA, 588 bp, Arabidopsis thaliana; identical to SEQ ID NO: 91188
  misc_feature (1)..(588): Ceres Seq. ID no. 12726786
  misc_feature: MA Experiment ID: 20000169 Result: Up-regulated in Transcription
  misc_feature: MA Experiment 20000169 PARAMETER Experiment Name: At_100uM_ABA_P Parameter: Age (day) Value: 14
  misc_feature: MA Experiment 20000169 PARAMETER Experiment Name: At_100uM_ABA_P Parameter: Organism Value: A. thaliana
  misc_feature: MA Experiment 20000169 PARAMETER Experiment Name: At_100uM_ABA_P Parameter: Plant Line Value: WS
  misc_feature: MA Experiment 20000169 PARAMETER Experiment Name: At_100uM_ABA_P Parameter: Timepoint (hr) Value: 6
  misc_feature: MA Experiment 20000169 PARAMETER Experiment Name: At_100uM_ABA_P Parameter: Tissue Value: Aerial
  misc_feature: MA Experiment 20000169 PARAMETER Experiment Name: At_100uM_ABA_P Parameter: Treatment Value: 100uM ABA vs. No Treatment
  misc_feature: MA Experiment ID: 20000180 Result: Down-regulated in Transcription
  misc_feature: MA Experiment 20000180 PARAMETER Experiment Name: At_Germinating_Seeds_P Parameter: Age (hr) Value: 24 vs. 0
  misc_feature: MA Experiment 20000180 PARAMETER Experiment Name: At_Germinating_Seeds_P Parameter: Tissue Value: Germinating Seeds
  misc_feature: MA Experiment ID: 20000264 Result: Up-regulated in Transcription
  misc_feature: MA Experiment 20000264 PARAMETER Experiment Name: At_Open_Flower_P Parameter: Age (day) Value: 21
  misc_feature: MA Experiment 20000264 PARAMETER Experiment Name: At_Open_Flower_P Parameter: Plant Line Value: WS
  misc_feature: MA Experiment 20000264 PARAMETER Experiment Name: At_Open_Flower_P Parameter: Tissue Value: Open Flower vs. Whole Plant
  misc_feature: MA Experiment ID: 20000286 Result: Up-regulated in Transcription
  misc_feature: MA Experiment 20000286 PARAMETER Experiment Name: At_Open_Flower_P Parameter: Age (day) Value: 21
  misc_feature: MA Experiment 20000286 PARAMETER Experiment Name: At_Open_Flower_P Parameter: Plant Line Value: WS
  misc_feature: MA Experiment 20000286 PARAMETER Experiment Name: At_Open_Flower_P Parameter: Tissue Value: Half Open vs. Whole Plant
  misc_feature: MA Experiment ID: 20001248 Result: Down-regulated in Transcription
  misc_feature: MA Experiment 20001248 PARAMETER Experiment Name: At_Far-red-induction_P Parameter: Age (day) Value: 7
  misc_feature: MA Experiment 20001248 PARAMETER Experiment Name: At_Far-red-induction_P Parameter: Light Value: Far-red vs. White
  misc_feature: MA Experiment 20001248 PARAMETER Experiment Name: At_Far-red-induction_P Parameter: Organism Value: A. thaliana
  misc_feature: MA Experiment 20001248 PARAMETER Experiment Name: At_Far-red-induction_P Parameter: Plant Line Value: Columbia
  misc_feature: MA Experiment 20001248 PARAMETER Experiment Name: At_Far-red-induction_P Parameter: Timepoint (hr) Value: 4
  misc_feature: MA Experiment 20001248 PARAMETER Experiment Name: At_Far-red-induction_P Parameter: Tissue Value: Whole Plant
  misc_feature: MA Experiment ID: 20001556 Result: Down-regulated in Transcription
  misc_feature: MA Experiment 20001556 PARAMETER Experiment Name: At_Drought_Soil_Dry_P Parameter: Age (day) Value: 26
  misc_feature: MA Experiment 20001556 PARAMETER Experiment Name: At_Drought_Soil_Dry_P Parameter: Organism Value: A. thaliana
  misc_feature: MA Experiment 20001556 PARAMETER Experiment Name: At_Drought_Soil_Dry_P Parameter: Plant Line Value: WS
  misc_feature: MA Experiment 20001556 PARAMETER Experiment Name: At_Drought_Soil_Dry_P Parameter: Post Timepoint (hr) Value: None
  misc_feature: MA Experiment 20001556 PARAMETER Experiment Name: At_Drought_Soil_Dry_P Parameter: Post-Treatment Value: None
  misc_feature: MA Experiment 20001556 PARAMETER Experiment Name: At_Drought_Soil_Dry_P Parameter: Timepoint (day) Value: 12
  misc_feature: MA Experiment 20001556 PARAMETER Experiment Name: At_Drought_Soil_Dry_P Parameter: Treatment Value: Drought vs. No Drought
  misc_feature: MA Experiment ID: 20001557 Result: Down-regulated in Transcription
  misc_feature: MA Experiment 20001557 PARAMETER Experiment Name: At_Drought_Soil_Dry_P Parameter: Age (day) Value: 27
  misc_feature: MA Experiment 20001557 PARAMETER Experiment Name: At_Drought_Soil_Dry_P Parameter: Organism Value: A. thaliana
  misc_feature: MA Experiment 20001557 PARAMETER Experiment Name: At_Drought_Soil_Dry_P Parameter: Plant Line Value: WS
  misc_feature: MA Experiment 20001557 PARAMETER Experiment Name: At_Drought_Soil_Dry_P Parameter: Post Timepoint (hr) Value: 3
  misc_feature: MA Experiment 20001557 PARAMETER Experiment Name: At_Drought_Soil_Dry_P Parameter: Post-Treatment Value: Re-Water vs. No Drought
  misc_feature: MA Experiment 20001557 PARAMETER Experiment Name: At_Drought_Soil_Dry_P Parameter: Timepoint (day) Value: 13
  misc_feature: MA Experiment 20001557 PARAMETER Experiment Name: At_Drought_Soil_Dry_P Parameter: Treatment Value: Drought vs. No Drought
  misc_feature: MA Experiment ID: 20001558 Result: Down-regulated in Transcription
  misc_feature: MA Experiment 20001558 PARAMETER Experiment Name: At_Drought_Soil_Dry_P Parameter: Age (day) Value: 27
  misc_feature: MA Experiment 20001558 PARAMETER Experiment Name: At_Drought_Soil_Dry_P Parameter: Organism Value: A. thaliana
  misc_feature: MA Experiment 20001558 PARAMETER Experiment Name: At_Drought_Soil_Dry_P Parameter: Plant Line Value: WS
  misc_feature: MA Experiment 20001558 PARAMETER Experiment Name: At_Drought_Soil_Dry_P Parameter: Post Timepoint (hr) Value: 6
  misc_feature: MA Experiment 20001558 PARAMETER Experiment Name: At_Drought_Soil_Dry_P Parameter: Post-Treatment Value: Re-Water vs. No Drought
  misc_feature: MA Experiment 20001558 PARAMETER Experiment Name: At_Drought_Soil_Dry_P Parameter: Timepoint (day) Value: 13
  misc_feature: MA Experiment 20001558 PARAMETER Experiment Name: At_Drought_Soil_Dry_P Parameter: Treatment Value: Drought vs. No Drought

SEQ ID NO: 94945 - protein, 195 aa, Arabidopsis thaliana; identical to SEQ ID NO: 91189
  peptide (1)..(195): Ceres Seq. ID no. 12726787
  misc_feature (1)..(195): Homolog of NCBI NO: 22330562 NR Description: hypothetical protein; protein id: At1g71015.1 thaliana] >gi|5902399|gb|AAD55501.1|AC008148_11 Hypothetical
  misc_feature (1)..(159): Homolog of NCBI NO: 30677912 NR Description: expressed protein [Arabidopsis thaliana]

SEQ ID NO: 94946 - protein, 182 aa, Arabidopsis thaliana; identical to SEQ ID NO: 91190
  peptide (1)..(182): Ceres Seq. ID no. 12726788
  misc_feature (1)..(182): Homolog of NCBI NO: 22330562 NR Description: hypothetical protein; protein id: At1g71015.1 thaliana] >gi|5902399|gb|AAD55501.1|AC008148_11 Hypothetical
  misc_feature (1)..(146): Homolog of NCBI NO: 30677912 NR Description: expressed protein [Arabidopsis thaliana]

SEQ ID NO: 94947 - protein, 125 aa, Arabidopsis thaliana; identical to SEQ ID NO: 91191
  peptide (1)..(125): Ceres Seq. ID no. 12726789
  misc_feature (1)..(125): Homolog of NCBI NO: 22330562 NR Description: hypothetical protein; protein id: At1g71015.1 thaliana] >gi|5902399|gb|AAD55501.1|AC008148_11 Hypothetical
  misc_feature (1)..(89): Homolog of NCBI NO: 30677912 NR Description: expressed protein [Arabidopsis thaliana]

SEQ ID NO: 94948 - DNA, 1773 bp, Arabidopsis thaliana; identical to SEQ ID NO: 91192
  misc_feature (1)..(1773): Ceres Seq. ID no. 12726794
  misc_feature: MA Experiment ID: 20000171 Result: Down-regulated in Transcription
  misc_feature: MA Experiment 20000171 PARAMETER Experiment Name: At_42deg_Heat_P Parameter: Age (day) Value: 14
  misc_feature: MA Experiment 20000171 PARAMETER Experiment Name: At_42deg_Heat_P Parameter: Organism Value: A. thaliana
  misc_feature: MA Experiment 20000171 PARAMETER Experiment Name: At_42deg_Heat_P Parameter: Plant Line Value: WS
  misc_feature: MA Experiment 20000171 PARAMETER Experiment Name: At_42deg_Heat_P Parameter: Temperature (deg C) Value: 42 vs. 22
  misc_feature: MA Experiment 20000171 PARAMETER Experiment Name: At_42deg_Heat_P Parameter: Timepoint (hr) Value: 1
  misc_feature: MA Experiment 20000171 PARAMETER Experiment Name: At_42deg_Heat_P Parameter: Tissue Value: Aerial
  misc_feature: MA Experiment ID: 20000173 Result: Down-regulated in Transcription
  misc_feature: MA Experiment 20000173 PARAMETER Experiment Name: At_42deg_Heat_P Parameter: Age (day) Value: 14
  misc_feature: MA Experiment 20000173 PARAMETER Experiment Name: At_42deg_Heat_P Parameter: Organism Value: A. thaliana
  misc_feature: MA Experiment 20000173 PARAMETER Experiment Name: At_42deg_Heat_P Parameter: Plant Line Value: WS
  misc_feature: MA Experiment 20000173 PARAMETER Experiment Name: At_42deg_Heat_P Parameter: Temperature (deg C) Value: 42 vs. 22
  misc_feature: MA Experiment 20000173 PARAMETER Experiment Name: At_42deg_Heat_P Parameter: Timepoint (hr) Value: 6
  misc_feature: MA Experiment 20000173 PARAMETER Experiment Name: At_42deg_Heat_P Parameter: Tissue Value: Aerial
  misc_feature: MA Experiment ID: 20000235 Result: Up-regulated in Transcription
  misc_feature: MA Experiment 20000235 PARAMETER Experiment Name: At_Siliques_P Parameter: Age (day) Value: 21
  misc_feature: MA Experiment 20000235 PARAMETER Experiment Name: At_Siliques_P Parameter: Organism Value: A. thaliana
  misc_feature: MA Experiment 20000235 PARAMETER Experiment Name: At_Siliques_P Parameter: Plant Line Value: WS
  misc_feature: MA Experiment 20000235 PARAMETER Experiment Name: At_Siliques_P Parameter: Tissue Value: 5-10mm Siliques vs. Whole Plant
  misc_feature: MA Experiment ID: 20001451 Result: Down-regulated in Transcription
  misc_feature: MA Experiment 20001451 PARAMETER Experiment Name: At_Far-red-induction_P Parameter: Age (day) Value: 7
  misc_feature: MA Experiment 20001451 PARAMETER Experiment Name: At_Far-red-induction_P Parameter: Light Value: Far-red vs. White
  misc_feature: MA Experiment 20001451 PARAMETER Experiment Name: At_Far-red-induction_P Parameter: Organism Value: A. thaliana
  misc_feature: MA Experiment 20001451 PARAMETER Experiment Name: At_Far-red-induction_P Parameter: Plant Line Value: Columbia
  misc_feature: MA Experiment 20001451 PARAMETER Experiment Name: At_Far-red-induction_P Parameter: Timepoint (hr) Value: 24
  misc_feature: MA Experiment 20001451 PARAMETER Experiment Name: At_Far-red-induction_P Parameter: Tissue Value: Whole Plant
  misc_feature: MA Experiment ID: 20001911 Result: Down-regulated in Transcription
  misc_feature: MA Experiment 20001911 PARAMETER Experiment Name: At_Drought_Reproduction_P Parameter: Age (day) Value: 40
  misc_feature: MA Experiment 20001911 PARAMETER Experiment Name: At_Drought_Reproduction_P Parameter: Organism Value: A. thaliana
  misc_feature: MA Experiment 20001911 PARAMETER Experiment Name: At_Drought_Reproduction_P Parameter: Plant Line Value: WS
  misc_feature: MA Experiment 20001911 PARAMETER Experiment Name: At_Drought_Reproduction_P Parameter: Timepoint (day) Value: 10
  misc_feature: MA Experiment 20001911 PARAMETER Experiment Name: At_Drought_Reproduction_P Parameter: Tissue Value: Flowers
  misc_feature: MA Experiment 20001911 PARAMETER Experiment Name: At_Drought_Reproduction_P Parameter: Treatment Value: Drought vs. No Drought

SEQ ID NO: 94949 - protein, 395 aa, Arabidopsis thaliana; identical to SEQ ID NO: 91193
  peptide (1)..(395): Ceres Seq. ID no. 12726795
  misc_feature (49)..(274): Pfam Name: Core-2/I-Branching enzyme Pfam Description: Core-2/I-Branching enzyme
  misc_feature (1)..(395): Homolog of NCBI NO: 18409754 NR Description: N-acetylglucosaminyltransferase family enzyme family); protein id: At1g71070.1, supported by cDNA:
  misc_feature (1)..(395): Homolog of NCBI NO: 34895394 NR Description: P0445D12.4 [Oryza sativa (japonica
  misc_feature (28)..(395): Homolog of NCBI NO: 15242532 NR Description: N-acetylglucosaminyltransferase family
  misc_feature (46)..(395): Homolog of NCBI NO: 15242199 NR Description: N-acetylglucosaminyltransferase family enzyme family); protein id: At5g15050.1, supported by cDNA: supported by cDNA: gi_16209673 [Arabidopsis thaliana]
  misc_feature (47)..(395): Homolog of NCBI NO: 15146308 NR Description: AT3g15350/K7L4_15 [Arabidopsis thaliana]
  misc_feature (47)..(395): Homolog of NCBI NO: 18400725 NR Description: N-acetylglucosaminyltransferase family enzyme family); protein id: At3g15350.1, supported by cDNA:
  misc_feature (46)..(394): Homolog of NCBI NO: 32489778 NR Description: OSJNBb0018A10.9 [Oryza sativa (japonica
  misc_feature (30)..(394): Homolog of NCBI NO: 15218824 NR Description: N-acetylglucosaminyltransferase family enzyme family); protein id: At1g03520.1, supported by cDNA: supported by cDNA: gi_20465790 [Arabidopsis thaliana] thaliana
  misc_feature (47)..(394): Homolog of NCBI NO: 15236287 NR Description: N-acetylglucosaminyltransferase family
  misc_feature (8)..(394): Homolog of NCBI NO: 15229570 NR Description: hypothetical protein; protein id: At3g24040.1 thaliana] >gi|9294673|dbj|BAB03022.1|

SEQ ID NO: 94950 - DNA, 1543 bp, Arabidopsis thaliana; identical to SEQ ID NO: 91194
  misc_feature (1)..(1543): Ceres Seq. ID no. 12726796
  misc_feature: MA Experiment ID: 108461 Result: Down-regulated in Transcription
  misc_feature: MA Experiment 108461 PARAMETER Experiment Name: At_Germinating_Seeds_cDNA_P Parameter: Age (day) Value: 1 vs. 0
  misc_feature: MA Experiment 108461 PARAMETER Experiment Name: At_Germinating_Seeds_cDNA_P Parameter: Tissue Value: Germinating Seeds
  misc_feature: MA Experiment ID: 108462 Result: Down-regulated in Transcription
  misc_feature: MA Experiment 108462 PARAMETER Experiment Name: At_Germinating_Seeds_cDNA_P Parameter: Age (day) Value: 2 vs. 0
  misc_feature: MA Experiment 108462 PARAMETER Experiment Name: At_Germinating_Seeds_cDNA_P Parameter: Tissue Value: Germinating Seeds
  misc_feature: MA Experiment ID: 108464 Result: Down-regulated in Transcription
  misc_feature: MA Experiment 108464 PARAMETER Experiment Name: At_Germinating_Seeds_cDNA_P Parameter: Age (day) Value: 4 vs. 0
  misc_feature: MA Experiment 108464 PARAMETER Experiment Name: At_Germinating_Seeds_cDNA_P Parameter: Tissue Value: Germinating Seeds
  misc_feature: MA Experiment ID: 108469 Result: Up-regulated in Transcription
  misc_feature: MA Experiment ID: 108667 Result: Up-regulated in Transcription
  misc_feature: MA Experiment 108667 PARAMETER Experiment Name: At_2mM_SA_cDNA_P Parameter: Plant Line Value: WS
  misc_feature: MA Experiment 108667 PARAMETER Experiment Name: At_2mM_SA_cDNA_P Parameter: Timepoint (hr) Value: 1
  misc_feature: MA Experiment 108667 PARAMETER Experiment Name: At_2mM_SA_cDNA_P Parameter: Treatment Value: 2mM SA vs. No Treatment
  misc_feature: MA Experiment ID: 108668 Result: Up-regulated in Transcription
  misc_feature: MA Experiment 108668 PARAMETER Experiment Name: At_2mM_SA_cDNA_P Parameter: Plant Line Value: WS
  misc_feature: MA Experiment 108668 PARAMETER Experiment Name: At_2mM_SA_cDNA_P Parameter: Timepoint (hr) Value: 6
  misc_feature: MA Experiment 108668 PARAMETER Experiment Name: At_2mM_SA_cDNA_P Parameter: Treatment Value: 2mM SA vs. No Treatment
  misc_feature: MA Experiment ID: 20000068 Result: Up-regulated in Transcription
  misc_feature: MA Experiment ID: 20000171 Result: Down-regulated in Transcription
  misc_feature: MA Experiment 20000171 PARAMETER Experiment Name: At_42deg_Heat_P Parameter: Age (day) Value: 14
  misc_feature: MA Experiment 20000171 PARAMETER Experiment Name: At_42deg_Heat_P Parameter: Organism Value: A. thaliana
  misc_feature: MA Experiment 20000171 PARAMETER Experiment Name: At_42deg_Heat_P Parameter: Plant Line Value: WS
  misc_feature: MA Experiment 20000171 PARAMETER Experiment Name: At_42deg_Heat_P Parameter: Temperature (deg C) Value: 42 vs. 22
  misc_feature: MA Experiment 20000171 PARAMETER Experiment Name: At_42deg_Heat_P Parameter: Timepoint (hr) Value: 1
  misc_feature: MA Experiment 20000171 PARAMETER Experiment Name: At_42deg_Heat_P Parameter: Tissue Value: Aerial
  misc_feature: MA Experiment ID: 20000173 Result: Down-regulated in Transcription
  misc_feature: MA Experiment 20000173 PARAMETER Experiment Name: At_42deg_Heat_P Parameter: Age (day) Value: 14
  misc_feature: MA Experiment 20000173 PARAMETER Experiment Name: At_42deg_Heat_P Parameter: Organism Value: A. thaliana
  misc_feature: MA Experiment 20000173 PARAMETER Experiment Name: At_42deg_Heat_P Parameter: Plant Line Value: WS
  misc_feature: MA Experiment 20000173 PARAMETER Experiment Name: At_42deg_Heat_P Parameter: Temperature (deg C) Value: 42 vs. 22
  misc_feature: MA Experiment 20000173 PARAMETER Experiment Name: At_42deg_Heat_P Parameter: Timepoint (hr) Value: 6
  misc_feature: MA Experiment 20000173 PARAMETER Experiment Name: At_42deg_Heat_P Parameter: Tissue Value: Aerial
  misc_feature: MA Experiment ID: 20000179 Result: Down-regulated in Transcription
  misc_feature: MA Experiment 20000179 PARAMETER Experiment Name: At_Germinating_Seeds_P Parameter: Age (hr) Value: 6 vs. 0
  misc_feature: MA Experiment 20000179 PARAMETER Experiment Name: At_Germinating_Seeds_P Parameter: Tissue Value: Germinating Seeds
  misc_feature: MA Experiment ID: 20000180 Result: Down-regulated in Transcription
  misc_feature: MA Experiment 20000180 PARAMETER Experiment Name: At_Germinating_Seeds_P Parameter: Age (hr) Value: 24 vs. 0
  misc_feature: MA Experiment 20000180 PARAMETER Experiment Name: At_Germinating_Seeds_P Parameter: Tissue Value: Germinating Seeds
  misc_feature: MA Experiment ID: 20000182 Result: Up-regulated in Transcription
  misc_feature: MA Experiment 20000182 PARAMETER Experiment Name: At_2mM_SA_P Parameter: Age (day) Value: 14
  misc_feature: MA Experiment 20000182 PARAMETER Experiment Name: At_2mM_SA_P Parameter: Organism Value: A. thaliana
  misc_feature: MA Experiment 20000182 PARAMETER Experiment Name: At_2mM_SA_P Parameter: Plant Line Value: WS
  misc_feature: MA Experiment 20000182 PARAMETER Experiment Name: At_2mM_SA_P Parameter: Timepoint (hr) Value: 6
  misc_feature: MA Experiment 20000182 PARAMETER Experiment Name: At_2mM_SA_P Parameter: Tissue Value: Aerial
  misc_feature: MA Experiment 20000182 PARAMETER Experiment Name: At_2mM_SA_P Parameter: Treatment Value: 2mM SA vs. No Treatment
  misc_feature: MA Experiment ID: 20000184 Result: Down-regulated in Transcription
  misc_feature: MA Experiment 20000184 PARAMETER Experiment Name: At_Shoots__P Parameter: Age (day) Value: 7
  misc_feature: MA Experiment 20000184 PARAMETER Experiment Name: At_Shoots__P Parameter: Tissue Value: Shoots vs. Whole Plant
  misc_feature: MA Experiment ID: 20000185 Result: Down-regulated in Transcription
  misc_feature: MA Experiment 20000185 PARAMETER Experiment Name: At_Roots__P Parameter: Age (day) Value: 7 vs. 21
  misc_feature: MA Experiment 20000185 PARAMETER Experiment Name: At_Roots__P Parameter: Organism Value: A. thaliana
  misc_feature: MA Experiment 20000185 PARAMETER Experiment Name: At_Roots__P Parameter: Tissue Value: Roots vs. Whole Plant
  misc_feature: MA Experiment ID: 20000234 Result: Down-regulated in Transcription
  misc_feature: MA Experiment 20000234 PARAMETER Experiment Name: At_Siliques_P Parameter: Age (day) Value: 21
  misc_feature: MA Experiment 20000234 PARAMETER Experiment Name: At_Siliques_P Parameter: Organism Value: A. thaliana
  misc_feature: MA Experiment 20000234 PARAMETER Experiment Name: At_Siliques_P Parameter: Plant Line Value: WS
  misc_feature: MA Experiment 20000234 PARAMETER Experiment Name: At_Siliques_P Parameter: Tissue Value: Less Than 5mm Siliques vs. Whole Plant
  misc_feature: MA Experiment ID: 20000265 Result: Down-regulated in Transcription
  misc_feature: MA Experiment 20000265 PARAMETER Experiment Name: At_Open_Flower_P Parameter: Age (day) Value: 21
  misc_feature: MA Experiment 20000265 PARAMETER Experiment Name: At_Open_Flower_P Parameter: Plant Line Value: WS
  misc_feature: MA Experiment 20000265 PARAMETER Experiment Name: At_Open_Flower_P Parameter: Tissue Value: Closed Flower vs. Whole Plant
  misc_feature: MA Experiment ID: 20000286 Result: Down-regulated in Transcription
  misc_feature: MA Experiment 20000286 PARAMETER Experiment Name: At_Open_Flower_P Parameter: Age (day) Value: 21
  misc_feature: MA Experiment 20000286 PARAMETER Experiment Name: At_Open_Flower_P Parameter: Plant Line Value: WS
  misc_feature: MA Experiment 20000286 PARAMETER Experiment Name: At_Open_Flower_P Parameter: Tissue Value: Half Open vs. Whole Plant
  misc_feature: MA Experiment ID: 20000439 Result: Down-regulated in Transcription
  misc_feature: MA Experiment 20000439 PARAMETER Experiment Name: At_Roots__P Parameter: Age (day) Value: 14 vs. 21
  misc_feature: MA Experiment 20000439 PARAMETER Experiment Name: At_Roots__P Parameter: Organism Value: A. thaliana
  misc_feature: MA Experiment 20000439 PARAMETER Experiment Name: At_Roots__P Parameter: Tissue Value: Roots vs. Whole Plant
  misc_feature: MA Experiment ID: 20000451 Result: Up-regulated in Transcription
  misc_feature: MA Experiment 20000451 PARAMETER Experiment Name: At_CS6879_Shoots-Roots_P Parameter: Age (day) Value: 14
  misc_feature: MA Experiment 20000451 PARAMETER Experiment Name: At_CS6879_Shoots-Roots_P Parameter: Organism Value: A. thaliana
  misc_feature: MA Experiment 20000451 PARAMETER Experiment Name: At_CS6879_Shoots-Roots_P Parameter: Plant Line Value: CS6879 vs. WS
  misc_feature: MA Experiment 20000451 PARAMETER Experiment Name: At_CS6879_Shoots-Roots_P Parameter: Tissue Value: Roots
  misc_feature: MA Experiment ID: 20000453 Result: Down-regulated in Transcription
  misc_feature: MA Experiment 20000453 PARAMETER Experiment Name: At_100uM_ABA_P Parameter: Age (day) Value: 15
  misc_feature: MA Experiment 20000453 PARAMETER Experiment Name: At_100uM_ABA_P Parameter: Organism Value: A. thaliana
  misc_feature: MA Experiment 20000453 PARAMETER Experiment Name: At_100uM_ABA_P Parameter: Plant Line Value: WS
  misc_feature: MA Experiment 20000453 PARAMETER Experiment Name: At_100uM_ABA_P Parameter: Timepoint (hr) Value: 24
  misc_feature: MA Experiment 20000453 PARAMETER Experiment Name: At_100uM_ABA_P Parameter: Tissue Value: Aerial
  misc_feature: MA Experiment 20000453 PARAMETER Experiment Name: At_100uM_ABA_P Parameter: Treatment Value: 100uM ABA vs. No Treatment
  misc_feature: MA Experiment ID: 20000495 Result: Down-regulated in Transcription
  misc_feature: MA Experiment 20000495 PARAMETER Experiment Name: At_Guard_Cells_P Parameter: Harvest Date Value: 8/2/2002
  misc_feature: MA Experiment 20000495 PARAMETER Experiment Name: At_Guard_Cells_P Parameter: Organism Value: A. thaliana
  misc_feature: MA Experiment 20000495 PARAMETER Experiment Name: At_Guard_Cells_P Parameter: Tissue Value: Guard Cells vs. Leaves
  misc_feature: MA Experiment ID: 20000709 Result: Up-regulated in Transcription
  misc_feature: MA Experiment 20000709 PARAMETER Experiment Name: At_15mM_NH4NO3_L-to-H_P Parameter: Age (hr) Value: 14
  misc_feature: MA Experiment 20000709 PARAMETER Experiment Name: At_15mM_NH4NO3_L-to-H_P Parameter: Organism Value: A. thaliana
  misc_feature: MA Experiment 20000709 PARAMETER Experiment Name: At_15mM_NH4NO3_L-to-H_P Parameter: Plant Line Value: WS
  misc_feature: MA Experiment 20000709 PARAMETER Experiment Name: At_15mM_NH4NO3_L-to-H_P Parameter: Timepoint (hr) Value: 4
  misc_feature: MA Experiment 20000709 PARAMETER Experiment Name: At_15mM_NH4NO3_L-to-H_P Parameter: Tissue Value: Aerial
  misc_feature: MA Experiment 20000709 PARAMETER Experiment Name: At_15mM_NH4NO3_L-to-H_P Parameter: Treatment Value: 15mM NH4NO3 vs. 30mM Mannitol
  misc_feature: MA Experiment ID: 20001248 Result: Down-regulated in Transcription
  misc_feature: MA Experiment 20001248 PARAMETER Experiment Name: At_Far-red-induction_P Parameter: Age (day) Value: 7
  misc_feature: MA Experiment 20001248 PARAMETER Experiment Name: At_Far-red-induction_P Parameter: Light Value: Far-red vs. White
  misc_feature: MA Experiment 20001248 PARAMETER Experiment Name: At_Far-red-induction_P Parameter: Organism Value: A. thaliana
  misc_feature: MA Experiment 20001248 PARAMETER Experiment Name: At_Far-red-induction_P Parameter: Plant Line Value: Columbia
  misc_feature: MA Experiment 20001248 PARAMETER Experiment Name: At_Far-red-induction_P Parameter: Timepoint (hr) Value: 4
  misc_feature: MA Experiment 20001248 PARAMETER Experiment Name: At_Far-red-induction_P Parameter: Tissue Value: Whole Plant
  misc_feature: MA Experiment ID: 20001450 Result: Down-regulated in Transcription
  misc_feature: MA Experiment 20001450 PARAMETER Experiment Name: At_Far-red-induction_P Parameter: Age (day) Value: 7
  misc_feature: MA Experiment 20001450 PARAMETER Experiment Name: At_Far-red-induction_P Parameter: Light Value: Far-red vs. White
  misc_feature: MA Experiment 20001450 PARAMETER Experiment Name: At_Far-red-induction_P Parameter: Organism Value: A. thaliana
  misc_feature: MA Experiment 20001450 PARAMETER Experiment Name: At_Far-red-induction_P Parameter: Plant Line Value: Columbia
  misc_feature: MA Experiment 20001450 PARAMETER Experiment Name: At_Far-red-induction_P Parameter: Timepoint (hr) Value: 8
  misc_feature: MA Experiment 20001450 PARAMETER Experiment Name: At_Far-red-induction_P Parameter: Tissue Value: Whole Plant
  misc_feature: MA Experiment ID: 20001451 Result: Down-regulated in Transcription
  misc_feature: MA Experiment 20001451 PARAMETER Experiment Name: At_Far-red-induction_P Parameter: Age (day) Value: 7
  misc_feature: MA Experiment 20001451 PARAMETER Experiment Name: At_Far-red-induction_P Parameter: Light Value: Far-red vs. White
  misc_feature: MA Experiment 20001451 PARAMETER Experiment Name: At_Far-red-induction_P Parameter: Organism Value: A. thaliana
  misc_feature: MA Experiment 20001451 PARAMETER Experiment Name: At_Far-red-induction_P Parameter: Plant Line Value: Columbia
  misc_feature: MA Experiment 20001451 PARAMETER Experiment Name: At_Far-red-induction_P Parameter: Timepoint (hr) Value: 24
  misc_feature: MA Experiment 20001451 PARAMETER Experiment Name: At_Far-red-induction_P Parameter: Tissue Value: Whole Plant
  misc_feature: MA Experiment ID: 20001554 Result: Down-regulated in Transcription
  misc_feature: MA Experiment 20001554 PARAMETER Experiment Name: At_Drought_Soil_Dry_P Parameter: Age (day) Value: 21
  misc_feature: MA Experiment 20001554 PARAMETER Experiment Name: At_Drought_Soil_Dry_P Parameter: Organism Value: A. thaliana
  misc_feature: MA Experiment 20001554 PARAMETER Experiment Name: At_Drought_Soil_Dry_P Parameter: Plant Line Value: WS
  misc_feature: MA Experiment 20001554 PARAMETER Experiment Name: At_Drought_Soil_Dry_P Parameter: Post Timepoint (hr) Value: None
  misc_feature: MA Experiment 20001554 PARAMETER Experiment Name: At_Drought_Soil_Dry_P Parameter: Post-Treatment Value: None
  misc_feature: MA Experiment 20001554 PARAMETER Experiment Name: At_Drought_Soil_Dry_P Parameter: Timepoint (day) Value: 7
  misc_feature: MA Experiment 20001554 PARAMETER Experiment Name: At_Drought_Soil_Dry_P Parameter: Treatment Value: Drought vs. No Drought
  misc_feature: MA Experiment ID: 20001556 Result: Down-regulated in Transcription
  misc_feature: MA Experiment 20001556 PARAMETER Experiment Name: At_Drought_Soil_Dry_P Parameter: Age (day) Value: 26
  misc_feature: MA Experiment 20001556 PARAMETER Experiment Name: At_Drought_Soil_Dry_P Parameter: Organism Value: A. thaliana
  misc_feature: MA Experiment 20001556 PARAMETER Experiment Name: At_Drought_Soil_Dry_P Parameter: Plant Line Value: WS
  misc_feature: MA Experiment 20001556 PARAMETER Experiment Name: At_Drought_Soil_Dry_P Parameter: Post Timepoint (hr) Value: None
  misc_feature: MA Experiment 20001556 PARAMETER Experiment Name: At_Drought_Soil_Dry_P Parameter: Post-Treatment Value: None
  misc_feature: MA Experiment 20001556 PARAMETER Experiment Name: At_Drought_Soil_Dry_P Parameter: Timepoint (day) Value: 12
  misc_feature: MA Experiment 20001556 PARAMETER Experiment Name: At_Drought_Soil_Dry_P Parameter: Treatment Value: Drought vs. No Drought
  misc_feature: MA Experiment ID: 20001557 Result: Down-regulated in Transcription
  misc_feature: MA Experiment 20001557 PARAMETER Experiment Name: At_Drought_Soil_Dry_P Parameter: Age (day) Value: 27
  misc_feature: MA Experiment 20001557 PARAMETER Experiment Name: At_Drought_Soil_Dry_P Parameter: Organism Value: A. thaliana
  misc_feature: MA Experiment 20001557 PARAMETER Experiment Name: At_Drought_Soil_Dry_P Parameter: Plant Line Value: WS
  misc_feature: MA Experiment 20001557 PARAMETER Experiment Name: At_Drought_Soil_Dry_P Parameter: Post Timepoint (hr) Value: 3
  misc_feature: MA Experiment 20001557 PARAMETER Experiment Name: At_Drought_Soil_Dry_P Parameter: Post-Treatment Value: Re-Water vs. No Drought
  misc_feature: MA Experiment 20001557 PARAMETER Experiment Name: At_Drought_Soil_Dry_P Parameter: Timepoint (day) Value: 13
  misc_feature: MA Experiment 20001557 PARAMETER Experiment Name: At_Drought_Soil_Dry_P Parameter: Treatment Value: Drought vs. No Drought

SEQ ID NO: 94951 - protein, 485 aa, Arabidopsis thaliana; identical to SEQ ID NO: 91195
  peptide (1)..(485): Ceres Seq. ID no. 12726797
  misc_feature (1)..(485): Homolog of NCBI NO: 15223961 NR Description: hypothetical protein; protein id: At1g71140.1
  misc_feature (2)..(467): Homolog of NCBI NO: 15218070 NR Description: hypothetical protein; protein id: At1g15170.1 thaliana] >gi|22655074|gb|AAM98128.1| unknown protein
  misc_feature (2)..(459): Homolog of NCBI NO: 25511632 NR Description: F9L1.11 protein - Arabidopsis thaliana Strong similarity to gi|4734005 F3L12.7 hypothetical protein from
  misc_feature (1)..(478): Homolog of NCBI NO: 22329577 NR Description: hypothetical protein; protein id: At1g15150.1, by cDNA: gi_17979411 [Arabidopsis thaliana] unknown protein [Arabidopsis thaliana]
  misc_feature (1)..(478): Homolog of NCBI NO: 15218068 NR Description: hypothetical protein; protein id: At1g15160.1
  misc_feature (20)..(467): Homolog of NCBI NO: 18394206 NR Description: expressed protein; protein id: At1g15180.1, by cDNA: gi_15028308, supported by cDNA: gi_19310610 [Arabidopsis >gi|15028309|gb|AAK76631.1| unknown protein [Arabidopsis
  misc_feature (1)..(459): Homolog of NCBI NO: 25518548 NR Description: hypothetical protein F9L1.10 - Arabidopsis >gi|5103818|gb|AAD39648.1|AC007591_13 Strong similarity to F3L12.7 hypothetical protein from Arabidopsis thaliana BAC
  misc_feature (20)..(459): Homolog of NCBI NO: 25518684 NR Description: hypothetical protein F9L1.12 [imported] - thaliana >gi|5103816|gb|AAD39646.1|AC007591_11 Strong similarity gi|4734005 F3L12.7 hypothetical protein from Arabidopsis thaliana
  misc_feature (1)..(459): Homolog of NCBI NO: 25518472 NR Description: hypothetical protein F9L1.9 [imported] - thaliana >gi|5103815|gb|AAD39645.1|AC007591_10 Strong similarity gi|4734005 F3L12.7 hypothetical protein from Arabidopsis thaliana
  misc_feature (26)..(471): Homolog of NCBI NO: 15228073 NR Description: hypothetical protein; protein id: At2g04050.1

SEQ ID NO: 94952 - protein, 449 aa, Arabidopsis thaliana; identical to SEQ ID NO: 91196
  peptide (1)..(449): Ceres Seq. ID no. 12726798
  misc_feature (1)..(449): Homolog of NCBI NO: 15223961 NR Description: hypothetical protein; protein id: At1g71140.1
  misc_feature (1)..(431): Homolog of NCBI NO: 15218070 NR Description: hypothetical protein; protein id: At1g15170.1 thaliana] >gi|22655074|gb|AAM98128.1| unknown protein
  misc_feature (1)..(423): Homolog of NCBI NO: 25511632 NR Description: F9L1.11 protein - Arabidopsis thaliana Strong similarity to gi|4734005 F3L12.7 hypothetical protein from
  misc_feature (1)..(442): Homolog of NCBI NO: 22329577 NR Description: hypothetical protein; protein id: At1g15150.1, by cDNA: gi_17979411 [Arabidopsis thaliana] unknown protein [Arabidopsis thaliana]
  misc_feature (1)..(442): Homolog of NCBI NO: 15218068 NR Description: hypothetical protein; protein id: At1g15160.1
  misc_feature (1)..(431): Homolog of NCBI NO: 18394206 NR Description: expressed protein; protein id: At1g15180.1, by cDNA: gi_15028308, supported by cDNA: gi_19310610 [Arabidopsis >gi|15028309|gb|AAK76631.1| unknown protein [Arabidopsis
  misc_feature (1)..(423): Homolog of NCBI NO: 25518548 NR Description: hypothetical protein F9L1.10 - Arabidopsis >gi|5103818|gb|AAD39648.1|AC007591_13 Strong similarity to F3L12.7 hypothetical protein from Arabidopsis thaliana BAC
  misc_feature (1)..(423): Homolog of NCBI NO: 25518684 NR Description: hypothetical protein F9L1.12 [imported] - thaliana >gi|5103816|gb|AAD39646.1|AC007591_11 Strong similarity gi|4734005 F3L12.7 hypothetical protein from Arabidopsis thaliana
  misc_feature (1)..(423): Homolog of NCBI NO: 25518472 NR Description: hypothetical protein F9L1.9 [imported] - thaliana >gi|5103815|gb|AAD39645.1|AC007591_10 Strong similarity gi|4734005 F3L12.7 hypothetical protein from Arabidopsis thaliana
  misc_feature (1)..(435): Homolog of NCBI NO: 15228073 NR Description: hypothetical protein; protein id: At2g04050.1

SEQ ID NO: 94953 - protein, 442 aa, Arabidopsis thaliana; identical to SEQ ID NO: 91197
  peptide (1)..(442): Ceres Seq. ID no. 12726799
  misc_feature (1)..(442): Homolog of NCBI NO: 15223961 NR Description: hypothetical protein; protein id: At1g71140.1
  misc_feature (1)..(424): Homolog of NCBI NO: 15218070 NR Description: hypothetical protein; protein id: At1g15170.1 thaliana] >gi|22655074|gb|AAM98128.1| unknown protein
  misc_feature (1)..(416): Homolog of NCBI NO: 25511632 NR Description: F9L1.11 protein - Arabidopsis thaliana Strong similarity to gi|4734005 F3L12.7 hypothetical protein from
  misc_feature (1)..(435): Homolog of NCBI NO: 22329577 NR Description: hypothetical protein; protein id: At1g15150.1, by cDNA: gi_17979411 [Arabidopsis thaliana] unknown protein [Arabidopsis thaliana]
  misc_feature (1)..(435): Homolog of NCBI NO: 15218068 NR Description: hypothetical protein; protein id: At1g15160.1
  misc_feature (1)..(424): Homolog of NCBI NO: 18394206 NR Description: expressed protein; protein id: At1g15180.1, by cDNA: gi_15028308, supported by cDNA: gi_19310610 [Arabidopsis >gi|15028309|gb|AAK76631.1| unknown protein [Arabidopsis
  misc_feature (1)..(416): Homolog of NCBI NO: 25518548 NR Description: hypothetical protein F9L1.10 - Arabidopsis >gi|5103818|gb|AAD39648.1|AC007591_13 Strong similarity to F3L12.7 hypothetical protein from Arabidopsis thaliana BAC
  misc_feature (1)..(416): Homolog of NCBI NO: 25518684 NR Description: hypothetical protein F9L1.12 [imported] - thaliana >gi|5103816|gb|AAD39646.1|AC007591_11 Strong similarity gi|4734005 F3L12.7 hypothetical protein from Arabidopsis thaliana
  misc_feature (1)..(416): Homolog of NCBI NO: 25518472 NR Description: hypothetical protein F9L1.9 [imported] - thaliana >gi|5103815|gb|AAD39645.1|AC007591_10 Strong similarity gi|4734005 F3L12.7 hypothetical protein from Arabidopsis thaliana
  misc_feature (1)..(428): Homolog of NCBI NO: 15228073 NR Description: hypothetical protein; protein id: At2g04050.1

SEQ ID NO: 94954 - DNA, 1056 bp, Arabidopsis thaliana; identical to SEQ ID NO: 91198
  misc_feature (1)..(1056): Ceres Seq. ID no. 12726800
  misc_feature: MA Experiment ID: 20000306 Result: Down-regulated in Transcription
  misc_feature: MA Experiment 20000306 PARAMETER Experiment Name: At_Germinating_Seeds_Sub_P Parameter: Age (hr) Value: 6 vs. 0
  misc_feature: MA Experiment 20000306 PARAMETER Experiment Name: At_Germinating_Seeds_Sub_P Parameter: Organism Value: A. thaliana
  misc_feature: MA Experiment 20000306 PARAMETER Experiment Name: At_Germinating_Seeds_Sub_P Parameter: Plant Line Value: WS
  misc_feature: MA Experiment 20000306 PARAMETER Experiment Name: At_Germinating_Seeds_Sub_P Parameter: Tissue Value: Germinating Seeds
  misc_feature: MA Experiment ID: 20000307 Result: Down-regulated in Transcription
  misc_feature: MA Experiment 20000307 PARAMETER Experiment Name: At_Germinating_Seeds_Sub_P Parameter: Age (hr) Value: 24 vs. 0
  misc_feature: MA Experiment 20000307 PARAMETER Experiment Name: At_Germinating_Seeds_Sub_P Parameter: Organism Value: A. thaliana
  misc_feature: MA Experiment 20000307 PARAMETER Experiment Name: At_Germinating_Seeds_Sub_P Parameter: Plant Line Value: WS
  misc_feature: MA Experiment 20000307 PARAMETER Experiment Name: At_Germinating_Seeds_Sub_P Parameter: Tissue Value: Germinating Seeds
  misc_feature: MA Experiment ID: 20000347 Result: Up-regulated in Transcription
  misc_feature: MA Experiment 20000347 PARAMETER Experiment Name: At_2mM_SA_Sub_P Parameter: Age (day) Value: 14
  misc_feature: MA Experiment 20000347 PARAMETER Experiment Name: At_2mM_SA_Sub_P Parameter: Organism Value: A. thaliana
  misc_feature: MA Experiment 20000347 PARAMETER Experiment Name: At_2mM_SA_Sub_P Parameter: Plant Line Value: WS
  misc_feature: MA Experiment 20000347 PARAMETER Experiment Name: At_2mM_SA_Sub_P Parameter: Timepoint (hr) Value: 6
  misc_feature: MA Experiment 20000347 PARAMETER Experiment Name: At_2mM_SA_Sub_P Parameter: Tissue Value: Aerial
  misc_feature: MA Experiment 20000347 PARAMETER Experiment Name: At_2mM_SA_Sub_P Parameter: Treatment Value: 2mM SA vs. No Treatment

SEQ ID NO: 94955 - protein, 351 aa, Arabidopsis thaliana; identical to SEQ ID NO: 91199
  peptide (1)..(351): Ceres Seq. ID no. 12726801
  misc_feature (1)..(351): Homolog of NCBI NO: 15223962 NR Description: unknown protein; protein id: At1g71150.1
  misc_feature (1)..(351): Homolog of NCBI NO: 15219987 NR Description: unknown protein; protein id: At1g22970.1,
  misc_feature (1)..(348): Homolog of NCBI NO: 18395185 NR Description: unknown protein; protein id: At1g22980.1
  misc_feature (56)..(348): Homolog of NCBI NO: 25372690 NR Description: F19G10.7 protein - Arabidopsis thaliana

SEQ ID NO: 94956 - protein, 293 aa, Arabidopsis thaliana; identical to SEQ ID NO: 88757
  peptide (1)..(293): Ceres Seq. ID no. 12726802
  misc_feature (1)..(293): Homolog of NCBI NO: 15223962 NR Description: unknown protein; protein id: At1g71150.1
  misc_feature (1)..(293): Homolog of NCBI NO: 15219987 NR Description: unknown protein; protein id: At1g22970.1,
  misc_feature (1)..(290): Homolog of NCBI NO: 18395185 NR Description: unknown protein; protein id: At1g22980.1
  misc_feature (1)..(290): Homolog of NCBI NO: 25372690 NR Description: F19G10.7 protein - Arabidopsis thaliana

SEQ ID NO: 94957 - protein, 280 aa, Arabidopsis thaliana; identical to SEQ ID NO: 91201
  peptide (1)..(280): Ceres Seq. ID no. 12726803
  misc_feature (1)..(280): Homolog of NCBI NO: 15223962 NR Description: unknown protein; protein id: At1g71150.1
  misc_feature (1)..(280): Homolog of NCBI NO: 15219987 NR Description: unknown protein; protein id: At1g22970.1,
  misc_feature (1)..(277): Homolog of NCBI NO: 18395185 NR Description: unknown protein; protein id: At1g22980.1
  misc_feature (1)..(277): Homolog of NCBI NO: 25372690 NR Description: F19G10.7 protein - Arabidopsis thaliana

SEQ ID NO: 94958 - DNA, 1383 bp, Arabidopsis thaliana; identical to SEQ ID NO: 91202
  misc_feature (1)..(1383): Ceres Seq. ID no. 12726804
  misc_feature: MA Experiment ID: 20000265 Result: Up-regulated in Transcription
  misc_feature: MA Experiment 20000265 PARAMETER Experiment Name: At_Open_Flower_P Parameter: Age (day) Value: 21
  misc_feature: MA Experiment 20000265 PARAMETER Experiment Name: At_Open_Flower_P Parameter: Plant Line Value: WS
  misc_feature: MA Experiment 20000265 PARAMETER Experiment Name: At_Open_Flower_P Parameter: Tissue Value: Closed Flower vs. Whole Plant
  misc_feature: MA Experiment ID: 20000286 Result: Up-regulated in Transcription
  misc_feature: MA Experiment 20000286 PARAMETER Experiment Name: At_Open_Flower_P Parameter: Age (day) Value: 21
  misc_feature: MA Experiment 20000286 PARAMETER Experiment Name: At_Open_Flower_P Parameter: Plant Line Value: WS
  misc_feature: MA Experiment 20000286 PARAMETER Experiment Name: At_Open_Flower_P Parameter: Tissue Value: Half Open vs. Whole Plant
  misc_feature: MA Experiment ID: 20001910 Result: Down-regulated in Transcription
  misc_feature: MA Experiment 20001910 PARAMETER Experiment Name: At_Drought_Reproduction_P Parameter: Age (day) Value: 37
  misc_feature: MA Experiment 20001910 PARAMETER Experiment Name: At_Drought_Reproduction_P Parameter: Organism Value: A. thaliana
  misc_feature: MA Experiment 20001910 PARAMETER Experiment Name: At_Drought_Reproduction_P Parameter: Plant Line Value: WS
  misc_feature: MA Experiment 20001910 PARAMETER Experiment Name: At_Drought_Reproduction_P Parameter: Timepoint (day) Value: 7
  misc_feature: MA Experiment 20001910 PARAMETER Experiment Name: At_Drought_Reproduction_P Parameter: Tissue Value: Flowers
  misc_feature: MA Experiment 20001910 PARAMETER Experiment Name: At_Drought_Reproduction_P Parameter: Treatment Value: Drought vs. No Drought

SEQ ID NO: 94959 - protein, 460 aa, Arabidopsis thaliana; identical to SEQ ID NO: 91203
  peptide (1)..(460): Ceres Seq. ID no. 12726805
  misc_feature (283)..(427): Pfam Name: Chalcone and stilbene synthases, C-terminal domain Pfam Description: Chalcone and stilbene synthases, C-terminal
  misc_feature (1)..(460): Homolog of NCBI NO: 15223964 NR Description: putative ketoacyl-CoA synthase; protein id:
  misc_feature (25)..(446): Homolog of NCBI NO: 15222592 NR Description: fatty acid condensing enzyme CUT1, putative; id: At1g25450.1, supported by cDNA: 99793. [Arabidopsis thaliana]
  misc_feature (25)..(446): Homolog of NCBI NO: 21618184 NR Description: fatty acid condensing enzyme CUT1, putative
  misc_feature (25)..(446): Homolog of NCBI NO: 28393607 NR Description: putative fatty acid condensing enzyme CUT1
  misc_feature (23)..(446): Homolog of NCBI NO: 17979464 NR Description: At1g68530/T26J14_10 [Arabidopsis thaliana]
  misc_feature (23)..(446): Homolog of NCBI NO: 15221431 NR Description: very-long-chain fatty acid condensing enzyme protein id: At1g68530.1, supported by cDNA: 36276. [Arabidopsis
  misc_feature (23)..(446): Homolog of NCBI NO: 21593111 NR Description: very-long-chain fatty acid condensing enzyme CUT1
  misc_feature (14)..(446): Homolog of NCBI NO: 15223556 NR Description: very-long-chain fatty acid condensing enzyme putative; protein id: At1g19440.1, supported by cDNA: 158882.
  misc_feature (29)..(446): Homolog of NCBI NO: 15239786 NR Description: fatty acid elongase; beta-ketoacyl-CoA
  misc_feature (24)..(446): Homolog of NCBI NO: 15226724 NR Description: putative beta-ketoacyl-CoA synthase; protein id:

SEQ ID NO: 94960 - protein, 299 aa, Arabidopsis thaliana; identical to SEQ ID NO: 91204
  peptide (1)..(299): Ceres Seq. ID no. 12726806
  misc_feature (122)..(266): Pfam Name: Chalcone and stilbene synthases, C-terminal domain Pfam Description: Chalcone and stilbene synthases, C-terminal
  misc_feature (1)..(299): Homolog of NCBI NO: 15223964 NR Description: putative ketoacyl-CoA synthase; protein id:
  misc_feature (1)..(285): Homolog of NCBI NO: 15222592 NR Description: fatty acid condensing enzyme CUT1, putative; id: At1g25450.1, supported by cDNA: 99793. [Arabidopsis thaliana]
  misc_feature (1)..(285): Homolog of NCBI NO: 21618184 NR Description: fatty acid condensing enzyme CUT1, putative
  misc_feature (1)..(285): Homolog of NCBI NO: 28393607 NR Description: putative fatty acid condensing enzyme CUT1
  misc_feature (1)..(285): Homolog of NCBI NO: 17979464 NR Description: At1g68530/T26J14_10 [Arabidopsis thaliana]
  misc_feature (1)..(285): Homolog of NCBI NO: 15221431 NR Description: very-long-chain fatty acid condensing enzyme protein id: At1g68530.1, supported by cDNA: 36276. [Arabidopsis
  misc_feature (1)..(285): Homolog of NCBI NO: 21593111 NR Description: very-long-chain fatty acid condensing enzyme CUT1
  misc_feature (1)..(285): Homolog of NCBI NO: 15223556 NR Description: very-long-chain fatty acid condensing enzyme putative; protein id: At1g19440.1, supported by cDNA: 158882.
  misc_feature (1)..(285): Homolog of NCBI NO: 15239786 NR Description: fatty acid elongase; beta-ketoacyl-CoA
  misc_feature (1)..(285): Homolog of NCBI NO: 15226724 NR Description: putative beta-ketoacyl-CoA synthase; protein id:

SEQ ID NO: 94961 - protein, 292 aa, Arabidopsis thaliana; identical to SEQ ID NO: 91205
  peptide (1)..(292): Ceres Seq. ID no. 12726807
  misc_feature (115)..(259): Pfam Name: Chalcone and stilbene synthases, C-terminal domain Pfam Description: Chalcone and stilbene synthases, C-terminal
  misc_feature (1)..(292): Homolog of NCBI NO: 15223964 NR Description: putative ketoacyl-CoA synthase; protein id:
  misc_feature (1)..(278): Homolog of NCBI NO: 15222592 NR Description: fatty acid condensing enzyme CUT1, putative; id: At1g25450.1, supported by cDNA: 99793. [Arabidopsis thaliana]
  misc_feature (1)..(278): Homolog of NCBI NO: 21618184 NR Description: fatty acid condensing enzyme CUT1, putative
  misc_feature (1)..(278): Homolog of NCBI NO: 28393607 NR Description: putative fatty acid condensing enzyme CUT1
  misc_feature (1)..(278): Homolog of NCBI NO: 17979464 NR Description: At1g68530/T26J14_10 [Arabidopsis thaliana]
  misc_feature (1)..(278): Homolog of NCBI NO: 15221431 NR Description: very-long-chain fatty acid condensing enzyme protein id: At1g68530.1, supported by cDNA: 36276. [Arabidopsis
  misc_feature (1)..(278): Homolog of NCBI NO: 21593111 NR Description: very-long-chain fatty acid condensing enzyme CUT1
  misc_feature (1)..(278): Homolog of NCBI NO: 15223556 NR Description: very-long-chain fatty acid condensing enzyme putative; protein id: At1g19440.1, supported by cDNA: 158882.
  misc_feature (1)..(278): Homolog of NCBI NO: 15239786 NR Description: fatty acid elongase; beta-ketoacyl-CoA
  misc_feature (1)..(278): Homolog of NCBI NO: 15226724 NR Description: putative beta-ketoacyl-CoA synthase; protein id:

SEQ ID NO: 94962 - DNA, 1016 bp, Arabidopsis thaliana; identical to SEQ ID NO: 91206
  misc_feature (1)..(1016): Ceres Seq. ID no. 12726812
  misc_feature: MA Experiment ID: 20000173 Result: Down-regulated in Transcription
  misc_feature: MA Experiment 20000173 PARAMETER Experiment Name: At_42deg_Heat_P Parameter: Age (day) Value: 14
  misc_feature: MA Experiment 20000173 PARAMETER Experiment Name: At_42deg_Heat_P Parameter: Organism Value: A. thaliana
  misc_feature: MA Experiment 20000173 PARAMETER Experiment Name: At_42deg_Heat_P Parameter: Plant Line Value: WS
  misc_feature: MA Experiment 20000173 PARAMETER Experiment Name: At_42deg_Heat_P Parameter: Temperature (deg C) Value: 42 vs. 22
  misc_feature: MA Experiment 20000173 PARAMETER Experiment Name: At_42deg_Heat_P Parameter: Timepoint (hr) Value: 6
  misc_feature: MA Experiment 20000173 PARAMETER Experiment Name: At_42deg_Heat_P Parameter: Tissue Value: Aerial
  misc_feature: MA Experiment ID: 20000227 Result: Down-regulated in Transcription
  misc_feature: MA Experiment 20000227 PARAMETER Experiment Name: At_Root-Tips-vs-Tops_P Parameter: Tissue Value: Root Tips vs. Root Tops
  misc_feature: MA Experiment ID: 20001560 Result: Down-regulated in Transcription
  misc_feature: MA Experiment 20001560 PARAMETER Experiment Name: At_Drought_Soil_Dry_P Parameter: Age (day) Value: 28
  misc_feature: MA Experiment 20001560 PARAMETER Experiment Name: At_Drought_Soil_Dry_P Parameter: Organism Value: A. thaliana
  misc_feature: MA Experiment 20001560 PARAMETER Experiment Name: At_Drought_Soil_Dry_P Parameter: Plant Line Value: WS
  misc_feature: MA Experiment 20001560 PARAMETER Experiment Name: At_Drought_Soil_Dry_P Parameter: Post Timepoint (hr) Value: None
  misc_feature: MA Experiment 20001560 PARAMETER Experiment Name: At_Drought_Soil_Dry_P Parameter: Post-Treatment Value: None
  misc_feature: MA Experiment 20001560 PARAMETER Experiment Name: At_Drought_Soil_Dry_P Parameter: Timepoint (day) Value: 14
  misc_feature: MA Experiment 20001560 PARAMETER Experiment Name: At_Drought_Soil_Dry_P Parameter: Treatment Value: Drought vs. No Drought

SEQ ID NO: 94963 - protein, 281 aa, Arabidopsis thaliana; identical to SEQ ID NO: 91207
  peptide (1)..(281): Ceres Seq. ID no. 12726813
  misc_feature (1)..(281): Homolog of NCBI NO: 15223970 NR Description: unknown protein; protein id: At1g71190.1
  misc_feature (2)..(280): Homolog of NCBI NO: 34905818 NR Description: P0483G10.13 [Oryza sativa (japonica
  misc_feature (2)..(252): Homolog of NCBI NO: 15239801 NR Description: putative protein; protein id: At5g11870.1
  misc_feature (13)..(246): Homolog of NCBI NO: 29653854 NR Description: membrane protein, putative [Coxiella burnetii RSA >gi|29541117|gb|AAO90060.1| membrane protein, putative [Coxiella
  misc_feature (10)..(251): Homolog of NCBI NO: 23029224 NR Description: hypothetical protein [Microbulbifer degradans
  misc_feature (12)..(241): Homolog of NCBI NO: 27376099 NR Description: blr0988 [Bradyrhizobium japonicum]
  misc_feature (145)..(249): Homolog of NCBI NO: 34903592 NR Description: P0419B01.9 [Oryza sativa (japonica
  misc_feature (2)..(103): Homolog of NCBI NO: 34903592 NR Description: P0419B01.9 [Oryza sativa (japonica

SEQ ID NO: 94964 - protein, 276 aa, Arabidopsis thaliana; identical to SEQ ID NO: 91208
  peptide (1)..(276): Ceres Seq. ID no. 12726814
  misc_feature (1)..(276): Homolog of NCBI NO: 15223970 NR Description: unknown protein; protein id: At1g71190.1
  misc_feature (1)..(275): Homolog of NCBI NO: 34905818 NR Description: P0483G10.13 [Oryza sativa (japonica
  misc_feature (1)..(247): Homolog of NCBI NO: 15239801 NR Description: putative protein; protein id: At5g11870.1
  misc_feature (8)..(241): Homolog of NCBI NO: 29653854 NR Description: membrane protein, putative [Coxiella burnetii RSA >gi|29541117|gb|AAO90060.1| membrane protein, putative [Coxiella
  misc_feature (5)..(246): Homolog of NCBI NO: 23029224 NR Description: hypothetical protein [Microbulbifer degradans
  misc_feature (7)..(236): Homolog of NCBI NO: 27376099 NR Description: blr0988 [Bradyrhizobium japonicum]
  misc_feature (140)..(244): Homolog of NCBI NO: 34903592 NR Description: P0419B01.9 [Oryza sativa (japonica
  misc_feature (1)..(98): Homolog of NCBI NO: 34903592 NR Description: P0419B01.9 [Oryza sativa (japonica

SEQ ID NO: 94965 - protein, 262 aa, Arabidopsis thaliana; identical to SEQ ID NO: 91209
  peptide (1)..(262): Ceres Seq. ID no. 12726815
  misc_feature (1)..(262): Homolog of NCBI NO: 15223970 NR Description: unknown protein; protein id: At1g71190.1
  misc_feature (1)..(261): Homolog of NCBI NO: 34905818 NR Description: P0483G10.13 [Oryza sativa (japonica
  misc_feature (1)..(233): Homolog of NCBI NO: 15239801 NR Description: putative protein; protein id: At5g11870.1
  misc_feature (1)..(227): Homolog of NCBI NO: 29653854 NR Description: membrane protein, putative [Coxiella burnetii RSA >gi|29541117|gb|AAO90060.1| membrane protein, putative [Coxiella
  misc_feature (1)..(232): Homolog of NCBI NO: 23029224 NR Description: hypothetical protein [Microbulbifer degradans
  misc_feature (1)..(222): Homolog of NCBI NO: 27376099 NR Description: blr0988 [Bradyrhizobium japonicum]
  misc_feature (126)..(230): Homolog of NCBI NO: 34903592 NR Description: P0419B01.9 [Oryza sativa (japonica
  misc_feature (1)..(84): Homolog of NCBI NO: 34903592 NR Description: P0419B01.9 [Oryza sativa (japonica

SEQ ID NO: 94966 - DNA, 957 bp, Arabidopsis thaliana; identical to SEQ ID NO: 91210
  misc_feature (1)..(957): Ceres Seq. ID no. 12726819
  misc_feature: MA Experiment ID: 108579 Result: Down-regulated in Transcription
  misc_feature: MA Experiment 108579 PARAMETER Experiment Name: At_4deg_Cold_cDNA_P Parameter: Temperature (deg C) Value: 4 vs. 22
  misc_feature: MA Experiment 108579 PARAMETER Experiment Name: At_4deg_Cold_cDNA_P Parameter: Timepoint (hr) Value: 6
  misc_feature: MA Experiment 108579 PARAMETER Experiment Name: At_4deg_Cold_cDNA_P Parameter: Tissue Value: Aerial

SEQ ID NO: 94967 - protein, 318 aa, Arabidopsis thaliana; identical to SEQ ID NO: 77113
  peptide (1)..(318): Ceres Seq. ID no. 12726820
  misc_feature (34)..(195): Pfam Name: NAD binding domain of 6-phosphogluconate dehydrogenase Pfam Description: NAD binding domain of 6-phosphogluconate
  misc_feature (1)..(318): Homolog of NCBI NO: 18409781 NR Description: putative dehydrogenase; protein id: At1g71180.1, by cDNA: gi_15293142, supported by cDNA: gi_21281067 [Arabidopsis >gi|15293143|gb|AAK93682.1| putative dehydrogenase dehydrogenase
  misc_feature (22)..(318): Homolog of NCBI NO: 25283629 NR Description: probable dehydrogenase F23N20.17 [imported] -
  misc_feature (22)..(318): Homolog of NCBI NO: 30698779 NR Description: dehydrogenase -related [Arabidopsis thaliana]
  misc_feature (29)..(318): Homolog of NCBI NO: 15233455 NR Description: putative protein; protein id: At4g29120.1, by cDNA: gi_13877868, supported by cDNA: gi_17065607 [Arabidopsis
  misc_feature (30)..(315): Homolog of NCBI NO: 34909392 NR Description: putative dehydrogenase [Oryza sativa (japonica group)] >gi|20521418|dbj|BAB91928.1| putative dehydrogenase
  misc_feature (35)..(307): Homolog of NCBI NO: 15896585 NR Description: Dehydrogenase related to 3-hydroxyisobutyrate YKWC B.subtilis ortholog [Clostridium acetobutylicum]
  misc_feature (37)..(305): Homolog of NCBI NO: 30022129 NR Description: 3-hydroxyisobutyrate dehydrogenase [Bacillus
  misc_feature (36)..(312): Homolog of NCBI NO: 16803045 NR Description: similar to 3-hydroxyisobutyrate dehydrogenase (B.
  misc_feature (34)..(307): Homolog of NCBI NO: 16078460 NR Description: similar to 3-hydroxyisobutyrate dehydrogenase subtilis] >gi|3183454|sp|O34948|YKWC_BACSU Hypothetical
  misc_feature (36)..(314): Homolog of NCBI NO: 15898379 NR Description: Oxidoreductase [Sulfolobus solfataricus]

SEQ ID NO: 94968 - protein, 297 aa, Arabidopsis thaliana; identical to SEQ ID NO: 77114
  peptide (1)..(297): Ceres Seq. ID no. 12726821
  misc_feature (13)..(174): Pfam Name: NAD binding domain of 6-phosphogluconate dehydrogenase Pfam Description: NAD binding domain of 6-phosphogluconate
  misc_feature (1)..(297): Homolog of NCBI NO: 18409781 NR Description: putative dehydrogenase; protein id: At1g71180.1, by cDNA: gi_15293142, supported by cDNA: gi_21281067 [Arabidopsis >gi|15293143|gb|AAK93682.1| putative dehydrogenase dehydrogenase
  misc_feature (1)..(297): Homolog of NCBI NO: 25283629 NR Description: probable dehydrogenase F23N20.17 [imported] -
  misc_feature (1)..(297): Homolog of NCBI NO: 30698779 NR Description: dehydrogenase -related [Arabidopsis thaliana]
  misc_feature (8)..(297): Homolog of NCBI NO: 15233455 NR Description: putative protein; protein id: At4g29120.1, by cDNA: gi_13877868, supported by cDNA: gi_17065607 [Arabidopsis
  misc_feature (9)..(294): Homolog of NCBI NO: 34909392 NR Description: putative dehydrogenase [Oryza sativa (japonica group)] >gi|20521418|dbj|BAB91928.1| putative dehydrogenase
  misc_feature (14)..(286): Homolog of NCBI NO: 15896585 NR Description: Dehydrogenase related to 3-hydroxyisobutyrate YKWC B.subtilis ortholog [Clostridium acetobutylicum]
  misc_feature (16)..(284): Homolog of NCBI NO: 30022129 NR Description: 3-hydroxyisobutyrate dehydrogenase [Bacillus
  misc_feature (15)..(291): Homolog of NCBI NO: 16803045 NR Description: similar to 3-hydroxyisobutyrate dehydrogenase (B.
  misc_feature (13)..(286): Homolog of NCBI NO: 16078460 NR Description: similar to 3-hydroxyisobutyrate dehydrogenase subtilis] >gi|3183454|sp|O34948|YKWC_BACSU Hypothetical
  misc_feature (15)..(293): Homolog of NCBI NO: 15898379 NR Description: Oxidoreductase [Sulfolobus solfataricus]

SEQ ID NO: 94969 - protein, 274 aa, Arabidopsis thaliana; identical to SEQ ID NO: 77115
  peptide (1)..(274): Ceres Seq. ID no. 12726822
  misc_feature (1)..(151): Pfam Name: NAD binding domain of 6-phosphogluconate dehydrogenase Pfam Description: NAD binding domain of 6-phosphogluconate
  misc_feature (1)..(274): Homolog of NCBI NO: 18409781 NR Description: putative dehydrogenase; protein id: At1g71180.1, by cDNA: gi_15293142, supported by cDNA: gi_21281067 [Arabidopsis >gi|15293143|gb|AAK93682.1| putative dehydrogenase dehydrogenase
  misc_feature (1)..(274): Homolog of NCBI NO: 25283629 NR Description: probable dehydrogenase F23N20.17 [imported] -
  misc_feature (1)..(274): Homolog of NCBI NO: 30698779 NR Description: dehydrogenase -related [Arabidopsis thaliana]
  misc_feature (1)..(274): Homolog of NCBI NO: 15233455 NR Description: putative protein; protein id: At4g29120.1, by cDNA: gi_13877868, supported by cDNA: gi_17065607 [Arabidopsis
  misc_feature (1)..(271): Homolog of NCBI NO: 34909392 NR Description: putative dehydrogenase [Oryza sativa (japonica group)] >gi|20521418|dbj|BAB91928.1| putative dehydrogenase
  misc_feature (1)..(263): Homolog of NCBI NO: 15896585 NR Description: Dehydrogenase related to 3-hydroxyisobutyrate YKWC B.subtilis ortholog [Clostridium acetobutylicum]
  misc_feature (1)..(261): Homolog of NCBI NO: 30022129 NR Description: 3-hydroxyisobutyrate dehydrogenase [Bacillus
  misc_feature (1)..(268): Homolog of NCBI NO: 16803045 NR Description: similar to 3-hydroxyisobutyrate dehydrogenase (B.
  misc_feature (1)..(263): Homolog of NCBI NO: 16078460 NR Description: similar to 3-hydroxyisobutyrate dehydrogenase subtilis] >gi|3183454|sp|O34948|YKWC_BACSU Hypothetical
  misc_feature (1)..(270): Homolog of NCBI NO: 15898379 NR Description: Oxidoreductase [Sulfolobus solfataricus]

SEQ ID NO: 94970 - DNA, 959 bp, Arabidopsis thaliana; identical to SEQ ID NO: 91214
  misc_feature (1)..(959): Ceres Seq. ID no. 12726846
  misc_feature: MA Experiment ID: 20000180 Result: Down-regulated in Transcription
  misc_feature: MA Experiment 20000180 PARAMETER Experiment Name: At_Germinating_Seeds_P Parameter: Age (hr) Value: 24 vs. 0
  misc_feature: MA Experiment 20000180 PARAMETER Experiment Name: At_Germinating_Seeds_P Parameter: Tissue Value: Germinating Seeds
  misc_feature: MA Experiment ID: 20001451 Result: Down-regulated in Transcription
  misc_feature: MA Experiment 20001451 PARAMETER Experiment Name: At_Far-red-induction_P Parameter: Age (day) Value: 7
  misc_feature: MA Experiment 20001451 PARAMETER Experiment Name: At_Far-red-induction_P Parameter: Light Value: Far-red vs. White
  misc_feature: MA Experiment 20001451 PARAMETER Experiment Name: At_Far-red-induction_P Parameter: Organism Value: A. thaliana
  misc_feature: MA Experiment 20001451 PARAMETER Experiment Name: At_Far-red-induction_P Parameter: Plant Line Value: Columbia
  misc_feature: MA Experiment 20001451 PARAMETER Experiment Name: At_Far-red-induction_P Parameter: Timepoint (hr) Value: 24
  misc_feature: MA Experiment 20001451 PARAMETER Experiment Name: At_Far-red-induction_P Parameter: Tissue Value: Whole Plant

SEQ ID NO: 94971 - protein, 176 aa, Arabidopsis thaliana; identical to SEQ ID NO: 91215
  peptide (1)..(176): Ceres Seq. ID no. 12726847
  misc_feature (1)..(176): Homolog of NCBI NO: 15224018 NR Description: hypothetical protein; protein id: At1g71310.1
  misc_feature (40)..(174): Homolog of NCBI NO: 34907336 NR Description: putative SnRK1-interacting protein 1 [Oryza
  misc_feature (45)..(174): Homolog of NCBI NO: 9367245 NR Description: SnRK1-interacting protein 1 [Hordeum vulgare
  misc_feature (47)..(173): Homolog of NCBI NO: 15238827 NR Description: putative protein; protein id: At5g47870.1, by cDNA: 38345. [Arabidopsis thaliana] gb|AAF26028.1~gene_id:MCA23.21~similar to unknown protein
  misc_feature (47)..(173): Homolog of NCBI NO: 21593360 NR Description: unknown [Arabidopsis thaliana]
  misc_feature (44)..(130): Homolog of NCBI NO: 27573357 NR Description: hypothetical protein [Oryza sativa (japonica
  misc_feature (54)..(174): Homolog of NCBI NO: 38505854 NR Description: slr6029 [Synechocystis sp. PCC 6803] slr6088 [Synechocystis sp. PCC 6803] >gi|38423878|dbj|BAD02086.1| [Synechocystis sp. PCC 6803] >gi|38423937|dbj|BAD02145.1| slr6088
  misc_feature (112)..(174): Homolog of NCBI NO: 38505607 NR Description: sll5072 [Synechocystis sp. PCC 6803]

SEQ ID NO: 94972 - protein, 147 aa, Arabidopsis thaliana; identical to SEQ ID NO: 91216
  peptide (1)..(147): Ceres Seq. ID no. 12726848
  misc_feature (1)..(147): Homolog of NCBI NO: 15224018 NR Description: hypothetical protein; protein id: At1g71310.1
  misc_feature (11)..(145): Homolog of NCBI NO: 34907336 NR Description: putative SnRK1-interacting protein 1 [Oryza
  misc_feature (16)..(145): Homolog of NCBI NO: 9367245 NR Description: SnRK1-interacting protein 1 [Hordeum vulgare
  misc_feature (18)..(144): Homolog of NCBI NO: 15238827 NR Description: putative protein; protein id: At5g47870.1, by cDNA: 38345. [Arabidopsis thaliana] gb|AAF26028.1~gene_id:MCA23.21~similar to unknown protein
  misc_feature (18)..(144): Homolog of NCBI NO: 21593360 NR Description: unknown [Arabidopsis thaliana]
  misc_feature (15)..(101): Homolog of NCBI NO: 27573357 NR Description: hypothetical protein [Oryza sativa (japonica
  misc_feature (25)..(145): Homolog of NCBI NO: 38505854 NR Description: slr6029 [Synechocystis sp. PCC 6803] slr6088 [Synechocystis sp. PCC 6803] >gi|38423878|dbj|BAD02086.1| [Synechocystis sp. PCC 6803] >gi|38423937|dbj|BAD02145.1| slr6088
  misc_feature (83)..(145): Homolog of NCBI NO: 38505607 NR Description: sll5072 [Synechocystis sp. PCC 6803]

SEQ ID NO: 94973 - DNA, 2070 bp, Arabidopsis thaliana; identical to SEQ ID NO: 91217
  misc_feature (1)..(2070): Ceres Seq. ID no. 12726871
  misc_feature: MA Experiment ID: 20000185 Result: Down-regulated in Transcription
  misc_feature: MA Experiment 20000185 PARAMETER Experiment Name: At_Roots__P Parameter: Age (day) Value: 7 vs. 21
  misc_feature: MA Experiment 20000185 PARAMETER Experiment Name: At_Roots__P Parameter: Organism Value: A. thaliana
  misc_feature: MA Experiment 20000185 PARAMETER Experiment Name: At_Roots__P Parameter: Tissue Value: Roots vs. Whole Plant
  misc_feature: MA Experiment ID: 20001451 Result: Down-regulated in Transcription
  misc_feature: MA Experiment 20001451 PARAMETER Experiment Name: At_Far-red-induction_P Parameter: Age (day) Value: 7
  misc_feature: MA Experiment 20001451 PARAMETER Experiment Name: At_Far-red-induction_P Parameter: Light Value: Far-red vs. White
  misc_feature: MA Experiment 20001451 PARAMETER Experiment Name: At_Far-red-induction_P Parameter: Organism Value: A. thaliana
  misc_feature: MA Experiment 20001451 PARAMETER Experiment Name: At_Far-red-induction_P Parameter: Plant Line Value: Columbia
  misc_feature: MA Experiment 20001451 PARAMETER Experiment Name: At_Far-red-induction_P Parameter: Timepoint (hr) Value: 24
  misc_feature: MA Experiment 20001451 PARAMETER Experiment Name: At_Far-red-induction_P Parameter: Tissue Value: Whole Plant

SEQ ID NO: 94974 - protein, 689 aa, Arabidopsis thaliana; identical to SEQ ID NO: 91218
  peptide (1)..(689): Ceres Seq. ID no. 12726872
  misc_feature (586)..(620): Pfam Name: PPR repeat Pfam Description: PPR repeat
  misc_feature (86)..(677): Homolog of NCBI NO: 15234006 NR Description: putative protein; protein id: At4g18750.1
  misc_feature (113)..(680): Homolog of NCBI NO: 34897084 NR Description: hypothetical protein [Oryza sativa (japonica group)] >gi|12957718|gb|AAK09236.1| hypothetical protein [Oryza
  misc_feature (88)..(681): Homolog of NCBI NO: 30694644 NR Description: pentatricopeptide (PPR) repeat-containing protein
  misc_feature (88)..(681): Homolog of NCBI NO: 30794008 NR Description: unknown protein [Arabidopsis thaliana]
  misc_feature (106)..(675): Homolog of NCBI NO: 34903762 NR Description: unnamed protein product [Oryza sativa (japonica group)] >gi|7340873|dbj|BAA92963.1| unnamed protein product
  misc_feature (145)..(677): Homolog of NCBI NO: 15236277 NR Description: putative protein; protein id: At4g35130.1
  misc_feature (106)..(681): Homolog of NCBI NO: 11281371 NR Description: hypothetical protein T8H10.30 - Arabidopsis >gi|6706414|emb|CAB66100.1| putative protein [Arabidopsis
  misc_feature (13)..(675): Homolog of NCBI NO: 15233292 NR Description: hypothetical protein; protein id: At3g22150.1
  misc_feature (123)..(676): Homolog of NCBI NO: 15226150 NR Description: hypothetical protein; protein id: At2g33680.1
  misc_feature (101)..(675): Homolog of NCBI NO: 15220337 NR Description: hypothetical protein; protein id: At1g11290.1

SEQ ID NO: 94975 - protein, 535 aa, Arabidopsis thaliana; identical to SEQ ID NO: 91219
  peptide (1)..(535): Ceres Seq. ID no. 12726873
  misc_feature (432)..(466): Pfam Name: PPR repeat Pfam Description: PPR repeat
  misc_feature (1)..(523): Homolog of NCBI NO: 15234006 NR Description: putative protein; protein id: At4g18750.1
  misc_feature (1)..(526): Homolog of NCBI NO: 34897084 NR Description: hypothetical protein [Oryza sativa (japonica group)] >gi|12957718|gb|AAK09236.1| hypothetical protein [Oryza
  misc_feature (1)..(527): Homolog of NCBI NO: 30694644 NR Description: pentatricopeptide (PPR) repeat-containing protein
  misc_feature (1)..(527): Homolog of NCBI NO: 30794008 NR Description: unknown protein [Arabidopsis thaliana]
  misc_feature (1)..(521): Homolog of NCBI NO: 34903762 NR Description: unnamed protein product [Oryza sativa (japonica group)] >gi|7340873|dbj|BAA92963.1| unnamed protein product
  misc_feature (1)..(523): Homolog of NCBI NO: 15236277 NR Description: putative protein; protein id: At4g35130.1
  misc_feature (1)..(527): Homolog of NCBI NO: 11281371 NR Description: hypothetical protein T8H10.30 - Arabidopsis >gi|6706414|emb|CAB66100.1| putative protein [Arabidopsis
  misc_feature (1)..(521): Homolog of NCBI NO: 15233292 NR Description: hypothetical protein; protein id: At3g22150.1
  misc_feature (1)..(522): Homolog of NCBI NO: 15226150 NR Description: hypothetical protein; protein id: At2g33680.1
  misc_feature (1)..(521): Homolog of NCBI NO: 15220337 NR Description: hypothetical protein; protein id: At1g11290.1

SEQ ID NO: 94976 - protein, 485 aa, Arabidopsis thaliana; identical to SEQ ID NO: 91220
  peptide (1)..(485): Ceres Seq. ID no. 12726874
  misc_feature (382)..(416): Pfam Name: PPR repeat Pfam Description: PPR repeat
  misc_feature (1)..(473): Homolog of NCBI NO: 15234006 NR Description: putative protein; protein id: At4g18750.1
  misc_feature (1)..(476): Homolog of NCBI NO: 34897084 NR Description: hypothetical protein [Oryza sativa (japonica group)] >gi|12957718|gb|AAK09236.1| hypothetical protein [Oryza
  misc_feature (1)..(477): Homolog of NCBI NO: 30694644 NR Description: pentatricopeptide (PPR) repeat-containing protein
  misc_feature (1)..(477): Homolog of NCBI NO: 30794008 NR Description: unknown protein [Arabidopsis thaliana]
  misc_feature (1)..(471): Homolog of NCBI NO: 34903762 NR Description: unnamed protein product [Oryza sativa (japonica group)] >gi|7340873|dbj|BAA92963.1| unnamed protein product
  misc_feature (1)..(473): Homolog of NCBI NO: 15236277 NR Description: putative protein; protein id: At4g35130.1
  misc_feature (1)..(477): Homolog of NCBI NO: 11281371 NR Description: hypothetical protein T8H10.30 - Arabidopsis >gi|6706414|emb|CAB66100.1| putative protein [Arabidopsis
  misc_feature (1)..(471): Homolog of NCBI NO: 15233292 NR Description: hypothetical protein; protein id: At3g22150.1
  misc_feature (1)..(472): Homolog of NCBI NO: 15226150 NR Description: hypothetical protein; protein id: At2g33680.1
  misc_feature (1)..(471): Homolog of NCBI NO: 15220337 NR Description: hypothetical protein; protein id: At1g11290.1

SEQ ID NO: 94977 - DNA, 888 bp, Arabidopsis thaliana; identical to SEQ ID NO: 91221
  misc_feature (1)..(888): Ceres Seq. ID no. 12726881
  misc_feature: MA Experiment ID: 20000234 Result: Up-regulated in Transcription
  misc_feature: MA Experiment 20000234 PARAMETER Experiment Name: At_Siliques_P Parameter: Age (day) Value: 21
  misc_feature: MA Experiment 20000234 PARAMETER Experiment Name: At_Siliques_P Parameter: Organism Value: A. thaliana
  misc_feature: MA Experiment 20000234 PARAMETER Experiment Name: At_Siliques_P Parameter: Plant Line Value: WS
  misc_feature: MA Experiment 20000234 PARAMETER Experiment Name: At_Siliques_P Parameter: Tissue Value: Less Than 5mm Siliques vs. Whole Plant
  misc_feature: MA Experiment ID: 20000235 Result: Up-regulated in Transcription
  misc_feature: MA Experiment 20000235 PARAMETER Experiment Name: At_Siliques_P Parameter: Age (day) Value: 21
  misc_feature: MA Experiment 20000235 PARAMETER Experiment Name: At_Siliques_P Parameter: Organism Value: A. thaliana
  misc_feature: MA Experiment 20000235 PARAMETER Experiment Name: At_Siliques_P Parameter: Plant Line Value: WS
  misc_feature: MA Experiment 20000235 PARAMETER Experiment Name: At_Siliques_P Parameter: Tissue Value: 5-10mm Siliques vs. Whole Plant
  misc_feature: MA Experiment ID: 20000439 Result: Down-regulated in Transcription
  misc_feature: MA Experiment 20000439 PARAMETER Experiment Name: At_Roots__P Parameter: Age (day) Value: 14 vs. 21
  misc_feature: MA Experiment 20000439 PARAMETER Experiment Name: At_Roots__P Parameter: Organism Value: A. thaliana
  misc_feature: MA Experiment 20000439 PARAMETER Experiment Name: At_Roots__P Parameter: Tissue Value: Roots vs. Whole Plant
  misc_feature: MA Experiment ID: 20001910 Result: Up-regulated in Transcription
  misc_feature: MA Experiment 20001910 PARAMETER Experiment Name: At_Drought_Reproduction_P Parameter: Age (day) Value: 37
  misc_feature: MA Experiment 20001910 PARAMETER Experiment Name: At_Drought_Reproduction_P Parameter: Organism Value: A. thaliana
  misc_feature: MA Experiment 20001910 PARAMETER Experiment Name: At_Drought_Reproduction_P Parameter: Plant Line Value: WS
  misc_feature: MA Experiment 20001910 PARAMETER Experiment Name: At_Drought_Reproduction_P Parameter: Timepoint (day) Value: 7
  misc_feature: MA Experiment 20001910 PARAMETER Experiment Name: At_Drought_Reproduction_P Parameter: Tissue Value: Flowers
  misc_feature: MA Experiment 20001910 PARAMETER Experiment Name: At_Drought_Reproduction_P Parameter: Treatment Value: Drought vs. No Drought

SEQ ID NO: 94978 - protein, 295 aa, Arabidopsis thaliana; identical to SEQ ID NO: 91222
  peptide (1)..(295): Ceres Seq. ID no. 12726882
  misc_feature (53)..(294): Pfam Name: Protein of unknown function (DUF579) Pfam Description: Protein of unknown function (DUF579)
  misc_feature (1)..(295): Homolog of NCBI NO: 18409879 NR Description: hypothetical protein; protein id: At1g71690.1
  misc_feature (9)..(295): Homolog of NCBI NO: 25354648 NR Description: hypothetical protein F14O23.3 [imported] - thaliana >gi|7239492|gb|AAF43218.1|AC012654_2 EST gb|AI999169
  misc_feature (1)..(295): Homolog of NCBI NO: 18398986 NR Description: expressed protein; protein id: At1g33800.1, by cDNA: 114466., supported by cDNA: gi_17979548, supported by gi_20453344 [Arabidopsis thaliana] >gi|25354651|pir||E86461
  misc_feature (20)..(295): Homolog of NCBI NO: 15234881 NR Description: putative protein; protein id: At4g09990.1
  misc_feature (14)..(295): Homolog of NCBI NO: 15217566 NR Description: unknown protein; protein id: At1g09610.1
  misc_feature (25)..(295): Homolog of NCBI NO: 25402555 NR Description: hypothetical protein [imported] - Arabidopsis >gi|3482933|gb|AAC33218.1| Similar to cdc2 protein kinases
  misc_feature (38)..(294): Homolog of NCBI NO: 18396558 NR Description: expressed protein; protein id: At1g27930.1, by cDNA: 1367., supported by cDNA: gi_15215712 [Arabidopsis
  misc_feature (38)..(294): Homolog of NCBI NO: 21537399 NR Description: unknown [Arabidopsis thaliana]
  misc_feature (38)..(294): Homolog of NCBI NO: 15220402 NR Description: unknown protein; protein id: At1g67330.1 thaliana] >gi|9828617|gb|AAG00240.1|AC002130_5 F1N21.15
  misc_feature (134)..(295): Homolog of NCBI NO: 27754730 NR Description: unknown protein [Arabidopsis thaliana]

SEQ ID NO: 94979 - protein, 287 aa, Arabidopsis thaliana; identical to SEQ ID NO: 91223
  peptide (1)..(287): Ceres Seq. ID no. 12726883
  misc_feature (45)..(286): Pfam Name: Protein of unknown function (DUF579) Pfam Description: Protein of unknown function (DUF579)
  misc_feature (1)..(287): Homolog of NCBI NO: 18409879 NR Description: hypothetical protein; protein id: At1g71690.1
  misc_feature (1)..(287): Homolog of NCBI NO: 25354648 NR Description: hypothetical protein F14O23.3 [imported] - thaliana >gi|7239492|gb|AAF43218.1|AC012654_2 EST gb|AI999169
  misc_feature (1)..(287): Homolog of NCBI NO: 18398986 NR Description: expressed protein; protein id: At1g33800.1, by cDNA: 114466., supported by cDNA: gi_17979548, supported by gi_20453344 [Arabidopsis thaliana] >gi|25354651|pir||E86461
  misc_feature (12)..(287): Homolog of NCBI NO: 15234881 NR Description: putative protein; protein id: At4g09990.1
  misc_feature (6)..(287): Homolog of NCBI NO: 15217566 NR Description: unknown protein; protein id: At1g09610.1
  misc_feature (17)..(287): Homolog of NCBI NO: 25402555 NR Description: hypothetical protein [imported] - Arabidopsis >gi|3482933|gb|AAC33218.1| Similar to cdc2 protein kinases
  misc_feature (30)..(286): Homolog of NCBI NO: 18396558 NR Description: expressed protein; protein id: At1g27930.1, by cDNA: 1367., supported by cDNA: gi_15215712 [Arabidopsis
  misc_feature (30)..(286): Homolog of NCBI NO: 21537399 NR Description: unknown [Arabidopsis thaliana]
  misc_feature (30)..(286): Homolog of NCBI NO: 15220402 NR Description: unknown protein; protein id: At1g67330.1 thaliana] >gi|9828617|gb|AAG00240.1|AC002130_5 F1N21.15
  misc_feature (126)..(287): Homolog of NCBI NO: 27754730 NR Description: unknown protein [Arabidopsis thaliana]

SEQ ID NO: 94980 - protein, 177 aa, Arabidopsis thaliana; identical to SEQ ID NO: 91224
  peptide (1)..(177): Ceres Seq. ID no. 12726884
  misc_feature (1)..(176): Pfam Name: Protein of unknown function (DUF579) Pfam Description: Protein of unknown function (DUF579)
  misc_feature (1)..(177): Homolog of NCBI NO: 18409879 NR Description: hypothetical protein; protein id: At1g71690.1
  misc_feature (1)..(177): Homolog of NCBI NO: 25354648 NR Description: hypothetical protein F14O23.3 [imported] - thaliana >gi|7239492|gb|AAF43218.1|AC012654_2 EST gb|AI999169
  misc_feature (1)..(177): Homolog of NCBI NO: 18398986 NR Description: expressed protein; protein id: At1g33800.1, by cDNA: 114466., supported by cDNA: gi_17979548, supported by gi_20453344 [Arabidopsis thaliana] >gi|25354651|pir||E86461
  misc_feature (1)..(177): Homolog of NCBI NO: 15234881 NR Description: putative protein; protein id: At4g09990.1
  misc_feature (1)..(177): Homolog of NCBI NO: 15217566 NR Description: unknown protein; protein id: At1g09610.1
  misc_feature (1)..(177): Homolog of NCBI NO: 25402555 NR Description: hypothetical protein [imported] - Arabidopsis >gi|3482933|gb|AAC33218.1| Similar to cdc2 protein kinases
  misc_feature (1)..(176): Homolog of NCBI NO: 18396558 NR Description: expressed protein; protein id: At1g27930.1, by cDNA: 1367., supported by cDNA: gi_15215712 [Arabidopsis
  misc_feature (1)..(176): Homolog of NCBI NO: 21537399 NR Description: unknown [Arabidopsis thaliana]
  misc_feature (1)..(176): Homolog of NCBI NO: 15220402 NR Description: unknown protein; protein id: At1g67330.1 thaliana] >gi|9828617|gb|AAG00240.1|AC002130_5 F1N21.15
  misc_feature (16)..(177): Homolog of NCBI NO: 27754730 NR Description: unknown protein [Arabidopsis thaliana]

SEQ ID NO: 94981 - DNA, 2273 bp, Arabidopsis thaliana; identical to SEQ ID NO: 91225
  misc_feature (1)..(2273): Ceres Seq. ID no. 12726893
  misc_feature: MA Experiment ID: 20000234 Result: Down-regulated in Transcription
  misc_feature: MA Experiment 20000234 PARAMETER Experiment Name: At_Siliques_P Parameter: Age (day) Value: 21
  misc_feature: MA Experiment 20000234 PARAMETER Experiment Name: At_Siliques_P Parameter: Organism Value: A. thaliana
  misc_feature: MA Experiment 20000234 PARAMETER Experiment Name: At_Siliques_P Parameter: Plant Line Value: WS
  misc_feature: MA Experiment 20000234 PARAMETER Experiment Name: At_Siliques_P Parameter: Tissue Value: Less Than 5mm Siliques vs. Whole Plant
  misc_feature: MA Experiment ID: 20000495 Result: Down-regulated in Transcription
  misc_feature: MA Experiment 20000495 PARAMETER Experiment Name: At_Guard_Cells_P Parameter: Harvest Date Value: 8/2/2002
  misc_feature: MA Experiment 20000495 PARAMETER Experiment Name: At_Guard_Cells_P Parameter: Organism Value: A. thaliana
  misc_feature: MA Experiment 20000495 PARAMETER Experiment Name: At_Guard_Cells_P Parameter: Tissue Value: Guard Cells vs. Leaves
  misc_feature: MA Experiment ID: 20000794 Result: Up-regulated in Transcription
  misc_feature: MA Experiment 20000794 PARAMETER Experiment Name: At_Petals_P Parameter: Age (day) Value: 23-25 days
  misc_feature: MA Experiment 20000794 PARAMETER Experiment Name: At_Petals_P Parameter: Plant Line Value: WS
  misc_feature: MA Experiment 20000794 PARAMETER Experiment Name: At_Petals_P Parameter: Tissue Value: Petals vs. Whole plant

SEQ ID NO: 94982 - protein, 664 aa, Arabidopsis thaliana; identical to SEQ ID NO: 91226
  peptide (1)..(664): Ceres Seq. ID no. 12726894
  misc_feature (130)..(631): Pfam Name: Endonuclease/Exonuclease/phosphatase family Pfam Description: Endonuclease/Exonuclease/phosphatase family
  misc_feature (114)..(664): Homolog of NCBI NO: 12323727 NR Description: putative inositol polyphosphate phosphatase, 5'
  misc_feature (396)..(655): Homolog of NCBI NO: 10444261 NR Description: inositol polyphosphate 5-phosphatase I
  misc_feature (396)..(655): Homolog of NCBI NO: 18399139 NR Description: inositol polyphosphate 5-phosphatase II, protein id: At1g34120.1, supported by cDNA: gi_10444260
  misc_feature (103)..(359): Homolog of NCBI NO: 10444261 NR Description: inositol polyphosphate 5-phosphatase I
  misc_feature (103)..(359): Homolog of NCBI NO: 18399139 NR Description: inositol polyphosphate 5-phosphatase II, protein id: At1g34120.1, supported by cDNA: gi_10444260
  misc_feature (19)..(62): Homolog of NCBI NO: 10444261 NR Description: inositol polyphosphate 5-phosphatase I
  misc_feature (19)..(62): Homolog of NCBI NO: 18399139 NR Description: inositol polyphosphate 5-phosphatase II, protein id: At1g34120.1, supported by cDNA: gi_10444260
  misc_feature (396)..(655): Homolog of NCBI NO: 30693006 NR Description: inositol polyphosphate 5-phosphatase I (IP5PI)
  misc_feature (109)..(359): Homolog of NCBI NO: 30693006 NR Description: inositol polyphosphate 5-phosphatase I (IP5PI)
  misc_feature (19)..(62): Homolog of NCBI NO: 30693006 NR Description: inositol polyphosphate 5-phosphatase I (IP5PI)

SEQ ID NO: 94983 - protein, 655 aa, Arabidopsis thaliana; identical to SEQ ID NO: 91227
  peptide (1)..(655): Ceres Seq. ID no. 12726895
  misc_feature (121)..(622): Pfam Name: Endonuclease/Exonuclease/phosphatase family Pfam Description: Endonuclease/Exonuclease/phosphatase family
  misc_feature (105)..(655): Homolog of NCBI NO: 12323727 NR Description: putative inositol polyphosphate phosphatase, 5'
  misc_feature (387)..(646): Homolog of NCBI NO: 10444261 NR Description: inositol polyphosphate 5-phosphatase I
  misc_feature (387)..(646): Homolog of NCBI NO: 18399139 NR Description: inositol polyphosphate 5-phosphatase II, protein id: At1g34120.1, supported by cDNA: gi_10444260
  misc_feature (94)..(350): Homolog of NCBI NO: 10444261 NR Description: inositol polyphosphate 5-phosphatase I
  misc_feature (94)..(350): Homolog of NCBI NO: 18399139 NR Description: inositol polyphosphate 5-phosphatase II, protein id: At1g34120.1, supported by cDNA: gi_10444260
  misc_feature (10)..(53): Homolog of NCBI NO: 10444261 NR Description: inositol polyphosphate 5-phosphatase I
  misc_feature (10)..(53): Homolog of NCBI NO: 18399139 NR Description: inositol polyphosphate 5-phosphatase II, protein id: At1g34120.1, supported by cDNA: gi_10444260
  misc_feature (387)..(646): Homolog of NCBI NO: 30693006 NR Description: inositol polyphosphate 5-phosphatase I (IP5PI)
  misc_feature (100)..(350): Homolog of NCBI NO: 30693006 NR Description: inositol polyphosphate 5-phosphatase I (IP5PI)
  misc_feature (10)..(53): Homolog of NCBI NO: 30693006 NR Description: inositol polyphosphate 5-phosphatase I (IP5PI)

SEQ ID NO: 94984 - protein, 638 aa, Arabidopsis thaliana; identical to SEQ ID NO: 91228
  peptide (1)..(638): Ceres Seq. ID no. 12726896
  misc_feature (104)..(605): Pfam Name: Endonuclease/Exonuclease/phosphatase family Pfam Description: Endonuclease/Exonuclease/phosphatase family
  misc_feature (88)..(638): Homolog of NCBI NO: 12323727 NR Description: putative inositol polyphosphate phosphatase, 5'
  misc_feature (370)..(629): Homolog of NCBI NO: 10444261 NR Description: inositol polyphosphate 5-phosphatase I
  misc_feature (370)..(629): Homolog of NCBI NO: 18399139 NR Description: inositol polyphosphate 5-phosphatase II, protein id: At1g34120.1, supported by cDNA: gi_10444260
  misc_feature (77)..(333): Homolog of NCBI NO: 10444261 NR Description: inositol polyphosphate 5-phosphatase I
  misc_feature (77)..(333): Homolog of NCBI NO: 18399139 NR Description: inositol polyphosphate 5-phosphatase II, protein id: At1g34120.1, supported by cDNA: gi_10444260
  misc_feature (1)..(36): Homolog of NCBI NO: 10444261 NR Description: inositol polyphosphate 5-phosphatase I
  misc_feature (1)..(36): Homolog of NCBI NO: 18399139 NR Description: inositol polyphosphate 5-phosphatase II, protein id: At1g34120.1, supported by cDNA: gi_10444260
  misc_feature (370)..(629): Homolog of NCBI NO: 30693006 NR Description: inositol polyphosphate 5-phosphatase I (IP5PI)
  misc_feature (83)..(333): Homolog of NCBI NO: 30693006 NR Description: inositol polyphosphate 5-phosphatase I (IP5PI)
  misc_feature (1)..(36): Homolog of NCBI NO: 30693006 NR Description: inositol polyphosphate 5-phosphatase I (IP5PI)

SEQ ID NO: 94985 - DNA, 1386 bp, Arabidopsis thaliana; identical to SEQ ID NO: 91229
  misc_feature (1)..(1386): Ceres Seq. ID no. 12726903
  misc_feature: MA Experiment ID: 20000173 Result: Down-regulated in Transcription
  misc_feature: MA Experiment 20000173 PARAMETER Experiment Name: At_42deg_Heat_P Parameter: Age (day) Value: 14
  misc_feature: MA Experiment 20000173 PARAMETER Experiment Name: At_42deg_Heat_P Parameter: Organism Value: A. thaliana
  misc_feature: MA Experiment 20000173 PARAMETER Experiment Name: At_42deg_Heat_P Parameter: Plant Line Value: WS
  misc_feature: MA Experiment 20000173 PARAMETER Experiment Name: At_42deg_Heat_P Parameter: Temperature (deg C) Value: 42 vs. 22
  misc_feature: MA Experiment 20000173 PARAMETER Experiment Name: At_42deg_Heat_P Parameter: Timepoint (hr) Value: 6
  misc_feature: MA Experiment 20000173 PARAMETER Experiment Name: At_42deg_Heat_P Parameter: Tissue Value: Aerial
  misc_feature: MA Experiment ID: 20000184 Result: Down-regulated in Transcription
  misc_feature: MA Experiment 20000184 PARAMETER Experiment Name: At_Shoots__P Parameter: Age (day) Value: 7
  misc_feature: MA Experiment 20000184 PARAMETER Experiment Name: At_Shoots__P Parameter: Tissue Value: Shoots vs. Whole Plant
  misc_feature: MA Experiment ID: 20001451 Result: Down-regulated in Transcription
  misc_feature: MA Experiment 20001451 PARAMETER Experiment Name: At_Far-red-induction_P Parameter: Age (day) Value: 7
  misc_feature: MA Experiment 20001451 PARAMETER Experiment Name: At_Far-red-induction_P Parameter: Light Value: Far-red vs. White
  misc_feature: MA Experiment 20001451 PARAMETER Experiment Name: At_Far-red-induction_P Parameter: Organism Value: A. thaliana
  misc_feature: MA Experiment 20001451 PARAMETER Experiment Name: At_Far-red-induction_P Parameter: Plant Line Value: Columbia
  misc_feature: MA Experiment 20001451 PARAMETER Experiment Name: At_Far-red-induction_P Parameter: Timepoint (hr) Value: 24
  misc_feature: MA Experiment 20001451 PARAMETER Experiment Name: At_Far-red-induction_P Parameter: Tissue Value: Whole Plant

SEQ ID NO: 94986 - protein, 461 aa, Arabidopsis thaliana; identical to SEQ ID NO: 91230
  peptide (1)..(461): Ceres Seq. ID no. 12726904
  misc_feature (11)..(82): Pfam Name: RNA recognition motif. (a.k.a. RRM, RBD, or RNP domain) Pfam Description: RNA recognition motif. (a.k.a. RRM, RBD, or RNP
  misc_feature (1)..(461): Homolog of NCBI NO: 22330574 NR Description: cleavage stimulation factor, putative; protein At1g71800.1 [Arabidopsis thaliana] >gi|25406120|pir||E96740
  misc_feature (1)..(461): Homolog of NCBI NO: 21591633 NR Description: cleavage stimulation factor 64 [Arabidopsis
  misc_feature (146)..(374): Homolog of NCBI NO: 21619877 NR Description: Similar to cleavage stimulation factor, 3'
  misc_feature (9)..(106): Homolog of NCBI NO: 21619877 NR Description: Similar to cleavage stimulation factor, 3'
  misc_feature (367)..(454): Homolog of NCBI NO: 21619877 NR Description: Similar to cleavage stimulation factor, 3'
  misc_feature (146)..(371): Homolog of NCBI NO: 27735464 NR Description: Similar to cleavage stimulation factor, 3'
  misc_feature (9)..(106): Homolog of NCBI NO: 27735464 NR Description: Similar to cleavage stimulation factor, 3'
  misc_feature (372)..(454): Homolog of NCBI NO: 27735464 NR Description: Similar to cleavage stimulation factor, 3'
  misc_feature (146)..(403): Homolog of NCBI NO: 632500 NR Description: polyadenylation factor 64 kDa subunit
  misc_feature (9)..(106): Homolog of NCBI NO: 632500 NR Description: polyadenylation factor 64 kDa subunit

SEQ ID NO: 94987 - protein, 337 aa, Arabidopsis thaliana; identical to SEQ ID NO: 91231
  peptide (1)..(337): Ceres Seq. ID no. 12726905
  misc_feature (1)..(337): Homolog of NCBI NO: 22330574 NR Description: cleavage stimulation factor, putative; protein At1g71800.1 [Arabidopsis thaliana] >gi|25406120|pir||E96740
  misc_feature (1)..(337): Homolog of NCBI NO: 21591633 NR Description: cleavage stimulation factor 64 [Arabidopsis
  misc_feature (22)..(250): Homolog of NCBI NO: 21619877 NR Description: Similar to cleavage stimulation factor, 3'
  misc_feature (243)..(330): Homolog of NCBI NO: 21619877 NR Description: Similar to cleavage stimulation factor, 3'
  misc_feature (22)..(247): Homolog of NCBI NO: 27735464 NR Description: Similar to cleavage stimulation factor, 3'
  misc_feature (248)..(330): Homolog of NCBI NO: 27735464 NR Description: Similar to cleavage stimulation factor, 3'
  misc_feature (22)..(279): Homolog of NCBI NO: 632500 NR Description: polyadenylation factor 64 kDa subunit
  misc_feature (264)..(330): Homolog of NCBI NO: 632500 NR Description: polyadenylation factor 64 kDa subunit
  misc_feature (22)..(183): Homolog of NCBI NO: 4557493 NR Description: cleavage stimulation factor subunit 2; cleavage
  misc_feature (243)..(330): Homolog of NCBI NO: 4557493 NR Description: cleavage stimulation factor subunit 2; cleavage

SEQ ID NO: 94988 - protein, 288 aa, Arabidopsis thaliana; identical to SEQ ID NO: 91232
  peptide (1)..(288): Ceres Seq. ID no. 12726906
  misc_feature (1)..(288): Homolog of NCBI NO: 22330574 NR Description: cleavage stimulation factor, putative; protein At1g71800.1 [Arabidopsis thaliana] >gi|25406120|pir||E96740
  misc_feature (1)..(288): Homolog of NCBI NO: 21591633 NR Description: cleavage stimulation factor 64 [Arabidopsis
  misc_feature (1)..(201): Homolog of NCBI NO: 21619877 NR Description: Similar to cleavage stimulation factor, 3'
  misc_feature (194)..(281): Homolog of NCBI NO: 21619877 NR Description: Similar to cleavage stimulation factor, 3'
  misc_feature (1)..(198): Homolog of NCBI NO: 27735464 NR Description: Similar to cleavage stimulation factor, 3'
  misc_feature (199)..(281): Homolog of NCBI NO: 27735464 NR Description: Similar to cleavage stimulation factor, 3'
  misc_feature (1)..(230): Homolog of NCBI NO: 632500 NR Description: polyadenylation factor 64 kDa subunit
  misc_feature (215)..(281): Homolog of NCBI NO: 632500 NR Description: polyadenylation factor 64 kDa subunit
  misc_feature (1)..(134): Homolog of NCBI NO: 4557493 NR Description: cleavage stimulation factor subunit 2; cleavage
  misc_feature (194)..(281): Homolog of NCBI NO: 4557493 NR Description: cleavage stimulation factor subunit 2; cleavage

SEQ ID NO: 94989 - DNA, 2388 bp, Arabidopsis thaliana; identical to SEQ ID NO: 91233
  misc_feature (1)..(2388): Ceres Seq. ID no. 12726907
  misc_feature: MA Experiment ID: 20000265 Result: Up-regulated in Transcription
  misc_feature: MA Experiment 20000265 PARAMETER Experiment Name: At_Open_Flower_P Parameter: Age (day) Value: 21
  misc_feature: MA Experiment 20000265 PARAMETER Experiment Name: At_Open_Flower_P Parameter: Plant Line Value: WS
  misc_feature: MA Experiment 20000265 PARAMETER Experiment Name: At_Open_Flower_P Parameter: Tissue Value: Closed Flower vs. Whole Plant
  misc_feature: MA Experiment ID: 20001248 Result: Down-regulated in Transcription
  misc_feature: MA Experiment 20001248 PARAMETER Experiment Name: At_Far-red-induction_P Parameter: Age (day) Value: 7
  misc_feature: MA Experiment 20001248 PARAMETER Experiment Name: At_Far-red-induction_P Parameter: Light Value: Far-red vs. White
  misc_feature: MA Experiment 20001248 PARAMETER Experiment Name: At_Far-red-induction_P Parameter: Organism Value: A. thaliana
  misc_feature: MA Experiment 20001248 PARAMETER Experiment Name: At_Far-red-induction_P Parameter: Plant Line Value: Columbia
  misc_feature: MA Experiment 20001248 PARAMETER Experiment Name: At_Far-red-induction_P Parameter: Timepoint (hr) Value: 4
  misc_feature: MA Experiment 20001248 PARAMETER Experiment Name: At_Far-red-induction_P Parameter: Tissue Value: Whole Plant

SEQ ID NO: 94990 - protein, 692 aa, Arabidopsis thaliana; identical to SEQ ID NO: 91234
  peptide (1)..(692): Ceres Seq. ID no. 12726908
  misc_feature (177)..(295): Pfam Name: ABC1 family Pfam Description: ABC1 family
  misc_feature (1)..(442): Homolog of NCBI NO: 25406121 NR Description: hypothetical protein F14O23.19 [imported] - thaliana >gi|7239508|gb|AAF43234.1|AC012654_18 EST gb|AI998820
  misc_feature (515)..(692): Homolog of NCBI NO: 25406121 NR Description: hypothetical protein F14O23.19 [imported] - thaliana >gi|7239508|gb|AAF43234.1|AC012654_18 EST gb|AI998820
  misc_feature (460)..(555): Homolog of NCBI NO: 25406121 NR Description: hypothetical protein F14O23.19 [imported] - thaliana >gi|7239508|gb|AAF43234.1|AC012654_18 EST gb|AI998820
  misc_feature (23)..(692): Homolog of NCBI NO: 38344898 NR Description: OSJNBb0079B02.1 [Oryza sativa (japonica
  misc_feature (265)..(692): Homolog of NCBI NO: 19698835 NR Description: unknown protein [Arabidopsis thaliana]
  misc_feature (78)..(583): Homolog of NCBI NO: 17232452 NR Description: hypothetical protein [Nostoc sp. PCC 7120]
  misc_feature (43)..(578): Homolog of NCBI NO: 23042448 NR Description: hypothetical protein [Trichodesmium erythraeum
  misc_feature (61)..(578): Homolog of NCBI NO: 22298493 NR Description: ORF_ID:tll0950~hypothetical protein
  misc_feature (23)..(577): Homolog of NCBI NO: 16331408 NR Description: ABC1-like [Synechocystis sp. PCC 6803]
  misc_feature (62)..(580): Homolog of NCBI NO: 33862270 NR Description: possible protein kinase:ABC1 family marinus subsp. pastoris str. CCMP1378] possible protein kinase:ABC1 family [Prochlorococcus marinus

SEQ ID NO: 94991 - protein, 685 aa, Arabidopsis thaliana; identical to SEQ ID NO: 91235
  peptide (1)..(685): Ceres Seq. ID no. 12726909
  misc_feature (170)..(288): Pfam Name: ABC1 family Pfam Description: ABC1 family
  misc_feature (1)..(435): Homolog of NCBI NO: 25406121 NR Description: hypothetical protein F14O23.19 [imported] - thaliana >gi|7239508|gb|AAF43234.1|AC012654_18 EST gb|AI998820
  misc_feature (508)..(685): Homolog of NCBI NO: 25406121 NR Description: hypothetical protein F14O23.19 [imported] - thaliana >gi|7239508|gb|AAF43234.1|AC012654_18 EST gb|AI998820
  misc_feature (453)..(548): Homolog of NCBI NO: 25406121 NR Description: hypothetical protein F14O23.19 [imported] - thaliana >gi|7239508|gb|AAF43234.1|AC012654_18 EST gb|AI998820
  misc_feature (16)..(685): Homolog of NCBI NO: 38344898 NR Description: OSJNBb0079B02.1 [Oryza sativa (japonica
  misc_feature (258)..(685): Homolog of NCBI NO: 19698835 NR Description: unknown protein [Arabidopsis thaliana]
  misc_feature (71)..(576): Homolog of NCBI NO: 17232452 NR Description: hypothetical protein [Nostoc sp. PCC 7120]
  misc_feature (36)..(571): Homolog of NCBI NO: 23042448 NR Description: hypothetical protein [Trichodesmium erythraeum
  misc_feature (54)..(571): Homolog of NCBI NO: 22298493 NR Description: ORF_ID:tll0950~hypothetical protein
  misc_feature (16)..(570): Homolog of NCBI NO: 16331408 NR Description: ABC1-like [Synechocystis sp. PCC 6803]
  misc_feature (55)..(573): Homolog of NCBI NO: 33862270 NR Description: possible protein kinase:ABC1 family marinus subsp. pastoris str. CCMP1378] possible protein kinase:ABC1 family [Prochlorococcus marinus

SEQ ID NO: 94992 - protein, 616 aa, Arabidopsis thaliana; identical to SEQ ID NO: 91236
  peptide (1)..(616): Ceres Seq. ID no. 12726910
  misc_feature (101)..(219): Pfam Name: ABC1 family Pfam Description: ABC1 family
  misc_feature (1)..(366): Homolog of NCBI NO: 25406121 NR Description: hypothetical protein F14O23.19 [imported] - thaliana >gi|7239508|gb|AAF43234.1|AC012654_18 EST gb|AI998820
  misc_feature (439)..(616): Homolog of NCBI NO: 25406121 NR Description: hypothetical protein F14O23.19 [imported] - thaliana >gi|7239508|gb|AAF43234.1|AC012654_18 EST gb|AI998820
  misc_feature (384)..(479): Homolog of NCBI NO: 25406121 NR Description: hypothetical protein F14O23.19 [imported] - thaliana >gi|7239508|gb|AAF43234.1|AC012654_18 EST gb|AI998820
  misc_feature (1)..(616): Homolog of NCBI NO: 38344898 NR Description: OSJNBb0079B02.1 [Oryza sativa (japonica
  misc_feature (189)..(616): Homolog of NCBI NO: 19698835 NR Description: unknown protein [Arabidopsis thaliana]
  misc_feature (2)..(507): Homolog of NCBI NO: 17232452 NR Description: hypothetical protein [Nostoc sp. PCC 7120]
  misc_feature (1)..(502): Homolog of NCBI NO: 23042448 NR Description: hypothetical protein [Trichodesmium erythraeum
  misc_feature (1)..(502): Homolog of NCBI NO: 22298493 NR Description: ORF_ID:tll0950~hypothetical protein
  misc_feature (1)..(501): Homolog of NCBI NO: 16331408 NR Description: ABC1-like [Synechocystis sp. PCC 6803]
  misc_feature (1)..(504): Homolog of NCBI NO: 33862270 NR Description: possible protein kinase:ABC1 family marinus subsp. pastoris str. CCMP1378] possible protein kinase:ABC1 family [Prochlorococcus marinus

SEQ ID NO: 94993 - DNA, 2459 bp, Arabidopsis thaliana; identical to SEQ ID NO: 91237
  misc_feature (1)..(2459): Ceres Seq. ID no. 12726915
  misc_feature: MA Experiment ID: 20000185 Result: Up-regulated in Transcription
  misc_feature: MA Experiment 20000185 PARAMETER Experiment Name: At_Roots__P Parameter: Age (day) Value: 7 vs. 21
  misc_feature: MA Experiment 20000185 PARAMETER Experiment Name: At_Roots__P Parameter: Organism Value: A. thaliana
  misc_feature: MA Experiment 20000185 PARAMETER Experiment Name: At_Roots__P Parameter: Tissue Value: Roots vs. Whole Plant
  misc_feature: MA Experiment ID: 20000234 Result: Up-regulated in Transcription
  misc_feature: MA Experiment 20000234 PARAMETER Experiment Name: At_Siliques_P Parameter: Age (day) Value: 21
  misc_feature: MA Experiment 20000234 PARAMETER Experiment Name: At_Siliques_P Parameter: Organism Value: A. thaliana
  misc_feature: MA Experiment 20000234 PARAMETER Experiment Name: At_Siliques_P Parameter: Plant Line Value: WS
  misc_feature: MA Experiment 20000234 PARAMETER Experiment Name: At_Siliques_P Parameter: Tissue Value: Less Than 5mm Siliques vs. Whole Plant
  misc_feature: MA Experiment ID: 20000235 Result: Up-regulated in Transcription
  misc_feature: MA Experiment 20000235 PARAMETER Experiment Name: At_Siliques_P Parameter: Age (day) Value: 21
  misc_feature: MA Experiment 20000235 PARAMETER Experiment Name: At_Siliques_P Parameter: Organism Value: A. thaliana
  misc_feature: MA Experiment 20000235 PARAMETER Experiment Name: At_Siliques_P Parameter: Plant Line Value: WS
  misc_feature: MA Experiment 20000235 PARAMETER Experiment Name: At_Siliques_P Parameter: Tissue Value: 5-10mm Siliques vs. Whole Plant
  misc_feature: MA Experiment ID: 20000264 Result: Up-regulated in Transcription
  misc_feature: MA Experiment 20000264 PARAMETER Experiment Name: At_Open_Flower_P Parameter: Age (day) Value: 21
  misc_feature: MA Experiment 20000264 PARAMETER Experiment Name: At_Open_Flower_P Parameter: Plant Line Value: WS
  misc_feature: MA Experiment 20000264 PARAMETER Experiment Name: At_Open_Flower_P Parameter: Tissue Value: Open Flower vs. Whole Plant
  misc_feature: MA Experiment ID: 20000265 Result: Up-regulated in Transcription
  misc_feature: MA Experiment 20000265 PARAMETER Experiment Name: At_Open_Flower_P Parameter: Age (day) Value: 21
  misc_feature: MA Experiment 20000265 PARAMETER Experiment Name: At_Open_Flower_P Parameter: Plant Line Value: WS
  misc_feature: MA Experiment 20000265 PARAMETER Experiment Name: At_Open_Flower_P Parameter: Tissue Value: Closed Flower vs. Whole Plant
  misc_feature: MA Experiment ID: 20000286 Result: Up-regulated in Transcription
  misc_feature: MA Experiment 20000286 PARAMETER Experiment Name: At_Open_Flower_P Parameter: Age (day) Value: 21
  misc_feature: MA Experiment 20000286 PARAMETER Experiment Name: At_Open_Flower_P Parameter: Plant Line Value: WS
  misc_feature: MA Experiment 20000286 PARAMETER Experiment Name: At_Open_Flower_P Parameter: Tissue Value: Half Open vs. Whole Plant
  misc_feature: MA Experiment ID: 20000437 Result: Down-regulated in Transcription
  misc_feature: MA Experiment 20000437 PARAMETER Experiment Name: At_Drought_P Parameter: Age (day) Value: 8
  misc_feature: MA Experiment 20000437 PARAMETER Experiment Name: At_Drought_P Parameter: Organism Value: A. thaliana
  misc_feature: MA Experiment 20000437 PARAMETER Experiment Name: At_Drought_P Parameter: Plant Line Value: WS
  misc_feature: MA Experiment 20000437 PARAMETER Experiment Name: At_Drought_P Parameter: Timepoint (hr) Value: 24
  misc_feature: MA Experiment 20000437 PARAMETER Experiment Name: At_Drought_P Parameter: Tissue Value: Whole Plant
  misc_feature: MA Experiment 20000437 PARAMETER Experiment Name: At_Drought_P Parameter: Treatment Value: Drought vs. No Drought
  misc_feature: MA Experiment ID: 20000495 Result: Up-regulated in Transcription
  misc_feature: MA Experiment 20000495 PARAMETER Experiment Name: At_Guard_Cells_P Parameter: Harvest Date Value: 8/2/2002
  misc_feature: MA Experiment 20000495 PARAMETER Experiment Name: At_Guard_Cells_P Parameter: Organism Value: A. thaliana
  misc_feature: MA Experiment 20000495 PARAMETER Experiment Name: At_Guard_Cells_P Parameter: Tissue Value: Guard Cells vs. Leaves
  misc_feature: MA Experiment ID: 20000496 Result: Up-regulated in Transcription
  misc_feature: MA Experiment 20000496 PARAMETER Experiment Name: At_Guard_Cells_P Parameter: Harvest Date Value: 7/19/2002
  misc_feature: MA Experiment 20000496 PARAMETER Experiment Name: At_Guard_Cells_P Parameter: Organism Value: Canola
  misc_feature: MA Experiment 20000496 PARAMETER Experiment Name: At_Guard_Cells_P Parameter: Tissue Value: Guard Cells vs. Leaves
  misc_feature: MA Experiment ID: 20000794 Result: Up-regulated in Transcription
  misc_feature: MA Experiment 20000794 PARAMETER Experiment Name: At_Petals_P Parameter: Age (day) Value: 23-25 days
  misc_feature: MA Experiment 20000794 PARAMETER Experiment Name: At_Petals_P Parameter: Plant Line Value: WS
  misc_feature: MA Experiment 20000794 PARAMETER Experiment Name: At_Petals_P Parameter: Tissue Value: Petals vs. Whole plant
  misc_feature: MA Experiment ID: 20001451 Result: Up-regulated in Transcription
  misc_feature: MA Experiment 20001451 PARAMETER Experiment Name: At_Far-red-induction_P Parameter: Age (day) Value: 7
  misc_feature: MA Experiment 20001451 PARAMETER Experiment Name: At_Far-red-induction_P Parameter: Light Value: Far-red vs. White
  misc_feature: MA Experiment 20001451 PARAMETER Experiment Name: At_Far-red-induction_P Parameter: Organism Value: A. thaliana
  misc_feature: MA Experiment 20001451 PARAMETER Experiment Name: At_Far-red-induction_P Parameter: Plant Line Value: Columbia
  misc_feature: MA Experiment 20001451 PARAMETER Experiment Name: At_Far-red-induction_P Parameter: Timepoint (hr) Value: 24
  misc_feature: MA Experiment 20001451 PARAMETER Experiment Name: At_Far-red-induction_P Parameter: Tissue Value: Whole Plant
  misc_feature: MA Experiment ID: 20001757 Result: Down-regulated in Transcription
  misc_feature: MA Experiment 20001757 PARAMETER Experiment Name: At_50mM_NH4NO3_L-to-H_P Parameter: Timepoint (hr) Value: 6
  misc_feature: MA Experiment 20001757 PARAMETER Experiment Name: At_50mM_NH4NO3_L-to-H_P Parameter: Tissue Value: Leaf
  misc_feature: MA Experiment 20001757 PARAMETER Experiment Name: At_50mM_NH4NO3_L-to-H_P Parameter: Treatment Value: 50mM NH4NO3 vs 100mM Mannitol
  misc_feature: MA Experiment ID: 20001911 Result: Down-regulated in Transcription
  misc_feature: MA Experiment 20001911 PARAMETER Experiment Name: At_Drought_Reproduction_P Parameter: Age (day) Value: 40
  misc_feature: MA Experiment 20001911 PARAMETER Experiment Name: At_Drought_Reproduction_P Parameter: Organism Value: A. thaliana
  misc_feature: MA Experiment 20001911 PARAMETER Experiment Name: At_Drought_Reproduction_P Parameter: Plant Line Value: WS
  misc_feature: MA Experiment 20001911 PARAMETER Experiment Name: At_Drought_Reproduction_P Parameter: Timepoint (day) Value: 10
  misc_feature: MA Experiment 20001911 PARAMETER Experiment Name: At_Drought_Reproduction_P Parameter: Tissue Value: Flowers
  misc_feature: MA Experiment 20001911 PARAMETER Experiment Name: At_Drought_Reproduction_P Parameter: Treatment Value: Drought vs. No Drought

SEQ ID NO: 94994 - protein, 625 aa, Arabidopsis thaliana; identical to SEQ ID NO: 91238
  peptide (1)..(625): Ceres Seq. ID no. 12726916
  misc_feature (10)..(625): Homolog of NCBI NO: 15218543 NR Description: somatic embryogenesis receptor-like kinase, protein id: At1g34210.1, supported by cDNA: gi_14573456
  misc_feature (10)..(625): Homolog of NCBI NO: 14573457 NR Description: somatic embryogenesis receptor-like kinase 2
  misc_feature (6)..(625): Homolog of NCBI NO: 24935324 NR Description: somatic embryogenesis receptor kinase 1 [Medicago >gi|24935326|gb|AAN64294.1| somatic embryogenesis receptor kinase
  misc_feature (5)..(625): Homolog of NCBI NO: 13897310 NR Description: SERK2 protein [Zea mays]
  misc_feature (5)..(625): Homolog of NCBI NO: 13897320 NR Description: somatic embryogenesis receptor-like kinase 2 [Zea
  misc_feature (26)..(625): Homolog of NCBI NO: 13897308 NR Description: SERK1 protein [Zea mays]
  misc_feature (98)..(625): Homolog of NCBI NO: 25406123 NR Description: hypothetical protein F14O23.21 [imported] - thaliana >gi|7239510|gb|AAF43236.1|AC012654_20 Contains
  misc_feature (1)..(625): Homolog of NCBI NO: 14573459 NR Description: somatic embryogenesis receptor-like kinase 3
  misc_feature (1)..(625): Homolog of NCBI NO: 15237242 NR Description: receptor protein kinase-like protein; protein id:
  misc_feature (7)..(585): Homolog of NCBI NO: 22329033 NR Description: receptor-like kinase homolog; protein id: supported by cDNA: gi_17979064, supported by cDNA: gi_20465456 thaliana] >gi|17979065|gb|AAL49800.1| putative receptor kinase

SEQ ID NO: 94995 - protein, 467 aa, Arabidopsis thaliana; identical to SEQ ID NO: 91239
  peptide (1)..(467): Ceres Seq. ID no. 12726917
  misc_feature (1)..(467): Homolog of NCBI NO: 15218543 NR Description: somatic embryogenesis receptor-like kinase, protein id: At1g34210.1, supported by cDNA: gi_14573456
  misc_feature (1)..(467): Homolog of NCBI NO: 14573457 NR Description: somatic embryogenesis receptor-like kinase 2
  misc_feature (1)..(467): Homolog of NCBI NO: 24935324 NR Description: somatic embryogenesis receptor kinase 1 [Medicago >gi|24935326|gb|AAN64294.1| somatic embryogenesis receptor kinase
  misc_feature (1)..(467): Homolog of NCBI NO: 13897310 NR Description: SERK2 protein [Zea mays]
  misc_feature (1)..(467): Homolog of NCBI NO: 13897320 NR Description: somatic embryogenesis receptor-like kinase 2 [Zea
  misc_feature (1)..(467): Homolog of NCBI NO: 13897308 NR Description: SERK1 protein [Zea mays]
  misc_feature (1)..(467): Homolog of NCBI NO: 25406123 NR Description: hypothetical protein F14O23.21 [imported] - thaliana >gi|7239510|gb|AAF43236.1|AC012654_20 Contains
  misc_feature (1)..(467): Homolog of NCBI NO: 14573459 NR Description: somatic embryogenesis receptor-like kinase 3
  misc_feature (1)..(467): Homolog of NCBI NO: 15237242 NR Description: receptor protein kinase-like protein; protein id:
  misc_feature (1)..(427): Homolog of NCBI NO: 22329033 NR Description: receptor-like kinase homolog; protein id: supported by cDNA: gi_17979064, supported by cDNA: gi_20465456 thaliana] >gi|17979065|gb|AAL49800.1| putative receptor kinase

SEQ ID NO: 94996 - DNA, 1413 bp, Arabidopsis thaliana; identical to SEQ ID NO: 91240
  misc_feature (1)..(1413): Ceres Seq. ID no. 12726922
  misc_feature: MA Experiment ID: 20000180 Result: Down-regulated in Transcription
  misc_feature: MA Experiment 20000180 PARAMETER Experiment Name: At_Germinating_Seeds_P Parameter: Age (hr) Value: 24 vs. 0
  misc_feature: MA Experiment 20000180 PARAMETER Experiment Name: At_Germinating_Seeds_P Parameter: Tissue Value: Germinating Seeds
  misc_feature: MA Experiment ID: 20000227 Result: Up-regulated in Transcription
  misc_feature: MA Experiment 20000227 PARAMETER Experiment Name: At_Root-Tips-vs-Tops_P Parameter: Tissue Value: Root Tips vs. Root Tops
  misc_feature: MA Experiment ID: 20000437 Result: Down-regulated in Transcription
  misc_feature: MA Experiment 20000437 PARAMETER Experiment Name: At_Drought_P Parameter: Age (day) Value: 8
  misc_feature: MA Experiment 20000437 PARAMETER Experiment Name: At_Drought_P Parameter: Organism Value: A. thaliana
  misc_feature: MA Experiment 20000437 PARAMETER Experiment Name: At_Drought_P Parameter: Plant Line Value: WS
  misc_feature: MA Experiment 20000437 PARAMETER Experiment Name: At_Drought_P Parameter: Timepoint (hr) Value: 24
  misc_feature: MA Experiment 20000437 PARAMETER Experiment Name: At_Drought_P Parameter: Tissue Value: Whole Plant
  misc_feature: MA Experiment 20000437 PARAMETER Experiment Name: At_Drought_P Parameter: Treatment Value: Drought vs. No Drought
  misc_feature: MA Experiment ID: 20001247 Result: Down-regulated in Transcription
  misc_feature: MA Experiment 20001247 PARAMETER Experiment Name: At_Far-red-induction_P Parameter: Age (day) Value: 7
  misc_feature: MA Experiment 20001247 PARAMETER Experiment Name: At_Far-red-induction_P Parameter: Light Value: Far-red vs. White
  misc_feature: MA Experiment 20001247 PARAMETER Experiment Name: At_Far-red-induction_P Parameter: Organism Value: A. thaliana
  misc_feature: MA Experiment 20001247 PARAMETER Experiment Name: At_Far-red-induction_P Parameter: Plant Line Value: Columbia
  misc_feature: MA Experiment 20001247 PARAMETER Experiment Name: At_Far-red-induction_P Parameter: Timepoint (hr) Value: 1
  misc_feature: MA Experiment 20001247 PARAMETER Experiment Name: At_Far-red-induction_P Parameter: Tissue Value: Whole Plant
  misc_feature: MA Experiment ID: 20001451 Result: Down-regulated in Transcription
  misc_feature: MA Experiment 20001451 PARAMETER Experiment Name: At_Far-red-induction_P Parameter: Age (day) Value: 7
  misc_feature: MA Experiment 20001451 PARAMETER Experiment Name: At_Far-red-induction_P Parameter: Light Value: Far-red vs. White
  misc_feature: MA Experiment 20001451 PARAMETER Experiment Name: At_Far-red-induction_P Parameter: Organism Value: A. thaliana
  misc_feature: MA Experiment 20001451 PARAMETER Experiment Name: At_Far-red-induction_P Parameter: Plant Line Value: Columbia
  misc_feature: MA Experiment 20001451 PARAMETER Experiment Name: At_Far-red-induction_P Parameter: Timepoint (hr) Value: 24
  misc_feature: MA Experiment 20001451 PARAMETER Experiment Name: At_Far-red-induction_P Parameter: Tissue Value: Whole Plant
  misc_feature: MA Experiment ID: 20001557 Result: Up-regulated in Transcription
  misc_feature: MA Experiment 20001557 PARAMETER Experiment Name: At_Drought_Soil_Dry_P Parameter: Age (day) Value: 27
  misc_feature: MA Experiment 20001557 PARAMETER Experiment Name: At_Drought_Soil_Dry_P Parameter: Organism Value: A. thaliana
  misc_feature: MA Experiment 20001557 PARAMETER Experiment Name: At_Drought_Soil_Dry_P Parameter: Plant Line Value: WS
  misc_feature: MA Experiment 20001557 PARAMETER Experiment Name: At_Drought_Soil_Dry_P Parameter: Post Timepoint (hr) Value: 3
  misc_feature: MA Experiment 20001557 PARAMETER Experiment Name: At_Drought_Soil_Dry_P Parameter: Post-Treatment Value: Re-Water vs. No Drought
  misc_feature: MA Experiment 20001557 PARAMETER Experiment Name: At_Drought_Soil_Dry_P Parameter: Timepoint (day) Value: 13
  misc_feature: MA Experiment 20001557 PARAMETER Experiment Name: At_Drought_Soil_Dry_P Parameter: Treatment Value: Drought vs. No Drought
  misc_feature: MA Experiment ID: 20001558 Result: Up-regulated in Transcription
  misc_feature: MA Experiment 20001558 PARAMETER Experiment Name: At_Drought_Soil_Dry_P Parameter: Age (day) Value: 27
  misc_feature: MA Experiment 20001558 PARAMETER Experiment Name: At_Drought_Soil_Dry_P Parameter: Organism Value: A. thaliana
  misc_feature: MA Experiment 20001558 PARAMETER Experiment Name: At_Drought_Soil_Dry_P Parameter: Plant Line Value: WS
  misc_feature: MA Experiment 20001558 PARAMETER Experiment Name: At_Drought_Soil_Dry_P Parameter: Post Timepoint (hr) Value: 6
  misc_feature: MA Experiment 20001558 PARAMETER Experiment Name: At_Drought_Soil_Dry_P Parameter: Post-Treatment Value: Re-Water vs. No Drought
  misc_feature: MA Experiment 20001558 PARAMETER Experiment Name: At_Drought_Soil_Dry_P Parameter: Timepoint (day) Value: 13
  misc_feature: MA Experiment 20001558 PARAMETER Experiment Name: At_Drought_Soil_Dry_P Parameter: Treatment Value: Drought vs. No Drought
  misc_feature: MA Experiment ID: 20001757 Result: Up-regulated in Transcription
  misc_feature: MA Experiment 20001757 PARAMETER Experiment Name: At_50mM_NH4NO3_L-to-H_P Parameter: Timepoint (hr) Value: 6
  misc_feature: MA Experiment 20001757 PARAMETER Experiment Name: At_50mM_NH4NO3_L-to-H_P Parameter: Tissue Value: Leaf
  misc_feature: MA Experiment 20001757 PARAMETER Experiment Name: At_50mM_NH4NO3_L-to-H_P Parameter: Treatment Value: 50mM NH4NO3 vs 100mM Mannitol

SEQ ID NO: 94997 - protein, 470 aa, Arabidopsis thaliana; identical to SEQ ID NO: 91241
  peptide (1)..(470): Ceres Seq. ID no. 12726923
  misc_feature (31)..(368): Pfam Name: Plant specific of unknown function (DUF860) Pfam Description: Plant specific of unknown function (DUF860)
  misc_feature (1)..(470): Homolog of NCBI NO: 15217597 NR Description: hypothetical protein; protein id: At1g71850.1
  misc_feature (1)..(470): Homolog of NCBI NO: 3413424 NR Description: hypothetical protein [Arabidopsis thaliana]
  misc_feature (30)..(385): Homolog of NCBI NO: 15233788 NR Description: putative protein; protein id: At4g24320.1
  misc_feature (2)..(409): Homolog of NCBI NO: 18410975 NR Description: putative protein; protein id: At3g58520.1, by cDNA: 112338., supported by cDNA: gi_15810015 [Arabidopsis >gi|15810016|gb|AAL06935.1| AT3g58520/F14P22_110 [Arabidopsis
  misc_feature (30)..(409): Homolog of NCBI NO: 11282335 NR Description: hypothetical protein F14P22.110 - Arabidopsis >gi|6735369|emb|CAB68190.1| putative protein [Arabidopsis
  misc_feature (30)..(409): Homolog of NCBI NO: 21536812 NR Description: unknown [Arabidopsis thaliana]
  misc_feature (30)..(401): Homolog of NCBI NO: 15238875 NR Description: putative protein; protein id: At5g48040.1 thaliana] >gi|10177755|dbj|BAB11068.1|
  misc_feature (8)..(389): Homolog of NCBI NO: 15225035 NR Description: hypothetical protein; protein id: At2g39120.1
  misc_feature (33)..(426): Homolog of NCBI NO: 34894384 NR Description: unnamed protein product [Oryza sativa (japonica group)] >gi|8468041|dbj|BAA96641.1| unnamed protein product
  misc_feature (33)..(415): Homolog of NCBI NO: 15224649 NR Description: hypothetical protein; protein id: At2g31290.1, by cDNA: gi_18377711, supported by cDNA: gi_20465406 [Arabidopsis >gi|25352258|pir||H84718 hypothetical protein At2g31290

SEQ ID NO: 94998 - protein, 328 aa, Arabidopsis thaliana; identical to SEQ ID NO: 91242
  peptide (1)..(328): Ceres Seq. ID no. 12726924
  misc_feature (1)..(226): Pfam Name: Plant specific of unknown function (DUF860) Pfam Description: Plant specific of unknown function (DUF860)
  misc_feature (1)..(328): Homolog of NCBI NO: 15217597 NR Description: hypothetical protein; protein id: At1g71850.1
  misc_feature (1)..(328): Homolog of NCBI NO: 3413424 NR Description: hypothetical protein [Arabidopsis thaliana]
  misc_feature (1)..(243): Homolog of NCBI NO: 15233788 NR Description: putative protein; protein id: At4g24320.1
  misc_feature (1)..(267): Homolog of NCBI NO: 18410975 NR Description: putative protein; protein id: At3g58520.1, by cDNA: 112338., supported by cDNA: gi_15810015 [Arabidopsis >gi|15810016|gb|AAL06935.1| AT3g58520/F14P22_110 [Arabidopsis
  misc_feature (1)..(267): Homolog of NCBI NO: 11282335 NR Description: hypothetical protein F14P22.110 - Arabidopsis >gi|6735369|emb|CAB68190.1| putative protein [Arabidopsis
  misc_feature (1)..(267): Homolog of NCBI NO: 21536812 NR Description: unknown [Arabidopsis thaliana]
  misc_feature (1)..(259): Homolog of NCBI NO: 15238875 NR Description: putative protein; protein id: At5g48040.1 thaliana] >gi|10177755|dbj|BAB11068.1|
  misc_feature (1)..(247): Homolog of NCBI NO: 15225035 NR Description: hypothetical protein; protein id: At2g39120.1
  misc_feature (1)..(284): Homolog of NCBI NO: 34894384 NR Description: unnamed protein product [Oryza sativa (japonica group)] >gi|8468041|dbj|BAA96641.1| unnamed protein product
  misc_feature (1)..(273): Homolog of NCBI NO: 15224649 NR Description: hypothetical protein; protein id: At2g31290.1, by cDNA: gi_18377711, supported by cDNA: gi_20465406 [Arabidopsis >gi|25352258|pir||H84718 hypothetical protein At2g31290

SEQ ID NO: 94999 - protein, 299 aa, Arabidopsis thaliana; identical to SEQ ID NO: 91243
  peptide (1)..(299): Ceres Seq. ID no. 12726925
  misc_feature (1)..(197): Pfam Name: Plant specific of unknown function (DUF860) Pfam Description: Plant specific of unknown function (DUF860)
  misc_feature (1)..(299): Homolog of NCBI NO: 15217597 NR Description: hypothetical protein; protein id: At1g71850.1
  misc_feature (1)..(299): Homolog of NCBI NO: 3413424 NR Description: hypothetical protein [Arabidopsis thaliana]
  misc_feature (1)..(214): Homolog of NCBI NO: 15233788 NR Description: putative protein; protein id: At4g24320.1
  misc_feature (1)..(238): Homolog of NCBI NO: 18410975 NR Description: putative protein; protein id: At3g58520.1, by cDNA: 112338., supported by cDNA: gi_15810015 [Arabidopsis >gi|15810016|gb|AAL06935.1| AT3g58520/F14P22_110 [Arabidopsis
  misc_feature (1)..(238): Homolog of NCBI NO: 11282335 NR Description: hypothetical protein F14P22.110 - Arabidopsis >gi|6735369|emb|CAB68190.1| putative protein [Arabidopsis
  misc_feature (1)..(238): Homolog of NCBI NO: 21536812 NR Description: unknown [Arabidopsis thaliana]
  misc_feature (1)..(230): Homolog of NCBI NO: 15238875 NR Description: putative protein; protein id: At5g48040.1 thaliana] >gi|10177755|dbj|BAB11068.1|
  misc_feature (1)..(218): Homolog of NCBI NO: 15225035 NR Description: hypothetical protein; protein id: At2g39120.1
  misc_feature (1)..(255): Homolog of NCBI NO: 34894384 NR Description: unnamed protein product [Oryza sativa (japonica group)] >gi|8468041|dbj|BAA96641.1| unnamed protein product
  misc_feature (1)..(244): Homolog of NCBI NO: 15224649 NR Description: hypothetical protein; protein id: At2g31290.1, by cDNA: gi_18377711, supported by cDNA: gi_20465406 [Arabidopsis >gi|25352258|pir||H84718 hypothetical protein At2g31290

SEQ ID NO: 95000 - DNA, 1489 bp, Arabidopsis thaliana; identical to SEQ ID NO: 91244
  misc_feature (1)..(1489): Ceres Seq. ID no. 12726940
  misc_feature: MA Experiment ID: 20000171 Result: Down-regulated in Transcription
  misc_feature: MA Experiment 20000171 PARAMETER Experiment Name: At_42deg_Heat_P Parameter: Age (day) Value: 14
  misc_feature: MA Experiment 20000171 PARAMETER Experiment Name: At_42deg_Heat_P Parameter: Organism Value: A. thaliana
  misc_feature: MA Experiment 20000171 PARAMETER Experiment Name: At_42deg_Heat_P Parameter: Plant Line Value: WS
  misc_feature: MA Experiment 20000171 PARAMETER Experiment Name: At_42deg_Heat_P Parameter: Temperature (deg C) Value: 42 vs. 22
  misc_feature: MA Experiment 20000171 PARAMETER Experiment Name: At_42deg_Heat_P Parameter: Timepoint (hr) Value: 1
  misc_feature: MA Experiment 20000171 PARAMETER Experiment Name: At_42deg_Heat_P Parameter: Tissue Value: Aerial
  misc_feature: MA Experiment ID: 20000185 Result: Down-regulated in Transcription
  misc_feature: MA Experiment 20000185 PARAMETER Experiment Name: At_Roots__P Parameter: Age (day) Value: 7 vs. 21
  misc_feature: MA Experiment 20000185 PARAMETER Experiment Name: At_Roots__P Parameter: Organism Value: A. thaliana
  misc_feature: MA Experiment 20000185 PARAMETER Experiment Name: At_Roots__P Parameter: Tissue Value: Roots vs. Whole Plant
  misc_feature: MA Experiment ID: 20000227 Result: Down-regulated in Transcription
  misc_feature: MA Experiment 20000227 PARAMETER Experiment Name: At_Root-Tips-vs-Tops_P Parameter: Tissue Value: Root Tips vs. Root Tops
  misc_feature: MA Experiment ID: 20000234 Result: Down-regulated in Transcription
  misc_feature: MA Experiment 20000234 PARAMETER Experiment Name: At_Siliques_P Parameter: Age (day) Value: 21
  misc_feature: MA Experiment 20000234 PARAMETER Experiment Name: At_Siliques_P Parameter: Organism Value: A. thaliana
  misc_feature: MA Experiment 20000234 PARAMETER Experiment Name: At_Siliques_P Parameter: Plant Line Value: WS
  misc_feature: MA Experiment 20000234 PARAMETER Experiment Name: At_Siliques_P Parameter: Tissue Value: Less Than 5mm Siliques vs. Whole Plant
  misc_feature: MA Experiment ID: 20000264 Result: Down-regulated in Transcription
  misc_feature: MA Experiment 20000264 PARAMETER Experiment Name: At_Open_Flower_P Parameter: Age (day) Value: 21
  misc_feature: MA Experiment 20000264 PARAMETER Experiment Name: At_Open_Flower_P Parameter: Plant Line Value: WS
  misc_feature: MA Experiment 20000264 PARAMETER Experiment Name: At_Open_Flower_P Parameter: Tissue Value: Open Flower vs. Whole Plant
  misc_feature: MA Experiment ID: 20000265 Result: Down-regulated in Transcription
  misc_feature: MA Experiment 20000265 PARAMETER Experiment Name: At_Open_Flower_P Parameter: Age (day) Value: 21
  misc_feature: MA Experiment 20000265 PARAMETER Experiment Name: At_Open_Flower_P Parameter: Plant Line Value: WS
  misc_feature: MA Experiment 20000265 PARAMETER Experiment Name: At_Open_Flower_P Parameter: Tissue Value: Closed Flower vs. Whole Plant
  misc_feature: MA Experiment ID: 20000286 Result: Down-regulated in Transcription
  misc_feature: MA Experiment 20000286 PARAMETER Experiment Name: At_Open_Flower_P Parameter: Age (day) Value: 21
  misc_feature: MA Experiment 20000286 PARAMETER Experiment Name: At_Open_Flower_P Parameter: Plant Line Value: WS
  misc_feature: MA Experiment 20000286 PARAMETER Experiment Name: At_Open_Flower_P Parameter: Tissue Value: Half Open vs. Whole Plant
  misc_feature: MA Experiment ID: 20001905 Result: Down-regulated in Transcription
  misc_feature: MA Experiment 20001905 PARAMETER Experiment Name: At_Drought_Reproduction_P Parameter: Age (day) Value: 40
  misc_feature: MA Experiment 20001905 PARAMETER Experiment Name: At_Drought_Reproduction_P Parameter: Organism Value: A. thaliana
  misc_feature: MA Experiment 20001905 PARAMETER Experiment Name: At_Drought_Reproduction_P Parameter: Plant Line Value: WS
  misc_feature: MA Experiment 20001905 PARAMETER Experiment Name: At_Drought_Reproduction_P Parameter: Timepoint (day) Value: 10
  misc_feature: MA Experiment 20001905 PARAMETER Experiment Name: At_Drought_Reproduction_P Parameter: Tissue Value: Rosettes
  misc_feature: MA Experiment 20001905 PARAMETER Experiment Name: At_Drought_Reproduction_P Parameter: Treatment Value: Drought vs. No Drought

SEQ ID NO: 95001 - protein, 375 aa, Arabidopsis thaliana; identical to SEQ ID NO: 91245
  peptide (1)..(375): Ceres Seq. ID no. 12726941
  misc_feature (44)..(253): Pfam Name: TCP family transcription factor Pfam Description: TCP family transcription factor
  misc_feature (1)..(375): Homolog of NCBI NO: 15218305 NR Description: unknown protein; protein id: At1g72010.1, by cDNA: gi_19423971 [Arabidopsis thaliana]
  misc_feature (1)..(347): Homolog of NCBI NO: 15217857 NR Description: auxin-induced basic helix-loop-helix factor, putative; protein id: At1g58100.1, supported by cDNA:
  misc_feature (10)..(371): Homolog of NCBI NO: 20975251 NR Description: transcription factor PCF3 [Oryza sativa (japonica
  misc_feature (15)..(264): Homolog of NCBI NO: 15219640 NR Description: DNA binding protein, putative; protein id: supported by cDNA: gi_15912302, supported by cDNA: gi_19548006
  misc_feature (29)..(372): Homolog of NCBI NO: 11357581 NR Description: hypothetical protein F1P2.170 - Arabidopsis >gi|6522545|emb|CAB61988.1| putative protein [Arabidopsis
  misc_feature (29)..(372): Homolog of NCBI NO: 22331641 NR Description: putative protein; protein id: At3g47620.1, by cDNA: gi_16604510 [Arabidopsis thaliana] AT3g47620/F1P2_170 [Arabidopsis thaliana]
  misc_feature (146)..(364): Homolog of NCBI NO: 15219640 NR Description: DNA binding protein, putative; protein id: supported by cDNA: gi_15912302, supported by cDNA: gi_19548006
  misc_feature (39)..(197): Homolog of NCBI NO: 18409345 NR Description: expressed protein; protein id: At1g69690.1, by cDNA: gi_15912212, supported by cDNA: gi_19547990 [Arabidopsis
  misc_feature (21)..(237): Homolog of NCBI NO: 5731257 NR Description: auxin-induced basic helix-loop-helix
  misc_feature (28)..(175): Homolog of NCBI NO: 15237274 NR Description: unknown protein; protein id: At5g23280.1 thaliana] >gi|10177817|dbj|BAB11183.1| gene_id:MKD15.14~unknown

SEQ ID NO: 95002 - protein, 297 aa, Arabidopsis thaliana; identical to SEQ ID NO: 91246
  peptide (1)..(297): Ceres Seq. ID no. 12726942
  misc_feature (1)..(175): Pfam Name: TCP family transcription factor Pfam Description: TCP family transcription factor
  misc_feature (1)..(297): Homolog of NCBI NO: 15218305 NR Description: unknown protein; protein id: At1g72010.1, by cDNA: gi_19423971 [Arabidopsis thaliana]
  misc_feature (1)..(269): Homolog of NCBI NO: 15217857 NR Description: auxin-induced basic helix-loop-helix factor, putative; protein id: At1g58100.1, supported by cDNA:
  misc_feature (1)..(293): Homolog of NCBI NO: 20975251 NR Description: transcription factor PCF3 [Oryza sativa (japonica
  misc_feature (1)..(186): Homolog of NCBI NO: 15219640 NR Description: DNA binding protein, putative; protein id: supported by cDNA: gi_15912302, supported by cDNA: gi_19548006
  misc_feature (1)..(294): Homolog of NCBI NO: 11357581 NR Description: hypothetical protein F1P2.170 - Arabidopsis >gi|6522545|emb|CAB61988.1| putative protein [Arabidopsis
  misc_feature (1)..(294): Homolog of NCBI NO: 22331641 NR Description: putative protein; protein id: At3g47620.1, by cDNA: gi_16604510 [Arabidopsis thaliana] AT3g47620/F1P2_170 [Arabidopsis thaliana]
  misc_feature (68)..(286): Homolog of NCBI NO: 15219640 NR Description: DNA binding protein, putative; protein id: supported by cDNA: gi_15912302, supported by cDNA: gi_19548006
  misc_feature (1)..(119): Homolog of NCBI NO: 18409345 NR Description: expressed protein; protein id: At1g69690.1, by cDNA: gi_15912212, supported by cDNA: gi_19547990 [Arabidopsis
  misc_feature (1)..(159): Homolog of NCBI NO: 5731257 NR Description: auxin-induced basic helix-loop-helix
  misc_feature (1)..(97): Homolog of NCBI NO: 15237274 NR Description: unknown protein; protein id: At5g23280.1 thaliana] >gi|10177817|dbj|BAB11183.1| gene_id:MKD15.14~unknown

SEQ ID NO: 95003 - protein, 294 aa, Arabidopsis thaliana; identical to SEQ ID NO: 91247
  peptide (1)..(294): Ceres Seq. ID no. 12726943
  misc_feature (1)..(172): Pfam Name: TCP family transcription factor Pfam Description: TCP family transcription factor
  misc_feature (1)..(294): Homolog of NCBI NO: 15218305 NR Description: unknown protein; protein id: At1g72010.1, by cDNA: gi_19423971 [Arabidopsis thaliana]
  misc_feature (1)..(266): Homolog of NCBI NO: 15217857 NR Description: auxin-induced basic helix-loop-helix factor, putative; protein id: At1g58100.1, supported by cDNA:
  misc_feature (1)..(290): Homolog of NCBI NO: 20975251 NR Description: transcription factor PCF3 [Oryza sativa (japonica
  misc_feature (1)..(183): Homolog of NCBI NO: 15219640 NR Description: DNA binding protein, putative; protein id: supported by cDNA: gi_15912302, supported by cDNA: gi_19548006
  misc_feature (1)..(291): Homolog of NCBI NO: 11357581 NR Description: hypothetical protein F1P2.170 - Arabidopsis >gi|6522545|emb|CAB61988.1| putative protein [Arabidopsis
  misc_feature (1)..(291): Homolog of NCBI NO: 22331641 NR Description: putative protein; protein id: At3g47620.1, by cDNA: gi_16604510 [Arabidopsis thaliana] AT3g47620/F1P2_170 [Arabidopsis thaliana]
  misc_feature (65)..(283): Homolog of NCBI NO: 15219640 NR Description: DNA binding protein, putative; protein id: supported by cDNA: gi_15912302, supported by cDNA: gi_19548006
  misc_feature (1)..(116): Homolog of NCBI NO: 18409345 NR Description: expressed protein; protein id: At1g69690.1, by cDNA: gi_15912212, supported by cDNA: gi_19547990 [Arabidopsis
  misc_feature (1)..(156): Homolog of NCBI NO: 5731257 NR Description: auxin-induced basic helix-loop-helix
  misc_feature (1)..(94): Homolog of NCBI NO: 15237274 NR Description: unknown protein; protein id: At5g23280.1 thaliana] >gi|10177817|dbj|BAB11183.1| gene_id:MKD15.14~unknown

SEQ ID NO: 95004 - DNA, 1500 bp, Arabidopsis thaliana; identical to SEQ ID NO: 91248
  misc_feature (1)..(1500): Ceres Seq. ID no. 12726951
  misc_feature: MA Experiment ID: 20000347 Result: Up-regulated in Transcription
  misc_feature: MA Experiment 20000347 PARAMETER Experiment Name: At_2mM_SA_Sub_P Parameter: Age (day) Value: 14
  misc_feature: MA Experiment 20000347 PARAMETER Experiment Name: At_2mM_SA_Sub_P Parameter: Organism Value: A. thaliana
  misc_feature: MA Experiment 20000347 PARAMETER Experiment Name: At_2mM_SA_Sub_P Parameter: Plant Line Value: WS
  misc_feature: MA Experiment 20000347 PARAMETER Experiment Name: At_2mM_SA_Sub_P Parameter: Timepoint (hr) Value: 6
  misc_feature: MA Experiment 20000347 PARAMETER Experiment Name: At_2mM_SA_Sub_P Parameter: Tissue Value: Aerial
  misc_feature: MA Experiment 20000347 PARAMETER Experiment Name: At_2mM_SA_Sub_P Parameter: Treatment Value: 2mM SA vs. No Treatment

SEQ ID NO: 95005 - protein, 499 aa, Arabidopsis thaliana; identical to SEQ ID NO: 91249
  peptide (1)..(499): Ceres Seq. ID no. 12726952
  misc_feature (26)..(493): Pfam Name: Plant neutral invertase Pfam Description: Plant neutral invertase
  misc_feature (1)..(499): Homolog of NCBI NO: 15218303 NR Description: neutral invertase, putative; protein id: [Arabidopsis thaliana] >gi|25354735|pir||A96743 probable neutral
  misc_feature (3)..(499): Homolog of NCBI NO: 18395144 NR Description: putative invertase; protein id: At1g22650.1,
  misc_feature (3)..(499): Homolog of NCBI NO: 21594008 NR Description: putative invertase [Arabidopsis thaliana]
  misc_feature (4)..(499): Homolog of NCBI NO: 18413234 NR Description: neutral invertase like protein; protein id:
  misc_feature (3)..(499): Homolog of NCBI NO: 7487359 NR Description: hypothetical protein T22J18.18 - Arabidopsis >gi|3287693|gb|AAC25521.1|AAC25521 Similar to LIM17 gene product from the genome of Synechocystis sp. gb|D90916. [Arabidopsis
  misc_feature (4)..(499): Homolog of NCBI NO: 25354737 NR Description: neutral invertase like protein [imported] - thaliana >gi|7267646|emb|CAB78074.1| neutral invertase like
  misc_feature (6)..(499): Homolog of NCBI NO: 15236209 NR Description: invertase - like protein; protein id: supported by cDNA: gi_15215775 [Arabidopsis thaliana]
  misc_feature (4)..(498): Homolog of NCBI NO: 30693221 NR Description: invertase -related [Arabidopsis thaliana]
  misc_feature (6)..(499): Homolog of NCBI NO: 38344939 NR Description: OSJNBa0084A10.15 [Oryza sativa (japonica
  misc_feature (19)..(485): Homolog of NCBI NO: 34894878 NR Description: putative neutral invertase [Oryza sativa cultivar- group)] >gi|14164543|dbj|BAB55792.1| putative neutral

SEQ ID NO: 95006 - protein, 475 aa, Arabidopsis thaliana; identical to SEQ ID NO: 91250
  peptide (1)..(475): Ceres Seq. ID no. 12726953
  misc_feature (2)..(469): Pfam Name: Plant neutral invertase Pfam Description: Plant neutral invertase
  misc_feature (1)..(475): Homolog of NCBI NO: 15218303 NR Description: neutral invertase, putative; protein id: [Arabidopsis thaliana] >gi|25354735|pir||A96743 probable neutral
  misc_feature (1)..(475): Homolog of NCBI NO: 18395144 NR Description: putative invertase; protein id: At1g22650.1,
  misc_feature (1)..(475): Homolog of NCBI NO: 21594008 NR Description: putative invertase [Arabidopsis thaliana]
  misc_feature (1)..(475): Homolog of NCBI NO: 18413234 NR Description: neutral invertase like protein; protein id:
  misc_feature (1)..(475): Homolog of NCBI NO: 7487359 NR Description: hypothetical protein T22J18.18 - Arabidopsis >gi|3287693|gb|AAC25521.1|AAC25521 Similar to LIM17 gene product from the genome of Synechocystis sp. gb|D90916. [Arabidopsis
  misc_feature (1)..(475): Homolog of NCBI NO: 25354737 NR Description: neutral invertase like protein [imported] - thaliana >gi|7267646|emb|CAB78074.1| neutral invertase like
  misc_feature (1)..(475): Homolog of NCBI NO: 15236209 NR Description: invertase - like protein; protein id: supported by cDNA: gi_15215775 [Arabidopsis thaliana]
  misc_feature (1)..(474): Homolog of NCBI NO: 30693221 NR Description: invertase -related [Arabidopsis thaliana]
  misc_feature (1)..(475): Homolog of NCBI NO: 38344939 NR Description: OSJNBa0084A10.15 [Oryza sativa (japonica
  misc_feature (1)..(461): Homolog of NCBI NO: 34894878 NR Description: putative neutral invertase [Oryza sativa cultivar- group)] >gi|14164543|dbj|BAB55792.1| putative neutral

SEQ ID NO: 95007 - protein, 471 aa, Arabidopsis thaliana; identical to SEQ ID NO: 91251
  peptide (1)..(471): Ceres Seq. ID no. 12726954
  misc_feature (1)..(465): Pfam Name: Plant neutral invertase Pfam Description: Plant neutral invertase
  misc_feature (1)..(471): Homolog of NCBI NO: 15218303 NR Description: neutral invertase, putative; protein id: [Arabidopsis thaliana] >gi|25354735|pir||A96743 probable neutral
  misc_feature (1)..(471): Homolog of NCBI NO: 18395144 NR Description: putative invertase; protein id: At1g22650.1,
  misc_feature (1)..(471): Homolog of NCBI NO: 21594008 NR Description: putative invertase [Arabidopsis thaliana]
  misc_feature (1)..(471): Homolog of NCBI NO: 18413234 NR Description: neutral invertase like protein; protein id:
  misc_feature (1)..(471): Homolog of NCBI NO: 7487359 NR Description: hypothetical protein T22J18.18 - Arabidopsis >gi|3287693|gb|AAC25521.1|AAC25521 Similar to LIM17 gene product from the genome of Synechocystis sp. gb|D90916. [Arabidopsis
  misc_feature (1)..(471): Homolog of NCBI NO: 25354737 NR Description: neutral invertase like protein [imported] - thaliana >gi|7267646|emb|CAB78074.1| neutral invertase like
  misc_feature (1)..(471): Homolog of NCBI NO: 15236209 NR Description: invertase - like protein; protein id: supported by cDNA: gi_15215775 [Arabidopsis thaliana]
  misc_feature (1)..(470): Homolog of NCBI NO: 30693221 NR Description: invertase -related [Arabidopsis thaliana]
  misc_feature (1)..(471): Homolog of NCBI NO: 38344939 NR Description: OSJNBa0084A10.15 [Oryza sativa (japonica
  misc_feature (1)..(457): Homolog of NCBI NO: 34894878 NR Description: putative neutral invertase [Oryza sativa cultivar- group)] >gi|14164543|dbj|BAB55792.1| putative neutral

SEQ ID NO: 95008 - DNA, 1747 bp, Arabidopsis thaliana; identical to SEQ ID NO: 91252
  misc_feature (1)..(1747): Ceres Seq. ID no. 12726967
  misc_feature: MA Experiment ID: 20000315 Result: Down-regulated in Transcription
  misc_feature: MA Experiment 20000315 PARAMETER Experiment Name: At_14day_Shoots-Roots_Sub_P Parameter: Age (day) Value: 14
  misc_feature: MA Experiment 20000315 PARAMETER Experiment Name: At_14day_Shoots-Roots_Sub_P Parameter: Organism Value: A. thaliana
  misc_feature: MA Experiment 20000315 PARAMETER Experiment Name: At_14day_Shoots-Roots_Sub_P Parameter: Plant Line Value: WS
  misc_feature: MA Experiment 20000315 PARAMETER Experiment Name: At_14day_Shoots-Roots_Sub_P Parameter: Tissue Value: Shoots vs. Whole Plant
  misc_feature: MA Experiment ID: 20000328 Result: Down-regulated in Transcription
  misc_feature: MA Experiment 20000328 PARAMETER Experiment Name: At_42deg_Heat_Sub_P Parameter: Age (day) Value: 14
  misc_feature: MA Experiment 20000328 PARAMETER Experiment Name: At_42deg_Heat_Sub_P Parameter: Organism Value: A. thaliana
  misc_feature: MA Experiment 20000328 PARAMETER Experiment Name: At_42deg_Heat_Sub_P Parameter: Plant Line Value: WS
  misc_feature: MA Experiment 20000328 PARAMETER Experiment Name: At_42deg_Heat_Sub_P Parameter: Temperature (deg C) Value: 42 vs. 22
  misc_feature: MA Experiment 20000328 PARAMETER Experiment Name: At_42deg_Heat_Sub_P Parameter: Timepoint (hr) Value: 6
  misc_feature: MA Experiment 20000328 PARAMETER Experiment Name: At_42deg_Heat_Sub_P Parameter: Tissue Value: Aerial
  misc_feature: MA Experiment ID: 20000440 Result: Down-regulated in Transcription
  misc_feature: MA Experiment 20000440 PARAMETER Experiment Name: At_Closed-Flower__Sub_P Parameter: Tissue Value: Closed Flower vs. Whole Plant

SEQ ID NO: 95009 - protein, 490 aa, Arabidopsis thaliana; identical to SEQ ID NO: 91253
  peptide (1)..(490): Ceres Seq. ID no. 12726968
  misc_feature (214)..(381): Pfam Name: CRAL/TRIO domain Pfam Description: CRAL/TRIO domain
  misc_feature (1)..(490): Homolog of NCBI NO: 15218383 NR Description: cytosolic factor, putative; protein id: supported by cDNA: gi_15081613 [Arabidopsis thaliana]
  misc_feature (101)..(490): Homolog of NCBI NO: 15081614 NR Description: At1g72160/T9N14_8 [Arabidopsis thaliana]
  misc_feature (4)..(490): Homolog of NCBI NO: 30680992 NR Description: expressed protein [Arabidopsis thaliana]
  misc_feature (4)..(408): Homolog of NCBI NO: 25407487 NR Description: hypothetical protein AT4g09160 [imported] - thaliana >gi|7267559|emb|CAB78040.1| putative protein
  misc_feature (408)..(490): Homolog of NCBI NO: 25407487 NR Description: hypothetical protein AT4g09160 [imported] - thaliana >gi|7267559|emb|CAB78040.1| putative protein
  misc_feature (14)..(490): Homolog of NCBI NO: 8894548 NR Description: hypothetical protein [Cicer arietinum]
  misc_feature (1)..(488): Homolog of NCBI NO: 34907288 NR Description: contains ESTs
  misc_feature (3)..(484): Homolog of NCBI NO: 15219901 NR Description: unknown protein; protein id: At1g22530.1
  misc_feature (21)..(488): Homolog of NCBI NO: 15218382 NR Description: cytosolic factor, putative; protein id: supported by cDNA: gi_15028180, supported by cDNA: gi_21280860 thaliana] >gi|25406149|pir||H96744 probable cytosolic factor
  misc_feature (24)..(488): Homolog of NCBI NO: 18397616 NR Description: expressed protein; protein id: At1g30690.1, by cDNA: gi_14334977 [Arabidopsis thaliana]

SEQ ID NO: 95010 - protein, 390 aa, Arabidopsis thaliana; identical to SEQ ID NO: 91254
  peptide (1)..(390): Ceres Seq. ID no. 12726969
  misc_feature (114)..(281): Pfam Name: CRAL/TRIO domain Pfam Description: CRAL/TRIO domain
  misc_feature (1)..(390): Homolog of NCBI NO: 15218383 NR Description: cytosolic factor, putative; protein id: supported by cDNA: gi_15081613 [Arabidopsis thaliana]
  misc_feature (1)..(390): Homolog of NCBI NO: 15081614 NR Description: At1g72160/T9N14_8 [Arabidopsis thaliana]
  misc_feature (1)..(390): Homolog of NCBI NO: 30680992 NR Description: expressed protein [Arabidopsis thaliana]
  misc_feature (1)..(308): Homolog of NCBI NO: 25407487 NR Description: hypothetical protein AT4g09160 [imported] - thaliana >gi|7267559|emb|CAB78040.1| putative protein
  misc_feature (308)..(390): Homolog of NCBI NO: 25407487 NR Description: hypothetical protein AT4g09160 [imported] - thaliana >gi|7267559|emb|CAB78040.1| putative protein
  misc_feature (1)..(390): Homolog of NCBI NO: 8894548 NR Description: hypothetical protein [Cicer arietinum]
  misc_feature (1)..(388): Homolog of NCBI NO: 34907288 NR Description: contains ESTs
  misc_feature (1)..(384): Homolog of NCBI NO: 15219901 NR Description: unknown protein; protein id: At1g22530.1
  misc_feature (1)..(388): Homolog of NCBI NO: 15218382 NR Description: cytosolic factor, putative; protein id: supported by cDNA: gi_15028180, supported by cDNA: gi_21280860 thaliana] >gi|25406149|pir||H96744 probable cytosolic factor
  misc_feature (1)..(388): Homolog of NCBI NO: 18397616 NR Description: expressed protein; protein id: At1g30690.1, by cDNA: gi_14334977 [Arabidopsis thaliana]

SEQ ID NO: 95011 - protein, 307 aa, Arabidopsis thaliana; identical to SEQ ID NO: 91255
  peptide (1)..(307): Ceres Seq. ID no. 12726970
  misc_feature (31)..(198): Pfam Name: CRAL/TRIO domain Pfam Description: CRAL/TRIO domain
  misc_feature (1)..(307): Homolog of NCBI NO: 15218383 NR Description: cytosolic factor, putative; protein id: supported by cDNA: gi_15081613 [Arabidopsis thaliana]
  misc_feature (1)..(307): Homolog of NCBI NO: 15081614 NR Description: At1g72160/T9N14_8 [Arabidopsis thaliana]
  misc_feature (1)..(307): Homolog of NCBI NO: 30680992 NR Description: expressed protein [Arabidopsis thaliana]
  misc_feature (1)..(225): Homolog of NCBI NO: 25407487 NR Description: hypothetical protein AT4g09160 [imported] - thaliana >gi|7267559|emb|CAB78040.1| putative protein
  misc_feature (225)..(307): Homolog of NCBI NO: 25407487 NR Description: hypothetical protein AT4g09160 [imported] - thaliana >gi|7267559|emb|CAB78040.1| putative protein
  misc_feature (1)..(307): Homolog of NCBI NO: 8894548 NR Description: hypothetical protein [Cicer arietinum]
  misc_feature (1)..(305): Homolog of NCBI NO: 34907288 NR Description: contains ESTs
  misc_feature (1)..(301): Homolog of NCBI NO: 15219901 NR Description: unknown protein; protein id: At1g22530.1
  misc_feature (1)..(305): Homolog of NCBI NO: 15218382 NR Description: cytosolic factor, putative; protein id: supported by cDNA: gi_15028180, supported by cDNA: gi_21280860 thaliana] >gi|25406149|pir||H96744 probable cytosolic factor
  misc_feature (1)..(305): Homolog of NCBI NO: 18397616 NR Description: expressed protein; protein id: At1g30690.1, by cDNA: gi_14334977 [Arabidopsis thaliana]

SEQ ID NO: 95012 - DNA, 1902 bp, Arabidopsis thaliana; identical to SEQ ID NO: 91256
  misc_feature (1)..(1902): Ceres Seq. ID no. 12727018
  misc_feature: MA Experiment ID: 20000179 Result: Up-regulated in Transcription
  misc_feature: MA Experiment 20000179 PARAMETER Experiment Name: At_Germinating_Seeds_P Parameter: Age (hr) Value: 6 vs. 0
  misc_feature: MA Experiment 20000179 PARAMETER Experiment Name: At_Germinating_Seeds_P Parameter: Tissue Value: Germinating Seeds
  misc_feature: MA Experiment ID: 20000180 Result: Up-regulated in Transcription
  misc_feature: MA Experiment 20000180 PARAMETER Experiment Name: At_Germinating_Seeds_P Parameter: Age (hr) Value: 24 vs. 0
  misc_feature: MA Experiment 20000180 PARAMETER Experiment Name: At_Germinating_Seeds_P Parameter: Tissue Value: Germinating Seeds
  misc_feature: MA Experiment ID: 20000235 Result: Up-regulated in Transcription
  misc_feature: MA Experiment 20000235 PARAMETER Experiment Name: At_Siliques_P Parameter: Age (day) Value: 21
  misc_feature: MA Experiment 20000235 PARAMETER Experiment Name: At_Siliques_P Parameter: Organism Value: A. thaliana
  misc_feature: MA Experiment 20000235 PARAMETER Experiment Name: At_Siliques_P Parameter: Plant Line Value: WS
  misc_feature: MA Experiment 20000235 PARAMETER Experiment Name: At_Siliques_P Parameter: Tissue Value: 5-10mm Siliques vs. Whole Plant
  misc_feature: MA Experiment ID: 20000286 Result: Up-regulated in Transcription
  misc_feature: MA Experiment 20000286 PARAMETER Experiment Name: At_Open_Flower_P Parameter: Age (day) Value: 21
  misc_feature: MA Experiment 20000286 PARAMETER Experiment Name: At_Open_Flower_P Parameter: Plant Line Value: WS
  misc_feature: MA Experiment 20000286 PARAMETER Experiment Name: At_Open_Flower_P Parameter: Tissue Value: Half Open vs. Whole Plant
  misc_feature: MA Experiment ID: 20000794 Result: Up-regulated in Transcription
  misc_feature: MA Experiment 20000794 PARAMETER Experiment Name: At_Petals_P Parameter: Age (day) Value: 23-25 days
  misc_feature: MA Experiment 20000794 PARAMETER Experiment Name: At_Petals_P Parameter: Plant Line Value: WS
  misc_feature: MA Experiment 20000794 PARAMETER Experiment Name: At_Petals_P Parameter: Tissue Value: Petals vs. Whole plant
  misc_feature: MA Experiment ID: 20001557 Result: Up-regulated in Transcription
  misc_feature: MA Experiment 20001557 PARAMETER Experiment Name: At_Drought_Soil_Dry_P Parameter: Age (day) Value: 27
  misc_feature: MA Experiment 20001557 PARAMETER Experiment Name: At_Drought_Soil_Dry_P Parameter: Organism Value: A. thaliana
  misc_feature: MA Experiment 20001557 PARAMETER Experiment Name: At_Drought_Soil_Dry_P Parameter: Plant Line Value: WS
  misc_feature: MA Experiment 20001557 PARAMETER Experiment Name: At_Drought_Soil_Dry_P Parameter: Post Timepoint (hr) Value: 3
  misc_feature: MA Experiment 20001557 PARAMETER Experiment Name: At_Drought_Soil_Dry_P Parameter: Post-Treatment Value: Re-Water vs. No Drought
  misc_feature: MA Experiment 20001557 PARAMETER Experiment Name: At_Drought_Soil_Dry_P Parameter: Timepoint (day) Value: 13
  misc_feature: MA Experiment 20001557 PARAMETER Experiment Name: At_Drought_Soil_Dry_P Parameter: Treatment Value: Drought vs. No Drought
  misc_feature: MA Experiment ID: 20001560 Result: Up-regulated in Transcription
  misc_feature: MA Experiment 20001560 PARAMETER Experiment Name: At_Drought_Soil_Dry_P Parameter: Age (day) Value: 28
  misc_feature: MA Experiment 20001560 PARAMETER Experiment Name: At_Drought_Soil_Dry_P Parameter: Organism Value: A. thaliana
  misc_feature: MA Experiment 20001560 PARAMETER Experiment Name: At_Drought_Soil_Dry_P Parameter: Plant Line Value: WS
  misc_feature: MA Experiment 20001560 PARAMETER Experiment Name: At_Drought_Soil_Dry_P Parameter: Post Timepoint (hr) Value: None
  misc_feature: MA Experiment 20001560 PARAMETER Experiment Name: At_Drought_Soil_Dry_P Parameter: Post-Treatment Value: None
  misc_feature: MA Experiment 20001560 PARAMETER Experiment Name: At_Drought_Soil_Dry_P Parameter: Timepoint (day) Value: 14
  misc_feature: MA Experiment 20001560 PARAMETER Experiment Name: At_Drought_Soil_Dry_P Parameter: Treatment Value: Drought vs. No Drought
  misc_feature: MA Experiment ID: 20001905 Result: Up-regulated in Transcription
  misc_feature: MA Experiment 20001905 PARAMETER Experiment Name: At_Drought_Reproduction_P Parameter: Age (day) Value: 40
  misc_feature: MA Experiment 20001905 PARAMETER Experiment Name: At_Drought_Reproduction_P Parameter: Organism Value: A. thaliana
  misc_feature: MA Experiment 20001905 PARAMETER Experiment Name: At_Drought_Reproduction_P Parameter: Plant Line Value: WS
  misc_feature: MA Experiment 20001905 PARAMETER Experiment Name: At_Drought_Reproduction_P Parameter: Timepoint (day) Value: 10
  misc_feature: MA Experiment 20001905 PARAMETER Experiment Name: At_Drought_Reproduction_P Parameter: Tissue Value: Rosettes
  misc_feature: MA Experiment 20001905 PARAMETER Experiment Name: At_Drought_Reproduction_P Parameter: Treatment Value: Drought vs. No Drought
  misc_feature: MA Experiment ID: 20001911 Result: Down-regulated in Transcription
  misc_feature: MA Experiment 20001911 PARAMETER Experiment Name: At_Drought_Reproduction_P Parameter: Age (day) Value: 40
  misc_feature: MA Experiment 20001911 PARAMETER Experiment Name: At_Drought_Reproduction_P Parameter: Organism Value: A. thaliana
  misc_feature: MA Experiment 20001911 PARAMETER Experiment Name: At_Drought_Reproduction_P Parameter: Plant Line Value: WS
  misc_feature: MA Experiment 20001911 PARAMETER Experiment Name: At_Drought_Reproduction_P Parameter: Timepoint (day) Value: 10
  misc_feature: MA Experiment 20001911 PARAMETER Experiment Name: At_Drought_Reproduction_P Parameter: Tissue Value: Flowers
  misc_feature: MA Experiment 20001911 PARAMETER Experiment Name: At_Drought_Reproduction_P Parameter: Treatment Value: Drought vs. No Drought

SEQ ID NO: 95013 - protein, 633 aa, Arabidopsis thaliana; identical to SEQ ID NO: 91257
  peptide (1)..(633): Ceres Seq. ID no. 12727019
  misc_feature (15)..(620): Pfam Name: Exo70 exocyst complex subunit Pfam Description: Exo70 exocyst complex subunit
  misc_feature (21)..(630): Homolog of NCBI NO: 15221040 NR Description: hypothetical protein; protein id: At1g54090.1, by cDNA: gi_20260593 [Arabidopsis thaliana]
  misc_feature (1)..(631): Homolog of NCBI NO: 30682979 NR Description: exocyst subunit EXO70 family [Arabidopsis >gi|9294634|dbj|BAB02973.1| gb|AAD25781.1~gene_id:MAG2.5~strong
  misc_feature (133)..(631): Homolog of NCBI NO: 23270388 NR Description: unknown protein [Arabidopsis thaliana]
  misc_feature (166)..(621): Homolog of NCBI NO: 19386798 NR Description: putative leucine zipper protein [Oryza sativa
  misc_feature (24)..(129): Homolog of NCBI NO: 19386798 NR Description: putative leucine zipper protein [Oryza sativa
  misc_feature (179)..(631): Homolog of NCBI NO: 38346639 NR Description: OSJNBa0072D21.9 [Oryza sativa (japonica
  misc_feature (23)..(127): Homolog of NCBI NO: 38346639 NR Description: OSJNBa0072D21.9 [Oryza sativa (japonica
  misc_feature (14)..(632): Homolog of NCBI NO: 9758920 NR Description: gb|AAD25781.1~gene_id:MXI22.10~strong similarity
  misc_feature (14)..(632): Homolog of NCBI NO: 30695880 NR Description: exocyst subunit EXO70 family [Arabidopsis
  misc_feature (180)..(629): Homolog of NCBI NO: 22326587 NR Description: putative protein; protein id: At5g03540.1, by cDNA: gi_18176063 [Arabidopsis thaliana]

SEQ ID NO: 95014 - protein, 589 aa, Arabidopsis thaliana; identical to SEQ ID NO: 91258
  peptide (1)..(589): Ceres Seq. ID no. 12727020
  misc_feature (1)..(576): Pfam Name: Exo70 exocyst complex subunit Pfam Description: Exo70 exocyst complex subunit
  misc_feature (1)..(586): Homolog of NCBI NO: 15221040 NR Description: hypothetical protein; protein id: At1g54090.1, by cDNA: gi_20260593 [Arabidopsis thaliana]
  misc_feature (1)..(587): Homolog of NCBI NO: 30682979 NR Description: exocyst subunit EXO70 family [Arabidopsis >gi|9294634|dbj|BAB02973.1| gb|AAD25781.1~gene_id:MAG2.5~strong
  misc_feature (89)..(587): Homolog of NCBI NO: 23270388 NR Description: unknown protein [Arabidopsis thaliana]
  misc_feature (122)..(577): Homolog of NCBI NO: 19386798 NR Description: putative leucine zipper protein [Oryza sativa
  misc_feature (1)..(85): Homolog of NCBI NO: 19386798 NR Description: putative leucine zipper protein [Oryza sativa
  misc_feature (135)..(587): Homolog of NCBI NO: 38346639 NR Description: OSJNBa0072D21.9 [Oryza sativa (japonica
  misc_feature (1)..(83): Homolog of NCBI NO: 38346639 NR Description: OSJNBa0072D21.9 [Oryza sativa (japonica
  misc_feature (1)..(588): Homolog of NCBI NO: 9758920 NR Description: gb|AAD25781.1~gene_id:MXI22.10~strong similarity
  misc_feature (1)..(588): Homolog of NCBI NO: 30695880 NR Description: exocyst subunit EXO70 family [Arabidopsis
  misc_feature (136)..(585): Homolog of NCBI NO: 22326587 NR Description: putative protein; protein id: At5g03540.1, by cDNA: gi_18176063 [Arabidopsis thaliana]

SEQ ID NO: 95015 - protein, 549 aa, Arabidopsis thaliana; identical to SEQ ID NO: 91259
  peptide (1)..(549): Ceres Seq. ID no. 12727021
  misc_feature (1)..(536): Pfam Name: Exo70 exocyst complex subunit Pfam Description: Exo70 exocyst complex subunit
  misc_feature (1)..(546): Homolog of NCBI NO: 15221040 NR Description: hypothetical protein; protein id: At1g54090.1, by cDNA: gi_20260593 [Arabidopsis thaliana]
  misc_feature (1)..(547): Homolog of NCBI NO: 30682979 NR Description: exocyst subunit EXO70 family [Arabidopsis >gi|9294634|dbj|BAB02973.1| gb|AAD25781.1~gene_id:MAG2.5~strong
  misc_feature (49)..(547): Homolog of NCBI NO: 23270388 NR Description: unknown protein [Arabidopsis thaliana]
  misc_feature (82)..(537): Homolog of NCBI NO: 19386798 NR Description: putative leucine zipper protein [Oryza sativa
  misc_feature (1)..(45): Homolog of NCBI NO: 19386798 NR Description: putative leucine zipper protein [Oryza sativa
  misc_feature (95)..(547): Homolog of NCBI NO: 38346639 NR Description: OSJNBa0072D21.9 [Oryza sativa (japonica
  misc_feature (1)..(43): Homolog of NCBI NO: 38346639 NR Description: OSJNBa0072D21.9 [Oryza sativa (japonica
  misc_feature (1)..(548): Homolog of NCBI NO: 9758920 NR Description: gb|AAD25781.1~gene_id:MXI22.10~strong similarity
  misc_feature (1)..(548): Homolog of NCBI NO: 30695880 NR Description: exocyst subunit EXO70 family [Arabidopsis
  misc_feature (96)..(545): Homolog of NCBI NO: 22326587 NR Description: putative protein; protein id: At5g03540.1, by cDNA: gi_18176063 [Arabidopsis thaliana]

SEQ ID NO: 95016 - DNA, 567 bp, Arabidopsis thaliana; identical to SEQ ID NO: 91260
  misc_feature (1)..(567): Ceres Seq. ID no. 12727022
  misc_feature: MA Experiment ID: 20000495 Result: Up-regulated in Transcription
  misc_feature: MA Experiment 20000495 PARAMETER Experiment Name: At_Guard_Cells_P Parameter: Harvest Date Value: 8/2/2002
  misc_feature: MA Experiment 20000495 PARAMETER Experiment Name: At_Guard_Cells_P Parameter: Organism Value: A. thaliana
  misc_feature: MA Experiment 20000495 PARAMETER Experiment Name: At_Guard_Cells_P Parameter: Tissue Value: Guard Cells vs. Leaves
  misc_feature: MA Experiment ID: 20000496 Result: Up-regulated in Transcription
  misc_feature: MA Experiment 20000496 PARAMETER Experiment Name: At_Guard_Cells_P Parameter: Harvest Date Value: 7/19/2002
  misc_feature: MA Experiment 20000496 PARAMETER Experiment Name: At_Guard_Cells_P Parameter: Organism Value: Canola
  misc_feature: MA Experiment 20000496 PARAMETER Experiment Name: At_Guard_Cells_P Parameter: Tissue Value: Guard Cells vs. Leaves
  misc_feature: MA Experiment ID: 20001451 Result: Up-regulated in Transcription
  misc_feature: MA Experiment 20001451 PARAMETER Experiment Name: At_Far-red-induction_P Parameter: Age (day) Value: 7
  misc_feature: MA Experiment 20001451 PARAMETER Experiment Name: At_Far-red-induction_P Parameter: Light Value: Far-red vs. White
  misc_feature: MA Experiment 20001451 PARAMETER Experiment Name: At_Far-red-induction_P Parameter: Organism Value: A. thaliana
  misc_feature: MA Experiment 20001451 PARAMETER Experiment Name: At_Far-red-induction_P Parameter: Plant Line Value: Columbia
  misc_feature: MA Experiment 20001451 PARAMETER Experiment Name: At_Far-red-induction_P Parameter: Timepoint (hr) Value: 24
  misc_feature: MA Experiment 20001451 PARAMETER Experiment Name: At_Far-red-induction_P Parameter: Tissue Value: Whole Plant

SEQ ID NO: 95017 - protein, 188 aa, Arabidopsis thaliana; identical to SEQ ID NO: 91261
  peptide (1)..(188): Ceres Seq. ID no. 12727023
  misc_feature (1)..(188): Homolog of NCBI NO: 15218508 NR Description: DAG-like protein; protein id: At1g72530.1
  misc_feature (29)..(164): Homolog of NCBI NO: 18400602 NR Description: expressed protein; protein id: At3g15000.1, by cDNA: gi_16226542 [Arabidopsis thaliana] Unknown mitochondrial protein At3g15000
  misc_feature (25)..(167): Homolog of NCBI NO: 15219250 NR Description: plastid protein, putative; protein id: [Arabidopsis thaliana] >gi|7769870|gb|AAF69548.1|AC008007_23
  misc_feature (21)..(152): Homolog of NCBI NO: 27754695 NR Description: putative DAG protein [Arabidopsis thaliana]
  misc_feature (21)..(152): Homolog of NCBI NO: 15230785 NR Description: DAG protein, putative; protein id: At3g06790.1 thaliana] >gi|7549634|gb|AAF63819.1| DAG protein, putative
  misc_feature (9)..(184): Homolog of NCBI NO: 15223247 NR Description: plastid protein, putative; protein id: supported by cDNA: gi_17381077, supported by cDNA: gi_20465720
  misc_feature (11)..(151): Homolog of NCBI NO: 38344141 NR Description: OSJNBa0041A02.8 [Oryza sativa (japonica
  misc_feature (26)..(151): Homolog of NCBI NO: 2440029 NR Description: DAL1 protein [Arabidopsis thaliana]
  misc_feature (26)..(151): Homolog of NCBI NO: 15226108 NR Description: plastid protein; protein id: At2g33430.1, by cDNA: 8717., supported by cDNA: gi_17933284, supported by
  misc_feature (26)..(151): Homolog of NCBI NO: 21617909 NR Description: plastid protein [Arabidopsis thaliana]

SEQ ID NO: 95018 - protein, 128 aa, Arabidopsis thaliana; identical to SEQ ID NO: 91262
  peptide (1)..(128): Ceres Seq. ID no. 12727024
  misc_feature (1)..(128): Homolog of NCBI NO: 15218508 NR Description: DAG-like protein; protein id: At1g72530.1
  misc_feature (1)..(104): Homolog of NCBI NO: 18400602 NR Description: expressed protein; protein id: At3g15000.1, by cDNA: gi_16226542 [Arabidopsis thaliana] Unknown mitochondrial protein At3g15000
  misc_feature (1)..(107): Homolog of NCBI NO: 15219250 NR Description: plastid protein, putative; protein id: [Arabidopsis thaliana] >gi|7769870|gb|AAF69548.1|AC008007_23
  misc_feature (1)..(92): Homolog of NCBI NO: 27754695 NR Description: putative DAG protein [Arabidopsis thaliana]
  misc_feature (1)..(92): Homolog of NCBI NO: 15230785 NR Description: DAG protein, putative; protein id: At3g06790.1 thaliana] >gi|7549634|gb|AAF63819.1| DAG protein, putative
  misc_feature (1)..(124): Homolog of NCBI NO: 15223247 NR Description: plastid protein, putative; protein id: supported by cDNA: gi_17381077, supported by cDNA: gi_20465720
  misc_feature (1)..(91): Homolog of NCBI NO: 38344141 NR Description: OSJNBa0041A02.8 [Oryza sativa (japonica
  misc_feature (1)..(91): Homolog of NCBI NO: 2440029 NR Description: DAL1 protein [Arabidopsis thaliana]
  misc_feature (1)..(91): Homolog of NCBI NO: 15226108 NR Description: plastid protein; protein id: At2g33430.1, by cDNA: 8717., supported by cDNA: gi_17933284, supported by
  misc_feature (1)..(91): Homolog of NCBI NO: 21617909 NR Description: plastid protein [Arabidopsis thaliana]

SEQ ID NO: 95019 - protein, 106 aa, Arabidopsis thaliana; identical to SEQ ID NO: 91263
  peptide (1)..(106): Ceres Seq. ID no. 12727025
  misc_feature (1)..(106): Homolog of NCBI NO: 15218508 NR Description: DAG-like protein; protein id: At1g72530.1
  misc_feature (1)..(82): Homolog of NCBI NO: 18400602 NR Description: expressed protein; protein id: At3g15000.1, by cDNA: gi_16226542 [Arabidopsis thaliana] Unknown mitochondrial protein At3g15000
  misc_feature (1)..(85): Homolog of NCBI NO: 15219250 NR Description: plastid protein, putative; protein id: [Arabidopsis thaliana] >gi|7769870|gb|AAF69548.1|AC008007_23
  misc_feature (1)..(70): Homolog of NCBI NO: 27754695 NR Description: putative DAG protein [Arabidopsis thaliana]
  misc_feature (1)..(70): Homolog of NCBI NO: 15230785 NR Description: DAG protein, putative; protein id: At3g06790.1 thaliana] >gi|7549634|gb|AAF63819.1| DAG protein, putative
  misc_feature (1)..(102): Homolog of NCBI NO: 15223247 NR Description: plastid protein, putative; protein id: supported by cDNA: gi_17381077, supported by cDNA: gi_20465720
  misc_feature (1)..(69): Homolog of NCBI NO: 38344141 NR Description: OSJNBa0041A02.8 [Oryza sativa (japonica
  misc_feature (1)..(69): Homolog of NCBI NO: 2440029 NR Description: DAL1 protein [Arabidopsis thaliana]
  misc_feature (1)..(69): Homolog of NCBI NO: 15226108 NR Description: plastid protein; protein id: At2g33430.1, by cDNA: 8717., supported by cDNA: gi_17933284, supported by
  misc_feature (1)..(69): Homolog of NCBI NO: 25370552 NR Description: DAG protein homolog [imported] - Arabidopsis >gi|2246378|emb|CAB06698.1| plastid protein [Arabidopsis

SEQ ID NO: 95020 - DNA, 1448 bp, Arabidopsis thaliana; identical to SEQ ID NO: 91264
  misc_feature (1)..(1448): Ceres Seq. ID no. 12727060
  misc_feature: MA Experiment ID: 20000184 Result: Down-regulated in Transcription
  misc_feature: MA Experiment 20000184 PARAMETER Experiment Name: At_Shoots__P Parameter: Age (day) Value: 7
  misc_feature: MA Experiment 20000184 PARAMETER Experiment Name: At_Shoots__P Parameter: Tissue Value: Shoots vs. Whole Plant
  misc_feature: MA Experiment ID: 20000185 Result: Up-regulated in Transcription
  misc_feature: MA Experiment 20000185 PARAMETER Experiment Name: At_Roots__P Parameter: Age (day) Value: 7 vs. 21
  misc_feature: MA Experiment 20000185 PARAMETER Experiment Name: At_Roots__P Parameter: Organism Value: A. thaliana
  misc_feature: MA Experiment 20000185 PARAMETER Experiment Name: At_Roots__P Parameter: Tissue Value: Roots vs. Whole Plant
  misc_feature: MA Experiment ID: 20000264 Result: Up-regulated in Transcription
  misc_feature: MA Experiment 20000264 PARAMETER Experiment Name: At_Open_Flower_P Parameter: Age (day) Value: 21
  misc_feature: MA Experiment 20000264 PARAMETER Experiment Name: At_Open_Flower_P Parameter: Plant Line Value: WS
  misc_feature: MA Experiment 20000264 PARAMETER Experiment Name: At_Open_Flower_P Parameter: Tissue Value: Open Flower vs. Whole Plant
  misc_feature: MA Experiment ID: 20000438 Result: Down-regulated in Transcription
  misc_feature: MA Experiment 20000438 PARAMETER Experiment Name: At_Shoots__P Parameter: Age (day) Value: 14
  misc_feature: MA Experiment 20000438 PARAMETER Experiment Name: At_Shoots__P Parameter: Tissue Value: Shoots vs. Whole Plant
  misc_feature: MA Experiment ID: 20000439 Result: Up-regulated in Transcription
  misc_feature: MA Experiment 20000439 PARAMETER Experiment Name: At_Roots__P Parameter: Age (day) Value: 14 vs. 21
  misc_feature: MA Experiment 20000439 PARAMETER Experiment Name: At_Roots__P Parameter: Organism Value: A. thaliana
  misc_feature: MA Experiment 20000439 PARAMETER Experiment Name: At_Roots__P Parameter: Tissue Value: Roots vs. Whole Plant
  misc_feature: MA Experiment ID: 20000495 Result: Up-regulated in Transcription
  misc_feature: MA Experiment 20000495 PARAMETER Experiment Name: At_Guard_Cells_P Parameter: Harvest Date Value: 8/2/2002
  misc_feature: MA Experiment 20000495 PARAMETER Experiment Name: At_Guard_Cells_P Parameter: Organism Value: A. thaliana
  misc_feature: MA Experiment 20000495 PARAMETER Experiment Name: At_Guard_Cells_P Parameter: Tissue Value: Guard Cells vs. Leaves
  misc_feature: MA Experiment ID: 20000794 Result: Up-regulated in Transcription
  misc_feature: MA Experiment 20000794 PARAMETER Experiment Name: At_Petals_P Parameter: Age (day) Value: 23-25 days
  misc_feature: MA Experiment 20000794 PARAMETER Experiment Name: At_Petals_P Parameter: Plant Line Value: WS
  misc_feature: MA Experiment 20000794 PARAMETER Experiment Name: At_Petals_P Parameter: Tissue Value: Petals vs. Whole plant

SEQ ID NO: 95021 - protein, 367 aa, Arabidopsis thaliana; identical to SEQ ID NO: 91265
  peptide (1)..(367): Ceres Seq. ID no. 12727061
  misc_feature (1)..(340): Homolog of NCBI NO: 8777310 NR Description: gb|AAF01562.1~gene_id:MBM17.7~strong similarity
  misc_feature (1)..(367): Homolog of NCBI NO: 22328041 NR Description: putative protein; protein id: At5g63970.1, by cDNA: gi_20259325 [Arabidopsis thaliana] unknown protein [Arabidopsis thaliana]
  misc_feature (10)..(367): Homolog of NCBI NO: 34905794 NR Description: P0401G10.23 [Oryza sativa (japonica
  misc_feature (6)..(366): Homolog of NCBI NO: 15232157 NR Description: unknown protein; protein id: At3g01650.1 thaliana] >gi|6016736|gb|AAF01562.1|AC009325_32 unknown protein
  misc_feature (1)..(288): Homolog of NCBI NO: 15241400 NR Description: putative protein; protein id: At5g14420.1, by cDNA: gi_20466261 [Arabidopsis thaliana]
  misc_feature (284)..(366): Homolog of NCBI NO: 15241400 NR Description: putative protein; protein id: At5g14420.1, by cDNA: gi_20466261 [Arabidopsis thaliana]
  misc_feature (4)..(367): Homolog of NCBI NO: 18412353 NR Description: expressed protein; protein id: At1g79380.1, by cDNA: gi_13937148 [Arabidopsis thaliana]
  misc_feature (1)..(366): Homolog of NCBI NO: 18408863 NR Description: F12A21.7; protein id: At1g67800.1, supported by
  misc_feature (1)..(366): Homolog of NCBI NO: 30697566 NR Description: copine-related [Arabidopsis thaliana]
  misc_feature (12)..(288): Homolog of NCBI NO: 20804894 NR Description: P0497A05.19 [Oryza sativa (japonica

SEQ ID NO: 95022 - protein, 365 aa, Arabidopsis thaliana; identical to SEQ ID NO: 91266
  peptide (1)..(365): Ceres Seq. ID no. 12727062
  misc_feature (1)..(338): Homolog of NCBI NO: 8777310 NR Description: gb|AAF01562.1~gene_id:MBM17.7~strong similarity
  misc_feature (1)..(365): Homolog of NCBI NO: 22328041 NR Description: putative protein; protein id: At5g63970.1, by cDNA: gi_20259325 [Arabidopsis thaliana] unknown protein [Arabidopsis thaliana]
  misc_feature (8)..(365): Homolog of NCBI NO: 34905794 NR Description: P0401G10.23 [Oryza sativa (japonica
  misc_feature (4)..(364): Homolog of NCBI NO: 15232157 NR Description: unknown protein; protein id: At3g01650.1 thaliana] >gi|6016736|gb|AAF01562.1|AC009325_32 unknown protein
  misc_feature (1)..(286): Homolog of NCBI NO: 15241400 NR Description: putative protein; protein id: At5g14420.1, by cDNA: gi_20466261 [Arabidopsis thaliana]
  misc_feature (282)..(364): Homolog of NCBI NO: 15241400 NR Description: putative protein; protein id: At5g14420.1, by cDNA: gi_20466261 [Arabidopsis thaliana]
  misc_feature (2)..(365): Homolog of NCBI NO: 18412353 NR Description: expressed protein; protein id: At1g79380.1, by cDNA: gi_13937148 [Arabidopsis thaliana]
  misc_feature (1)..(364): Homolog of NCBI NO: 18408863 NR Description: F12A21.7; protein id: At1g67800.1, supported by
  misc_feature (1)..(364): Homolog of NCBI NO: 30697566 NR Description: copine-related [Arabidopsis thaliana]
  misc_feature (10)..(286): Homolog of NCBI NO: 20804894 NR Description: P0497A05.19 [Oryza sativa (japonica

SEQ ID NO: 95023 - protein, 211 aa, Arabidopsis thaliana; identical to SEQ ID NO: 91267
  peptide (1)..(211): Ceres Seq. ID no. 12727063
  misc_feature (1)..(184): Homolog of NCBI NO: 8777310 NR Description: gb|AAF01562.1~gene_id:MBM17.7~strong similarity
  misc_feature (1)..(211): Homolog of NCBI NO: 22328041 NR Description: putative protein; protein id: At5g63970.1, by cDNA: gi_20259325 [Arabidopsis thaliana] unknown protein [Arabidopsis thaliana]
  misc_feature (1)..(211): Homolog of NCBI NO: 34905794 NR Description: P0401G10.23 [Oryza sativa (japonica
  misc_feature (1)..(210): Homolog of NCBI NO: 15232157 NR Description: unknown protein; protein id: At3g01650.1 thaliana] >gi|6016736|gb|AAF01562.1|AC009325_32 unknown protein
  misc_feature (1)..(132): Homolog of NCBI NO: 15241400 NR Description: putative protein; protein id: At5g14420.1, by cDNA: gi_20466261 [Arabidopsis thaliana]
  misc_feature (128)..(210): Homolog of NCBI NO: 15241400 NR Description: putative protein; protein id: At5g14420.1, by cDNA: gi_20466261 [Arabidopsis thaliana]
  misc_feature (1)..(211): Homolog of NCBI NO: 18412353 NR Description: expressed protein; protein id: At1g79380.1, by cDNA: gi_13937148 [Arabidopsis thaliana]
  misc_feature (1)..(210): Homolog of NCBI NO: 18408863 NR Description: F12A21.7; protein id: At1g67800.1, supported by
  misc_feature (1)..(210): Homolog of NCBI NO: 30697566 NR Description: copine-related [Arabidopsis thaliana]
  misc_feature (1)..(132): Homolog of NCBI NO: 20804894 NR Description: P0497A05.19 [Oryza sativa (japonica

SEQ ID NO: 95024 - DNA, 1178 bp, Arabidopsis thaliana; identical to SEQ ID NO: 91268
  misc_feature (1)..(1178): Ceres Seq. ID no. 12727064
  misc_feature: MA Experiment ID: 20000169 Result: Down-regulated in Transcription
  misc_feature: MA Experiment 20000169 PARAMETER Experiment Name: At_100uM_ABA_P Parameter: Age (day) Value: 14
  misc_feature: MA Experiment 20000169 PARAMETER Experiment Name: At_100uM_ABA_P Parameter: Organism Value: A. thaliana
  misc_feature: MA Experiment 20000169 PARAMETER Experiment Name: At_100uM_ABA_P Parameter: Plant Line Value: WS
  misc_feature: MA Experiment 20000169 PARAMETER Experiment Name: At_100uM_ABA_P Parameter: Timepoint (hr) Value: 6
  misc_feature: MA Experiment 20000169 PARAMETER Experiment Name: At_100uM_ABA_P Parameter: Tissue Value: Aerial
  misc_feature: MA Experiment 20000169 PARAMETER Experiment Name: At_100uM_ABA_P Parameter: Treatment Value: 100uM ABA vs. No Treatment
  misc_feature: MA Experiment ID: 20000173 Result: Down-regulated in Transcription
  misc_feature: MA Experiment 20000173 PARAMETER Experiment Name: At_42deg_Heat_P Parameter: Age (day) Value: 14
  misc_feature: MA Experiment 20000173 PARAMETER Experiment Name: At_42deg_Heat_P Parameter: Organism Value: A. thaliana
  misc_feature: MA Experiment 20000173 PARAMETER Experiment Name: At_42deg_Heat_P Parameter: Plant Line Value: WS
  misc_feature: MA Experiment 20000173 PARAMETER Experiment Name: At_42deg_Heat_P Parameter: Temperature (deg C) Value: 42 vs. 22
  misc_feature: MA Experiment 20000173 PARAMETER Experiment Name: At_42deg_Heat_P Parameter: Timepoint (hr) Value: 6
  misc_feature: MA Experiment 20000173 PARAMETER Experiment Name: At_42deg_Heat_P Parameter: Tissue Value: Aerial
  misc_feature: MA Experiment ID: 20000184 Result: Down-regulated in Transcription
  misc_feature: MA Experiment 20000184 PARAMETER Experiment Name: At_Shoots__P Parameter: Age (day) Value: 7
  misc_feature: MA Experiment 20000184 PARAMETER Experiment Name: At_Shoots__P Parameter: Tissue Value: Shoots vs. Whole Plant
  misc_feature: MA Experiment ID: 20000185 Result: Down-regulated in Transcription
  misc_feature: MA Experiment 20000185 PARAMETER Experiment Name: At_Roots__P Parameter: Age (day) Value: 7 vs. 21
  misc_feature: MA Experiment 20000185 PARAMETER Experiment Name: At_Roots__P Parameter: Organism Value: A. thaliana
  misc_feature: MA Experiment 20000185 PARAMETER Experiment Name: At_Roots__P Parameter: Tissue Value: Roots vs. Whole Plant
  misc_feature: MA Experiment ID: 20000234 Result: Down-regulated in Transcription
  misc_feature: MA Experiment 20000234 PARAMETER Experiment Name: At_Siliques_P Parameter: Age (day) Value: 21
  misc_feature: MA Experiment 20000234 PARAMETER Experiment Name: At_Siliques_P Parameter: Organism Value: A. thaliana
  misc_feature: MA Experiment 20000234 PARAMETER Experiment Name: At_Siliques_P Parameter: Plant Line Value: WS
  misc_feature: MA Experiment 20000234 PARAMETER Experiment Name: At_Siliques_P Parameter: Tissue Value: Less Than 5mm Siliques vs. Whole Plant
  misc_feature: MA Experiment ID: 20000235 Result: Down-regulated in Transcription
  misc_feature: MA Experiment 20000235 PARAMETER Experiment Name: At_Siliques_P Parameter: Age (day) Value: 21
  misc_feature: MA Experiment 20000235 PARAMETER Experiment Name: At_Siliques_P Parameter: Organism Value: A. thaliana
  misc_feature: MA Experiment 20000235 PARAMETER Experiment Name: At_Siliques_P Parameter: Plant Line Value: WS
  misc_feature: MA Experiment 20000235 PARAMETER Experiment Name: At_Siliques_P Parameter: Tissue Value: 5-10mm Siliques vs. Whole Plant
  misc_feature: MA Experiment ID: 20000264 Result: Down-regulated in Transcription
  misc_feature: MA Experiment 20000264 PARAMETER Experiment Name: At_Open_Flower_P Parameter: Age (day) Value: 21
  misc_feature: MA Experiment 20000264 PARAMETER Experiment Name: At_Open_Flower_P Parameter: Plant Line Value: WS
  misc_feature: MA Experiment 20000264 PARAMETER Experiment Name: At_Open_Flower_P Parameter: Tissue Value: Open Flower vs. Whole Plant
  misc_feature: MA Experiment ID: 20000265 Result: Down-regulated in Transcription
  misc_feature: MA Experiment 20000265 PARAMETER Experiment Name: At_Open_Flower_P Parameter: Age (day) Value: 21
  misc_feature: MA Experiment 20000265 PARAMETER Experiment Name: At_Open_Flower_P Parameter: Plant Line Value: WS
  misc_feature: MA Experiment 20000265 PARAMETER Experiment Name: At_Open_Flower_P Parameter: Tissue Value: Closed Flower vs. Whole Plant
  misc_feature: MA Experiment ID: 20000286 Result: Down-regulated in Transcription
  misc_feature: MA Experiment 20000286 PARAMETER Experiment Name: At_Open_Flower_P Parameter: Age (day) Value: 21
  misc_feature: MA Experiment 20000286 PARAMETER Experiment Name: At_Open_Flower_P Parameter: Plant Line Value: WS
  misc_feature: MA Experiment 20000286 PARAMETER Experiment Name: At_Open_Flower_P Parameter: Tissue Value: Half Open vs. Whole Plant
  misc_feature: MA Experiment ID: 20000438 Result: Down-regulated in Transcription
  misc_feature: MA Experiment 20000438 PARAMETER Experiment Name: At_Shoots__P Parameter: Age (day) Value: 14
  misc_feature: MA Experiment 20000438 PARAMETER Experiment Name: At_Shoots__P Parameter: Tissue Value: Shoots vs. Whole Plant
  misc_feature: MA Experiment ID: 20000439 Result: Down-regulated in Transcription
  misc_feature: MA Experiment 20000439 PARAMETER Experiment Name: At_Roots__P Parameter: Age (day) Value: 14 vs. 21
  misc_feature: MA Experiment 20000439 PARAMETER Experiment Name: At_Roots__P Parameter: Organism Value: A. thaliana
  misc_feature: MA Experiment 20000439 PARAMETER Experiment Name: At_Roots__P Parameter: Tissue Value: Roots vs. Whole Plant
  misc_feature: MA Experiment ID: 20000453 Result: Down-regulated in Transcription
  misc_feature: MA Experiment 20000453 PARAMETER Experiment Name: At_100uM_ABA_P Parameter: Age (day) Value: 15
  misc_feature: MA Experiment 20000453 PARAMETER Experiment Name: At_100uM_ABA_P Parameter: Organism Value: A. thaliana
  misc_feature: MA Experiment 20000453 PARAMETER Experiment Name: At_100uM_ABA_P Parameter: Plant Line Value: WS
  misc_feature: MA Experiment 20000453 PARAMETER Experiment Name: At_100uM_ABA_P Parameter: Timepoint (hr) Value: 24
  misc_feature: MA Experiment 20000453 PARAMETER Experiment Name: At_100uM_ABA_P Parameter: Tissue Value: Aerial
  misc_feature: MA Experiment 20000453 PARAMETER Experiment Name: At_100uM_ABA_P Parameter: Treatment Value: 100uM ABA vs. No Treatment
  misc_feature: MA Experiment ID: 20000456 Result: Up-regulated in Transcription
  misc_feature: MA Experiment 20000456 PARAMETER Experiment Name: At_100uM_BA_P Parameter: Age (day) Value: 14
  misc_feature: MA Experiment 20000456 PARAMETER Experiment Name: At_100uM_BA_P Parameter: Organism Value: A. thaliana
  misc_feature: MA Experiment 20000456 PARAMETER Experiment Name: At_100uM_BA_P Parameter: Plant Line Value: WS
  misc_feature: MA Experiment 20000456 PARAMETER Experiment Name: At_100uM_BA_P Parameter: Timepoint (hr) Value: 6
  misc_feature: MA Experiment 20000456 PARAMETER Experiment Name: At_100uM_BA_P Parameter: Tissue Value: Aerial
  misc_feature: MA Experiment 20000456 PARAMETER Experiment Name: At_100uM_BA_P Parameter: Treatment Value: 100uM BA vs. No Treatment
  misc_feature: MA Experiment ID: 20000527 Result: Down-regulated in Transcription
  misc_feature: MA Experiment 20000527 PARAMETER Experiment Name: At_10percent_PEG_P Parameter: Age (day) Value: 20
  misc_feature: MA Experiment 20000527 PARAMETER Experiment Name: At_10percent_PEG_P Parameter: Organism Value: A. thaliana
  misc_feature: MA Experiment 20000527 PARAMETER Experiment Name: At_10percent_PEG_P Parameter: Plant Line Value: WS
  misc_feature: MA Experiment 20000527 PARAMETER Experiment Name: At_10percent_PEG_P Parameter: Timepoint (day) Value: 20
  misc_feature: MA Experiment 20000527 PARAMETER Experiment Name: At_10percent_PEG_P Parameter: Tissue Value: Whole Plant
  misc_feature: MA Experiment 20000527 PARAMETER Experiment Name: At_10percent_PEG_P Parameter: Treatment Value: 10percent PEG vs. No Treatment
  misc_feature: MA Experiment ID: 20000606 Result: Up-regulated in Transcription
  misc_feature: MA Experiment 20000606 PARAMETER Experiment Name: At_CS8548_Mutant_P Parameter: Age (day) Value: 14
  misc_feature: MA Experiment 20000606 PARAMETER Experiment Name: At_CS8548_Mutant_P Parameter: Plant Line Value: CS8548 vs. wt
  misc_feature: MA Experiment 20000606 PARAMETER Experiment Name: At_CS8548_Mutant_P Parameter: Tissue Value: Whole Plant
  misc_feature: MA Experiment ID: 20000709 Result: Down-regulated in Transcription
  misc_feature: MA Experiment 20000709 PARAMETER Experiment Name: At_15mM_NH4NO3_L-to-H_P Parameter: Age (hr) Value: 14
  misc_feature: MA Experiment 20000709 PARAMETER Experiment Name: At_15mM_NH4NO3_L-to-H_P Parameter: Organism Value: A. thaliana
  misc_feature: MA Experiment 20000709 PARAMETER Experiment Name: At_15mM_NH4NO3_L-to-H_P Parameter: Plant Line Value: WS
  misc_feature: MA Experiment 20000709 PARAMETER Experiment Name: At_15mM_NH4NO3_L-to-H_P Parameter: Timepoint (hr) Value: 4
  misc_feature: MA Experiment 20000709 PARAMETER Experiment Name: At_15mM_NH4NO3_L-to-H_P Parameter: Tissue Value: Aerial
  misc_feature: MA Experiment 20000709 PARAMETER Experiment Name: At_15mM_NH4NO3_L-to-H_P Parameter: Treatment Value: 15mM NH4NO3 vs. 30mM Mannitol
  misc_feature: MA Experiment ID: 20000794 Result: Down-regulated in Transcription
  misc_feature: MA Experiment 20000794 PARAMETER Experiment Name: At_Petals_P Parameter: Age (day) Value: 23-25 days
  misc_feature: MA Experiment 20000794 PARAMETER Experiment Name: At_Petals_P Parameter: Plant Line Value: WS
  misc_feature: MA Experiment 20000794 PARAMETER Experiment Name: At_Petals_P Parameter: Tissue Value: Petals vs. Whole plant
  misc_feature: MA Experiment ID: 20001555 Result: Down-regulated in Transcription
  misc_feature: MA Experiment 20001555 PARAMETER Experiment Name: At_Drought_Soil_Dry_P Parameter: Age (day) Value: 24
  misc_feature: MA Experiment 20001555 PARAMETER Experiment Name: At_Drought_Soil_Dry_P Parameter: Organism Value: A. thaliana
  misc_feature: MA Experiment 20001555 PARAMETER Experiment Name: At_Drought_Soil_Dry_P Parameter: Plant Line Value: WS
  misc_feature: MA Experiment 20001555 PARAMETER Experiment Name: At_Drought_Soil_Dry_P Parameter: Post Timepoint (hr) Value: None
  misc_feature: MA Experiment 20001555 PARAMETER Experiment Name: At_Drought_Soil_Dry_P Parameter: Post-Treatment Value: None
  misc_feature: MA Experiment 20001555 PARAMETER Experiment Name: At_Drought_Soil_Dry_P Parameter: Timepoint (day) Value: 10
  misc_feature: MA Experiment 20001555 PARAMETER Experiment Name: At_Drought_Soil_Dry_P Parameter: Treatment Value: Drought vs. No Drought
  misc_feature: MA Experiment ID: 20001556 Result: Down-regulated in Transcription
  misc_feature: MA Experiment 20001556 PARAMETER Experiment Name: At_Drought_Soil_Dry_P Parameter: Age (day) Value: 26
  misc_feature: MA Experiment 20001556 PARAMETER Experiment Name: At_Drought_Soil_Dry_P Parameter: Organism Value: A. thaliana
  misc_feature: MA Experiment 20001556 PARAMETER Experiment Name: At_Drought_Soil_Dry_P Parameter: Plant Line Value: WS
  misc_feature: MA Experiment 20001556 PARAMETER Experiment Name: At_Drought_Soil_Dry_P Parameter: Post Timepoint (hr) Value: None
  misc_feature: MA Experiment 20001556 PARAMETER Experiment Name: At_Drought_Soil_Dry_P Parameter: Post-Treatment Value: None
  misc_feature: MA Experiment 20001556 PARAMETER Experiment Name: At_Drought_Soil_Dry_P Parameter: Timepoint (day) Value: 12
  misc_feature: MA Experiment 20001556 PARAMETER Experiment Name: At_Drought_Soil_Dry_P Parameter: Treatment Value: Drought vs. No Drought
  misc_feature: MA Experiment ID: 20001560 Result: Down-regulated in Transcription
  misc_feature: MA Experiment 20001560 PARAMETER Experiment Name: At_Drought_Soil_Dry_P Parameter: Age (day) Value: 28
  misc_feature: MA Experiment 20001560 PARAMETER Experiment Name: At_Drought_Soil_Dry_P Parameter: Organism Value: A. thaliana
  misc_feature: MA Experiment 20001560 PARAMETER Experiment Name: At_Drought_Soil_Dry_P Parameter: Plant Line Value: WS
  misc_feature: MA Experiment 20001560 PARAMETER Experiment Name: At_Drought_Soil_Dry_P Parameter: Post Timepoint (hr) Value: None
  misc_feature: MA Experiment 20001560 PARAMETER Experiment Name: At_Drought_Soil_Dry_P Parameter: Post-Treatment Value: None
  misc_feature: MA Experiment 20001560 PARAMETER Experiment Name: At_Drought_Soil_Dry_P Parameter: Timepoint (day) Value: 14
  misc_feature: MA Experiment 20001560 PARAMETER Experiment Name: At_Drought_Soil_Dry_P Parameter: Treatment Value: Drought vs. No Drought
  misc_feature: MA Experiment ID: 20001904 Result: Down-regulated in Transcription
  misc_feature: MA Experiment 20001904 PARAMETER Experiment Name: At_Drought_Reproduction_P Parameter: Age (day) Value: 37
  misc_feature: MA Experiment 20001904 PARAMETER Experiment Name: At_Drought_Reproduction_P Parameter: Organism Value: A. thaliana
  misc_feature: MA Experiment 20001904 PARAMETER Experiment Name: At_Drought_Reproduction_P Parameter: Plant Line Value: WS
  misc_feature: MA Experiment 20001904 PARAMETER Experiment Name: At_Drought_Reproduction_P Parameter: Timepoint (day) Value: 7
  misc_feature: MA Experiment 20001904 PARAMETER Experiment Name: At_Drought_Reproduction_P Parameter: Tissue Value: Rosettes
  misc_feature: MA Experiment 20001904 PARAMETER Experiment Name: At_Drought_Reproduction_P Parameter: Treatment Value: Drought vs. No Drought
  misc_feature: MA Experiment ID: 20001905 Result: Down-regulated in Transcription
  misc_feature: MA Experiment 20001905 PARAMETER Experiment Name: At_Drought_Reproduction_P Parameter: Age (day) Value: 40
  misc_feature: MA Experiment 20001905 PARAMETER Experiment Name: At_Drought_Reproduction_P Parameter: Organism Value: A. thaliana
  misc_feature: MA Experiment 20001905 PARAMETER Experiment Name: At_Drought_Reproduction_P Parameter: Plant Line Value: WS
  misc_feature: MA Experiment 20001905 PARAMETER Experiment Name: At_Drought_Reproduction_P Parameter: Timepoint (day) Value: 10
  misc_feature: MA Experiment 20001905 PARAMETER Experiment Name: At_Drought_Reproduction_P Parameter: Tissue Value: Rosettes
  misc_feature: MA Experiment 20001905 PARAMETER Experiment Name: At_Drought_Reproduction_P Parameter: Treatment Value: Drought vs. No Drought

SEQ ID NO: 95025 - protein, 347 aa, Arabidopsis thaliana; identical to SEQ ID NO: 76001
  peptide (1)..(347): Ceres Seq. ID no. 12727065
  misc_feature (1)..(347): Homolog of NCBI NO: 15237589 NR Description: 3(2),5-bisphosphate nucleotidase protein id: At5g64000.1, supported by cDNA: gi_20466006
  misc_feature (1)..(345): Homolog of NCBI NO: 34395640 NR Description: Probable SAL4 phosphatase (3'(2'),5'-bisphosphate
  misc_feature (1)..(345): Homolog of NCBI NO: 15242383 NR Description: 3'(2'),5'-bisphosphate nucleotidase-like protein;
  misc_feature (1)..(343): Homolog of NCBI NO: 18424775 NR Description: 3(2),5-bisphosphate nucleotidase; protein id: supported by cDNA: 98980. [Arabidopsis thaliana]
  misc_feature (1)..(343): Homolog of NCBI NO: 21618152 NR Description: 3(2),5-bisphosphate nucleotidase [Arabidopsis
  misc_feature (1)..(343): Homolog of NCBI NO: 15237567 NR Description: 3(2),5-bisphosphate nucleotidase; protein id:
  misc_feature (1)..(343): Homolog of NCBI NO: 8777312 NR Description: 3'(2'),5'-bisphosphate nucleotidase [Arabidopsis
  misc_feature (3)..(344): Homolog of NCBI NO: 14268820 NR Description: diphosphonucleotide phosphatase 1 [Zea mays]
  misc_feature (3)..(344): Homolog of NCBI NO: 3913517 NR Description: 3'(2'),5'-BISPHOSPHATE NUCLEOTIDASE (3'(2'),5-
  misc_feature (3)..(172): Homolog of NCBI NO: 15451579 NR Description: Putative PAP-specific phosphatase [Oryza sativa]

SEQ ID NO: 95026 - protein, 183 aa, Arabidopsis thaliana; identical to SEQ ID NO: 76002
  peptide (1)..(183): Ceres Seq. ID no. 12727066
  misc_feature (1)..(183): Homolog of NCBI NO: 15237589 NR Description: 3(2),5-bisphosphate nucleotidase protein id: At5g64000.1, supported by cDNA: gi_20466006
  misc_feature (1)..(181): Homolog of NCBI NO: 34395640 NR Description: Probable SAL4 phosphatase (3'(2'),5'-bisphosphate
  misc_feature (1)..(181): Homolog of NCBI NO: 15242383 NR Description: 3'(2'),5'-bisphosphate nucleotidase-like protein;
  misc_feature (1)..(179): Homolog of NCBI NO: 18424775 NR Description: 3(2),5-bisphosphate nucleotidase; protein id: supported by cDNA: 98980. [Arabidopsis thaliana]
  misc_feature (1)..(179): Homolog of NCBI NO: 21618152 NR Description: 3(2),5-bisphosphate nucleotidase [Arabidopsis
  misc_feature (1)..(179): Homolog of NCBI NO: 15237567 NR Description: 3(2),5-bisphosphate nucleotidase; protein id:
  misc_feature (1)..(179): Homolog of NCBI NO: 8777312 NR Description: 3'(2'),5'-bisphosphate nucleotidase [Arabidopsis
  misc_feature (1)..(180): Homolog of NCBI NO: 14268820 NR Description: diphosphonucleotide phosphatase 1 [Zea mays]
  misc_feature (1)..(180): Homolog of NCBI NO: 3913517 NR Description: 3'(2'),5'-BISPHOSPHATE NUCLEOTIDASE (3'(2'),5-
  misc_feature (24)..(164): Homolog of NCBI NO: 15451579 NR Description: Putative PAP-specific phosphatase [Oryza sativa]

SEQ ID NO: 95027 - DNA, 912 bp, Arabidopsis thaliana; identical to SEQ ID NO: 91271
  misc_feature (1)..(912): Ceres Seq. ID no. 12727087
  misc_feature: MA Experiment ID: 108573 Result: Up-regulated in Transcription
  misc_feature: MA Experiment 108573 PARAMETER Experiment Name: At_Drought_cDNA_P Parameter: Timepoint (hr) Value: 6
  misc_feature: MA Experiment 108573 PARAMETER Experiment Name: At_Drought_cDNA_P Parameter: Tissue Value: Aerial
  misc_feature: MA Experiment 108573 PARAMETER Experiment Name: At_Drought_cDNA_P Parameter: Treatment Value: Drought vs. No Drought
  misc_feature: MA Experiment ID: 108577 Result: Up-regulated in Transcription
  misc_feature: MA Experiment 108577 PARAMETER Experiment Name: At_42deg_Heat_cDNA_P Parameter: Temperature (deg C) Value: 42 vs. 22
  misc_feature: MA Experiment 108577 PARAMETER Experiment Name: At_42deg_Heat_cDNA_P Parameter: Timepoint (hr) Value: 6
  misc_feature: MA Experiment 108577 PARAMETER Experiment Name: At_42deg_Heat_cDNA_P Parameter: Tissue Value: Aerial
  misc_feature: MA Experiment ID: 108585 Result: Up-regulated in Transcription
  misc_feature: MA Experiment 108585 PARAMETER Experiment Name: At_5mM_NaNP_cDNA_P Parameter: Timepoint (hr) Value: 6
  misc_feature: MA Experiment 108585 PARAMETER Experiment Name: At_5mM_NaNP_cDNA_P Parameter: Tissue Value: Aerial
  misc_feature: MA Experiment 108585 PARAMETER Experiment Name: At_5mM_NaNP_cDNA_P Parameter: Treatment Value: null

SEQ ID NO: 95028 - protein, 303 aa, Arabidopsis thaliana; identical to SEQ ID NO: 35347
  peptide (1)..(303): Ceres Seq. ID no. 12727088
  misc_feature (18)..(89): Pfam Name: RNA recognition motif. (a.k.a. RRM, RBD, or RNP domain) Pfam Description: RNA recognition motif. (a.k.a. RRM, RBD, or RNP
  misc_feature (1)..(303): Homolog of NCBI NO: 15237641 NR Description: arginine/serine-rich splicing factor SC35; id: At5g64200.1, supported by cDNA: gi_17380867 [Arabidopsis >gi|17380868|gb|AAL36246.1| unknown protein [Arabidopsis
  misc_feature (1)..(303): Homolog of NCBI NO: 9843653 NR Description: splicing factor SC35 [Arabidopsis thaliana]
  misc_feature (1)..(280): Homolog of NCBI NO: 33146621 NR Description: putative splicing factor, arginine/serine-rich 2
  misc_feature (1)..(288): Homolog of NCBI NO: 7446336 NR Description: probable arginine/serine-rich splicing factor -
  misc_feature (4)..(216): Homolog of NCBI NO: 28279759 NR Description: Similar to splicing factor, arginine/serine-rich
  misc_feature (4)..(234): Homolog of NCBI NO: 266991 NR Description: Splicing factor, arginine/serine-rich 2 (Splicing
  misc_feature (4)..(234): Homolog of NCBI NO: 6755478 NR Description: splicing factor, arginine/serine-rich 2; DNA Chr 11, Wayne State University 175, expressed; splicing factor [Mus musculus] >gi|27691222|ref|XP_213556.1| similar to
  misc_feature (4)..(234): Homolog of NCBI NO: 4506899 NR Description: splicing factor, arginine/serine-rich 2 [Homo
  misc_feature (5)..(279): Homolog of NCBI NO: 15055543 NR Description: 46kD arginine/serine-rich splicing factor [Homo
  misc_feature (4)..(221): Homolog of NCBI NO: 39794351 NR Description: Unknown (protein for MGC:75633) [Silurana

SEQ ID NO: 95029 - DNA, 2517 bp, Arabidopsis thaliana; identical to SEQ ID NO: 91273
  misc_feature (1)..(2517): Ceres Seq. ID no. 12727108
  misc_feature: MA Experiment ID: 20000180 Result: Up-regulated in Transcription
  misc_feature: MA Experiment 20000180 PARAMETER Experiment Name: At_Germinating_Seeds_P Parameter: Age (hr) Value: 24 vs. 0
  misc_feature: MA Experiment 20000180 PARAMETER Experiment Name: At_Germinating_Seeds_P Parameter: Tissue Value: Germinating Seeds
  misc_feature: MA Experiment ID: 20000182 Result: Down-regulated in Transcription
  misc_feature: MA Experiment 20000182 PARAMETER Experiment Name: At_2mM_SA_P Parameter: Age (day) Value: 14
  misc_feature: MA Experiment 20000182 PARAMETER Experiment Name: At_2mM_SA_P Parameter: Organism Value: A. thaliana
  misc_feature: MA Experiment 20000182 PARAMETER Experiment Name: At_2mM_SA_P Parameter: Plant Line Value: WS
  misc_feature: MA Experiment 20000182 PARAMETER Experiment Name: At_2mM_SA_P Parameter: Timepoint (hr) Value: 6
  misc_feature: MA Experiment 20000182 PARAMETER Experiment Name: At_2mM_SA_P Parameter: Tissue Value: Aerial
  misc_feature: MA Experiment 20000182 PARAMETER Experiment Name: At_2mM_SA_P Parameter: Treatment Value: 2mM SA vs. No Treatment
  misc_feature: MA Experiment ID: 20000227 Result: Up-regulated in Transcription
  misc_feature: MA Experiment 20000227 PARAMETER Experiment Name: At_Root-Tips-vs-Tops_P Parameter: Tissue Value: Root Tips vs. Root Tops
  misc_feature: MA Experiment ID: 20000264 Result: Up-regulated in Transcription
  misc_feature: MA Experiment 20000264 PARAMETER Experiment Name: At_Open_Flower_P Parameter: Age (day) Value: 21
  misc_feature: MA Experiment 20000264 PARAMETER Experiment Name: At_Open_Flower_P Parameter: Plant Line Value: WS
  misc_feature: MA Experiment 20000264 PARAMETER Experiment Name: At_Open_Flower_P Parameter: Tissue Value: Open Flower vs. Whole Plant
  misc_feature: MA Experiment ID: 20000286 Result: Up-regulated in Transcription
  misc_feature: MA Experiment 20000286 PARAMETER Experiment Name: At_Open_Flower_P Parameter: Age (day) Value: 21
  misc_feature: MA Experiment 20000286 PARAMETER Experiment Name: At_Open_Flower_P Parameter: Plant Line Value: WS
  misc_feature: MA Experiment 20000286 PARAMETER Experiment Name: At_Open_Flower_P Parameter: Tissue Value: Half Open vs. Whole Plant
  misc_feature: MA Experiment ID: 20000437 Result: Down-regulated in Transcription
  misc_feature: MA Experiment 20000437 PARAMETER Experiment Name: At_Drought_P Parameter: Age (day) Value: 8
  misc_feature: MA Experiment 20000437 PARAMETER Experiment Name: At_Drought_P Parameter: Organism Value: A. thaliana
  misc_feature: MA Experiment 20000437 PARAMETER Experiment Name: At_Drought_P Parameter: Plant Line Value: WS
  misc_feature: MA Experiment 20000437 PARAMETER Experiment Name: At_Drought_P Parameter: Timepoint (hr) Value: 24
  misc_feature: MA Experiment 20000437 PARAMETER Experiment Name: At_Drought_P Parameter: Tissue Value: Whole Plant
  misc_feature: MA Experiment 20000437 PARAMETER Experiment Name: At_Drought_P Parameter: Treatment Value: Drought vs. No Drought
  misc_feature: MA Experiment ID: 20000438 Result: Up-regulated in Transcription
  misc_feature: MA Experiment 20000438 PARAMETER Experiment Name: At_Shoots__P Parameter: Age (day) Value: 14
  misc_feature: MA Experiment 20000438 PARAMETER Experiment Name: At_Shoots__P Parameter: Tissue Value: Shoots vs. Whole Plant
  misc_feature: MA Experiment ID: 20000794 Result: Up-regulated in Transcription
  misc_feature: MA Experiment 20000794 PARAMETER Experiment Name: At_Petals_P Parameter: Age (day) Value: 23-25 days
  misc_feature: MA Experiment 20000794 PARAMETER Experiment Name: At_Petals_P Parameter: Plant Line Value: WS
  misc_feature: MA Experiment 20000794 PARAMETER Experiment Name: At_Petals_P Parameter: Tissue Value: Petals vs. Whole plant
  misc_feature: MA Experiment ID: 20001451 Result: Up-regulated in Transcription
  misc_feature: MA Experiment 20001451 PARAMETER Experiment Name: At_Far-red-induction_P Parameter: Age (day) Value: 7
  misc_feature: MA Experiment 20001451 PARAMETER Experiment Name: At_Far-red-induction_P Parameter: Light Value: Far-red vs. White
  misc_feature: MA Experiment 20001451 PARAMETER Experiment Name: At_Far-red-induction_P Parameter: Organism Value: A. thaliana
  misc_feature: MA Experiment 20001451 PARAMETER Experiment Name: At_Far-red-induction_P Parameter: Plant Line Value: Columbia
  misc_feature: MA Experiment 20001451 PARAMETER Experiment Name: At_Far-red-induction_P Parameter: Timepoint (hr) Value: 24
  misc_feature: MA Experiment 20001451 PARAMETER Experiment Name: At_Far-red-induction_P Parameter: Tissue Value: Whole Plant
  misc_feature: MA Experiment ID: 20001904 Result: Down-regulated in Transcription
  misc_feature: MA Experiment 20001904 PARAMETER Experiment Name: At_Drought_Reproduction_P Parameter: Age (day) Value: 37
  misc_feature: MA Experiment 20001904 PARAMETER Experiment Name: At_Drought_Reproduction_P Parameter: Organism Value: A. thaliana
  misc_feature: MA Experiment 20001904 PARAMETER Experiment Name: At_Drought_Reproduction_P Parameter: Plant Line Value: WS
  misc_feature: MA Experiment 20001904 PARAMETER Experiment Name: At_Drought_Reproduction_P Parameter: Timepoint (day) Value: 7
  misc_feature: MA Experiment 20001904 PARAMETER Experiment Name: At_Drought_Reproduction_P Parameter: Tissue Value: Rosettes
  misc_feature: MA Experiment 20001904 PARAMETER Experiment Name: At_Drought_Reproduction_P Parameter: Treatment Value: Drought vs. No Drought
  misc_feature: MA Experiment ID: 20001905 Result: Down-regulated in Transcription
  misc_feature: MA Experiment 20001905 PARAMETER Experiment Name: At_Drought_Reproduction_P Parameter: Age (day) Value: 40
  misc_feature: MA Experiment 20001905 PARAMETER Experiment Name: At_Drought_Reproduction_P Parameter: Organism Value: A. thaliana
  misc_feature: MA Experiment 20001905 PARAMETER Experiment Name: At_Drought_Reproduction_P Parameter: Plant Line Value: WS
  misc_feature: MA Experiment 20001905 PARAMETER Experiment Name: At_Drought_Reproduction_P Parameter: Timepoint (day) Value: 10
  misc_feature: MA Experiment 20001905 PARAMETER Experiment Name: At_Drought_Reproduction_P Parameter: Tissue Value: Rosettes
  misc_feature: MA Experiment 20001905 PARAMETER Experiment Name: At_Drought_Reproduction_P Parameter: Treatment Value: Drought vs. No Drought

SEQ ID NO: 95030 - protein, 746 aa, Arabidopsis thaliana; identical to SEQ ID NO: 91274
  peptide (1)..(746): Ceres Seq. ID no. 12727109
  misc_feature (249)..(581): Pfam Name: NPH3 family Pfam Description: NPH3 family
  misc_feature (364)..(726): Homolog of NCBI NO: 15220750 NR Description: non-phototropic hypocotyl, putative; protein id:
  misc_feature (364)..(726): Homolog of NCBI NO: 25336228 NR Description: F26G16.2 protein - Arabidopsis thaliana Contains a bZIP transcription factor PF|00170 domain. ESTs gb|AA650964, gb|AI994521 come from this gene. [Arabidopsis
  misc_feature (33)..(322): Homolog of NCBI NO: 15220750 NR Description: non-phototropic hypocotyl, putative; protein id:
  misc_feature (33)..(322): Homolog of NCBI NO: 25336228 NR Description: F26G16.2 protein - Arabidopsis thaliana Contains a bZIP transcription factor PF|00170 domain. ESTs gb|AA650964, gb|AI994521 come from this gene. [Arabidopsis
  misc_feature (369)..(697): Homolog of NCBI NO: 18481720 NR Description: hypothetical protein [Sorghum bicolor]
  misc_feature (33)..(310): Homolog of NCBI NO: 18481720 NR Description: hypothetical protein [Sorghum bicolor]
  misc_feature (502)..(720): Homolog of NCBI NO: 15238110 NR Description: non-phototropic hypocotyl 3-like protein; protein
  misc_feature (37)..(199): Homolog of NCBI NO: 15238110 NR Description: non-phototropic hypocotyl 3-like protein; protein
  misc_feature (371)..(464): Homolog of NCBI NO: 15238110 NR Description: non-phototropic hypocotyl 3-like protein; protein
  misc_feature (253)..(337): Homolog of NCBI NO: 15238110 NR Description: non-phototropic hypocotyl 3-like protein; protein

SEQ ID NO: 95031 - protein, 745 aa, Arabidopsis thaliana; identical to SEQ ID NO: 91275
  peptide (1)..(745): Ceres Seq. ID no. 12727110
  misc_feature (248)..(580): Pfam Name: NPH3 family Pfam Description: NPH3 family
  misc_feature (363)..(725): Homolog of NCBI NO: 15220750 NR Description: non-phototropic hypocotyl, putative; protein id:
  misc_feature (363)..(725): Homolog of NCBI NO: 25336228 NR Description: F26G16.2 protein - Arabidopsis thaliana Contains a bZIP transcription factor PF|00170 domain. ESTs gb|AA650964, gb|AI994521 come from this gene. [Arabidopsis
  misc_feature (32)..(321): Homolog of NCBI NO: 15220750 NR Description: non-phototropic hypocotyl, putative; protein id:
  misc_feature (32)..(321): Homolog of NCBI NO: 25336228 NR Description: F26G16.2 protein - Arabidopsis thaliana Contains a bZIP transcription factor PF|00170 domain. ESTs gb|AA650964, gb|AI994521 come from this gene. [Arabidopsis
  misc_feature (368)..(696): Homolog of NCBI NO: 18481720 NR Description: hypothetical protein [Sorghum bicolor]
  misc_feature (32)..(309): Homolog of NCBI NO: 18481720 NR Description: hypothetical protein [Sorghum bicolor]
  misc_feature (501)..(719): Homolog of NCBI NO: 15238110 NR Description: non-phototropic hypocotyl 3-like protein; protein
  misc_feature (36)..(198): Homolog of NCBI NO: 15238110 NR Description: non-phototropic hypocotyl 3-like protein; protein
  misc_feature (370)..(463): Homolog of NCBI NO: 15238110 NR Description: non-phototropic hypocotyl 3-like protein; protein
  misc_feature (252)..(336): Homolog of NCBI NO: 15238110 NR Description: non-phototropic hypocotyl 3-like protein; protein

SEQ ID NO: 95032 - protein, 684 aa, Arabidopsis thaliana; identical to SEQ ID NO: 91276
  peptide (1)..(684): Ceres Seq. ID no. 12727111
  misc_feature (187)..(519): Pfam Name: NPH3 family Pfam Description: NPH3 family
  misc_feature (302)..(664): Homolog of NCBI NO: 15220750 NR Description: non-phototropic hypocotyl, putative; protein id:
  misc_feature (302)..(664): Homolog of NCBI NO: 25336228 NR Description: F26G16.2 protein - Arabidopsis thaliana Contains a bZIP transcription factor PF|00170 domain. ESTs gb|AA650964, gb|AI994521 come from this gene. [Arabidopsis
  misc_feature (1)..(260): Homolog of NCBI NO: 15220750 NR Description: non-phototropic hypocotyl, putative; protein id:
  misc_feature (1)..(260): Homolog of NCBI NO: 25336228 NR Description: F26G16.2 protein - Arabidopsis thaliana Contains a bZIP transcription factor PF|00170 domain. ESTs gb|AA650964, gb|AI994521 come from this gene. [Arabidopsis
  misc_feature (307)..(635): Homolog of NCBI NO: 18481720 NR Description: hypothetical protein [Sorghum bicolor]
  misc_feature (1)..(248): Homolog of NCBI NO: 18481720 NR Description: hypothetical protein [Sorghum bicolor]
  misc_feature (440)..(658): Homolog of NCBI NO: 15238110 NR Description: non-phototropic hypocotyl 3-like protein; protein
  misc_feature (1)..(137): Homolog of NCBI NO: 15238110 NR Description: non-phototropic hypocotyl 3-like protein; protein
  misc_feature (309)..(402): Homolog of NCBI NO: 15238110 NR Description: non-phototropic hypocotyl 3-like protein; protein
  misc_feature (191)..(275): Homolog of NCBI NO: 15238110 NR Description: non-phototropic hypocotyl 3-like protein; protein

SEQ ID NO: 95033 - DNA, 1218 bp, Arabidopsis thaliana; identical to SEQ ID NO: 91277
  misc_feature (1)..(1218): Ceres Seq. ID no. 12727120
  misc_feature: MA Experiment ID: 20000180 Result: Up-regulated in Transcription
  misc_feature: MA Experiment 20000180 PARAMETER Experiment Name: At_Germinating_Seeds_P Parameter: Age (hr) Value: 24 vs. 0
  misc_feature: MA Experiment 20000180 PARAMETER Experiment Name: At_Germinating_Seeds_P Parameter: Tissue Value: Germinating Seeds
  misc_feature: MA Experiment ID: 20000182 Result: Up-regulated in Transcription
  misc_feature: MA Experiment 20000182 PARAMETER Experiment Name: At_2mM_SA_P Parameter: Age (day) Value: 14
  misc_feature: MA Experiment 20000182 PARAMETER Experiment Name: At_2mM_SA_P Parameter: Organism Value: A. thaliana
  misc_feature: MA Experiment 20000182 PARAMETER Experiment Name: At_2mM_SA_P Parameter: Plant Line Value: WS
  misc_feature: MA Experiment 20000182 PARAMETER Experiment Name: At_2mM_SA_P Parameter: Timepoint (hr) Value: 6
  misc_feature: MA Experiment 20000182 PARAMETER Experiment Name: At_2mM_SA_P Parameter: Tissue Value: Aerial
  misc_feature: MA Experiment 20000182 PARAMETER Experiment Name: At_2mM_SA_P Parameter: Treatment Value: 2mM SA vs. No Treatment
  misc_feature: MA Experiment ID: 20000185 Result: Up-regulated in Transcription
  misc_feature: MA Experiment 20000185 PARAMETER Experiment Name: At_Roots__P Parameter: Age (day) Value: 7 vs. 21
  misc_feature: MA Experiment 20000185 PARAMETER Experiment Name: At_Roots__P Parameter: Organism Value: A. thaliana
  misc_feature: MA Experiment 20000185 PARAMETER Experiment Name: At_Roots__P Parameter: Tissue Value: Roots vs. Whole Plant
  misc_feature: MA Experiment ID: 20000439 Result: Up-regulated in Transcription
  misc_feature: MA Experiment 20000439 PARAMETER Experiment Name: At_Roots__P Parameter: Age (day) Value: 14 vs. 21
  misc_feature: MA Experiment 20000439 PARAMETER Experiment Name: At_Roots__P Parameter: Organism Value: A. thaliana
  misc_feature: MA Experiment 20000439 PARAMETER Experiment Name: At_Roots__P Parameter: Tissue Value: Roots vs. Whole Plant
  misc_feature: MA Experiment ID: 20000794 Result: Up-regulated in Transcription
  misc_feature: MA Experiment 20000794 PARAMETER Experiment Name: At_Petals_P Parameter: Age (day) Value: 23-25 days
  misc_feature: MA Experiment 20000794 PARAMETER Experiment Name: At_Petals_P Parameter: Plant Line Value: WS
  misc_feature: MA Experiment 20000794 PARAMETER Experiment Name: At_Petals_P Parameter: Tissue Value: Petals vs. Whole plant
  misc_feature: MA Experiment ID: 20001557 Result: Down-regulated in Transcription
  misc_feature: MA Experiment 20001557 PARAMETER Experiment Name: At_Drought_Soil_Dry_P Parameter: Age (day) Value: 27
  misc_feature: MA Experiment 20001557 PARAMETER Experiment Name: At_Drought_Soil_Dry_P Parameter: Organism Value: A. thaliana
  misc_feature: MA Experiment 20001557 PARAMETER Experiment Name: At_Drought_Soil_Dry_P Parameter: Plant Line Value: WS
  misc_feature: MA Experiment 20001557 PARAMETER Experiment Name: At_Drought_Soil_Dry_P Parameter: Post Timepoint (hr) Value: 3
  misc_feature: MA Experiment 20001557 PARAMETER Experiment Name: At_Drought_Soil_Dry_P Parameter: Post-Treatment Value: Re-Water vs. No Drought
  misc_feature: MA Experiment 20001557 PARAMETER Experiment Name: At_Drought_Soil_Dry_P Parameter: Timepoint (day) Value: 13
  misc_feature: MA Experiment 20001557 PARAMETER Experiment Name: At_Drought_Soil_Dry_P Parameter: Treatment Value: Drought vs. No Drought
  misc_feature: MA Experiment ID: 20001558 Result: Down-regulated in Transcription
  misc_feature: MA Experiment 20001558 PARAMETER Experiment Name: At_Drought_Soil_Dry_P Parameter: Age (day) Value: 27
  misc_feature: MA Experiment 20001558 PARAMETER Experiment Name: At_Drought_Soil_Dry_P Parameter: Organism Value: A. thaliana
  misc_feature: MA Experiment 20001558 PARAMETER Experiment Name: At_Drought_Soil_Dry_P Parameter: Plant Line Value: WS
  misc_feature: MA Experiment 20001558 PARAMETER Experiment Name: At_Drought_Soil_Dry_P Parameter: Post Timepoint (hr) Value: 6
  misc_feature: MA Experiment 20001558 PARAMETER Experiment Name: At_Drought_Soil_Dry_P Parameter: Post-Treatment Value: Re-Water vs. No Drought
  misc_feature: MA Experiment 20001558 PARAMETER Experiment Name: At_Drought_Soil_Dry_P Parameter: Timepoint (day) Value: 13
  misc_feature: MA Experiment 20001558 PARAMETER Experiment Name: At_Drought_Soil_Dry_P Parameter: Treatment Value: Drought vs. No Drought
  misc_feature: MA Experiment ID: 20001560 Result: Down-regulated in Transcription
  misc_feature: MA Experiment 20001560 PARAMETER Experiment Name: At_Drought_Soil_Dry_P Parameter: Age (day) Value: 28
  misc_feature: MA Experiment 20001560 PARAMETER Experiment Name: At_Drought_Soil_Dry_P Parameter: Organism Value: A. thaliana
  misc_feature: MA Experiment 20001560 PARAMETER Experiment Name: At_Drought_Soil_Dry_P Parameter: Plant Line Value: WS
  misc_feature: MA Experiment 20001560 PARAMETER Experiment Name: At_Drought_Soil_Dry_P Parameter: Post Timepoint (hr) Value: None
  misc_feature: MA Experiment 20001560 PARAMETER Experiment Name: At_Drought_Soil_Dry_P Parameter: Post-Treatment Value: None
  misc_feature: MA Experiment 20001560 PARAMETER Experiment Name: At_Drought_Soil_Dry_P Parameter: Timepoint (day) Value: 14
  misc_feature: MA Experiment 20001560 PARAMETER Experiment Name: At_Drought_Soil_Dry_P Parameter: Treatment Value: Drought vs. No Drought

SEQ ID NO: 95034 - protein, 405 aa, Arabidopsis thaliana; identical to SEQ ID NO: 84734
  peptide (1)..(405): Ceres Seq. ID no. 12727121
  misc_feature (1)..(405): Homolog of NCBI NO: 30698009 NR Description: beta-ureidopropionase [Arabidopsis thaliana]
  misc_feature (4)..(404): Homolog of NCBI NO: 22775671 NR Description: contains ESTs
  misc_feature (17)..(398): Homolog of NCBI NO: 14334061 NR Description: beta-alanine synthase [Dictyostelium discoideum]
  misc_feature (19)..(397): Homolog of NCBI NO: 21358471 NR Description: CG3027-PA [Drosophila melanogaster]
  misc_feature (19)..(397): Homolog of NCBI NO: 40215848 NR Description: LD13390p [Drosophila melanogaster]
  misc_feature (17)..(397): Homolog of NCBI NO: 7706509 NR Description: beta-ureidopropionase [Homo sapiens]
  misc_feature (17)..(397): Homolog of NCBI NO: 6288790 NR Description: beta-ureidopropionase [Homo sapiens]
  misc_feature (17)..(400): Homolog of NCBI NO: 16758704 NR Description: ureidopropionase, beta [Rattus norvegicus]
  misc_feature (17)..(400): Homolog of NCBI NO: 19527212 NR Description: expressed sequence AI195023 [Mus musculus]
  misc_feature (18)..(394): Homolog of NCBI NO: 39597058 NR Description: Hypothetical protein CBG02618 [Caenorhabditis

SEQ ID NO: 95035 - protein, 325 aa, Arabidopsis thaliana; identical to SEQ ID NO: 84735
  peptide (1)..(325): Ceres Seq. ID no. 12727122
  misc_feature (1)..(325): Homolog of NCBI NO: 30698009 NR Description: beta-ureidopropionase [Arabidopsis thaliana]
  misc_feature (1)..(324): Homolog of NCBI NO: 22775671 NR Description: contains ESTs
  misc_feature (1)..(318): Homolog of NCBI NO: 14334061 NR Description: beta-alanine synthase [Dictyostelium discoideum]
  misc_feature (1)..(317): Homolog of NCBI NO: 21358471 NR Description: CG3027-PA [Drosophila melanogaster]
  misc_feature (1)..(317): Homolog of NCBI NO: 40215848 NR Description: LD13390p [Drosophila melanogaster]
  misc_feature (1)..(317): Homolog of NCBI NO: 7706509 NR Description: beta-ureidopropionase [Homo sapiens]
  misc_feature (1)..(317): Homolog of NCBI NO: 6288790 NR Description: beta-ureidopropionase [Homo sapiens]
  misc_feature (1)..(320): Homolog of NCBI NO: 16758704 NR Description: ureidopropionase, beta [Rattus norvegicus]
  misc_feature (1)..(320): Homolog of NCBI NO: 19527212 NR Description: expressed sequence AI195023 [Mus musculus]
  misc_feature (1)..(314): Homolog of NCBI NO: 39597058 NR Description: Hypothetical protein CBG02618 [Caenorhabditis

SEQ ID NO: 95036 - protein, 268 aa, Arabidopsis thaliana; identical to SEQ ID NO: 91280
  peptide (1)..(268): Ceres Seq. ID no. 12727123
  misc_feature (1)..(268): Homolog of NCBI NO: 30698009 NR Description: beta-ureidopropionase [Arabidopsis thaliana]
  misc_feature (1)..(267): Homolog of NCBI NO: 22775671 NR Description: contains ESTs
  misc_feature (1)..(261): Homolog of NCBI NO: 14334061 NR Description: beta-alanine synthase [Dictyostelium discoideum]
  misc_feature (1)..(260): Homolog of NCBI NO: 21358471 NR Description: CG3027-PA [Drosophila melanogaster]
  misc_feature (1)..(260): Homolog of NCBI NO: 40215848 NR Description: LD13390p [Drosophila melanogaster]
  misc_feature (1)..(260): Homolog of NCBI NO: 7706509 NR Description: beta-ureidopropionase [Homo sapiens]
  misc_feature (1)..(260): Homolog of NCBI NO: 6288790 NR Description: beta-ureidopropionase [Homo sapiens]
  misc_feature (1)..(263): Homolog of NCBI NO: 16758704 NR Description: ureidopropionase, beta [Rattus norvegicus]
  misc_feature (1)..(263): Homolog of NCBI NO: 19527212 NR Description: expressed sequence AI195023 [Mus musculus]
  misc_feature (1)..(257): Homolog of NCBI NO: 39597058 NR Description: Hypothetical protein CBG02618 [Caenorhabditis

SEQ ID NO: 95037 - DNA, 1792 bp, Arabidopsis thaliana; identical to SEQ ID NO: 91281
  misc_feature (1)..(1792): Ceres Seq. ID no. 12727144
  misc_feature: MA Experiment ID: 20000264 Result: Up-regulated in Transcription
  misc_feature: MA Experiment 20000264 PARAMETER Experiment Name: At_Open_Flower_P Parameter: Age (day) Value: 21
  misc_feature: MA Experiment 20000264 PARAMETER Experiment Name: At_Open_Flower_P Parameter: Plant Line Value: WS
  misc_feature: MA Experiment 20000264 PARAMETER Experiment Name: At_Open_Flower_P Parameter: Tissue Value: Open Flower vs. Whole Plant
  misc_feature: MA Experiment ID: 20000451 Result: Up-regulated in Transcription
  misc_feature: MA Experiment 20000451 PARAMETER Experiment Name: At_CS6879_Shoots-Roots_P Parameter: Age (day) Value: 14
  misc_feature: MA Experiment 20000451 PARAMETER Experiment Name: At_CS6879_Shoots-Roots_P Parameter: Organism Value: A. thaliana
  misc_feature: MA Experiment 20000451 PARAMETER Experiment Name: At_CS6879_Shoots-Roots_P Parameter: Plant Line Value: CS6879 vs. WS
  misc_feature: MA Experiment 20000451 PARAMETER Experiment Name: At_CS6879_Shoots-Roots_P Parameter: Tissue Value: Roots
  misc_feature: MA Experiment ID: 20000452 Result: Up-regulated in Transcription
  misc_feature: MA Experiment 20000452 PARAMETER Experiment Name: At_CS6879_Shoots-Roots_P Parameter: Age (day) Value: 14
  misc_feature: MA Experiment 20000452 PARAMETER Experiment Name: At_CS6879_Shoots-Roots_P Parameter: Organism Value: A. thaliana
  misc_feature: MA Experiment 20000452 PARAMETER Experiment Name: At_CS6879_Shoots-Roots_P Parameter: Plant Line Value: CS6879 vs. WS
  misc_feature: MA Experiment 20000452 PARAMETER Experiment Name: At_CS6879_Shoots-Roots_P Parameter: Tissue Value: Shoots
  misc_feature: MA Experiment ID: 20000573 Result: Up-regulated in Transcription
  misc_feature: MA Experiment 20000573 PARAMETER Experiment Name: At_100uM_ABA_Mutants__P Parameter: Organism Value: A. thaliana
  misc_feature: MA Experiment 20000573 PARAMETER Experiment Name: At_100uM_ABA_Mutants__P Parameter: Plant Line Value: CS22 vs. Ler wt
  misc_feature: MA Experiment 20000573 PARAMETER Experiment Name: At_100uM_ABA_Mutants__P Parameter: Timepoint (hr) Value: N/A
  misc_feature: MA Experiment 20000573 PARAMETER Experiment Name: At_100uM_ABA_Mutants__P Parameter: Tissue Value: Whole Plant
  misc_feature: MA Experiment 20000573 PARAMETER Experiment Name: At_100uM_ABA_Mutants__P Parameter: Treatment Value: None

SEQ ID NO: 95038 - protein, 419 aa, Arabidopsis thaliana; identical to SEQ ID NO: 91282
  peptide (1)..(419): Ceres Seq. ID no. 12727145
  misc_feature (23)..(419): Homolog of NCBI NO: 18424846 NR Description: FAS2 (dbj|BAA77766.1); protein id: At5g64630.1, by cDNA: gi_14030688, supported by cDNA: gi_18491112 [Arabidopsis >gi|14030689|gb|AAK53019.1|AF375435_1 AT5g64630/MUB3_15
  misc_feature (23)..(419): Homolog of NCBI NO: 4884488 NR Description: FAS2 [Arabidopsis thaliana]

SEQ ID NO: 95039 - protein, 397 aa, Arabidopsis thaliana; identical to SEQ ID NO: 91283
  peptide (1)..(397): Ceres Seq. ID no. 12727146
  misc_feature (1)..(397): Homolog of NCBI NO: 18424846 NR Description: FAS2 (dbj|BAA77766.1); protein id: At5g64630.1, by cDNA: gi_14030688, supported by cDNA: gi_18491112 [Arabidopsis >gi|14030689|gb|AAK53019.1|AF375435_1 AT5g64630/MUB3_15
  misc_feature (1)..(397): Homolog of NCBI NO: 4884488 NR Description: FAS2 [Arabidopsis thaliana]

SEQ ID NO: 95040 - DNA, 1955 bp, Arabidopsis thaliana; identical to SEQ ID NO: 91284
  misc_feature (1)..(1955): Ceres Seq. ID no. 12727147
  misc_feature: MA Experiment ID: 108434 Result: Down-regulated in Transcription
  misc_feature: MA Experiment 108434 PARAMETER Experiment Name: At_Root_Tips_cDNA_P Parameter: Tissue Value: Root Tips
  misc_feature: MA Experiment ID: 108576 Result: Down-regulated in Transcription
  misc_feature: MA Experiment 108576 PARAMETER Experiment Name: At_42deg_Heat_cDNA_P Parameter: Temperature (deg C) Value: 42 vs. 22
  misc_feature: MA Experiment 108576 PARAMETER Experiment Name: At_42deg_Heat_cDNA_P Parameter: Timepoint (hr) Value: 1
  misc_feature: MA Experiment 108576 PARAMETER Experiment Name: At_42deg_Heat_cDNA_P Parameter: Tissue Value: Aerial
  misc_feature: MA Experiment ID: 20000069 Result: Up-regulated in Transcription
  misc_feature: MA Experiment 20000069 PARAMETER Experiment Name: At_100uM_ABA_Mutants_cDNA_P Parameter: Plant Line Value: CS23
  misc_feature: MA Experiment 20000069 PARAMETER Experiment Name: At_100uM_ABA_Mutants_cDNA_P Parameter: Timepoint (hr) Value: 6
  misc_feature: MA Experiment 20000069 PARAMETER Experiment Name: At_100uM_ABA_Mutants_cDNA_P Parameter: Tissue Value: Aerial
  misc_feature: MA Experiment 20000069 PARAMETER Experiment Name: At_100uM_ABA_Mutants_cDNA_P Parameter: Treatment Value: 100uM ABA vs. No Treatment
  misc_feature: MA Experiment ID: 20000070 Result: Up-regulated in Transcription
  misc_feature: MA Experiment 20000070 PARAMETER Experiment Name: At_100uM_ABA_Mutants_cDNA_P Parameter: Plant Line Value: CS24
  misc_feature: MA Experiment 20000070 PARAMETER Experiment Name: At_100uM_ABA_Mutants_cDNA_P Parameter: Timepoint (hr) Value: 6
  misc_feature: MA Experiment 20000070 PARAMETER Experiment Name: At_100uM_ABA_Mutants_cDNA_P Parameter: Tissue Value: Aerial
  misc_feature: MA Experiment 20000070 PARAMETER Experiment Name: At_100uM_ABA_Mutants_cDNA_P Parameter: Treatment Value: 100uM ABA vs. No Treatment
  misc_feature: MA Experiment ID: 20000111 Result: Down-regulated in Transcription
  misc_feature: MA Experiment 20000111 PARAMETER Experiment Name: At_42deg_Heat_cDNA_P Parameter: Temperature (deg C) Value: 42 vs. 22
  misc_feature: MA Experiment 20000111 PARAMETER Experiment Name: At_42deg_Heat_cDNA_P Parameter: Timepoint (hr) Value: 6
  misc_feature: MA Experiment 20000111 PARAMETER Experiment Name: At_42deg_Heat_cDNA_P Parameter: Tissue Value: Aerial
  misc_feature: MA Experiment ID: 20000113 Result: Down-regulated in Transcription
  misc_feature: MA Experiment 20000113 PARAMETER Experiment Name: At_42deg_Heat_cDNA_P Parameter: Temperature (deg C) Value: 42 vs. 22
  misc_feature: MA Experiment 20000113 PARAMETER Experiment Name: At_42deg_Heat_cDNA_P Parameter: Timepoint (hr) Value: 8
  misc_feature: MA Experiment 20000113 PARAMETER Experiment Name: At_42deg_Heat_cDNA_P Parameter: Tissue Value: Aerial
  misc_feature: MA Experiment ID: 20000234 Result: Up-regulated in Transcription
  misc_feature: MA Experiment 20000234 PARAMETER Experiment Name: At_Siliques_P Parameter: Age (day) Value: 21
  misc_feature: MA Experiment 20000234 PARAMETER Experiment Name: At_Siliques_P Parameter: Organism Value: A. thaliana
  misc_feature: MA Experiment 20000234 PARAMETER Experiment Name: At_Siliques_P Parameter: Plant Line Value: WS
  misc_feature: MA Experiment 20000234 PARAMETER Experiment Name: At_Siliques_P Parameter: Tissue Value: Less Than 5mm Siliques vs. Whole Plant
  misc_feature: MA Experiment ID: 20000264 Result: Up-regulated in Transcription
  misc_feature: MA Experiment 20000264 PARAMETER Experiment Name: At_Open_Flower_P Parameter: Age (day) Value: 21
  misc_feature: MA Experiment 20000264 PARAMETER Experiment Name: At_Open_Flower_P Parameter: Plant Line Value: WS
  misc_feature: MA Experiment 20000264 PARAMETER Experiment Name: At_Open_Flower_P Parameter: Tissue Value: Open Flower vs. Whole Plant
  misc_feature: MA Experiment ID: 20000265 Result: Up-regulated in Transcription
  misc_feature: MA Experiment 20000265 PARAMETER Experiment Name: At_Open_Flower_P Parameter: Age (day) Value: 21
  misc_feature: MA Experiment 20000265 PARAMETER Experiment Name: At_Open_Flower_P Parameter: Plant Line Value: WS
  misc_feature: MA Experiment 20000265 PARAMETER Experiment Name: At_Open_Flower_P Parameter: Tissue Value: Closed Flower vs. Whole Plant
  misc_feature: MA Experiment ID: 20000286 Result: Up-regulated in Transcription
  misc_feature: MA Experiment 20000286 PARAMETER Experiment Name: At_Open_Flower_P Parameter: Age (day) Value: 21
  misc_feature: MA Experiment 20000286 PARAMETER Experiment Name: At_Open_Flower_P Parameter: Plant Line Value: WS
  misc_feature: MA Experiment 20000286 PARAMETER Experiment Name: At_Open_Flower_P Parameter: Tissue Value: Half Open vs. Whole Plant

SEQ ID NO: 95041 - protein, 602 aa, Arabidopsis thaliana; identical to SEQ ID NO: 91285
  peptide (1)..(602): Ceres Seq. ID no. 12727148
  misc_feature (288)..(595): Pfam Name: Pectinesterase Pfam Description: Pectinesterase
  misc_feature (194)..(602): Homolog of NCBI NO: 22135882 NR Description: pectin methylesterase-like protein [Arabidopsis
  misc_feature (25)..(602): Homolog of NCBI NO: 9759007 NR Description: pectin methylesterase-like protein [Arabidopsis
  misc_feature (43)..(602): Homolog of NCBI NO: 15242495 NR Description: pectin methylesterase - like protein; protein id:
  misc_feature (66)..(597): Homolog of NCBI NO: 34907404 NR Description: putative pectin methylesterase [Oryza sativa
  misc_feature (381)..(602): Homolog of NCBI NO: 21554293 NR Description: pectin methylesterase-like protein [Arabidopsis
  misc_feature (220)..(602): Homolog of NCBI NO: 1552379 NR Description: pectin methylesterase [Silene latifolia subsp.
  misc_feature (281)..(597): Homolog of NCBI NO: 38344075 NR Description: OSJNBa0006B20.19 [Oryza sativa (japonica
  misc_feature (164)..(204): Homolog of NCBI NO: 38344075 NR Description: OSJNBa0006B20.19 [Oryza sativa (japonica
  misc_feature (45)..(601): Homolog of NCBI NO: 24250746 NR Description: putative thermostable pectinesterase [Citrus >gi|24250751|gb|AAK84486.1| putative thermostable pectinesterase
  misc_feature (38)..(597): Homolog of NCBI NO: 15230019 NR Description: putative pectinesterase; protein id: At3g05610.1 thaliana] >gi|6714449|gb|AAF26136.1|AC011620_12 putative

SEQ ID NO: 95042 - protein, 409 aa, Arabidopsis thaliana; identical to SEQ ID NO: 91286
  peptide (1)..(409): Ceres Seq. ID no. 12727149
  misc_feature (95)..(402): Pfam Name: Pectinesterase Pfam Description: Pectinesterase
  misc_feature (1)..(409): Homolog of NCBI NO: 22135882 NR Description: pectin methylesterase-like protein [Arabidopsis
  misc_feature (1)..(409): Homolog of NCBI NO: 9759007 NR Description: pectin methylesterase-like protein [Arabidopsis
  misc_feature (1)..(409): Homolog of NCBI NO: 15242495 NR Description: pectin methylesterase - like protein; protein id:
  misc_feature (1)..(404): Homolog of NCBI NO: 34907404 NR Description: putative pectin methylesterase [Oryza sativa
  misc_feature (188)..(409): Homolog of NCBI NO: 21554293 NR Description: pectin methylesterase-like protein [Arabidopsis
  misc_feature (27)..(409): Homolog of NCBI NO: 1552379 NR Description: pectin methylesterase [Silene latifolia subsp.
  misc_feature (88)..(404): Homolog of NCBI NO: 38344075 NR Description: OSJNBa0006B20.19 [Oryza sativa (japonica
  misc_feature (1)..(11): Homolog of NCBI NO: 38344075 NR Description: OSJNBa0006B20.19 [Oryza sativa (japonica
  misc_feature (1)..(408): Homolog of NCBI NO: 24250746 NR Description: putative thermostable pectinesterase [Citrus >gi|24250751|gb|AAK84486.1| putative thermostable pectinesterase
  misc_feature (1)..(404): Homolog of NCBI NO: 15230019 NR Description: putative pectinesterase; protein id: At3g05610.1 thaliana] >gi|6714449|gb|AAF26136.1|AC011620_12 putative

SEQ ID NO: 95043 - protein, 366 aa, Arabidopsis thaliana; identical to SEQ ID NO: 91287
  peptide (1)..(366): Ceres Seq. ID no. 12727150
  misc_feature (52)..(359): Pfam Name: Pectinesterase Pfam Description: Pectinesterase
  misc_feature (1)..(366): Homolog of NCBI NO: 22135882 NR Description: pectin methylesterase-like protein [Arabidopsis
  misc_feature (1)..(366): Homolog of NCBI NO: 9759007 NR Description: pectin methylesterase-like protein [Arabidopsis
  misc_feature (1)..(366): Homolog of NCBI NO: 15242495 NR Description: pectin methylesterase - like protein; protein id:
  misc_feature (1)..(361): Homolog of NCBI NO: 34907404 NR Description: putative pectin methylesterase [Oryza sativa
  misc_feature (145)..(366): Homolog of NCBI NO: 21554293 NR Description: pectin methylesterase-like protein [Arabidopsis
  misc_feature (1)..(366): Homolog of NCBI NO: 1552379 NR Description: pectin methylesterase [Silene latifolia subsp.
  misc_feature (45)..(361): Homolog of NCBI NO: 38344075 NR Description: OSJNBa0006B20.19 [Oryza sativa (japonica
  misc_feature (1)..(365): Homolog of NCBI NO: 24250746 NR Description: putative thermostable pectinesterase [Citrus >gi|24250751|gb|AAK84486.1| putative thermostable pectinesterase
  misc_feature (1)..(361): Homolog of NCBI NO: 15230019 NR Description: putative pectinesterase; protein id: At3g05610.1 thaliana] >gi|6714449|gb|AAF26136.1|AC011620_12 putative
  misc_feature (1)..(361): Homolog of NCBI NO: 26451784 NR Description: putative pectinesterase [Arabidopsis thaliana]

SEQ ID NO: 95044 - DNA, 1080 bp, Arabidopsis thaliana; identical to SEQ ID NO: 91288
  misc_feature (1)..(1080): Ceres Seq. ID no. 12727154
  misc_feature: MA Experiment ID: 20000227 Result: Down-regulated in Transcription
  misc_feature: MA Experiment 20000227 PARAMETER Experiment Name: At_Root-Tips-vs-Tops_P Parameter: Tissue Value: Root Tips vs. Root Tops

SEQ ID NO: 95045 - protein, 359 aa, Arabidopsis thaliana; identical to SEQ ID NO: 91289
  peptide (1)..(359): Ceres Seq. ID no. 12727155
  misc_feature (198)..(327): Pfam Name: Integral membrane protein DUF6 Pfam Description: Integral membrane protein DUF6
  misc_feature (1)..(359): Homolog of NCBI NO: 15238227 NR Description: nodulin-like protein; protein id: At5g64700.1
  misc_feature (3)..(333): Homolog of NCBI NO: 34903802 NR Description: OSJNBa0016I09.14 [Oryza sativa (japonica
  misc_feature (3)..(333): Homolog of NCBI NO: 34913776 NR Description: nodulin-like protein [Oryza sativa (japonica
  misc_feature (1)..(357): Homolog of NCBI NO: 30693682 NR Description: nodulin N21 family protein [Arabidopsis thaliana]
  misc_feature (3)..(332): Homolog of NCBI NO: 34903800 NR Description: OSJNBa0016I09.13 [Oryza sativa (japonica
  misc_feature (24)..(334): Homolog of NCBI NO: 34913778 NR Description: nodulin-like protein [Oryza sativa (japonica
  misc_feature (34)..(343): Homolog of NCBI NO: 34913772 NR Description: nodulin-like protein [Oryza sativa (japonica
  misc_feature (3)..(359): Homolog of NCBI NO: 15240683 NR Description: MtN21 nodulin protein-like; protein id:
  misc_feature (58)..(335): Homolog of NCBI NO: 15088548 NR Description: putative nodulin-like-like protein [Triticum
  misc_feature (2)..(55): Homolog of NCBI NO: 15088548 NR Description: putative nodulin-like-like protein [Triticum

SEQ ID NO: 95046 - protein, 357 aa, Arabidopsis thaliana; identical to SEQ ID NO: 91290
  peptide (1)..(357): Ceres Seq. ID no. 12727156
  misc_feature (196)..(325): Pfam Name: Integral membrane protein DUF6 Pfam Description: Integral membrane protein DUF6
  misc_feature (1)..(357): Homolog of NCBI NO: 15238227 NR Description: nodulin-like protein; protein id: At5g64700.1
  misc_feature (1)..(331): Homolog of NCBI NO: 34903802 NR Description: OSJNBa0016I09.14 [Oryza sativa (japonica
  misc_feature (1)..(331): Homolog of NCBI NO: 34913776 NR Description: nodulin-like protein [Oryza sativa (japonica
  misc_feature (1)..(355): Homolog of NCBI NO: 30693682 NR Description: nodulin N21 family protein [Arabidopsis thaliana]
  misc_feature (1)..(330): Homolog of NCBI NO: 34903800 NR Description: OSJNBa0016I09.13 [Oryza sativa (japonica
  misc_feature (22)..(332): Homolog of NCBI NO: 34913778 NR Description: nodulin-like protein [Oryza sativa (japonica
  misc_feature (32)..(341): Homolog of NCBI NO: 34913772 NR Description: nodulin-like protein [Oryza sativa (japonica
  misc_feature (1)..(357): Homolog of NCBI NO: 15240683 NR Description: MtN21 nodulin protein-like; protein id:
  misc_feature (56)..(333): Homolog of NCBI NO: 15088548 NR Description: putative nodulin-like-like protein [Triticum
  misc_feature (1)..(53): Homolog of NCBI NO: 15088548 NR Description: putative nodulin-like-like protein [Triticum

SEQ ID NO: 95047 - protein, 349 aa, Arabidopsis thaliana; identical to SEQ ID NO: 91291
  peptide (1)..(349): Ceres Seq. ID no. 12727157
  misc_feature (188)..(317): Pfam Name: Integral membrane protein DUF6 Pfam Description: Integral membrane protein DUF6
  misc_feature (1)..(349): Homolog of NCBI NO: 15238227 NR Description: nodulin-like protein; protein id: At5g64700.1
  misc_feature (1)..(323): Homolog of NCBI NO: 34903802 NR Description: OSJNBa0016I09.14 [Oryza sativa (japonica
  misc_feature (1)..(323): Homolog of NCBI NO: 34913776 NR Description: nodulin-like protein [Oryza sativa (japonica
  misc_feature (1)..(347): Homolog of NCBI NO: 30693682 NR Description: nodulin N21 family protein [Arabidopsis thaliana]
  misc_feature (1)..(322): Homolog of NCBI NO: 34903800 NR Description: OSJNBa0016I09.13 [Oryza sativa (japonica
  misc_feature (14)..(324): Homolog of NCBI NO: 34913778 NR Description: nodulin-like protein [Oryza sativa (japonica
  misc_feature (24)..(333): Homolog of NCBI NO: 34913772 NR Description: nodulin-like protein [Oryza sativa (japonica
  misc_feature (1)..(349): Homolog of NCBI NO: 15240683 NR Description: MtN21 nodulin protein-like; protein id:
  misc_feature (48)..(325): Homolog of NCBI NO: 15088548 NR Description: putative nodulin-like-like protein [Triticum
  misc_feature (1)..(45): Homolog of NCBI NO: 15088548 NR Description: putative nodulin-like-like protein [Triticum

SEQ ID NO: 95048 - DNA, 3452 bp, Arabidopsis thaliana; identical to SEQ ID NO: 91292
  misc_feature (1)..(3452): Ceres Seq. ID no. 12727166
  misc_feature: MA Experiment ID: 20000171 Result: Down-regulated in Transcription
  misc_feature: MA Experiment 20000171 PARAMETER Experiment Name: At_42deg_Heat_P Parameter: Age (day) Value: 14
  misc_feature: MA Experiment 20000171 PARAMETER Experiment Name: At_42deg_Heat_P Parameter: Organism Value: A. thaliana
  misc_feature: MA Experiment 20000171 PARAMETER Experiment Name: At_42deg_Heat_P Parameter: Plant Line Value: WS
  misc_feature: MA Experiment 20000171 PARAMETER Experiment Name: At_42deg_Heat_P Parameter: Temperature (deg C) Value: 42 vs. 22
  misc_feature: MA Experiment 20000171 PARAMETER Experiment Name: At_42deg_Heat_P Parameter: Timepoint (hr) Value: 1
  misc_feature: MA Experiment 20000171 PARAMETER Experiment Name: At_42deg_Heat_P Parameter: Tissue Value: Aerial
  misc_feature: MA Experiment ID: 20000173 Result: Down-regulated in Transcription
  misc_feature: MA Experiment 20000173 PARAMETER Experiment Name: At_42deg_Heat_P Parameter: Age (day) Value: 14
  misc_feature: MA Experiment 20000173 PARAMETER Experiment Name: At_42deg_Heat_P Parameter: Organism Value: A. thaliana
  misc_feature: MA Experiment 20000173 PARAMETER Experiment Name: At_42deg_Heat_P Parameter: Plant Line Value: WS
  misc_feature: MA Experiment 20000173 PARAMETER Experiment Name: At_42deg_Heat_P Parameter: Temperature (deg C) Value: 42 vs. 22
  misc_feature: MA Experiment 20000173 PARAMETER Experiment Name: At_42deg_Heat_P Parameter: Timepoint (hr) Value: 6
  misc_feature: MA Experiment 20000173 PARAMETER Experiment Name: At_42deg_Heat_P Parameter: Tissue Value: Aerial
  misc_feature: MA Experiment ID: 20001451 Result: Up-regulated in Transcription
  misc_feature: MA Experiment 20001451 PARAMETER Experiment Name: At_Far-red-induction_P Parameter: Age (day) Value: 7
  misc_feature: MA Experiment 20001451 PARAMETER Experiment Name: At_Far-red-induction_P Parameter: Light Value: Far-red vs. White
  misc_feature: MA Experiment 20001451 PARAMETER Experiment Name: At_Far-red-induction_P Parameter: Organism Value: A. thaliana
  misc_feature: MA Experiment 20001451 PARAMETER Experiment Name: At_Far-red-induction_P Parameter: Plant Line Value: Columbia
  misc_feature: MA Experiment 20001451 PARAMETER Experiment Name: At_Far-red-induction_P Parameter: Timepoint (hr) Value: 24
  misc_feature: MA Experiment 20001451 PARAMETER Experiment Name: At_Far-red-induction_P Parameter: Tissue Value: Whole Plant
  misc_feature: MA Experiment ID: 20001557 Result: Up-regulated in Transcription
  misc_feature: MA Experiment 20001557 PARAMETER Experiment Name: At_Drought_Soil_Dry_P Parameter: Age (day) Value: 27
  misc_feature: MA Experiment 20001557 PARAMETER Experiment Name: At_Drought_Soil_Dry_P Parameter: Organism Value: A. thaliana
  misc_feature: MA Experiment 20001557 PARAMETER Experiment Name: At_Drought_Soil_Dry_P Parameter: Plant Line Value: WS
  misc_feature: MA Experiment 20001557 PARAMETER Experiment Name: At_Drought_Soil_Dry_P Parameter: Post Timepoint (hr) Value: 3
  misc_feature: MA Experiment 20001557 PARAMETER Experiment Name: At_Drought_Soil_Dry_P Parameter: Post-Treatment Value: Re-Water vs. No Drought
  misc_feature: MA Experiment 20001557 PARAMETER Experiment Name: At_Drought_Soil_Dry_P Parameter: Timepoint (day) Value: 13
  misc_feature: MA Experiment 20001557 PARAMETER Experiment Name: At_Drought_Soil_Dry_P Parameter: Treatment Value: Drought vs. No Drought
  misc_feature: MA Experiment ID: 20001558 Result: Up-regulated in Transcription
  misc_feature: MA Experiment 20001558 PARAMETER Experiment Name: At_Drought_Soil_Dry_P Parameter: Age (day) Value: 27
  misc_feature: MA Experiment 20001558 PARAMETER Experiment Name: At_Drought_Soil_Dry_P Parameter: Organism Value: A. thaliana
  misc_feature: MA Experiment 20001558 PARAMETER Experiment Name: At_Drought_Soil_Dry_P Parameter: Plant Line Value: WS
  misc_feature: MA Experiment 20001558 PARAMETER Experiment Name: At_Drought_Soil_Dry_P Parameter: Post Timepoint (hr) Value: 6
  misc_feature: MA Experiment 20001558 PARAMETER Experiment Name: At_Drought_Soil_Dry_P Parameter: Post-Treatment Value: Re-Water vs. No Drought
  misc_feature: MA Experiment 20001558 PARAMETER Experiment Name: At_Drought_Soil_Dry_P Parameter: Timepoint (day) Value: 13
  misc_feature: MA Experiment 20001558 PARAMETER Experiment Name: At_Drought_Soil_Dry_P Parameter: Treatment Value: Drought vs. No Drought
  misc_feature: MA Experiment ID: 20001906 Result: Down-regulated in Transcription
  misc_feature: MA Experiment 20001906 PARAMETER Experiment Name: At_Drought_Reproduction_P Parameter: Age (day) Value: 35
  misc_feature: MA Experiment 20001906 PARAMETER Experiment Name: At_Drought_Reproduction_P Parameter: Organism Value: A. thaliana
  misc_feature: MA Experiment 20001906 PARAMETER Experiment Name: At_Drought_Reproduction_P Parameter: Plant Line Value: WS
  misc_feature: MA Experiment 20001906 PARAMETER Experiment Name: At_Drought_Reproduction_P Parameter: Timepoint (day) Value: 5
  misc_feature: MA Experiment 20001906 PARAMETER Experiment Name: At_Drought_Reproduction_P Parameter: Tissue Value: Siliques
  misc_feature: MA Experiment 20001906 PARAMETER Experiment Name: At_Drought_Reproduction_P Parameter: Treatment Value: Drought vs. No Drought

SEQ ID NO: 95049 - protein, 1084 aa, Arabidopsis thaliana; identical to SEQ ID NO: 91293
  peptide (1)..(1084): Ceres Seq. ID no. 12727167
  misc_feature (356)..(424): Pfam Name: Glycosyl transferase Pfam Description: Glycosyl transferase
  misc_feature (493)..(1067): Homolog of NCBI NO: 15217853 NR Description: hypothetical protein; protein id: At1g02730.1
  misc_feature (255)..(470): Homolog of NCBI NO: 15217853 NR Description: hypothetical protein; protein id: At1g02730.1
  misc_feature (32)..(109): Homolog of NCBI NO: 15217853 NR Description: hypothetical protein; protein id: At1g02730.1
  misc_feature (476)..(1067): Homolog of NCBI NO: 15237873 NR Description: cellulose synthase catalytic subunit -like protein id: At5g16910.1 [Arabidopsis thaliana]
  misc_feature (210)..(470): Homolog of NCBI NO: 15237873 NR Description: cellulose synthase catalytic subunit -like protein id: At5g16910.1 [Arabidopsis thaliana]
  misc_feature (36)..(103): Homolog of NCBI NO: 15237873 NR Description: cellulose synthase catalytic subunit -like protein id: At5g16910.1 [Arabidopsis thaliana]
  misc_feature (476)..(1067): Homolog of NCBI NO: 27372782 NR Description: cellulose synthase-like protein D4 [Populus
  misc_feature (240)..(470): Homolog of NCBI NO: 27372782 NR Description: cellulose synthase-like protein D4 [Populus
  misc_feature (476)..(1067): Homolog of NCBI NO: 15228448 NR Description: putative cellulose synthase catalytic subunit; id: At3g03050.1, supported by cDNA: gi_12619787, supported by gi_13430535 [Arabidopsis thaliana]
  misc_feature (253)..(470): Homolog of NCBI NO: 15228448 NR Description: putative cellulose synthase catalytic subunit; id: At3g03050.1, supported by cDNA: gi_12619787, supported by gi_13430535 [Arabidopsis thaliana]

SEQ ID NO: 95050 - protein, 956 aa, Arabidopsis thaliana; identical to SEQ ID NO: 91294
  peptide (1)..(956): Ceres Seq. ID no. 12727168
  misc_feature (228)..(296): Pfam Name: Glycosyl transferase Pfam Description: Glycosyl transferase
  misc_feature (365)..(939): Homolog of NCBI NO: 15217853 NR Description: hypothetical protein; protein id: At1g02730.1
  misc_feature (127)..(342): Homolog of NCBI NO: 15217853 NR Description: hypothetical protein; protein id: At1g02730.1
  misc_feature (348)..(939): Homolog of NCBI NO: 15237873 NR Description: cellulose synthase catalytic subunit -like protein id: At5g16910.1 [Arabidopsis thaliana]
  misc_feature (82)..(342): Homolog of NCBI NO: 15237873 NR Description: cellulose synthase catalytic subunit -like protein id: At5g16910.1 [Arabidopsis thaliana]
  misc_feature (348)..(939): Homolog of NCBI NO: 27372782 NR Description: cellulose synthase-like protein D4 [Populus
  misc_feature (112)..(342): Homolog of NCBI NO: 27372782 NR Description: cellulose synthase-like protein D4 [Populus
  misc_feature (348)..(939): Homolog of NCBI NO: 15228448 NR Description: putative cellulose synthase catalytic subunit; id: At3g03050.1, supported by cDNA: gi_12619787, supported by gi_13430535 [Arabidopsis thaliana]
  misc_feature (125)..(342): Homolog of NCBI NO: 15228448 NR Description: putative cellulose synthase catalytic subunit; id: At3g03050.1, supported by cDNA: gi_12619787, supported by gi_13430535 [Arabidopsis thaliana]
  misc_feature (618)..(952): Homolog of NCBI NO: 13925884 NR Description: cellulose synthase D-like protein [Nicotiana
  misc_feature (113)..(342): Homolog of NCBI NO: 13925884 NR Description: cellulose synthase D-like protein [Nicotiana

SEQ ID NO: 95051 - protein, 884 aa, Arabidopsis thaliana; identical to SEQ ID NO: 91295
  peptide (1)..(884): Ceres Seq. ID no. 12727169
  misc_feature (156)..(224): Pfam Name: Glycosyl transferase Pfam Description: Glycosyl transferase
  misc_feature (293)..(867): Homolog of NCBI NO: 15217853 NR Description: hypothetical protein; protein id: At1g02730.1
  misc_feature (55)..(270): Homolog of NCBI NO: 15217853 NR Description: hypothetical protein; protein id: At1g02730.1
  misc_feature (276)..(867): Homolog of NCBI NO: 15237873 NR Description: cellulose synthase catalytic subunit -like protein id: At5g16910.1 [Arabidopsis thaliana]
  misc_feature (10)..(270): Homolog of NCBI NO: 15237873 NR Description: cellulose synthase catalytic subunit -like protein id: At5g16910.1 [Arabidopsis thaliana]
  misc_feature (276)..(867): Homolog of NCBI NO: 27372782 NR Description: cellulose synthase-like protein D4 [Populus
  misc_feature (40)..(270): Homolog of NCBI NO: 27372782 NR Description: cellulose synthase-like protein D4 [Populus
  misc_feature (276)..(867): Homolog of NCBI NO: 15228448 NR Description: putative cellulose synthase catalytic subunit; id: At3g03050.1, supported by cDNA: gi_12619787, supported by gi_13430535 [Arabidopsis thaliana]
  misc_feature (53)..(270): Homolog of NCBI NO: 15228448 NR Description: putative cellulose synthase catalytic subunit; id: At3g03050.1, supported by cDNA: gi_12619787, supported by gi_13430535 [Arabidopsis thaliana]
  misc_feature (546)..(880): Homolog of NCBI NO: 13925884 NR Description: cellulose synthase D-like protein [Nicotiana
  misc_feature (41)..(270): Homolog of NCBI NO: 13925884 NR Description: cellulose synthase D-like protein [Nicotiana

SEQ ID NO: 95052 - DNA, 1525 bp, Arabidopsis thaliana; identical to SEQ ID NO: 91296
  misc_feature (1)..(1525): Ceres Seq. ID no. 12727170
  misc_feature: MA Experiment ID: 20000173 Result: Up-regulated in Transcription
  misc_feature: MA Experiment 20000173 PARAMETER Experiment Name: At_42deg_Heat_P Parameter: Age (day) Value: 14
  misc_feature: MA Experiment 20000173 PARAMETER Experiment Name: At_42deg_Heat_P Parameter: Organism Value: A. thaliana
  misc_feature: MA Experiment 20000173 PARAMETER Experiment Name: At_42deg_Heat_P Parameter: Plant Line Value: WS
  misc_feature: MA Experiment 20000173 PARAMETER Experiment Name: At_42deg_Heat_P Parameter: Temperature (deg C) Value: 42 vs. 22
  misc_feature: MA Experiment 20000173 PARAMETER Experiment Name: At_42deg_Heat_P Parameter: Timepoint (hr) Value: 6
  misc_feature: MA Experiment 20000173 PARAMETER Experiment Name: At_42deg_Heat_P Parameter: Tissue Value: Aerial
  misc_feature: MA Experiment ID: 20000179 Result: Down-regulated in Transcription
  misc_feature: MA Experiment 20000179 PARAMETER Experiment Name: At_Germinating_Seeds_P Parameter: Age (hr) Value: 6 vs. 0
  misc_feature: MA Experiment 20000179 PARAMETER Experiment Name: At_Germinating_Seeds_P Parameter: Tissue Value: Germinating Seeds
  misc_feature: MA Experiment ID: 20000180 Result: Down-regulated in Transcription
  misc_feature: MA Experiment 20000180 PARAMETER Experiment Name: At_Germinating_Seeds_P Parameter: Age (hr) Value: 24 vs. 0
  misc_feature: MA Experiment 20000180 PARAMETER Experiment Name: At_Germinating_Seeds_P Parameter: Tissue Value: Germinating Seeds
  misc_feature: MA Experiment ID: 20000182 Result: Up-regulated in Transcription
  misc_feature: MA Experiment 20000182 PARAMETER Experiment Name: At_2mM_SA_P Parameter: Age (day) Value: 14
  misc_feature: MA Experiment 20000182 PARAMETER Experiment Name: At_2mM_SA_P Parameter: Organism Value: A. thaliana
  misc_feature: MA Experiment 20000182 PARAMETER Experiment Name: At_2mM_SA_P Parameter: Plant Line Value: WS
  misc_feature: MA Experiment 20000182 PARAMETER Experiment Name: At_2mM_SA_P Parameter: Timepoint (hr) Value: 6
  misc_feature: MA Experiment 20000182 PARAMETER Experiment Name: At_2mM_SA_P Parameter: Tissue Value: Aerial
  misc_feature: MA Experiment 20000182 PARAMETER Experiment Name: At_2mM_SA_P Parameter: Treatment Value: 2mM SA vs. No Treatment
  misc_feature: MA Experiment ID: 20000184 Result: Down-regulated in Transcription
  misc_feature: MA Experiment 20000184 PARAMETER Experiment Name: At_Shoots__P Parameter: Age (day) Value: 7
  misc_feature: MA Experiment 20000184 PARAMETER Experiment Name: At_Shoots__P Parameter: Tissue Value: Shoots vs. Whole Plant
  misc_feature: MA Experiment ID: 20000185 Result: Down-regulated in Transcription
  misc_feature: MA Experiment 20000185 PARAMETER Experiment Name: At_Roots__P Parameter: Age (day) Value: 7 vs. 21
  misc_feature: MA Experiment 20000185 PARAMETER Experiment Name: At_Roots__P Parameter: Organism Value: A. thaliana
  misc_feature: MA Experiment 20000185 PARAMETER Experiment Name: At_Roots__P Parameter: Tissue Value: Roots vs. Whole Plant
  misc_feature: MA Experiment ID: 20000213 Result: Up-regulated in Transcription
  misc_feature: MA Experiment 20000213 PARAMETER Experiment Name: At_4deg_Cold_P Parameter: Timepoint (hr) Value: 2
  misc_feature: MA Experiment ID: 20000234 Result: Down-regulated in Transcription
  misc_feature: MA Experiment 20000234 PARAMETER Experiment Name: At_Siliques_P Parameter: Age (day) Value: 21
  misc_feature: MA Experiment 20000234 PARAMETER Experiment Name: At_Siliques_P Parameter: Organism Value: A. thaliana
  misc_feature: MA Experiment 20000234 PARAMETER Experiment Name: At_Siliques_P Parameter: Plant Line Value: WS
  misc_feature: MA Experiment 20000234 PARAMETER Experiment Name: At_Siliques_P Parameter: Tissue Value: Less Than 5mm Siliques vs. Whole Plant
  misc_feature: MA Experiment ID: 20000235 Result: Down-regulated in Transcription
  misc_feature: MA Experiment 20000235 PARAMETER Experiment Name: At_Siliques_P Parameter: Age (day) Value: 21
  misc_feature: MA Experiment 20000235 PARAMETER Experiment Name: At_Siliques_P Parameter: Organism Value: A. thaliana
  misc_feature: MA Experiment 20000235 PARAMETER Experiment Name: At_Siliques_P Parameter: Plant Line Value: WS
  misc_feature: MA Experiment 20000235 PARAMETER Experiment Name: At_Siliques_P Parameter: Tissue Value: 5-10mm Siliques vs. Whole Plant
  misc_feature: MA Experiment ID: 20000264 Result: Down-regulated in Transcription
  misc_feature: MA Experiment 20000264 PARAMETER Experiment Name: At_Open_Flower_P Parameter: Age (day) Value: 21
  misc_feature: MA Experiment 20000264 PARAMETER Experiment Name: At_Open_Flower_P Parameter: Plant Line Value: WS
  misc_feature: MA Experiment 20000264 PARAMETER Experiment Name: At_Open_Flower_P Parameter: Tissue Value: Open Flower vs. Whole Plant
  misc_feature: MA Experiment ID: 20000265 Result: Down-regulated in Transcription
  misc_feature: MA Experiment 20000265 PARAMETER Experiment Name: At_Open_Flower_P Parameter: Age (day) Value: 21
  misc_feature: MA Experiment 20000265 PARAMETER Experiment Name: At_Open_Flower_P Parameter: Plant Line Value: WS
  misc_feature: MA Experiment 20000265 PARAMETER Experiment Name: At_Open_Flower_P Parameter: Tissue Value: Closed Flower vs. Whole Plant
  misc_feature: MA Experiment ID: 20000286 Result: Down-regulated in Transcription
  misc_feature: MA Experiment 20000286 PARAMETER Experiment Name: At_Open_Flower_P Parameter: Age (day) Value: 21
  misc_feature: MA Experiment 20000286 PARAMETER Experiment Name: At_Open_Flower_P Parameter: Plant Line Value: WS
  misc_feature: MA Experiment 20000286 PARAMETER Experiment Name: At_Open_Flower_P Parameter: Tissue Value: Half Open vs. Whole Plant
  misc_feature: MA Experiment ID: 20000437 Result: Up-regulated in Transcription
  misc_feature: MA Experiment 20000437 PARAMETER Experiment Name: At_Drought_P Parameter: Age (day) Value: 8
  misc_feature: MA Experiment 20000437 PARAMETER Experiment Name: At_Drought_P Parameter: Organism Value: A. thaliana
  misc_feature: MA Experiment 20000437 PARAMETER Experiment Name: At_Drought_P Parameter: Plant Line Value: WS
  misc_feature: MA Experiment 20000437 PARAMETER Experiment Name: At_Drought_P Parameter: Timepoint (hr) Value: 24
  misc_feature: MA Experiment 20000437 PARAMETER Experiment Name: At_Drought_P Parameter: Tissue Value: Whole Plant
  misc_feature: MA Experiment 20000437 PARAMETER Experiment Name: At_Drought_P Parameter: Treatment Value: Drought vs. No Drought
  misc_feature: MA Experiment ID: 20000439 Result: Down-regulated in Transcription
  misc_feature: MA Experiment 20000439 PARAMETER Experiment Name: At_Roots__P Parameter: Age (day) Value: 14 vs. 21
  misc_feature: MA Experiment 20000439 PARAMETER Experiment Name: At_Roots__P Parameter: Organism Value: A. thaliana
  misc_feature: MA Experiment 20000439 PARAMETER Experiment Name: At_Roots__P Parameter: Tissue Value: Roots vs. Whole Plant
  misc_feature: MA Experiment ID: 20000456 Result: Up-regulated in Transcription
  misc_feature: MA Experiment 20000456 PARAMETER Experiment Name: At_100uM_BA_P Parameter: Age (day) Value: 14
  misc_feature: MA Experiment 20000456 PARAMETER Experiment Name: At_100uM_BA_P Parameter: Organism Value: A. thaliana
  misc_feature: MA Experiment 20000456 PARAMETER Experiment Name: At_100uM_BA_P Parameter: Plant Line Value: WS
  misc_feature: MA Experiment 20000456 PARAMETER Experiment Name: At_100uM_BA_P Parameter: Timepoint (hr) Value: 6
  misc_feature: MA Experiment 20000456 PARAMETER Experiment Name: At_100uM_BA_P Parameter: Tissue Value: Aerial
  misc_feature: MA Experiment 20000456 PARAMETER Experiment Name: At_100uM_BA_P Parameter: Treatment Value: 100uM BA vs. No Treatment
  misc_feature: MA Experiment ID: 20000460 Result: Up-regulated in Transcription
  misc_feature: MA Experiment 20000460 PARAMETER Experiment Name: At_10percent_PEG_P Parameter: Age (day) Value: 12
  misc_feature: MA Experiment 20000460 PARAMETER Experiment Name: At_10percent_PEG_P Parameter: Organism Value: A. thaliana
  misc_feature: MA Experiment 20000460 PARAMETER Experiment Name: At_10percent_PEG_P Parameter: Plant Line Value: WS
  misc_feature: MA Experiment 20000460 PARAMETER Experiment Name: At_10percent_PEG_P Parameter: Timepoint (day) Value: 12
  misc_feature: MA Experiment 20000460 PARAMETER Experiment Name: At_10percent_PEG_P Parameter: Tissue Value: Whole Plant
  misc_feature: MA Experiment 20000460 PARAMETER Experiment Name: At_10percent_PEG_P Parameter: Treatment Value: 10percent PEG vs. No Treatment
  misc_feature: MA Experiment ID: 20000495 Result: Down-regulated in Transcription
  misc_feature: MA Experiment 20000495 PARAMETER Experiment Name: At_Guard_Cells_P Parameter: Harvest Date Value: 8/2/2002
  misc_feature: MA Experiment 20000495 PARAMETER Experiment Name: At_Guard_Cells_P Parameter: Organism Value: A. thaliana
  misc_feature: MA Experiment 20000495 PARAMETER Experiment Name: At_Guard_Cells_P Parameter: Tissue Value: Guard Cells vs. Leaves
  misc_feature: MA Experiment ID: 20000496 Result: Down-regulated in Transcription
  misc_feature: MA Experiment 20000496 PARAMETER Experiment Name: At_Guard_Cells_P Parameter: Harvest Date Value: 7/19/2002
  misc_feature: MA Experiment 20000496 PARAMETER Experiment Name: At_Guard_Cells_P Parameter: Organism Value: Canola
  misc_feature: MA Experiment 20000496 PARAMETER Experiment Name: At_Guard_Cells_P Parameter: Tissue Value: Guard Cells vs. Leaves
  misc_feature: MA Experiment ID: 20000709 Result: Up-regulated in Transcription
  misc_feature: MA Experiment 20000709 PARAMETER Experiment Name: At_15mM_NH4NO3_L-to-H_P Parameter: Age (hr) Value: 14
  misc_feature: MA Experiment 20000709 PARAMETER Experiment Name: At_15mM_NH4NO3_L-to-H_P Parameter: Organism Value: A. thaliana
  misc_feature: MA Experiment 20000709 PARAMETER Experiment Name: At_15mM_NH4NO3_L-to-H_P Parameter: Plant Line Value: WS
  misc_feature: MA Experiment 20000709 PARAMETER Experiment Name: At_15mM_NH4NO3_L-to-H_P Parameter: Timepoint (hr) Value: 4
  misc_feature: MA Experiment 20000709 PARAMETER Experiment Name: At_15mM_NH4NO3_L-to-H_P Parameter: Tissue Value: Aerial
  misc_feature: MA Experiment 20000709 PARAMETER Experiment Name: At_15mM_NH4NO3_L-to-H_P Parameter: Treatment Value: 15mM NH4NO3 vs. 30mM Mannitol
  misc_feature: MA Experiment ID: 20001248 Result: Up-regulated in Transcription
  misc_feature: MA Experiment 20001248 PARAMETER Experiment Name: At_Far-red-induction_P Parameter: Age (day) Value: 7
  misc_feature: MA Experiment 20001248 PARAMETER Experiment Name: At_Far-red-induction_P Parameter: Light Value: Far-red vs. White
  misc_feature: MA Experiment 20001248 PARAMETER Experiment Name: At_Far-red-induction_P Parameter: Organism Value: A. thaliana
  misc_feature: MA Experiment 20001248 PARAMETER Experiment Name: At_Far-red-induction_P Parameter: Plant Line Value: Columbia
  misc_feature: MA Experiment 20001248 PARAMETER Experiment Name: At_Far-red-induction_P Parameter: Timepoint (hr) Value: 4
  misc_feature: MA Experiment 20001248 PARAMETER Experiment Name: At_Far-red-induction_P Parameter: Tissue Value: Whole Plant
  misc_feature: MA Experiment ID: 20001557 Result: Up-regulated in Transcription
  misc_feature: MA Experiment 20001557 PARAMETER Experiment Name: At_Drought_Soil_Dry_P Parameter: Age (day) Value: 27
  misc_feature: MA Experiment 20001557 PARAMETER Experiment Name: At_Drought_Soil_Dry_P Parameter: Organism Value: A. thaliana
  misc_feature: MA Experiment 20001557 PARAMETER Experiment Name: At_Drought_Soil_Dry_P Parameter: Plant Line Value: WS
  misc_feature: MA Experiment 20001557 PARAMETER Experiment Name: At_Drought_Soil_Dry_P Parameter: Post Timepoint (hr) Value: 3
  misc_feature: MA Experiment 20001557 PARAMETER Experiment Name: At_Drought_Soil_Dry_P Parameter: Post-Treatment Value: Re-Water vs. No Drought
  misc_feature: MA Experiment 20001557 PARAMETER Experiment Name: At_Drought_Soil_Dry_P Parameter: Timepoint (day) Value: 13
  misc_feature: MA Experiment 20001557 PARAMETER Experiment Name: At_Drought_Soil_Dry_P Parameter: Treatment Value: Drought vs. No Drought
  misc_feature: MA Experiment ID: 20001558 Result: Up-regulated in Transcription
  misc_feature: MA Experiment 20001558 PARAMETER Experiment Name: At_Drought_Soil_Dry_P Parameter: Age (day) Value: 27
  misc_feature: MA Experiment 20001558 PARAMETER Experiment Name: At_Drought_Soil_Dry_P Parameter: Organism Value: A. thaliana
  misc_feature: MA Experiment 20001558 PARAMETER Experiment Name: At_Drought_Soil_Dry_P Parameter: Plant Line Value: WS
  misc_feature: MA Experiment 20001558 PARAMETER Experiment Name: At_Drought_Soil_Dry_P Parameter: Post Timepoint (hr) Value: 6
  misc_feature: MA Experiment 20001558 PARAMETER Experiment Name: At_Drought_Soil_Dry_P Parameter: Post-Treatment Value: Re-Water vs. No Drought
  misc_feature: MA Experiment 20001558 PARAMETER Experiment Name: At_Drought_Soil_Dry_P Parameter: Timepoint (day) Value: 13
  misc_feature: MA Experiment 20001558 PARAMETER Experiment Name: At_Drought_Soil_Dry_P Parameter: Treatment Value: Drought vs. No Drought
  misc_feature: MA Experiment ID: 20001905 Result: Up-regulated in Transcription
  misc_feature: MA Experiment 20001905 PARAMETER Experiment Name: At_Drought_Reproduction_P Parameter: Age (day) Value: 40
  misc_feature: MA Experiment 20001905 PARAMETER Experiment Name: At_Drought_Reproduction_P Parameter: Organism Value: A. thaliana
  misc_feature: MA Experiment 20001905 PARAMETER Experiment Name: At_Drought_Reproduction_P Parameter: Plant Line Value: WS
  misc_feature: MA Experiment 20001905 PARAMETER Experiment Name: At_Drought_Reproduction_P Parameter: Timepoint (day) Value: 10
  misc_feature: MA Experiment 20001905 PARAMETER Experiment Name: At_Drought_Reproduction_P Parameter: Tissue Value: Rosettes
  misc_feature: MA Experiment 20001905 PARAMETER Experiment Name: At_Drought_Reproduction_P Parameter: Treatment Value: Drought vs. No Drought

SEQ ID NO: 95053 - protein, 391 aa, Arabidopsis thaliana; identical to SEQ ID NO: 91297
  peptide (1)..(391): Ceres Seq. ID no. 12727171
  misc_feature (182)..(246): Pfam Name: AP2 domain Pfam Description: AP2 domain
  misc_feature (1)..(391): Homolog of NCBI NO: 15238232 NR Description: putative protein; protein id: At5g64750.1 thaliana] >gi|10177206|dbj|BAB10308.1| contains similarity to factor~gene_id:MVP7.8 [Arabidopsis thaliana]
  misc_feature (58)..(295): Homolog of NCBI NO: 34908616 NR Description: P0677H08.8 [Oryza sativa (japonica
  misc_feature (180)..(278): Homolog of NCBI NO: 15240610 NR Description: putative protein; protein id: At5g50080.1 thaliana] >gi|10177219|dbj|BAB10294.1| contains similarity to AP2
  misc_feature (180)..(278): Homolog of NCBI NO: 34221731 NR Description: putative AP2 domain transcription factor
  misc_feature (141)..(246): Homolog of NCBI NO: 15240379 NR Description: putative protein; protein id: At5g61890.1
  misc_feature (182)..(364): Homolog of NCBI NO: 15240754 NR Description: putative transcription factor; protein id:
  misc_feature (179)..(311): Homolog of NCBI NO: 15240604 NR Description: putative protein; protein id: At5g13330.1
  misc_feature (164)..(244): Homolog of NCBI NO: 2281637 NR Description: AP2 domain containing protein RAP2.6 [Arabidopsis
  misc_feature (164)..(244): Homolog of NCBI NO: 15218275 NR Description: AP2 domain protein RAP2.6; protein id: supported by cDNA: gi_17065541 [Arabidopsis thaliana]
  misc_feature (123)..(245): Homolog of NCBI NO: 38347164 NR Description: OSJNBa0039C07.10 [Oryza sativa (japonica

SEQ ID NO: 95054 - protein, 321 aa, Arabidopsis thaliana; identical to SEQ ID NO: 91298
  peptide (1)..(321): Ceres Seq. ID no. 12727172
  misc_feature (112)..(176): Pfam Name: AP2 domain Pfam Description: AP2 domain
  misc_feature (1)..(321): Homolog of NCBI NO: 15238232 NR Description: putative protein; protein id: At5g64750.1 thaliana] >gi|10177206|dbj|BAB10308.1| contains similarity to factor~gene_id:MVP7.8 [Arabidopsis thaliana]
  misc_feature (1)..(225): Homolog of NCBI NO: 34908616 NR Description: P0677H08.8 [Oryza sativa (japonica
  misc_feature (110)..(208): Homolog of NCBI NO: 15240610 NR Description: putative protein; protein id: At5g50080.1 thaliana] >gi|10177219|dbj|BAB10294.1| contains similarity to AP2
  misc_feature (110)..(208): Homolog of NCBI NO: 34221731 NR Description: putative AP2 domain transcription factor
  misc_feature (71)..(176): Homolog of NCBI NO: 15240379 NR Description: putative protein; protein id: At5g61890.1
  misc_feature (112)..(294): Homolog of NCBI NO: 15240754 NR Description: putative transcription factor; protein id:
  misc_feature (109)..(241): Homolog of NCBI NO: 15240604 NR Description: putative protein; protein id: At5g13330.1
  misc_feature (94)..(174): Homolog of NCBI NO: 2281637 NR Description: AP2 domain containing protein RAP2.6 [Arabidopsis
  misc_feature (94)..(174): Homolog of NCBI NO: 15218275 NR Description: AP2 domain protein RAP2.6; protein id: supported by cDNA: gi_17065541 [Arabidopsis thaliana]
  misc_feature (53)..(175): Homolog of NCBI NO: 38347164 NR Description: OSJNBa0039C07.10 [Oryza sativa (japonica

SEQ ID NO: 95055 - protein, 319 aa, Arabidopsis thaliana; identical to SEQ ID NO: 91299
  peptide (1)..(319): Ceres Seq. ID no. 12727173
  misc_feature (110)..(174): Pfam Name: AP2 domain Pfam Description: AP2 domain
  misc_feature (1)..(319): Homolog of NCBI NO: 15238232 NR Description: putative protein; protein id: At5g64750.1 thaliana] >gi|10177206|dbj|BAB10308.1| contains similarity to factor~gene_id:MVP7.8 [Arabidopsis thaliana]
  misc_feature (1)..(223): Homolog of NCBI NO: 34908616 NR Description: P0677H08.8 [Oryza sativa (japonica
  misc_feature (108)..(206): Homolog of NCBI NO: 15240610 NR Description: putative protein; protein id: At5g50080.1 thaliana] >gi|10177219|dbj|BAB10294.1| contains similarity to AP2
  misc_feature (108)..(206): Homolog of NCBI NO: 34221731 NR Description: putative AP2 domain transcription factor
  misc_feature (69)..(174): Homolog of NCBI NO: 15240379 NR Description: putative protein; protein id: At5g61890.1
  misc_feature (110)..(292): Homolog of NCBI NO: 15240754 NR Description: putative transcription factor; protein id:
  misc_feature (107)..(239): Homolog of NCBI NO: 15240604 NR Description: putative protein; protein id: At5g13330.1
  misc_feature (92)..(172): Homolog of NCBI NO: 2281637 NR Description: AP2 domain containing protein RAP2.6 [Arabidopsis
  misc_feature (92)..(172): Homolog of NCBI NO: 15218275 NR Description: AP2 domain protein RAP2.6; protein id: supported by cDNA: gi_17065541 [Arabidopsis thaliana]
  misc_feature (51)..(173): Homolog of NCBI NO: 38347164 NR Description: OSJNBa0039C07.10 [Oryza sativa (japonica

SEQ ID NO: 95056 - DNA, 1329 bp, Arabidopsis thaliana; identical to SEQ ID NO: 91300
  misc_feature (1)..(1329): Ceres Seq. ID no. 12727174
  misc_feature: MA Experiment ID: 108434 Result: Up-regulated in Transcription
  misc_feature: MA Experiment 108434 PARAMETER Experiment Name: At_Root_Tips_cDNA_P Parameter: Tissue Value: Root Tips
  misc_feature: MA Experiment ID: 108462 Result: Down-regulated in Transcription
  misc_feature: MA Experiment 108462 PARAMETER Experiment Name: At_Germinating_Seeds_cDNA_P Parameter: Age (day) Value: 2 vs. 0
  misc_feature: MA Experiment 108462 PARAMETER Experiment Name: At_Germinating_Seeds_cDNA_P Parameter: Tissue Value: Germinating Seeds
  misc_feature: MA Experiment ID: 108463 Result: Down-regulated in Transcription
  misc_feature: MA Experiment 108463 PARAMETER Experiment Name: At_Germinating_Seeds_cDNA_P Parameter: Age (day) Value: 3 vs. 0
  misc_feature: MA Experiment 108463 PARAMETER Experiment Name: At_Germinating_Seeds_cDNA_P Parameter: Tissue Value: Germinating Seeds
  misc_feature: MA Experiment ID: 108464 Result: Down-regulated in Transcription
  misc_feature: MA Experiment 108464 PARAMETER Experiment Name: At_Germinating_Seeds_cDNA_P Parameter: Age (day) Value: 4 vs. 0
  misc_feature: MA Experiment 108464 PARAMETER Experiment Name: At_Germinating_Seeds_cDNA_P Parameter: Tissue Value: Germinating Seeds
  misc_feature: MA Experiment ID: 108585 Result: Up-regulated in Transcription
  misc_feature: MA Experiment 108585 PARAMETER Experiment Name: At_5mM_NaNP_cDNA_P Parameter: Timepoint (hr) Value: 6
  misc_feature: MA Experiment 108585 PARAMETER Experiment Name: At_5mM_NaNP_cDNA_P Parameter: Tissue Value: Aerial
  misc_feature: MA Experiment 108585 PARAMETER Experiment Name: At_5mM_NaNP_cDNA_P Parameter: Treatment Value: null
  misc_feature: MA Experiment ID: 20000224 Result: Up-regulated in Transcription
  misc_feature: MA Experiment ID: 20000315 Result: Down-regulated in Transcription
  misc_feature: MA Experiment 20000315 PARAMETER Experiment Name: At_14day_Shoots-Roots_Sub_P Parameter: Age (day) Value: 14
  misc_feature: MA Experiment 20000315 PARAMETER Experiment Name: At_14day_Shoots-Roots_Sub_P Parameter: Organism Value: A. thaliana
  misc_feature: MA Experiment 20000315 PARAMETER Experiment Name: At_14day_Shoots-Roots_Sub_P Parameter: Plant Line Value: WS
  misc_feature: MA Experiment 20000315 PARAMETER Experiment Name: At_14day_Shoots-Roots_Sub_P Parameter: Tissue Value: Shoots vs. Whole Plant
  misc_feature: MA Experiment ID: 20000440 Result: Up-regulated in Transcription
  misc_feature: MA Experiment 20000440 PARAMETER Experiment Name: At_Closed-Flower__Sub_P Parameter: Tissue Value: Closed Flower vs. Whole Plant

SEQ ID NO: 95057 - protein, 442 aa, Arabidopsis thaliana; identical to SEQ ID NO: 91301
  peptide (1)..(442): Ceres Seq. ID no. 12727175
  misc_feature (290)..(400): Pfam Name: PCI domain Pfam Description: PCI domain
  misc_feature (1)..(442): Homolog of NCBI NO: 10177207 NR Description: proteasome regulatory subunit-like [Arabidopsis
  misc_feature (1)..(442): Homolog of NCBI NO: 30698065 NR Description: 26S proteasome regulatory subunit (RPN5), [Arabidopsis thaliana] >gi|17063181|gb|AAL32985.1| [Arabidopsis thaliana] >gi|17063193|gb|AAL32972.1|
  misc_feature (1)..(441): Homolog of NCBI NO: 15242545 NR Description: 26S proteasome regulatory subunit (RPN5), protein id: At5g09900.1, supported by cDNA: gi_14334433
  misc_feature (4)..(442): Homolog of NCBI NO: 27573351 NR Description: putative proteasome regulatory non-ATPase subunit
  misc_feature (175)..(442): Homolog of NCBI NO: 17298157 NR Description: 26S proteasome regulatory particle non-ATPase
  misc_feature (1)..(438): Homolog of NCBI NO: 13385384 NR Description: proteasome 26S non-ATPase subunit 12 [Mus >gi|12841378|dbj|BAB25184.1| unnamed protein product [Mus >gi|12845096|dbj|BAB26619.1| unnamed protein product [Mus
  misc_feature (1)..(438): Homolog of NCBI NO: 12857304 NR Description: unnamed protein product [Mus musculus]
  misc_feature (1)..(438): Homolog of NCBI NO: 27503944 NR Description: Similar to proteasome (prosome, macropain) 26S
  misc_feature (1)..(438): Homolog of NCBI NO: 20978555 NR Description: 26S proteasome non-ATPase regulatory subunit 12 proteasome regulatory subunit p55) >gi|12841273|dbj|BAB25140.1|
  misc_feature (1)..(438): Homolog of NCBI NO: 40741155 NR Description: hypothetical protein AN4775.2 [Aspergillus

SEQ ID NO: 95058 - protein, 422 aa, Arabidopsis thaliana; identical to SEQ ID NO: 25306
  peptide (1)..(422): Ceres Seq. ID no. 12727176
  misc_feature (270)..(380): Pfam Name: PCI domain Pfam Description: PCI domain
  misc_feature (1)..(422): Homolog of NCBI NO: 10177207 NR Description: proteasome regulatory subunit-like [Arabidopsis
  misc_feature (1)..(422): Homolog of NCBI NO: 30698065 NR Description: 26S proteasome regulatory subunit (RPN5), [Arabidopsis thaliana] >gi|17063181|gb|AAL32985.1| [Arabidopsis thaliana] >gi|17063193|gb|AAL32972.1|
  misc_feature (1)..(421): Homolog of NCBI NO: 15242545 NR Description: 26S proteasome regulatory subunit (RPN5), protein id: At5g09900.1, supported by cDNA: gi_14334433
  misc_feature (1)..(422): Homolog of NCBI NO: 27573351 NR Description: putative proteasome regulatory non-ATPase subunit
  misc_feature (155)..(422): Homolog of NCBI NO: 17298157 NR Description: 26S proteasome regulatory particle non-ATPase
  misc_feature (1)..(418): Homolog of NCBI NO: 13385384 NR Description: proteasome 26S non-ATPase subunit 12 [Mus >gi|12841378|dbj|BAB25184.1| unnamed protein product [Mus >gi|12845096|dbj|BAB26619.1| unnamed protein product [Mus
  misc_feature (1)..(418): Homolog of NCBI NO: 12857304 NR Description: unnamed protein product [Mus musculus]
  misc_feature (1)..(418): Homolog of NCBI NO: 27503944 NR Description: Similar to proteasome (prosome, macropain) 26S
  misc_feature (1)..(418): Homolog of NCBI NO: 20978555 NR Description: 26S proteasome non-ATPase regulatory subunit 12 proteasome regulatory subunit p55) >gi|12841273|dbj|BAB25140.1|
  misc_feature (1)..(418): Homolog of NCBI NO: 40741155 NR Description: hypothetical protein AN4775.2 [Aspergillus

SEQ ID NO: 95059 - protein, 372 aa, Arabidopsis thaliana; identical to SEQ ID NO: 91303
  peptide (1)..(372): Ceres Seq. ID no. 12727177
  misc_feature (220)..(330): Pfam Name: PCI domain Pfam Description: PCI domain
  misc_feature (1)..(372): Homolog of NCBI NO: 10177207 NR Description: proteasome regulatory subunit-like [Arabidopsis
  misc_feature (1)..(372): Homolog of NCBI NO: 30698065 NR Description: 26S proteasome regulatory subunit (RPN5), [Arabidopsis thaliana] >gi|17063181|gb|AAL32985.1| [Arabidopsis thaliana] >gi|17063193|gb|AAL32972.1|
  misc_feature (1)..(371): Homolog of NCBI NO: 15242545 NR Description: 26S proteasome regulatory subunit (RPN5), protein id: At5g09900.1, supported by cDNA: gi_14334433
  misc_feature (1)..(372): Homolog of NCBI NO: 27573351 NR Description: putative proteasome regulatory non-ATPase subunit
  misc_feature (105)..(372): Homolog of NCBI NO: 17298157 NR Description: 26S proteasome regulatory particle non-ATPase
  misc_feature (1)..(368): Homolog of NCBI NO: 13385384 NR Description: proteasome 26S non-ATPase subunit 12 [Mus >gi|12841378|dbj|BAB25184.1| unnamed protein product [Mus >gi|12845096|dbj|BAB26619.1| unnamed protein product [Mus
  misc_feature (1)..(368): Homolog of NCBI NO: 12857304 NR Description: unnamed protein product [Mus musculus]
  misc_feature (1)..(368): Homolog of NCBI NO: 27503944 NR Description: Similar to proteasome (prosome, macropain) 26S
  misc_feature (1)..(368): Homolog of NCBI NO: 20978555 NR Description: 26S proteasome non-ATPase regulatory subunit 12 proteasome regulatory subunit p55) >gi|12841273|dbj|BAB25140.1|
  misc_feature (1)..(368): Homolog of NCBI NO: 40741155 NR Description: hypothetical protein AN4775.2 [Aspergillus

SEQ ID NO: 95060 - DNA, 585 bp, Arabidopsis thaliana; identical to SEQ ID NO: 91304
  misc_feature (1)..(585): Ceres Seq. ID no. 12727180
  misc_feature: MA Experiment ID: 20000173 Result: Down-regulated in Transcription
  misc_feature: MA Experiment 20000173 PARAMETER Experiment Name: At_42deg_Heat_P Parameter: Age (day) Value: 14
  misc_feature: MA Experiment 20000173 PARAMETER Experiment Name: At_42deg_Heat_P Parameter: Organism Value: A. thaliana
  misc_feature: MA Experiment 20000173 PARAMETER Experiment Name: At_42deg_Heat_P Parameter: Plant Line Value: WS
  misc_feature: MA Experiment 20000173 PARAMETER Experiment Name: At_42deg_Heat_P Parameter: Temperature (deg C) Value: 42 vs. 22
  misc_feature: MA Experiment 20000173 PARAMETER Experiment Name: At_42deg_Heat_P Parameter: Timepoint (hr) Value: 6
  misc_feature: MA Experiment 20000173 PARAMETER Experiment Name: At_42deg_Heat_P Parameter: Tissue Value: Aerial
  misc_feature: MA Experiment ID: 20000182 Result: Up-regulated in Transcription
  misc_feature: MA Experiment 20000182 PARAMETER Experiment Name: At_2mM_SA_P Parameter: Age (day) Value: 14
  misc_feature: MA Experiment 20000182 PARAMETER Experiment Name: At_2mM_SA_P Parameter: Organism Value: A. thaliana
  misc_feature: MA Experiment 20000182 PARAMETER Experiment Name: At_2mM_SA_P Parameter: Plant Line Value: WS
  misc_feature: MA Experiment 20000182 PARAMETER Experiment Name: At_2mM_SA_P Parameter: Timepoint (hr) Value: 6
  misc_feature: MA Experiment 20000182 PARAMETER Experiment Name: At_2mM_SA_P Parameter: Tissue Value: Aerial
  misc_feature: MA Experiment 20000182 PARAMETER Experiment Name: At_2mM_SA_P Parameter: Treatment Value: 2mM SA vs. No Treatment
  misc_feature: MA Experiment ID: 20000184 Result: Down-regulated in Transcription
  misc_feature: MA Experiment 20000184 PARAMETER Experiment Name: At_Shoots__P Parameter: Age (day) Value: 7
  misc_feature: MA Experiment 20000184 PARAMETER Experiment Name: At_Shoots__P Parameter: Tissue Value: Shoots vs. Whole Plant
  misc_feature: MA Experiment ID: 20000234 Result: Down-regulated in Transcription
  misc_feature: MA Experiment 20000234 PARAMETER Experiment Name: At_Siliques_P Parameter: Age (day) Value: 21
  misc_feature: MA Experiment 20000234 PARAMETER Experiment Name: At_Siliques_P Parameter: Organism Value: A. thaliana
  misc_feature: MA Experiment 20000234 PARAMETER Experiment Name: At_Siliques_P Parameter: Plant Line Value: WS
  misc_feature: MA Experiment 20000234 PARAMETER Experiment Name: At_Siliques_P Parameter: Tissue Value: Less Than 5mm Siliques vs. Whole Plant
  misc_feature: MA Experiment ID: 20000438 Result: Down-regulated in Transcription
  misc_feature: MA Experiment 20000438 PARAMETER Experiment Name: At_Shoots__P Parameter: Age (day) Value: 14
  misc_feature: MA Experiment 20000438 PARAMETER Experiment Name: At_Shoots__P Parameter: Tissue Value: Shoots vs. Whole Plant
  misc_feature: MA Experiment ID: 20000456 Result: Up-regulated in Transcription
  misc_feature: MA Experiment 20000456 PARAMETER Experiment Name: At_100uM_BA_P Parameter: Age (day) Value: 14
  misc_feature: MA Experiment 20000456 PARAMETER Experiment Name: At_100uM_BA_P Parameter: Organism Value: A. thaliana
  misc_feature: MA Experiment 20000456 PARAMETER Experiment Name: At_100uM_BA_P Parameter: Plant Line Value: WS
  misc_feature: MA Experiment 20000456 PARAMETER Experiment Name: At_100uM_BA_P Parameter: Timepoint (hr) Value: 6
  misc_feature: MA Experiment 20000456 PARAMETER Experiment Name: At_100uM_BA_P Parameter: Tissue Value: Aerial
  misc_feature: MA Experiment 20000456 PARAMETER Experiment Name: At_100uM_BA_P Parameter: Treatment Value: 100uM BA vs. No Treatment
  misc_feature: MA Experiment ID: 20000527 Result: Down-regulated in Transcription
  misc_feature: MA Experiment 20000527 PARAMETER Experiment Name: At_10percent_PEG_P Parameter: Age (day) Value: 20
  misc_feature: MA Experiment 20000527 PARAMETER Experiment Name: At_10percent_PEG_P Parameter: Organism Value: A. thaliana
  misc_feature: MA Experiment 20000527 PARAMETER Experiment Name: At_10percent_PEG_P Parameter: Plant Line Value: WS
  misc_feature: MA Experiment 20000527 PARAMETER Experiment Name: At_10percent_PEG_P Parameter: Timepoint (day) Value: 20
  misc_feature: MA Experiment 20000527 PARAMETER Experiment Name: At_10percent_PEG_P Parameter: Tissue Value: Whole Plant
  misc_feature: MA Experiment 20000527 PARAMETER Experiment Name: At_10percent_PEG_P Parameter: Treatment Value: 10percent PEG vs. No Treatment
  misc_feature: MA Experiment ID: 20000573 Result: Up-regulated in Transcription
  misc_feature: MA Experiment 20000573 PARAMETER Experiment Name: At_100uM_ABA_Mutants__P Parameter: Organism Value: A. thaliana
  misc_feature: MA Experiment 20000573 PARAMETER Experiment Name: At_100uM_ABA_Mutants__P Parameter: Plant Line Value: CS22 vs. Ler wt
  misc_feature: MA Experiment 20000573 PARAMETER Experiment Name: At_100uM_ABA_Mutants__P Parameter: Timepoint (hr) Value: N/A
  misc_feature: MA Experiment 20000573 PARAMETER Experiment Name: At_100uM_ABA_Mutants__P Parameter: Tissue Value: Whole Plant
  misc_feature: MA Experiment 20000573 PARAMETER Experiment Name: At_100uM_ABA_Mutants__P Parameter: Treatment Value: None
  misc_feature: MA Experiment ID: 20001556 Result: Down-regulated in Transcription
  misc_feature: MA Experiment 20001556 PARAMETER Experiment Name: At_Drought_Soil_Dry_P Parameter: Age (day) Value: 26
  misc_feature: MA Experiment 20001556 PARAMETER Experiment Name: At_Drought_Soil_Dry_P Parameter: Organism Value: A. thaliana
  misc_feature: MA Experiment 20001556 PARAMETER Experiment Name: At_Drought_Soil_Dry_P Parameter: Plant Line Value: WS
  misc_feature: MA Experiment 20001556 PARAMETER Experiment Name: At_Drought_Soil_Dry_P Parameter: Post Timepoint (hr) Value: None
  misc_feature: MA Experiment 20001556 PARAMETER Experiment Name: At_Drought_Soil_Dry_P Parameter: Post-Treatment Value: None
  misc_feature: MA Experiment 20001556 PARAMETER Experiment Name: At_Drought_Soil_Dry_P Parameter: Timepoint (day) Value: 12
  misc_feature: MA Experiment 20001556 PARAMETER Experiment Name: At_Drought_Soil_Dry_P Parameter: Treatment Value: Drought vs. No Drought
  misc_feature: MA Experiment ID: 20001557 Result: Down-regulated in Transcription
  misc_feature: MA Experiment 20001557 PARAMETER Experiment Name: At_Drought_Soil_Dry_P Parameter: Age (day) Value: 27
  misc_feature: MA Experiment 20001557 PARAMETER Experiment Name: At_Drought_Soil_Dry_P Parameter: Organism Value: A. thaliana
  misc_feature: MA Experiment 20001557 PARAMETER Experiment Name: At_Drought_Soil_Dry_P Parameter: Plant Line Value: WS
  misc_feature: MA Experiment 20001557 PARAMETER Experiment Name: At_Drought_Soil_Dry_P Parameter: Post Timepoint (hr) Value: 3
  misc_feature: MA Experiment 20001557 PARAMETER Experiment Name: At_Drought_Soil_Dry_P Parameter: Post-Treatment Value: Re-Water vs. No Drought
  misc_feature: MA Experiment 20001557 PARAMETER Experiment Name: At_Drought_Soil_Dry_P Parameter: Timepoint (day) Value: 13
  misc_feature: MA Experiment 20001557 PARAMETER Experiment Name: At_Drought_Soil_Dry_P Parameter: Treatment Value: Drought vs. No Drought
  misc_feature: MA Experiment ID: 20001558 Result: Down-regulated in Transcription
  misc_feature: MA Experiment 20001558 PARAMETER Experiment Name: At_Drought_Soil_Dry_P Parameter: Age (day) Value: 27
  misc_feature: MA Experiment 20001558 PARAMETER Experiment Name: At_Drought_Soil_Dry_P Parameter: Organism Value: A. thaliana
  misc_feature: MA Experiment 20001558 PARAMETER Experiment Name: At_Drought_Soil_Dry_P Parameter: Plant Line Value: WS
  misc_feature: MA Experiment 20001558 PARAMETER Experiment Name: At_Drought_Soil_Dry_P Parameter: Post Timepoint (hr) Value: 6
  misc_feature: MA Experiment 20001558 PARAMETER Experiment Name: At_Drought_Soil_Dry_P Parameter: Post-Treatment Value: Re-Water vs. No Drought
  misc_feature: MA Experiment 20001558 PARAMETER Experiment Name: At_Drought_Soil_Dry_P Parameter: Timepoint (day) Value: 13
  misc_feature: MA Experiment 20001558 PARAMETER Experiment Name: At_Drought_Soil_Dry_P Parameter: Treatment Value: Drought vs. No Drought
  misc_feature: MA Experiment ID: 20001560 Result: Down-regulated in Transcription
  misc_feature: MA Experiment 20001560 PARAMETER Experiment Name: At_Drought_Soil_Dry_P Parameter: Age (day) Value: 28
  misc_feature: MA Experiment 20001560 PARAMETER Experiment Name: At_Drought_Soil_Dry_P Parameter: Organism Value: A. thaliana
  misc_feature: MA Experiment 20001560 PARAMETER Experiment Name: At_Drought_Soil_Dry_P Parameter: Plant Line Value: WS
  misc_feature: MA Experiment 20001560 PARAMETER Experiment Name: At_Drought_Soil_Dry_P Parameter: Post Timepoint (hr) Value: None
  misc_feature: MA Experiment 20001560 PARAMETER Experiment Name: At_Drought_Soil_Dry_P Parameter: Post-Treatment Value: None
  misc_feature: MA Experiment 20001560 PARAMETER Experiment Name: At_Drought_Soil_Dry_P Parameter: Timepoint (day) Value: 14
  misc_feature: MA Experiment 20001560 PARAMETER Experiment Name: At_Drought_Soil_Dry_P Parameter: Treatment Value: Drought vs. No Drought
  misc_feature: MA Experiment ID: 20001768 Result: Up-regulated in Transcription
  misc_feature: MA Experiment 20001768 PARAMETER Experiment Name: At_Far-red-enriched-adult_P Parameter: Age (day) Value: 28
  misc_feature: MA Experiment 20001768 PARAMETER Experiment Name: At_Far-red-enriched-adult_P Parameter: Light Value: Far-red enriched vs. White
  misc_feature: MA Experiment 20001768 PARAMETER Experiment Name: At_Far-red-enriched-adult_P Parameter: Organism Value: A. thaliana
  misc_feature: MA Experiment 20001768 PARAMETER Experiment Name: At_Far-red-enriched-adult_P Parameter: Plant Line Value: Columbia
  misc_feature: MA Experiment 20001768 PARAMETER Experiment Name: At_Far-red-enriched-adult_P Parameter: Timepoint (hr) Value: 1
  misc_feature: MA Experiment 20001768 PARAMETER Experiment Name: At_Far-red-enriched-adult_P Parameter: Tissue Value: Aerial
  misc_feature: MA Experiment ID: 20001904 Result: Down-regulated in Transcription
  misc_feature: MA Experiment 20001904 PARAMETER Experiment Name: At_Drought_Reproduction_P Parameter: Age (day) Value: 37
  misc_feature: MA Experiment 20001904 PARAMETER Experiment Name: At_Drought_Reproduction_P Parameter: Organism Value: A. thaliana
  misc_feature: MA Experiment 20001904 PARAMETER Experiment Name: At_Drought_Reproduction_P Parameter: Plant Line Value: WS
  misc_feature: MA Experiment 20001904 PARAMETER Experiment Name: At_Drought_Reproduction_P Parameter: Timepoint (day) Value: 7
  misc_feature: MA Experiment 20001904 PARAMETER Experiment Name: At_Drought_Reproduction_P Parameter: Tissue Value: Rosettes
  misc_feature: MA Experiment 20001904 PARAMETER Experiment Name: At_Drought_Reproduction_P Parameter: Treatment Value: Drought vs. No Drought
  misc_feature: MA Experiment ID: 20001905 Result: Down-regulated in Transcription
  misc_feature: MA Experiment 20001905 PARAMETER Experiment Name: At_Drought_Reproduction_P Parameter: Age (day) Value: 40
  misc_feature: MA Experiment 20001905 PARAMETER Experiment Name: At_Drought_Reproduction_P Parameter: Organism Value: A. thaliana
  misc_feature: MA Experiment 20001905 PARAMETER Experiment Name: At_Drought_Reproduction_P Parameter: Plant Line Value: WS
  misc_feature: MA Experiment 20001905 PARAMETER Experiment Name: At_Drought_Reproduction_P Parameter: Timepoint (day) Value: 10
  misc_feature: MA Experiment 20001905 PARAMETER Experiment Name: At_Drought_Reproduction_P Parameter: Tissue Value: Rosettes
  misc_feature: MA Experiment 20001905 PARAMETER Experiment Name: At_Drought_Reproduction_P Parameter: Treatment Value: Drought vs. No Drought

SEQ ID NO: 95061 - protein, 194 aa, Arabidopsis thaliana; identical to SEQ ID NO: 91305
  peptide (1)..(194): Ceres Seq. ID no. 12727181
  misc_feature (109)..(168): Pfam Name: WRKY DNA -binding domain Pfam Description: WRKY DNA -binding domain
  misc_feature (1)..(194): Homolog of NCBI NO: 22328061 NR Description: WRKY family transcription factor; protein id: supported by cDNA: gi_16798361 [Arabidopsis thaliana]
  misc_feature (1)..(144): Homolog of NCBI NO: 8843745 NR Description: gb|AAF03448.1~gene_id:MXK3.3~similar to unknown
  misc_feature (54)..(170): Homolog of NCBI NO: 22327079 NR Description: WRKY family transcription factor; protein id: supported by cDNA: gi_18252116 [Arabidopsis thaliana]
  misc_feature (84)..(166): Homolog of NCBI NO: 34906314 NR Description: unnamed protein product [Oryza sativa (japonica group)] >gi|9558431|dbj|BAB03367.1| unnamed protein product
  misc_feature (92)..(174): Homolog of NCBI NO: 34910570 NR Description: B1131B07.13 [Oryza sativa (japonica
  misc_feature (93)..(166): Homolog of NCBI NO: 34912126 NR Description: OSJNBb0024F06.15 [Oryza sativa (japonica
  misc_feature (13)..(166): Homolog of NCBI NO: 15220582 NR Description: WRKY family transcription factor; protein id: supported by cDNA: gi_15991739 [Arabidopsis thaliana]
  misc_feature (13)..(166): Homolog of NCBI NO: 25518132 NR Description: F1N18.10 protein - Arabidopsis thaliana
  misc_feature (8)..(166): Homolog of NCBI NO: 15239913 NR Description: WRKY family transcription factor; protein id: supported by cDNA: gi_17064165, supported by cDNA: gi_17380791, by cDNA: gi_20259612 [Arabidopsis thaliana]
  misc_feature (6)..(166): Homolog of NCBI NO: 6692107 NR Description: F22C12.23 [Arabidopsis thaliana]

SEQ ID NO: 95062 - protein, 171 aa, Arabidopsis thaliana; identical to SEQ ID NO: 91306
  peptide (1)..(171): Ceres Seq. ID no. 12727182
  misc_feature (86)..(145): Pfam Name: WRKY DNA -binding domain Pfam Description: WRKY DNA -binding domain
  misc_feature (1)..(171): Homolog of NCBI NO: 22328061 NR Description: WRKY family transcription factor; protein id: supported by cDNA: gi_16798361 [Arabidopsis thaliana]
  misc_feature (1)..(121): Homolog of NCBI NO: 8843745 NR Description: gb|AAF03448.1~gene_id:MXK3.3~similar to unknown
  misc_feature (31)..(147): Homolog of NCBI NO: 22327079 NR Description: WRKY family transcription factor; protein id: supported by cDNA: gi_18252116 [Arabidopsis thaliana]
  misc_feature (61)..(143): Homolog of NCBI NO: 34906314 NR Description: unnamed protein product [Oryza sativa (japonica group)] >gi|9558431|dbj|BAB03367.1| unnamed protein product
  misc_feature (69)..(151): Homolog of NCBI NO: 34910570 NR Description: B1131B07.13 [Oryza sativa (japonica
  misc_feature (70)..(143): Homolog of NCBI NO: 34912126 NR Description: OSJNBb0024F06.15 [Oryza sativa (japonica
  misc_feature (1)..(143): Homolog of NCBI NO: 15220582 NR Description: WRKY family transcription factor; protein id: supported by cDNA: gi_15991739 [Arabidopsis thaliana]
  misc_feature (1)..(143): Homolog of NCBI NO: 25518132 NR Description: F1N18.10 protein - Arabidopsis thaliana
  misc_feature (1)..(143): Homolog of NCBI NO: 15239913 NR Description: WRKY family transcription factor; protein id: supported by cDNA: gi_17064165, supported by cDNA: gi_17380791, by cDNA: gi_20259612 [Arabidopsis thaliana]
  misc_feature (1)..(143): Homolog of NCBI NO: 6692107 NR Description: F22C12.23 [Arabidopsis thaliana]

SEQ ID NO: 95063 - protein, 162 aa, Arabidopsis thaliana; identical to SEQ ID NO: 91307
  peptide (1)..(162): Ceres Seq. ID no. 12727183
  misc_feature (77)..(136): Pfam Name: WRKY DNA -binding domain Pfam Description: WRKY DNA -binding domain
  misc_feature (1)..(162): Homolog of NCBI NO: 22328061 NR Description: WRKY family transcription factor; protein id: supported by cDNA: gi_16798361 [Arabidopsis thaliana]
  misc_feature (1)..(112): Homolog of NCBI NO: 8843745 NR Description: gb|AAF03448.1~gene_id:MXK3.3~similar to unknown
  misc_feature (22)..(138): Homolog of NCBI NO: 22327079 NR Description: WRKY family transcription factor; protein id: supported by cDNA: gi_18252116 [Arabidopsis thaliana]
  misc_feature (52)..(134): Homolog of NCBI NO: 34906314 NR Description: unnamed protein product [Oryza sativa (japonica group)] >gi|9558431|dbj|BAB03367.1| unnamed protein product
  misc_feature (60)..(142): Homolog of NCBI NO: 34910570 NR Description: B1131B07.13 [Oryza sativa (japonica
  misc_feature (61)..(134): Homolog of NCBI NO: 34912126 NR Description: OSJNBb0024F06.15 [Oryza sativa (japonica
  misc_feature (1)..(134): Homolog of NCBI NO: 15220582 NR Description: WRKY family transcription factor; protein id: supported by cDNA: gi_15991739 [Arabidopsis thaliana]
  misc_feature (1)..(134): Homolog of NCBI NO: 25518132 NR Description: F1N18.10 protein - Arabidopsis thaliana
  misc_feature (1)..(134): Homolog of NCBI NO: 15239913 NR Description: WRKY family transcription factor; protein id: supported by cDNA: gi_17064165, supported by cDNA: gi_17380791, by cDNA: gi_20259612 [Arabidopsis thaliana]
  misc_feature (1)..(134): Homolog of NCBI NO: 6692107 NR Description: F22C12.23 [Arabidopsis thaliana]

SEQ ID NO: 95064 - DNA, 621 bp, Arabidopsis thaliana; identical to SEQ ID NO: 91308
  misc_feature (1)..(621): Ceres Seq. ID no. 12727191
  misc_feature: MA Experiment ID: 20000179 Result: Down-regulated in Transcription
  misc_feature: MA Experiment 20000179 PARAMETER Experiment Name: At_Germinating_Seeds_P Parameter: Age (hr) Value: 6 vs. 0
  misc_feature: MA Experiment 20000179 PARAMETER Experiment Name: At_Germinating_Seeds_P Parameter: Tissue Value: Germinating Seeds
  misc_feature: MA Experiment ID: 20000180 Result: Down-regulated in Transcription
  misc_feature: MA Experiment 20000180 PARAMETER Experiment Name: At_Germinating_Seeds_P Parameter: Age (hr) Value: 24 vs. 0
  misc_feature: MA Experiment 20000180 PARAMETER Experiment Name: At_Germinating_Seeds_P Parameter: Tissue Value: Germinating Seeds
  misc_feature: MA Experiment ID: 20000234 Result: Up-regulated in Transcription
  misc_feature: MA Experiment 20000234 PARAMETER Experiment Name: At_Siliques_P Parameter: Age (day) Value: 21
  misc_feature: MA Experiment 20000234 PARAMETER Experiment Name: At_Siliques_P Parameter: Organism Value: A. thaliana
  misc_feature: MA Experiment 20000234 PARAMETER Experiment Name: At_Siliques_P Parameter: Plant Line Value: WS
  misc_feature: MA Experiment 20000234 PARAMETER Experiment Name: At_Siliques_P Parameter: Tissue Value: Less Than 5mm Siliques vs. Whole Plant
  misc_feature: MA Experiment ID: 20000235 Result: Up-regulated in Transcription
  misc_feature: MA Experiment 20000235 PARAMETER Experiment Name: At_Siliques_P Parameter: Age (day) Value: 21
  misc_feature: MA Experiment 20000235 PARAMETER Experiment Name: At_Siliques_P Parameter: Organism Value: A. thaliana
  misc_feature: MA Experiment 20000235 PARAMETER Experiment Name: At_Siliques_P Parameter: Plant Line Value: WS
  misc_feature: MA Experiment 20000235 PARAMETER Experiment Name: At_Siliques_P Parameter: Tissue Value: 5-10mm Siliques vs. Whole Plant
  misc_feature: MA Experiment ID: 20000264 Result: Up-regulated in Transcription
  misc_feature: MA Experiment 20000264 PARAMETER Experiment Name: At_Open_Flower_P Parameter: Age (day) Value: 21
  misc_feature: MA Experiment 20000264 PARAMETER Experiment Name: At_Open_Flower_P Parameter: Plant Line Value: WS
  misc_feature: MA Experiment 20000264 PARAMETER Experiment Name: At_Open_Flower_P Parameter: Tissue Value: Open Flower vs. Whole Plant
  misc_feature: MA Experiment ID: 20000265 Result: Up-regulated in Transcription
  misc_feature: MA Experiment 20000265 PARAMETER Experiment Name: At_Open_Flower_P Parameter: Age (day) Value: 21
  misc_feature: MA Experiment 20000265 PARAMETER Experiment Name: At_Open_Flower_P Parameter: Plant Line Value: WS
  misc_feature: MA Experiment 20000265 PARAMETER Experiment Name: At_Open_Flower_P Parameter: Tissue Value: Closed Flower vs. Whole Plant
  misc_feature: MA Experiment ID: 20000286 Result: Up-regulated in Transcription
  misc_feature: MA Experiment 20000286 PARAMETER Experiment Name: At_Open_Flower_P Parameter: Age (day) Value: 21
  misc_feature: MA Experiment 20000286 PARAMETER Experiment Name: At_Open_Flower_P Parameter: Plant Line Value: WS
  misc_feature: MA Experiment 20000286 PARAMETER Experiment Name: At_Open_Flower_P Parameter: Tissue Value: Half Open vs. Whole Plant
  misc_feature: MA Experiment ID: 20000794 Result: Up-regulated in Transcription
  misc_feature: MA Experiment 20000794 PARAMETER Experiment Name: At_Petals_P Parameter: Age (day) Value: 23-25 days
  misc_feature: MA Experiment 20000794 PARAMETER Experiment Name: At_Petals_P Parameter: Plant Line Value: WS
  misc_feature: MA Experiment 20000794 PARAMETER Experiment Name: At_Petals_P Parameter: Tissue Value: Petals vs. Whole plant
  misc_feature: MA Experiment ID: 20001906 Result: Up-regulated in Transcription
  misc_feature: MA Experiment 20001906 PARAMETER Experiment Name: At_Drought_Reproduction_P Parameter: Age (day) Value: 35
  misc_feature: MA Experiment 20001906 PARAMETER Experiment Name: At_Drought_Reproduction_P Parameter: Organism Value: A. thaliana
  misc_feature: MA Experiment 20001906 PARAMETER Experiment Name: At_Drought_Reproduction_P Parameter: Plant Line Value: WS
  misc_feature: MA Experiment 20001906 PARAMETER Experiment Name: At_Drought_Reproduction_P Parameter: Timepoint (day) Value: 5
  misc_feature: MA Experiment 20001906 PARAMETER Experiment Name: At_Drought_Reproduction_P Parameter: Tissue Value: Siliques
  misc_feature: MA Experiment 20001906 PARAMETER Experiment Name: At_Drought_Reproduction_P Parameter: Treatment Value: Drought vs. No Drought
  misc_feature: MA Experiment ID: 20001911 Result: Up-regulated in Transcription
  misc_feature: MA Experiment 20001911 PARAMETER Experiment Name: At_Drought_Reproduction_P Parameter: Age (day) Value: 40
  misc_feature: MA Experiment 20001911 PARAMETER Experiment Name: At_Drought_Reproduction_P Parameter: Organism Value: A. thaliana
  misc_feature: MA Experiment 20001911 PARAMETER Experiment Name: At_Drought_Reproduction_P Parameter: Plant Line Value: WS
  misc_feature: MA Experiment 20001911 PARAMETER Experiment Name: At_Drought_Reproduction_P Parameter: Timepoint (day) Value: 10
  misc_feature: MA Experiment 20001911 PARAMETER Experiment Name: At_Drought_Reproduction_P Parameter: Tissue Value: Flowers
  misc_feature: MA Experiment 20001911 PARAMETER Experiment Name: At_Drought_Reproduction_P Parameter: Treatment Value: Drought vs. No Drought

SEQ ID NO: 95065 - protein, 206 aa, Arabidopsis thaliana; identical to SEQ ID NO: 91309
  peptide (1)..(206): Ceres Seq. ID no. 12727192
  misc_feature (9)..(170): Pfam Name: Ras family Pfam Description: Ras family
  misc_feature (1)..(206): Homolog of NCBI NO: 15238317 NR Description: GTP-binding protein, putative; protein id:
  misc_feature (8)..(206): Homolog of NCBI NO: 15238112 NR Description: Ras family GTP-binding protein, putative; protein
  misc_feature (8)..(206): Homolog of NCBI NO: 15227173 NR Description: GTP-binding protein, putative; protein id:
  misc_feature (8)..(206): Homolog of NCBI NO: 34901804 NR Description: putative ras-related protein Rab-6A [Oryza sativa
  misc_feature (8)..(206): Homolog of NCBI NO: 15224916 NR Description: GTP-binding protein, putative; protein id:
  misc_feature (8)..(206): Homolog of NCBI NO: 7438385 NR Description: GTP-binding protein Rab6 - common tobacco
  misc_feature (8)..(206): Homolog of NCBI NO: 15236081 NR Description: GTP-binding protein, putative; protein id: supported by cDNA: gi_13272476, supported by cDNA: gi_14423429
  misc_feature (2)..(206): Homolog of NCBI NO: 13195674 NR Description: RAB6, member RAS oncogene family [Mus musculus]
  misc_feature (2)..(206): Homolog of NCBI NO: 38679888 NR Description: RAB6A, member RAS oncogene family isoform b;
  misc_feature (2)..(206): Homolog of NCBI NO: 17512290 NR Description: Similar to RAB6C, member RAS oncogene family [Mus

SEQ ID NO: 95066 - protein, 179 aa, Arabidopsis thaliana; identical to SEQ ID NO: 91310
  peptide (1)..(179): Ceres Seq. ID no. 12727193
  misc_feature (1)..(143): Pfam Name: Ras family Pfam Description: Ras family
  misc_feature (1)..(179): Homolog of NCBI NO: 15238317 NR Description: GTP-binding protein, putative; protein id:
  misc_feature (1)..(179): Homolog of NCBI NO: 15238112 NR Description: Ras family GTP-binding protein, putative; protein
  misc_feature (1)..(179): Homolog of NCBI NO: 15227173 NR Description: GTP-binding protein, putative; protein id:
  misc_feature (1)..(179): Homolog of NCBI NO: 34901804 NR Description: putative ras-related protein Rab-6A [Oryza sativa
  misc_feature (1)..(179): Homolog of NCBI NO: 15224916 NR Description: GTP-binding protein, putative; protein id:
  misc_feature (1)..(179): Homolog of NCBI NO: 7438385 NR Description: GTP-binding protein Rab6 - common tobacco
  misc_feature (1)..(179): Homolog of NCBI NO: 15236081 NR Description: GTP-binding protein, putative; protein id: supported by cDNA: gi_13272476, supported by cDNA: gi_14423429
  misc_feature (1)..(179): Homolog of NCBI NO: 13195674 NR Description: RAB6, member RAS oncogene family [Mus musculus]
  misc_feature (1)..(179): Homolog of NCBI NO: 38679888 NR Description: RAB6A, member RAS oncogene family isoform b;
  misc_feature (1)..(179): Homolog of NCBI NO: 17512290 NR Description: Similar to RAB6C, member RAS oncogene family [Mus

SEQ ID NO: 95067 - DNA, 1146 bp, Arabidopsis thaliana; identical to SEQ ID NO: 91311
  misc_feature (1)..(1146): Ceres Seq. ID no. 12727205
  misc_feature: MA Experiment ID: 108561 Result: Up-regulated in Transcription
  misc_feature: MA Experiment 108561 PARAMETER Experiment Name: At_100uM_ABA_cDNA_P Parameter: Timepoint (hr) Value: 6
  misc_feature: MA Experiment 108561 PARAMETER Experiment Name: At_100uM_ABA_cDNA_P Parameter: Tissue Value: Aerial
  misc_feature: MA Experiment 108561 PARAMETER Experiment Name: At_100uM_ABA_cDNA_P Parameter: Treatment Value: 100uM ABA vs. No Treatment
  misc_feature: MA Experiment ID: 108573 Result: Up-regulated in Transcription
  misc_feature: MA Experiment 108573 PARAMETER Experiment Name: At_Drought_cDNA_P Parameter: Timepoint (hr) Value: 6
  misc_feature: MA Experiment 108573 PARAMETER Experiment Name: At_Drought_cDNA_P Parameter: Tissue Value: Aerial
  misc_feature: MA Experiment 108573 PARAMETER Experiment Name: At_Drought_cDNA_P Parameter: Treatment Value: Drought vs. No Drought
  misc_feature: MA Experiment ID: 108574 Result: Up-regulated in Transcription
  misc_feature: MA Experiment 108574 PARAMETER Experiment Name: At_Wounding__cDNA_P Parameter: Timepoint (hr) Value: 1
  misc_feature: MA Experiment 108574 PARAMETER Experiment Name: At_Wounding__cDNA_P Parameter: Tissue Value: Aerial
  misc_feature: MA Experiment 108574 PARAMETER Experiment Name: At_Wounding__cDNA_P Parameter: Treatment Value: Wounding vs. No Wounding
  misc_feature: MA Experiment ID: 108579 Result: Up-regulated in Transcription
  misc_feature: MA Experiment 108579 PARAMETER Experiment Name: At_4deg_Cold_cDNA_P Parameter: Temperature (deg C) Value: 4 vs. 22
  misc_feature: MA Experiment 108579 PARAMETER Experiment Name: At_4deg_Cold_cDNA_P Parameter: Timepoint (hr) Value: 6
  misc_feature: MA Experiment 108579 PARAMETER Experiment Name: At_4deg_Cold_cDNA_P Parameter: Tissue Value: Aerial
  misc_feature: MA Experiment ID: 108585 Result: Up-regulated in Transcription
  misc_feature: MA Experiment 108585 PARAMETER Experiment Name: At_5mM_NaNP_cDNA_P Parameter: Timepoint (hr) Value: 6
  misc_feature: MA Experiment 108585 PARAMETER Experiment Name: At_5mM_NaNP_cDNA_P Parameter: Tissue Value: Aerial
  misc_feature: MA Experiment 108585 PARAMETER Experiment Name: At_5mM_NaNP_cDNA_P Parameter: Treatment Value: null

SEQ ID NO: 95068 - protein, 381 aa, Arabidopsis thaliana; identical to SEQ ID NO: 91312
  peptide (1)..(381): Ceres Seq. ID no. 12727206
  misc_feature (119)..(353): Pfam Name: Trehalose-phosphatase Pfam Description: Trehalose-phosphatase
  misc_feature (1)..(381): Homolog of NCBI NO: 15238360 NR Description: trehalose-6-phosphate phosphatase; protein id:
  misc_feature (3)..(372): Homolog of NCBI NO: 30683008 NR Description: trehalose-6-phosphate phosphatase, putative
  misc_feature (3)..(356): Homolog of NCBI NO: 11282598 NR Description: trehalose-6-phosphate phosphatase-like protein -
  misc_feature (41)..(363): Homolog of NCBI NO: 30692524 NR Description: trehalose-6-phosphate phosphatase, putative thaliana] >gi|26452744|dbj|BAC43453.1| putative protein thaliana] >gi|28973301|gb|AAO63975.1| unknown protein
  misc_feature (1)..(363): Homolog of NCBI NO: 18399940 NR Description: trehalose-phosphatase, putative; protein id:
  misc_feature (1)..(363): Homolog of NCBI NO: 21554408 NR Description: trehalose-phosphatase, putative [Arabidopsis
  misc_feature (1)..(363): Homolog of NCBI NO: 25354597 NR Description: probable trehalose-phosphatase [imported] -
  misc_feature (1)..(363): Homolog of NCBI NO: 15218205 NR Description: trehalose-6-phosphate phosphatase (AtTPPB); id: At1g78090.1, supported by cDNA: gi_2944179 [Arabidopsis
  misc_feature (1)..(363): Homolog of NCBI NO: 25354595 NR Description: trehalose-phosphatase (EC 3.1.3.12) B [imported] -
  misc_feature (103)..(363): Homolog of NCBI NO: 15227161 NR Description: putative trehalose-6-phosphate phosphatase;

SEQ ID NO: 95069 - protein, 312 aa, Arabidopsis thaliana; identical to SEQ ID NO: 91313
  peptide (1)..(312): Ceres Seq. ID no. 12727207
  misc_feature (50)..(284): Pfam Name: Trehalose-phosphatase Pfam Description: Trehalose-phosphatase
  misc_feature (1)..(312): Homolog of NCBI NO: 15238360 NR Description: trehalose-6-phosphate phosphatase; protein id:
  misc_feature (1)..(303): Homolog of NCBI NO: 30683008 NR Description: trehalose-6-phosphate phosphatase, putative
  misc_feature (1)..(287): Homolog of NCBI NO: 11282598 NR Description: trehalose-6-phosphate phosphatase-like protein -
  misc_feature (1)..(294): Homolog of NCBI NO: 30692524 NR Description: trehalose-6-phosphate phosphatase, putative thaliana] >gi|26452744|dbj|BAC43453.1| putative protein thaliana] >gi|28973301|gb|AAO63975.1| unknown protein
  misc_feature (1)..(294): Homolog of NCBI NO: 18399940 NR Description: trehalose-phosphatase, putative; protein id:
  misc_feature (1)..(294): Homolog of NCBI NO: 21554408 NR Description: trehalose-phosphatase, putative [Arabidopsis
  misc_feature (1)..(294): Homolog of NCBI NO: 25354597 NR Description: probable trehalose-phosphatase [imported] -
  misc_feature (1)..(294): Homolog of NCBI NO: 15218205 NR Description: trehalose-6-phosphate phosphatase (AtTPPB); id: At1g78090.1, supported by cDNA: gi_2944179 [Arabidopsis
  misc_feature (1)..(294): Homolog of NCBI NO: 25354595 NR Description: trehalose-phosphatase (EC 3.1.3.12) B [imported] -
  misc_feature (34)..(294): Homolog of NCBI NO: 15227161 NR Description: putative trehalose-6-phosphate phosphatase;

SEQ ID NO: 95070 - protein, 279 aa, Arabidopsis thaliana; identical to SEQ ID NO: 91314
  peptide (1)..(279): Ceres Seq. ID no. 12727208
  misc_feature (17)..(251): Pfam Name: Trehalose-phosphatase Pfam Description: Trehalose-phosphatase
  misc_feature (1)..(279): Homolog of NCBI NO: 15238360 NR Description: trehalose-6-phosphate phosphatase; protein id:
  misc_feature (1)..(270): Homolog of NCBI NO: 30683008 NR Description: trehalose-6-phosphate phosphatase, putative
  misc_feature (1)..(254): Homolog of NCBI NO: 11282598 NR Description: trehalose-6-phosphate phosphatase-like protein -
  misc_feature (1)..(261): Homolog of NCBI NO: 30692524 NR Description: trehalose-6-phosphate phosphatase, putative thaliana] >gi|26452744|dbj|BAC43453.1| putative protein thaliana] >gi|28973301|gb|AAO63975.1| unknown protein
  misc_feature (1)..(261): Homolog of NCBI NO: 18399940 NR Description: trehalose-phosphatase, putative; protein id:
  misc_feature (1)..(261): Homolog of NCBI NO: 21554408 NR Description: trehalose-phosphatase, putative [Arabidopsis
  misc_feature (1)..(261): Homolog of NCBI NO: 25354597 NR Description: probable trehalose-phosphatase [imported] -
  misc_feature (1)..(261): Homolog of NCBI NO: 15218205 NR Description: trehalose-6-phosphate phosphatase (AtTPPB); id: At1g78090.1, supported by cDNA: gi_2944179 [Arabidopsis
  misc_feature (1)..(261): Homolog of NCBI NO: 25354595 NR Description: trehalose-phosphatase (EC 3.1.3.12) B [imported] -
  misc_feature (1)..(261): Homolog of NCBI NO: 15227161 NR Description: putative trehalose-6-phosphate phosphatase;

SEQ ID NO: 95071 - DNA, 1089 bp, Arabidopsis thaliana; identical to SEQ ID NO: 91315
  misc_feature (1)..(1089): Ceres Seq. ID no. 12727221
  misc_feature: MA Experiment ID: 20000185 Result: Up-regulated in Transcription
  misc_feature: MA Experiment 20000185 PARAMETER Experiment Name: At_Roots__P Parameter: Age (day) Value: 7 vs. 21
  misc_feature: MA Experiment 20000185 PARAMETER Experiment Name: At_Roots__P Parameter: Organism Value: A. thaliana
  misc_feature: MA Experiment 20000185 PARAMETER Experiment Name: At_Roots__P Parameter: Tissue Value: Roots vs. Whole Plant
  misc_feature: MA Experiment ID: 20000439 Result: Up-regulated in Transcription
  misc_feature: MA Experiment 20000439 PARAMETER Experiment Name: At_Roots__P Parameter: Age (day) Value: 14 vs. 21
  misc_feature: MA Experiment 20000439 PARAMETER Experiment Name: At_Roots__P Parameter: Organism Value: A. thaliana
  misc_feature: MA Experiment 20000439 PARAMETER Experiment Name: At_Roots__P Parameter: Tissue Value: Roots vs. Whole Plant

SEQ ID NO: 95072 - protein, 362 aa, Arabidopsis thaliana; identical to SEQ ID NO: 91316
  peptide (1)..(362): Ceres Seq. ID no. 12727222
  misc_feature (147)..(177): Pfam Name: VQ motif Pfam Description: VQ motif
  misc_feature (1)..(362): Homolog of NCBI NO: 15238363 NR Description: putative protein; protein id: At5g65170.1 thaliana] >gi|10178179|dbj|BAB11653.1|
  misc_feature (134)..(226): Homolog of NCBI NO: 15220238 NR Description: hypothetical protein; protein id: At1g35830.1
  misc_feature (91)..(276): Homolog of NCBI NO: 15235990 NR Description: putative protein; protein id: At4g39720.1
  misc_feature (96)..(266): Homolog of NCBI NO: 18403283 NR Description: expressed protein; protein id: At3g22160.1, by cDNA: 8081. [Arabidopsis thaliana] emb|CAB10291.1~gene_id:MKA23.7~similar to unknown protein
  misc_feature (97)..(201): Homolog of NCBI NO: 21593100 NR Description: unknown [Arabidopsis thaliana]
  misc_feature (97)..(201): Homolog of NCBI NO: 18414384 NR Description: expressed protein; protein id: At4g15120.1, by cDNA: 36129. [Arabidopsis thaliana] >gi|7485016|pir||A71415
  misc_feature (134)..(192): Homolog of NCBI NO: 22535682 NR Description: hypothetical protein~predicted by GeneMark.hmm

SEQ ID NO: 95073 - protein, 354 aa, Arabidopsis thaliana; identical to SEQ ID NO: 91317
  peptide (1)..(354): Ceres Seq. ID no. 12727223
  misc_feature (139)..(169): Pfam Name: VQ motif Pfam Description: VQ motif
  misc_feature (1)..(354): Homolog of NCBI NO: 15238363 NR Description: putative protein; protein id: At5g65170.1 thaliana] >gi|10178179|dbj|BAB11653.1|
  misc_feature (126)..(218): Homolog of NCBI NO: 15220238 NR Description: hypothetical protein; protein id: At1g35830.1
  misc_feature (83)..(268): Homolog of NCBI NO: 15235990 NR Description: putative protein; protein id: At4g39720.1
  misc_feature (88)..(258): Homolog of NCBI NO: 18403283 NR Description: expressed protein; protein id: At3g22160.1, by cDNA: 8081. [Arabidopsis thaliana] emb|CAB10291.1~gene_id:MKA23.7~similar to unknown protein
  misc_feature (89)..(193): Homolog of NCBI NO: 21593100 NR Description: unknown [Arabidopsis thaliana]
  misc_feature (89)..(193): Homolog of NCBI NO: 18414384 NR Description: expressed protein; protein id: At4g15120.1, by cDNA: 36129. [Arabidopsis thaliana] >gi|7485016|pir||A71415
  misc_feature (126)..(184): Homolog of NCBI NO: 22535682 NR Description: hypothetical protein~predicted by GeneMark.hmm

SEQ ID NO: 95074 - protein, 199 aa, Arabidopsis thaliana; identical to SEQ ID NO: 91318
  peptide (1)..(199): Ceres Seq. ID no. 12727224
  misc_feature (1)..(199): Homolog of NCBI NO: 15238363 NR Description: putative protein; protein id: At5g65170.1 thaliana] >gi|10178179|dbj|BAB11653.1|
  misc_feature (1)..(63): Homolog of NCBI NO: 15220238 NR Description: hypothetical protein; protein id: At1g35830.1
  misc_feature (1)..(113): Homolog of NCBI NO: 15235990 NR Description: putative protein; protein id: At4g39720.1
  misc_feature (1)..(103): Homolog of NCBI NO: 18403283 NR Description: expressed protein; protein id: At3g22160.1, by cDNA: 8081. [Arabidopsis thaliana] emb|CAB10291.1~gene_id:MKA23.7~similar to unknown protein
  misc_feature (1)..(38): Homolog of NCBI NO: 21593100 NR Description: unknown [Arabidopsis thaliana]
  misc_feature (1)..(38): Homolog of NCBI NO: 18414384 NR Description: expressed protein; protein id: At4g15120.1, by cDNA: 36129. [Arabidopsis thaliana] >gi|7485016|pir||A71415
  misc_feature (1)..(29): Homolog of NCBI NO: 22535682 NR Description: hypothetical protein~predicted by GeneMark.hmm

SEQ ID NO: 95075 - DNA, 411 bp, Arabidopsis thaliana; identical to SEQ ID NO: 91319
  misc_feature (1)..(411): Ceres Seq. ID no. 12727235
  misc_feature: MA Experiment ID: 20000328 Result: Down-regulated in Transcription
  misc_feature: MA Experiment 20000328 PARAMETER Experiment Name: At_42deg_Heat_Sub_P Parameter: Age (day) Value: 14
  misc_feature: MA Experiment 20000328 PARAMETER Experiment Name: At_42deg_Heat_Sub_P Parameter: Organism Value: A. thaliana
  misc_feature: MA Experiment 20000328 PARAMETER Experiment Name: At_42deg_Heat_Sub_P Parameter: Plant Line Value: WS
  misc_feature: MA Experiment 20000328 PARAMETER Experiment Name: At_42deg_Heat_Sub_P Parameter: Temperature (deg C) Value: 42 vs. 22
  misc_feature: MA Experiment 20000328 PARAMETER Experiment Name: At_42deg_Heat_Sub_P Parameter: Timepoint (hr) Value: 6
  misc_feature: MA Experiment 20000328 PARAMETER Experiment Name: At_42deg_Heat_Sub_P Parameter: Tissue Value: Aerial

SEQ ID NO: 95076 - protein, 136 aa, Arabidopsis thaliana; identical to SEQ ID NO: 8709
  peptide (1)..(136): Ceres Seq. ID no. 12727236
  misc_feature (17)..(135): Pfam Name: Core histone H2A/H2B/H3/H4 Pfam Description: Core histone H2A/H2B/H3/H4
  misc_feature (1)..(136): Homolog of NCBI NO: 15232146 NR Description: histone H3, putative; protein id: At3g27360.1, by cDNA: gi_14335141, supported by cDNA: gi_18655352 [Arabidopsis >gi|15238433|ref|NP_201339.1| histone H3 (sp|P05203); id:
  misc_feature (1)..(136): Homolog of NCBI NO: 122087 NR Description: Histone H3 >gi|81849|pir||S04520 histone H3
  misc_feature (1)..(136): Homolog of NCBI NO: 1362108 NR Description: histone H3 homolog - common tobacco
  misc_feature (1)..(136): Homolog of NCBI NO: 166384 NR Description: histone H3 (H3-1.1)
  misc_feature (2)..(136): Homolog of NCBI NO: 70753 NR Description: histone H3 - garden pea (tentative sequence)
  misc_feature (2)..(136): Homolog of NCBI NO: 122083 NR Description: Histone H3 >gi|70751|pir||HSEAH3 histone H3 -
  misc_feature (1)..(136): Homolog of NCBI NO: 122070 NR Description: Histone H3 >gi|82483|pir||A25564 histone H3 - >gi|169793|gb|AAA33907.1| histone 3 >gi|940018|gb|AAA74190.1|
  misc_feature (1)..(136): Homolog of NCBI NO: 7305139 NR Description: histone 1, H3f; histone gene complex 1 [Mus
  misc_feature (1)..(136): Homolog of NCBI NO: 30061401 NR Description: histone 2, H3ca1 [Mus musculus]
  misc_feature (1)..(136): Homolog of NCBI NO: 37546835 NR Description: similar to histone protein Hist2h3c1 [Homo

SEQ ID NO: 95077 - DNA, 3846 bp, Arabidopsis thaliana; identical to SEQ ID NO: 91321
  misc_feature (1)..(3846): Ceres Seq. ID no. 12727244
  misc_feature: MA Experiment ID: 20000173 Result: Down-regulated in Transcription
  misc_feature: MA Experiment 20000173 PARAMETER Experiment Name: At_42deg_Heat_P Parameter: Age (day) Value: 14
  misc_feature: MA Experiment 20000173 PARAMETER Experiment Name: At_42deg_Heat_P Parameter: Organism Value: A. thaliana
  misc_feature: MA Experiment 20000173 PARAMETER Experiment Name: At_42deg_Heat_P Parameter: Plant Line Value: WS
  misc_feature: MA Experiment 20000173 PARAMETER Experiment Name: At_42deg_Heat_P Parameter: Temperature (deg C) Value: 42 vs. 22
  misc_feature: MA Experiment 20000173 PARAMETER Experiment Name: At_42deg_Heat_P Parameter: Timepoint (hr) Value: 6
  misc_feature: MA Experiment 20000173 PARAMETER Experiment Name: At_42deg_Heat_P Parameter: Tissue Value: Aerial
  misc_feature: MA Experiment ID: 20000794 Result: Up-regulated in Transcription
  misc_feature: MA Experiment 20000794 PARAMETER Experiment Name: At_Petals_P Parameter: Age (day) Value: 23-25 days
  misc_feature: MA Experiment 20000794 PARAMETER Experiment Name: At_Petals_P Parameter: Plant Line Value: WS
  misc_feature: MA Experiment 20000794 PARAMETER Experiment Name: At_Petals_P Parameter: Tissue Value: Petals vs. Whole plant

SEQ ID NO: 95078 - protein, 1281 aa, Arabidopsis thaliana; identical to SEQ ID NO: 91322
  peptide (1)..(1281): Ceres Seq. ID no. 12727245
  misc_feature (476)..(815): Pfam Name: Myosin tail Pfam Description: Myosin tail
  misc_feature (317)..(592): Homolog of NCBI NO: 15144517 NR Description: TH65-like protein [Lycopersicon esculentum]
  misc_feature (65)..(236): Homolog of NCBI NO: 15144517 NR Description: TH65-like protein [Lycopersicon esculentum]
  misc_feature (1)..(70): Homolog of NCBI NO: 15144517 NR Description: TH65-like protein [Lycopersicon esculentum]
  misc_feature (486)..(866): Homolog of NCBI NO: 2576255 NR Description: TH65 protein [Arabidopsis thaliana]
  misc_feature (52)..(503): Homolog of NCBI NO: 22329655 NR Description: kinesin-related protein; protein id: At1g18410.1
  misc_feature (66)..(514): Homolog of NCBI NO: 25406299 NR Description: protein kinesin F2P9.27 [imported] - Arabidopsis
  misc_feature (66)..(514): Homolog of NCBI NO: 22330608 NR Description: kinesin-related protein; protein id: At1g73860.1
  misc_feature (66)..(514): Homolog of NCBI NO: 12324217 NR Description: kinesin-related protein; 103921-99132
  misc_feature (123)..(528): Homolog of NCBI NO: 15240982 NR Description: kinesin-related protein; protein id: At5g27550.1
  misc_feature (45)..(631): Homolog of NCBI NO: 15218418 NR Description: kinesin-related protein; protein id: At1g72250.1

SEQ ID NO: 95079 - protein, 1273 aa, Arabidopsis thaliana; identical to SEQ ID NO: 91323
  peptide (1)..(1273): Ceres Seq. ID no. 12727246
  misc_feature (468)..(807): Pfam Name: Myosin tail Pfam Description: Myosin tail
  misc_feature (309)..(584): Homolog of NCBI NO: 15144517 NR Description: TH65-like protein [Lycopersicon esculentum]
  misc_feature (57)..(228): Homolog of NCBI NO: 15144517 NR Description: TH65-like protein [Lycopersicon esculentum]
  misc_feature (1)..(62): Homolog of NCBI NO: 15144517 NR Description: TH65-like protein [Lycopersicon esculentum]
  misc_feature (478)..(858): Homolog of NCBI NO: 2576255 NR Description: TH65 protein [Arabidopsis thaliana]
  misc_feature (44)..(495): Homolog of NCBI NO: 22329655 NR Description: kinesin-related protein; protein id: At1g18410.1
  misc_feature (58)..(506): Homolog of NCBI NO: 25406299 NR Description: protein kinesin F2P9.27 [imported] - Arabidopsis
  misc_feature (58)..(506): Homolog of NCBI NO: 22330608 NR Description: kinesin-related protein; protein id: At1g73860.1
  misc_feature (58)..(506): Homolog of NCBI NO: 12324217 NR Description: kinesin-related protein; 103921-99132
  misc_feature (115)..(520): Homolog of NCBI NO: 15240982 NR Description: kinesin-related protein; protein id: At5g27550.1
  misc_feature (37)..(623): Homolog of NCBI NO: 15218418 NR Description: kinesin-related protein; protein id: At1g72250.1

SEQ ID NO: 95080 - protein, 1246 aa, Arabidopsis thaliana; identical to SEQ ID NO: 91324
  peptide (1)..(1246): Ceres Seq. ID no. 12727247
  misc_feature (441)..(780): Pfam Name: Myosin tail Pfam Description: Myosin tail
  misc_feature (282)..(557): Homolog of NCBI NO: 15144517 NR Description: TH65-like protein [Lycopersicon esculentum]
  misc_feature (30)..(201): Homolog of NCBI NO: 15144517 NR Description: TH65-like protein [Lycopersicon esculentum]
  misc_feature (1)..(35): Homolog of NCBI NO: 15144517 NR Description: TH65-like protein [Lycopersicon esculentum]
  misc_feature (451)..(831): Homolog of NCBI NO: 2576255 NR Description: TH65 protein [Arabidopsis thaliana]
  misc_feature (17)..(468): Homolog of NCBI NO: 22329655 NR Description: kinesin-related protein; protein id: At1g18410.1
  misc_feature (31)..(479): Homolog of NCBI NO: 25406299 NR Description: protein kinesin F2P9.27 [imported] - Arabidopsis
  misc_feature (31)..(479): Homolog of NCBI NO: 22330608 NR Description: kinesin-related protein; protein id: At1g73860.1
  misc_feature (31)..(479): Homolog of NCBI NO: 12324217 NR Description: kinesin-related protein; 103921-99132
  misc_feature (88)..(493): Homolog of NCBI NO: 15240982 NR Description: kinesin-related protein; protein id: At5g27550.1
  misc_feature (10)..(596): Homolog of NCBI NO: 15218418 NR Description: kinesin-related protein; protein id: At1g72250.1

SEQ ID NO: 95081 - DNA, 1287 bp, Arabidopsis thaliana; identical to SEQ ID NO: 91325
  misc_feature (1)..(1287): Ceres Seq. ID no. 12727274
  misc_feature: MA Experiment ID: 20000306 Result: Up-regulated in Transcription
  misc_feature: MA Experiment 20000306 PARAMETER Experiment Name: At_Germinating_Seeds_Sub_P Parameter: Age (hr) Value: 6 vs. 0
  misc_feature: MA Experiment 20000306 PARAMETER Experiment Name: At_Germinating_Seeds_Sub_P Parameter: Organism Value: A. thaliana
  misc_feature: MA Experiment 20000306 PARAMETER Experiment Name: At_Germinating_Seeds_Sub_P Parameter: Plant Line Value: WS
  misc_feature: MA Experiment 20000306 PARAMETER Experiment Name: At_Germinating_Seeds_Sub_P Parameter: Tissue Value: Germinating Seeds
  misc_feature: MA Experiment ID: 20000315 Result: Down-regulated in Transcription
  misc_feature: MA Experiment 20000315 PARAMETER Experiment Name: At_14day_Shoots-Roots_Sub_P Parameter: Age (day) Value: 14
  misc_feature: MA Experiment 20000315 PARAMETER Experiment Name: At_14day_Shoots-Roots_Sub_P Parameter: Organism Value: A. thaliana
  misc_feature: MA Experiment 20000315 PARAMETER Experiment Name: At_14day_Shoots-Roots_Sub_P Parameter: Plant Line Value: WS
  misc_feature: MA Experiment 20000315 PARAMETER Experiment Name: At_14day_Shoots-Roots_Sub_P Parameter: Tissue Value: Shoots vs. Whole Plant
  misc_feature: MA Experiment ID: 20000328 Result: Down-regulated in Transcription
  misc_feature: MA Experiment 20000328 PARAMETER Experiment Name: At_42deg_Heat_Sub_P Parameter: Age (day) Value: 14
  misc_feature: MA Experiment 20000328 PARAMETER Experiment Name: At_42deg_Heat_Sub_P Parameter: Organism Value: A. thaliana
  misc_feature: MA Experiment 20000328 PARAMETER Experiment Name: At_42deg_Heat_Sub_P Parameter: Plant Line Value: WS
  misc_feature: MA Experiment 20000328 PARAMETER Experiment Name: At_42deg_Heat_Sub_P Parameter: Temperature (deg C) Value: 42 vs. 22
  misc_feature: MA Experiment 20000328 PARAMETER Experiment Name: At_42deg_Heat_Sub_P Parameter: Timepoint (hr) Value: 6
  misc_feature: MA Experiment 20000328 PARAMETER Experiment Name: At_42deg_Heat_Sub_P Parameter: Tissue Value: Aerial

SEQ ID NO: 95082 - protein, 428 aa, Arabidopsis thaliana; identical to SEQ ID NO: 91326
  peptide (1)..(428): Ceres Seq. ID no. 12727275
  misc_feature (8)..(427): Pfam Name: Adaptor complexes medium subunit family Pfam Description: Adaptor complexes medium subunit family
  misc_feature (1)..(428): Homolog of NCBI NO: 15220202 NR Description: putative clathrin-coat assembly protein; protein At1g10730.1 [Arabidopsis thaliana] >gi|25320047|pir||G86240
  misc_feature (111)..(428): Homolog of NCBI NO: 6573741 NR Description: F20B24.16 [Arabidopsis thaliana]
  misc_feature (1)..(92): Homolog of NCBI NO: 6573741 NR Description: F20B24.16 [Arabidopsis thaliana]
  misc_feature (1)..(428): Homolog of NCBI NO: 15219810 NR Description: clathrin adaptor medium chain protein MU1B, protein id: At1g60780.1, supported by cDNA: gi_20466371 thaliana] >gi|25320049|pir||C96633 probable Serine/Threonine
  misc_feature (1)..(428): Homolog of NCBI NO: 34910334 NR Description: putative clathrin-associated protein [Oryza
  misc_feature (1)..(427): Homolog of NCBI NO: 21913172 NR Description: mu1 adaptin [Toxoplasma gondii]
  misc_feature (5)..(427): Homolog of NCBI NO: 28949965 NR Description: probable clathrin assembly protein AP47
  misc_feature (4)..(426): Homolog of NCBI NO: 14210504 NR Description: adaptor-related protein complex 1, mu 1 subunit; assembly protein complex 1, medium chain; clathrin coat assembly
  misc_feature (4)..(426): Homolog of NCBI NO: 6671557 NR Description: adaptor-related protein complex AP-1, mu subunit
  misc_feature (4)..(427): Homolog of NCBI NO: 17508211 NR Description: UNCoordinated locomotion UNC-101,

SEQ ID NO: 95083 - protein, 368 aa, Arabidopsis thaliana; identical to SEQ ID NO: 91327
  peptide (1)..(368): Ceres Seq. ID no. 12727276
  misc_feature (1)..(367): Pfam Name: Adaptor complexes medium subunit family Pfam Description: Adaptor complexes medium subunit family
  misc_feature (1)..(368): Homolog of NCBI NO: 15220202 NR Description: putative clathrin-coat assembly protein; protein At1g10730.1 [Arabidopsis thaliana] >gi|25320047|pir||G86240
  misc_feature (51)..(368): Homolog of NCBI NO: 6573741 NR Description: F20B24.16 [Arabidopsis thaliana]
  misc_feature (1)..(32): Homolog of NCBI NO: 6573741 NR Description: F20B24.16 [Arabidopsis thaliana]
  misc_feature (1)..(368): Homolog of NCBI NO: 15219810 NR Description: clathrin adaptor medium chain protein MU1B, protein id: At1g60780.1, supported by cDNA: gi_20466371 thaliana] >gi|25320049|pir||C96633 probable Serine/Threonine
  misc_feature (1)..(368): Homolog of NCBI NO: 34910334 NR Description: putative clathrin-associated protein [Oryza
  misc_feature (1)..(367): Homolog of NCBI NO: 21913172 NR Description: mu1 adaptin [Toxoplasma gondii]
  misc_feature (1)..(367): Homolog of NCBI NO: 28949965 NR Description: probable clathrin assembly protein AP47
  misc_feature (1)..(366): Homolog of NCBI NO: 14210504 NR Description: adaptor-related protein complex 1, mu 1 subunit; assembly protein complex 1, medium chain; clathrin coat assembly
  misc_feature (1)..(366): Homolog of NCBI NO: 6671557 NR Description: adaptor-related protein complex AP-1, mu subunit
  misc_feature (1)..(367): Homolog of NCBI NO: 17508211 NR Description: UNCoordinated locomotion UNC-101,

SEQ ID NO: 95084 - protein, 358 aa, Arabidopsis thaliana; identical to SEQ ID NO: 91328
  peptide (1)..(358): Ceres Seq. ID no. 12727277
  misc_feature (1)..(357): Pfam Name: Adaptor complexes medium subunit family Pfam Description: Adaptor complexes medium subunit family
  misc_feature (1)..(358): Homolog of NCBI NO: 15220202 NR Description: putative clathrin-coat assembly protein; protein At1g10730.1 [Arabidopsis thaliana] >gi|25320047|pir||G86240
  misc_feature (41)..(358): Homolog of NCBI NO: 6573741 NR Description: F20B24.16 [Arabidopsis thaliana]
  misc_feature (1)..(22): Homolog of NCBI NO: 6573741 NR Description: F20B24.16 [Arabidopsis thaliana]
  misc_feature (1)..(358): Homolog of NCBI NO: 15219810 NR Description: clathrin adaptor medium chain protein MU1B, protein id: At1g60780.1, supported by cDNA: gi_20466371 thaliana] >gi|25320049|pir||C96633 probable Serine/Threonine
  misc_feature (1)..(358): Homolog of NCBI NO: 34910334 NR Description: putative clathrin-associated protein [Oryza
  misc_feature (1)..(357): Homolog of NCBI NO: 21913172 NR Description: mu1 adaptin [Toxoplasma gondii]
  misc_feature (1)..(357): Homolog of NCBI NO: 28949965 NR Description: probable clathrin assembly protein AP47
  misc_feature (1)..(356): Homolog of NCBI NO: 14210504 NR Description: adaptor-related protein complex 1, mu 1 subunit; assembly protein complex 1, medium chain; clathrin coat assembly
  misc_feature (1)..(356): Homolog of NCBI NO: 6671557 NR Description: adaptor-related protein complex AP-1, mu subunit
  misc_feature (1)..(357): Homolog of NCBI NO: 17508211 NR Description: UNCoordinated locomotion UNC-101,

SEQ ID NO: 95085 - DNA, 1035 bp, Arabidopsis thaliana; identical to SEQ ID NO: 91329
  misc_feature (1)..(1035): Ceres Seq. ID no. 12727292
  misc_feature: MA Experiment ID: 20000227 Result: Up-regulated in Transcription
  misc_feature: MA Experiment 20000227 PARAMETER Experiment Name: At_Root-Tips-vs-Tops_P Parameter: Tissue Value: Root Tips vs. Root Tops

SEQ ID NO: 95086 - protein, 344 aa, Arabidopsis thaliana; identical to SEQ ID NO: 91330
  peptide (1)..(344): Ceres Seq. ID no. 12727293
  misc_feature (1)..(344): Homolog of NCBI NO: 15220214 NR Description: putative auxin-induced protein; protein id:
  misc_feature (1)..(344): Homolog of NCBI NO: 25316213 NR Description: hypothetical protein [imported] - Arabidopsis
  misc_feature (1)..(342): Homolog of NCBI NO: 30696459 NR Description: aldo/keto reductase family [Arabidopsis thaliana] At1g60730/F8A5_24 [Arabidopsis thaliana]
  misc_feature (1)..(342): Homolog of NCBI NO: 25316216 NR Description: hypothetical protein F8A5.24 [imported] -
  misc_feature (1)..(344): Homolog of NCBI NO: 15219786 NR Description: auxin-induced protein, putative; protein id: [Arabidopsis thaliana] >gi|25316215|pir||C96632 hypothetical
  misc_feature (1)..(342): Homolog of NCBI NO: 18406861 NR Description: auxin-induced protein, putative; protein id: supported by cDNA: gi_15912324, supported by cDNA: gi_20466377, by cDNA: gi_6562979 [Arabidopsis thaliana]
  misc_feature (1)..(342): Homolog of NCBI NO: 6562980 NR Description: auxin-induced atb2 [Arabidopsis thaliana]
  misc_feature (1)..(342): Homolog of NCBI NO: 30102704 NR Description: At1g60680 [Arabidopsis thaliana]
  misc_feature (1)..(342): Homolog of NCBI NO: 30696451 NR Description: aldo/keto reductase family [Arabidopsis thaliana]
  misc_feature (4)..(228): Homolog of NCBI NO: 15219805 NR Description: auxin-induced protein, putative; protein id:

SEQ ID NO: 95087 - protein, 318 aa, Arabidopsis thaliana; identical to SEQ ID NO: 91331
  peptide (1)..(318): Ceres Seq. ID no. 12727294
  misc_feature (1)..(318): Homolog of NCBI NO: 15220214 NR Description: putative auxin-induced protein; protein id:
  misc_feature (1)..(318): Homolog of NCBI NO: 25316213 NR Description: hypothetical protein [imported] - Arabidopsis
  misc_feature (1)..(316): Homolog of NCBI NO: 30696459 NR Description: aldo/keto reductase family [Arabidopsis thaliana] At1g60730/F8A5_24 [Arabidopsis thaliana]
  misc_feature (1)..(316): Homolog of NCBI NO: 25316216 NR Description: hypothetical protein F8A5.24 [imported] -
  misc_feature (1)..(318): Homolog of NCBI NO: 15219786 NR Description: auxin-induced protein, putative; protein id: [Arabidopsis thaliana] >gi|25316215|pir||C96632 hypothetical
  misc_feature (1)..(316): Homolog of NCBI NO: 18406861 NR Description: auxin-induced protein, putative; protein id: supported by cDNA: gi_15912324, supported by cDNA: gi_20466377, by cDNA: gi_6562979 [Arabidopsis thaliana]
  misc_feature (1)..(316): Homolog of NCBI NO: 6562980 NR Description: auxin-induced atb2 [Arabidopsis thaliana]
  misc_feature (1)..(316): Homolog of NCBI NO: 30102704 NR Description: At1g60680 [Arabidopsis thaliana]
  misc_feature (1)..(316): Homolog of NCBI NO: 30696451 NR Description: aldo/keto reductase family [Arabidopsis thaliana]
  misc_feature (1)..(202): Homolog of NCBI NO: 15219805 NR Description: auxin-induced protein, putative; protein id:

SEQ ID NO: 95088 - protein, 265 aa, Arabidopsis thaliana; identical to SEQ ID NO: 91332
  peptide (1)..(265): Ceres Seq. ID no. 12727295
  misc_feature (1)..(265): Homolog of NCBI NO: 15220214 NR Description: putative auxin-induced protein; protein id:
  misc_feature (1)..(265): Homolog of NCBI NO: 25316213 NR Description: hypothetical protein [imported] - Arabidopsis
  misc_feature (1)..(263): Homolog of NCBI NO: 30696459 NR Description: aldo/keto reductase family [Arabidopsis thaliana] At1g60730/F8A5_24 [Arabidopsis thaliana]
  misc_feature (1)..(263): Homolog of NCBI NO: 25316216 NR Description: hypothetical protein F8A5.24 [imported] -
  misc_feature (1)..(265): Homolog of NCBI NO: 15219786 NR Description: auxin-induced protein, putative; protein id: [Arabidopsis thaliana] >gi|25316215|pir||C96632 hypothetical
  misc_feature (1)..(263): Homolog of NCBI NO: 18406861 NR Description: auxin-induced protein, putative; protein id: supported by cDNA: gi_15912324, supported by cDNA: gi_20466377, by cDNA: gi_6562979 [Arabidopsis thaliana]
  misc_feature (1)..(263): Homolog of NCBI NO: 6562980 NR Description: auxin-induced atb2 [Arabidopsis thaliana]
  misc_feature (1)..(263): Homolog of NCBI NO: 30102704 NR Description: At1g60680 [Arabidopsis thaliana]
  misc_feature (1)..(263): Homolog of NCBI NO: 30696451 NR Description: aldo/keto reductase family [Arabidopsis thaliana]
  misc_feature (1)..(149): Homolog of NCBI NO: 15219805 NR Description: auxin-induced protein, putative; protein id:

SEQ ID NO: 95089 - DNA, 1398 bp, Arabidopsis thaliana; identical to SEQ ID NO: 91333
  misc_feature (1)..(1398): Ceres Seq. ID no. 12727332
  misc_feature: MA Experiment ID: 20000315 Result: Down-regulated in Transcription
  misc_feature: MA Experiment 20000315 PARAMETER Experiment Name: At_14day_Shoots-Roots_Sub_P Parameter: Age (day) Value: 14
  misc_feature: MA Experiment 20000315 PARAMETER Experiment Name: At_14day_Shoots-Roots_Sub_P Parameter: Organism Value: A. thaliana
  misc_feature: MA Experiment 20000315 PARAMETER Experiment Name: At_14day_Shoots-Roots_Sub_P Parameter: Plant Line Value: WS
  misc_feature: MA Experiment 20000315 PARAMETER Experiment Name: At_14day_Shoots-Roots_Sub_P Parameter: Tissue Value: Shoots vs. Whole Plant

SEQ ID NO: 95090 - protein, 465 aa, Arabidopsis thaliana; identical to SEQ ID NO: 91334
  peptide (1)..(465): Ceres Seq. ID no. 12727333
  misc_feature (55)..(458): Pfam Name: Serine carboxypeptidase Pfam Description: Serine carboxypeptidase
  misc_feature (1)..(465): Homolog of NCBI NO: 15220282 NR Description: Serine carboxypeptidase isolog; protein id: [Arabidopsis thaliana] >gi|25289784|pir||G86244 Serine
  misc_feature (48)..(304): Homolog of NCBI NO: 15219869 NR Description: hypothetical protein; protein id: At1g61130.1
  misc_feature (296)..(465): Homolog of NCBI NO: 15219869 NR Description: hypothetical protein; protein id: At1g61130.1
  misc_feature (48)..(304): Homolog of NCBI NO: 25289786 NR Description: hypothetical protein F11P17.14 [imported] - thaliana >gi|2443888|gb|AAB71481.1| similar to serine
  misc_feature (296)..(465): Homolog of NCBI NO: 25289786 NR Description: hypothetical protein F11P17.14 [imported] - thaliana >gi|2443888|gb|AAB71481.1| similar to serine
  misc_feature (104)..(305): Homolog of NCBI NO: 15233683 NR Description: hydroxynitrile lyase like protein; protein id: [Arabidopsis thaliana] >gi|7485011|pir||G71414
  misc_feature (306)..(465): Homolog of NCBI NO: 15233683 NR Description: hydroxynitrile lyase like protein; protein id: [Arabidopsis thaliana] >gi|7485011|pir||G71414
  misc_feature (11)..(304): Homolog of NCBI NO: 15241571 NR Description: serine-type carboxypeptidase II-like protein; id: At5g08260.1, supported by cDNA: gi_13877962, supported by gi_17065641 [Arabidopsis thaliana] >gi|11264740|pir||T50511
  misc_feature (313)..(465): Homolog of NCBI NO: 15241571 NR Description: serine-type carboxypeptidase II-like protein; id: At5g08260.1, supported by cDNA: gi_13877962, supported by gi_17065641 [Arabidopsis thaliana] >gi|11264740|pir||T50511
  misc_feature (47)..(357): Homolog of NCBI NO: 15224082 NR Description: putative serine carboxypeptidase II; protein id: [Arabidopsis thaliana] >gi|25289798|pir||D84631 probable serine

SEQ ID NO: 95091 - protein, 387 aa, Arabidopsis thaliana; identical to SEQ ID NO: 91335
  peptide (1)..(387): Ceres Seq. ID no. 12727334
  misc_feature (1)..(380): Pfam Name: Serine carboxypeptidase Pfam Description: Serine carboxypeptidase
  misc_feature (1)..(387): Homolog of NCBI NO: 15220282 NR Description: Serine carboxypeptidase isolog; protein id: [Arabidopsis thaliana] >gi|25289784|pir||G86244 Serine
  misc_feature (1)..(226): Homolog of NCBI NO: 15219869 NR Description: hypothetical protein; protein id: At1g61130.1
  misc_feature (218)..(387): Homolog of NCBI NO: 15219869 NR Description: hypothetical protein; protein id: At1g61130.1
  misc_feature (1)..(226): Homolog of NCBI NO: 25289786 NR Description: hypothetical protein F11P17.14 [imported] - thaliana >gi|2443888|gb|AAB71481.1| similar to serine
  misc_feature (218)..(387): Homolog of NCBI NO: 25289786 NR Description: hypothetical protein F11P17.14 [imported] - thaliana >gi|2443888|gb|AAB71481.1| similar to serine
  misc_feature (26)..(227): Homolog of NCBI NO: 15233683 NR Description: hydroxynitrile lyase like protein; protein id: [Arabidopsis thaliana] >gi|7485011|pir||G71414
  misc_feature (228)..(387): Homolog of NCBI NO: 15233683 NR Description: hydroxynitrile lyase like protein; protein id: [Arabidopsis thaliana] >gi|7485011|pir||G71414
  misc_feature (1)..(226): Homolog of NCBI NO: 15241571 NR Description: serine-type carboxypeptidase II-like protein; id: At5g08260.1, supported by cDNA: gi_13877962, supported by gi_17065641 [Arabidopsis thaliana] >gi|11264740|pir||T50511
  misc_feature (235)..(387): Homolog of NCBI NO: 15241571 NR Description: serine-type carboxypeptidase II-like protein; id: At5g08260.1, supported by cDNA: gi_13877962, supported by gi_17065641 [Arabidopsis thaliana] >gi|11264740|pir||T50511
  misc_feature (1)..(279): Homolog of NCBI NO: 15224082 NR Description: putative serine carboxypeptidase II; protein id: [Arabidopsis thaliana] >gi|25289798|pir||D84631 probable serine

SEQ ID NO: 95092 - protein, 379 aa, Arabidopsis thaliana; identical to SEQ ID NO: 91336
  peptide (1)..(379): Ceres Seq. ID no. 12727335
  misc_feature (1)..(372): Pfam Name: Serine carboxypeptidase Pfam Description: Serine carboxypeptidase
  misc_feature (1)..(379): Homolog of NCBI NO: 15220282 NR Description: Serine carboxypeptidase isolog; protein id: [Arabidopsis thaliana] >gi|25289784|pir||G86244 Serine
  misc_feature (1)..(218): Homolog of NCBI NO: 15219869 NR Description: hypothetical protein; protein id: At1g61130.1
  misc_feature (210)..(379): Homolog of NCBI NO: 15219869 NR Description: hypothetical protein; protein id: At1g61130.1
  misc_feature (1)..(218): Homolog of NCBI NO: 25289786 NR Description: hypothetical protein F11P17.14 [imported] - thaliana >gi|2443888|gb|AAB71481.1| similar to serine
  misc_feature (210)..(379): Homolog of NCBI NO: 25289786 NR Description: hypothetical protein F11P17.14 [imported] - thaliana >gi|2443888|gb|AAB71481.1| similar to serine
  misc_feature (18)..(219): Homolog of NCBI NO: 15233683 NR Description: hydroxynitrile lyase like protein; protein id: [Arabidopsis thaliana] >gi|7485011|pir||G71414
  misc_feature (220)..(379): Homolog of NCBI NO: 15233683 NR Description: hydroxynitrile lyase like protein; protein id: [Arabidopsis thaliana] >gi|7485011|pir||G71414
  misc_feature (1)..(218): Homolog of NCBI NO: 15241571 NR Description: serine-type carboxypeptidase II-like protein; id: At5g08260.1, supported by cDNA: gi_13877962, supported by gi_17065641 [Arabidopsis thaliana] >gi|11264740|pir||T50511
  misc_feature (227)..(379): Homolog of NCBI NO: 15241571 NR Description: serine-type carboxypeptidase II-like protein; id: At5g08260.1, supported by cDNA: gi_13877962, supported by gi_17065641 [Arabidopsis thaliana] >gi|11264740|pir||T50511
  misc_feature (1)..(271): Homolog of NCBI NO: 15224082 NR Description: putative serine carboxypeptidase II; protein id: [Arabidopsis thaliana] >gi|25289798|pir||D84631 probable serine

SEQ ID NO: 95093 - DNA, 1707 bp, Arabidopsis thaliana; identical to SEQ ID NO: 91337
  misc_feature (1)..(1707): Ceres Seq. ID no. 12727348
  misc_feature: MA Experiment ID: 20000307 Result: Down-regulated in Transcription
  misc_feature: MA Experiment 20000307 PARAMETER Experiment Name: At_Germinating_Seeds_Sub_P Parameter: Age (hr) Value: 24 vs. 0
  misc_feature: MA Experiment 20000307 PARAMETER Experiment Name: At_Germinating_Seeds_Sub_P Parameter: Organism Value: A. thaliana
  misc_feature: MA Experiment 20000307 PARAMETER Experiment Name: At_Germinating_Seeds_Sub_P Parameter: Plant Line Value: WS
  misc_feature: MA Experiment 20000307 PARAMETER Experiment Name: At_Germinating_Seeds_Sub_P Parameter: Tissue Value: Germinating Seeds
  misc_feature: MA Experiment ID: 20000315 Result: Down-regulated in Transcription
  misc_feature: MA Experiment 20000315 PARAMETER Experiment Name: At_14day_Shoots-Roots_Sub_P Parameter: Age (day) Value: 14
  misc_feature: MA Experiment 20000315 PARAMETER Experiment Name: At_14day_Shoots-Roots_Sub_P Parameter: Organism Value: A. thaliana
  misc_feature: MA Experiment 20000315 PARAMETER Experiment Name: At_14day_Shoots-Roots_Sub_P Parameter: Plant Line Value: WS
  misc_feature: MA Experiment 20000315 PARAMETER Experiment Name: At_14day_Shoots-Roots_Sub_P Parameter: Tissue Value: Shoots vs. Whole Plant
  misc_feature: MA Experiment ID: 20000328 Result: Down-regulated in Transcription
  misc_feature: MA Experiment 20000328 PARAMETER Experiment Name: At_42deg_Heat_Sub_P Parameter: Age (day) Value: 14
  misc_feature: MA Experiment 20000328 PARAMETER Experiment Name: At_42deg_Heat_Sub_P Parameter: Organism Value: A. thaliana
  misc_feature: MA Experiment 20000328 PARAMETER Experiment Name: At_42deg_Heat_Sub_P Parameter: Plant Line Value: WS
  misc_feature: MA Experiment 20000328 PARAMETER Experiment Name: At_42deg_Heat_Sub_P Parameter: Temperature (deg C) Value: 42 vs. 22
  misc_feature: MA Experiment 20000328 PARAMETER Experiment Name: At_42deg_Heat_Sub_P Parameter: Timepoint (hr) Value: 6
  misc_feature: MA Experiment 20000328 PARAMETER Experiment Name: At_42deg_Heat_Sub_P Parameter: Tissue Value: Aerial

SEQ ID NO: 95094 - protein, 438 aa, Arabidopsis thaliana; identical to SEQ ID NO: 91338
  peptide (1)..(438): Ceres Seq. ID no. 12727349
  misc_feature (77)..(395): Pfam Name: Protein of unknown function (DUF707) Pfam Description: Protein of unknown function (DUF707)
  misc_feature (1)..(438): Homolog of NCBI NO: 22329488 NR Description: hypothetical protein; protein id: At1g11170.1, by cDNA: gi_18700104 [Arabidopsis thaliana] At1g11170/T28P6_16 [Arabidopsis thaliana]
  misc_feature (1)..(431): Homolog of NCBI NO: 15219892 NR Description: hypothetical protein; protein id: At1g61240.1 thaliana] >gi|26449863|dbj|BAC42054.1| unknown protein
  misc_feature (71)..(430): Homolog of NCBI NO: 24636978 NR Description: lysine ketoglutarate reductase trans-splicing
  misc_feature (179)..(438): Homolog of NCBI NO: 25402652 NR Description: hypothetical protein [imported] - Arabidopsis >gi|5734733|gb|AAD49998.1|AC007259_11 Hypothetical protein
  misc_feature (33)..(406): Homolog of NCBI NO: 33146749 NR Description: putative lysine ketoglutarate reductase
  misc_feature (96)..(253): Homolog of NCBI NO: 34899756 NR Description: OJ1773_H01.1 [Oryza sativa (japonica
  misc_feature (274)..(406): Homolog of NCBI NO: 34899756 NR Description: OJ1773_H01.1 [Oryza sativa (japonica
  misc_feature (85)..(394): Homolog of NCBI NO: 19386727 NR Description: P0678F11.16 [Oryza sativa (japonica
  misc_feature (111)..(394): Homolog of NCBI NO: 34903420 NR Description: hypothetical protein~similar to Oryza sativa
  misc_feature (85)..(363): Homolog of NCBI NO: 22329525 NR Description: unknown protein; protein id: At1g13000.1, by cDNA: gi_18175818, supported by cDNA: gi_20465546 [Arabidopsis >gi|18175819|gb|AAL59933.1| unknown protein [Arabidopsis

SEQ ID NO: 95095 - protein, 431 aa, Arabidopsis thaliana; identical to SEQ ID NO: 91339
  peptide (1)..(431): Ceres Seq. ID no. 12727350
  misc_feature (70)..(388): Pfam Name: Protein of unknown function (DUF707) Pfam Description: Protein of unknown function (DUF707)
  misc_feature (1)..(431): Homolog of NCBI NO: 22329488 NR Description: hypothetical protein; protein id: At1g11170.1, by cDNA: gi_18700104 [Arabidopsis thaliana] At1g11170/T28P6_16 [Arabidopsis thaliana]
  misc_feature (1)..(424): Homolog of NCBI NO: 15219892 NR Description: hypothetical protein; protein id: At1g61240.1 thaliana] >gi|26449863|dbj|BAC42054.1| unknown protein
  misc_feature (64)..(423): Homolog of NCBI NO: 24636978 NR Description: lysine ketoglutarate reductase trans-splicing
  misc_feature (172)..(431): Homolog of NCBI NO: 25402652 NR Description: hypothetical protein [imported] - Arabidopsis >gi|5734733|gb|AAD49998.1|AC007259_11 Hypothetical protein
  misc_feature (26)..(399): Homolog of NCBI NO: 33146749 NR Description: putative lysine ketoglutarate reductase
  misc_feature (89)..(246): Homolog of NCBI NO: 34899756 NR Description: OJ1773_H01.1 [Oryza sativa (japonica
  misc_feature (267)..(399): Homolog of NCBI NO: 34899756 NR Description: OJ1773_H01.1 [Oryza sativa (japonica
  misc_feature (78)..(387): Homolog of NCBI NO: 19386727 NR Description: P0678F11.16 [Oryza sativa (japonica
  misc_feature (104)..(387): Homolog of NCBI NO: 34903420 NR Description: hypothetical protein~similar to Oryza sativa
  misc_feature (78)..(356): Homolog of NCBI NO: 22329525 NR Description: unknown protein; protein id: At1g13000.1, by cDNA: gi_18175818, supported by cDNA: gi_20465546 [Arabidopsis >gi|18175819|gb|AAL59933.1| unknown protein [Arabidopsis

SEQ ID NO: 95096 - protein, 405 aa, Arabidopsis thaliana; identical to SEQ ID NO: 91340
  peptide (1)..(405): Ceres Seq. ID no. 12727351
  misc_feature (44)..(362): Pfam Name: Protein of unknown function (DUF707) Pfam Description: Protein of unknown function (DUF707)
  misc_feature (1)..(405): Homolog of NCBI NO: 22329488 NR Description: hypothetical protein; protein id: At1g11170.1, by cDNA: gi_18700104 [Arabidopsis thaliana] At1g11170/T28P6_16 [Arabidopsis thaliana]
  misc_feature (1)..(398): Homolog of NCBI NO: 15219892 NR Description: hypothetical protein; protein id: At1g61240.1 thaliana] >gi|26449863|dbj|BAC42054.1| unknown protein
  misc_feature (38)..(397): Homolog of NCBI NO: 24636978 NR Description: lysine ketoglutarate reductase trans-splicing
  misc_feature (146)..(405): Homolog of NCBI NO: 25402652 NR Description: hypothetical protein [imported] - Arabidopsis >gi|5734733|gb|AAD49998.1|AC007259_11 Hypothetical protein
  misc_feature (1)..(373): Homolog of NCBI NO: 33146749 NR Description: putative lysine ketoglutarate reductase
  misc_feature (63)..(220): Homolog of NCBI NO: 34899756 NR Description: OJ1773_H01.1 [Oryza sativa (japonica
  misc_feature (241)..(373): Homolog of NCBI NO: 34899756 NR Description: OJ1773_H01.1 [Oryza sativa (japonica
  misc_feature (52)..(361): Homolog of NCBI NO: 19386727 NR Description: P0678F11.16 [Oryza sativa (japonica
  misc_feature (78)..(361): Homolog of NCBI NO: 34903420 NR Description: hypothetical protein~similar to Oryza sativa
  misc_feature (52)..(330): Homolog of NCBI NO: 22329525 NR Description: unknown protein; protein id: At1g13000.1, by cDNA: gi_18175818, supported by cDNA: gi_20465546 [Arabidopsis >gi|18175819|gb|AAL59933.1| unknown protein [Arabidopsis

SEQ ID NO: 95097 - DNA, 876 bp, Arabidopsis thaliana; identical to SEQ ID NO: 91341
  misc_feature (1)..(876): Ceres Seq. ID no. 12727352
  misc_feature: MA Experiment ID: 20000306 Result: Up-regulated in Transcription
  misc_feature: MA Experiment 20000306 PARAMETER Experiment Name: At_Germinating_Seeds_Sub_P Parameter: Age (hr) Value: 6 vs. 0
  misc_feature: MA Experiment 20000306 PARAMETER Experiment Name: At_Germinating_Seeds_Sub_P Parameter: Organism Value: A. thaliana
  misc_feature: MA Experiment 20000306 PARAMETER Experiment Name: At_Germinating_Seeds_Sub_P Parameter: Plant Line Value: WS
  misc_feature: MA Experiment 20000306 PARAMETER Experiment Name: At_Germinating_Seeds_Sub_P Parameter: Tissue Value: Germinating Seeds
  misc_feature: MA Experiment ID: 20000307 Result: Up-regulated in Transcription
  misc_feature: MA Experiment 20000307 PARAMETER Experiment Name: At_Germinating_Seeds_Sub_P Parameter: Age (hr) Value: 24 vs. 0
  misc_feature: MA Experiment 20000307 PARAMETER Experiment Name: At_Germinating_Seeds_Sub_P Parameter: Organism Value: A. thaliana
  misc_feature: MA Experiment 20000307 PARAMETER Experiment Name: At_Germinating_Seeds_Sub_P Parameter: Plant Line Value: WS
  misc_feature: MA Experiment 20000307 PARAMETER Experiment Name: At_Germinating_Seeds_Sub_P Parameter: Tissue Value: Germinating Seeds
  misc_feature: MA Experiment ID: 20000329 Result: Down-regulated in Transcription
  misc_feature: MA Experiment 20000329 PARAMETER Experiment Name: At_4deg_Cold_Sub_P Parameter: Age (day) Value: 14
  misc_feature: MA Experiment 20000329 PARAMETER Experiment Name: At_4deg_Cold_Sub_P Parameter: Organism Value: A. thaliana
  misc_feature: MA Experiment 20000329 PARAMETER Experiment Name: At_4deg_Cold_Sub_P Parameter: Plant Line Value: WS
  misc_feature: MA Experiment 20000329 PARAMETER Experiment Name: At_4deg_Cold_Sub_P Parameter: Temperature (deg C) Value: 4 vs. 22
  misc_feature: MA Experiment 20000329 PARAMETER Experiment Name: At_4deg_Cold_Sub_P Parameter: Timepoint (hr) Value: 6
  misc_feature: MA Experiment 20000329 PARAMETER Experiment Name: At_4deg_Cold_Sub_P Parameter: Tissue Value: Aerial
  misc_feature: MA Experiment ID: 20000355 Result: Down-regulated in Transcription
  misc_feature: MA Experiment 20000355 PARAMETER Experiment Name: At_Siliques_Sub_P Parameter: Age (day) Value: 21
  misc_feature: MA Experiment 20000355 PARAMETER Experiment Name: At_Siliques_Sub_P Parameter: Organism Value: A. thaliana
  misc_feature: MA Experiment 20000355 PARAMETER Experiment Name: At_Siliques_Sub_P Parameter: Plant Line Value: WS
  misc_feature: MA Experiment 20000355 PARAMETER Experiment Name: At_Siliques_Sub_P Parameter: Tissue Value: Less Than 5mm Siliques vs. Whole Plant

SEQ ID NO: 95098 - protein, 291 aa, Arabidopsis thaliana; identical to SEQ ID NO: 91342
  peptide (1)..(291): Ceres Seq. ID no. 12727353
  misc_feature (99)..(273): Pfam Name: SCAMP family Pfam Description: SCAMP family
  misc_feature (1)..(291): Homolog of NCBI NO: 15220305 NR Description: secretory carrier membrane protein, putative;
  misc_feature (1)..(291): Homolog of NCBI NO: 15219893 NR Description: secretory carrier membrane protein; protein id: supported by cDNA: 27197., supported by cDNA: gi_15027862, by cDNA: gi_19310672, supported by cDNA: gi_7109227 [Arabidopsis
  misc_feature (1)..(291): Homolog of NCBI NO: 25402653 NR Description: hypothetical protein [imported] - Arabidopsis >gi|5734732|gb|AAD49997.1|AC007259_10 Hypothetical protein
  misc_feature (1)..(290): Homolog of NCBI NO: 7109232 NR Description: secretory carrier membrane protein [Oryza sativa]
  misc_feature (4)..(291): Homolog of NCBI NO: 15226410 NR Description: putative secretory carrier-associated membrane protein id: At2g20840.1 [Arabidopsis thaliana]
  misc_feature (1)..(290): Homolog of NCBI NO: 34899754 NR Description: putative secretory carrier membrane protein
  misc_feature (1)..(291): Homolog of NCBI NO: 3941289 NR Description: similarity to SCAMP37 [Pisum sativum]
  misc_feature (4)..(291): Homolog of NCBI NO: 18379111 NR Description: expressed protein; protein id: At1g03550.1, by cDNA: 30006. [Arabidopsis thaliana] F21B7.17 [Arabidopsis thaliana] >gi|21592580|gb|AAM64529.1|
  misc_feature (1)..(138): Homolog of NCBI NO: 25404319 NR Description: hypothetical protein F11P17.4 [imported] - thaliana >gi|2443878|gb|AAB71471.1| Unknown protein [Arabidopsis
  misc_feature (203)..(263): Homolog of NCBI NO: 25404319 NR Description: hypothetical protein F11P17.4 [imported] - thaliana >gi|2443878|gb|AAB71471.1| Unknown protein [Arabidopsis

SEQ ID NO: 95099 - DNA, 897 bp, Arabidopsis thaliana; identical to SEQ ID NO: 91343
  misc_feature (1)..(897): Ceres Seq. ID no. 12727362
  misc_feature: MA Experiment ID: 20000794 Result: Up-regulated in Transcription
  misc_feature: MA Experiment 20000794 PARAMETER Experiment Name: At_Petals_P Parameter: Age (day) Value: 23-25 days
  misc_feature: MA Experiment 20000794 PARAMETER Experiment Name: At_Petals_P Parameter: Plant Line Value: WS
  misc_feature: MA Experiment 20000794 PARAMETER Experiment Name: At_Petals_P Parameter: Tissue Value: Petals vs. Whole plant
  misc_feature: MA Experiment ID: 20001910 Result: Up-regulated in Transcription
  misc_feature: MA Experiment 20001910 PARAMETER Experiment Name: At_Drought_Reproduction_P Parameter: Age (day) Value: 37
  misc_feature: MA Experiment 20001910 PARAMETER Experiment Name: At_Drought_Reproduction_P Parameter: Organism Value: A. thaliana
  misc_feature: MA Experiment 20001910 PARAMETER Experiment Name: At_Drought_Reproduction_P Parameter: Plant Line Value: WS
  misc_feature: MA Experiment 20001910 PARAMETER Experiment Name: At_Drought_Reproduction_P Parameter: Timepoint (day) Value: 7
  misc_feature: MA Experiment 20001910 PARAMETER Experiment Name: At_Drought_Reproduction_P Parameter: Tissue Value: Flowers
  misc_feature: MA Experiment 20001910 PARAMETER Experiment Name: At_Drought_Reproduction_P Parameter: Treatment Value: Drought vs. No Drought

SEQ ID NO: 95100 - protein, 298 aa, Arabidopsis thaliana; identical to SEQ ID NO: 91344
  peptide (1)..(298): Ceres Seq. ID no. 12727363
  misc_feature (203)..(265): Pfam Name: SNARE domain Pfam Description: SNARE domain
  misc_feature (1)..(298): Homolog of NCBI NO: 15220328 NR Description: syntaxin SYP125; protein id: At1g11250.1 thaliana] >gi|28380142|sp|Q9SXB0|S125_ARATH Putative syntaxin 125
  misc_feature (1)..(298): Homolog of NCBI NO: 15219900 NR Description: syntaxin SYP124; protein id: At1g61290.1 thaliana] >gi|28380117|sp|O64791|S124_ARATH Putative syntaxin 124
  misc_feature (1)..(295): Homolog of NCBI NO: 15236285 NR Description: syntaxin SYP123; protein id: At4g03330.1, by cDNA: 37727. [Arabidopsis thaliana]
  misc_feature (1)..(291): Homolog of NCBI NO: 4206787 NR Description: syntaxin-related protein Nt-syr1 [Nicotiana
  misc_feature (1)..(290): Homolog of NCBI NO: 15229865 NR Description: syntaxin SYP121; protein id: At3g11820.1, by cDNA: 38899., supported by cDNA: gi_20260503, supported by gi_4206788 [Arabidopsis thaliana]
  misc_feature (1)..(287): Homolog of NCBI NO: 11358871 NR Description: syntaxin synt4 [imported] - Arabidopsis thaliana
  misc_feature (1)..(287): Homolog of NCBI NO: 15231205 NR Description: syntaxin SYP122; protein id: At3g52400.1, by cDNA: 37248., supported by cDNA: gi_15292946, supported by gi_20259662 [Arabidopsis thaliana]
  misc_feature (1)..(289): Homolog of NCBI NO: 5912543 NR Description: Knolle [Capsicum annuum]
  misc_feature (1)..(289): Homolog of NCBI NO: 28974542 NR Description: knolle [Antirrhinum majus]
  misc_feature (1)..(290): Homolog of NCBI NO: 33146794 NR Description: putative syntaxin-related protein [Oryza sativa

SEQ ID NO: 95101 - protein, 273 aa, Arabidopsis thaliana; identical to SEQ ID NO: 91345
  peptide (1)..(273): Ceres Seq. ID no. 12727364
  misc_feature (178)..(240): Pfam Name: SNARE domain Pfam Description: SNARE domain
  misc_feature (1)..(273): Homolog of NCBI NO: 15220328 NR Description: syntaxin SYP125; protein id: At1g11250.1 thaliana] >gi|28380142|sp|Q9SXB0|S125_ARATH Putative syntaxin 125
  misc_feature (1)..(273): Homolog of NCBI NO: 15219900 NR Description: syntaxin SYP124; protein id: At1g61290.1 thaliana] >gi|28380117|sp|O64791|S124_ARATH Putative syntaxin 124
  misc_feature (1)..(270): Homolog of NCBI NO: 15236285 NR Description: syntaxin SYP123; protein id: At4g03330.1, by cDNA: 37727. [Arabidopsis thaliana]
  misc_feature (1)..(266): Homolog of NCBI NO: 4206787 NR Description: syntaxin-related protein Nt-syr1 [Nicotiana
  misc_feature (1)..(265): Homolog of NCBI NO: 15229865 NR Description: syntaxin SYP121; protein id: At3g11820.1, by cDNA: 38899., supported by cDNA: gi_20260503, supported by gi_4206788 [Arabidopsis thaliana]
  misc_feature (1)..(262): Homolog of NCBI NO: 11358871 NR Description: syntaxin synt4 [imported] - Arabidopsis thaliana
  misc_feature (1)..(262): Homolog of NCBI NO: 15231205 NR Description: syntaxin SYP122; protein id: At3g52400.1, by cDNA: 37248., supported by cDNA: gi_15292946, supported by gi_20259662 [Arabidopsis thaliana]
  misc_feature (1)..(264): Homolog of NCBI NO: 5912543 NR Description: Knolle [Capsicum annuum]
  misc_feature (1)..(264): Homolog of NCBI NO: 28974542 NR Description: knolle [Antirrhinum majus]
  misc_feature (1)..(265): Homolog of NCBI NO: 33146794 NR Description: putative syntaxin-related protein [Oryza sativa

SEQ ID NO: 95102 - protein, 257 aa, Arabidopsis thaliana; identical to SEQ ID NO: 91346
  peptide (1)..(257): Ceres Seq. ID no. 12727365
  misc_feature (162)..(224): Pfam Name: SNARE domain Pfam Description: SNARE domain
  misc_feature (1)..(257): Homolog of NCBI NO: 15220328 NR Description: syntaxin SYP125; protein id: At1g11250.1 thaliana] >gi|28380142|sp|Q9SXB0|S125_ARATH Putative syntaxin 125
  misc_feature (1)..(257): Homolog of NCBI NO: 15219900 NR Description: syntaxin SYP124; protein id: At1g61290.1 thaliana] >gi|28380117|sp|O64791|S124_ARATH Putative syntaxin 124
  misc_feature (1)..(254): Homolog of NCBI NO: 15236285 NR Description: syntaxin SYP123; protein id: At4g03330.1, by cDNA: 37727. [Arabidopsis thaliana]
  misc_feature (1)..(250): Homolog of NCBI NO: 4206787 NR Description: syntaxin-related protein Nt-syr1 [Nicotiana
  misc_feature (1)..(249): Homolog of NCBI NO: 15229865 NR Description: syntaxin SYP121; protein id: At3g11820.1, by cDNA: 38899., supported by cDNA: gi_20260503, supported by gi_4206788 [Arabidopsis thaliana]
  misc_feature (1)..(246): Homolog of NCBI NO: 11358871 NR Description: syntaxin synt4 [imported] - Arabidopsis thaliana
  misc_feature (1)..(246): Homolog of NCBI NO: 15231205 NR Description: syntaxin SYP122; protein id: At3g52400.1, by cDNA: 37248., supported by cDNA: gi_15292946, supported by gi_20259662 [Arabidopsis thaliana]
  misc_feature (1)..(248): Homolog of NCBI NO: 5912543 NR Description: Knolle [Capsicum annuum]
  misc_feature (1)..(248): Homolog of NCBI NO: 28974542 NR Description: knolle [Antirrhinum majus]
  misc_feature (1)..(249): Homolog of NCBI NO: 33146794 NR Description: putative syntaxin-related protein [Oryza sativa

SEQ ID NO: 95103 - DNA, 2493 bp, Arabidopsis thaliana; identical to SEQ ID NO: 91347
  misc_feature (1)..(2493): Ceres Seq. ID no. 12727378
  misc_feature: MA Experiment ID: 20000166 Result: Down-regulated in Transcription
  misc_feature: MA Experiment 20000166 PARAMETER Experiment Name: At_100uM_ABA_P Parameter: Age (day) Value: 14
  misc_feature: MA Experiment 20000166 PARAMETER Experiment Name: At_100uM_ABA_P Parameter: Organism Value: A. thaliana
  misc_feature: MA Experiment 20000166 PARAMETER Experiment Name: At_100uM_ABA_P Parameter: Plant Line Value: WS
  misc_feature: MA Experiment 20000166 PARAMETER Experiment Name: At_100uM_ABA_P Parameter: Timepoint (hr) Value: 1
  misc_feature: MA Experiment 20000166 PARAMETER Experiment Name: At_100uM_ABA_P Parameter: Tissue Value: Aerial
  misc_feature: MA Experiment 20000166 PARAMETER Experiment Name: At_100uM_ABA_P Parameter: Treatment Value: 100uM ABA vs. No Treatment
  misc_feature: MA Experiment ID: 20000173 Result: Down-regulated in Transcription
  misc_feature: MA Experiment 20000173 PARAMETER Experiment Name: At_42deg_Heat_P Parameter: Age (day) Value: 14
  misc_feature: MA Experiment 20000173 PARAMETER Experiment Name: At_42deg_Heat_P Parameter: Organism Value: A. thaliana
  misc_feature: MA Experiment 20000173 PARAMETER Experiment Name: At_42deg_Heat_P Parameter: Plant Line Value: WS
  misc_feature: MA Experiment 20000173 PARAMETER Experiment Name: At_42deg_Heat_P Parameter: Temperature (deg C) Value: 42 vs. 22
  misc_feature: MA Experiment 20000173 PARAMETER Experiment Name: At_42deg_Heat_P Parameter: Timepoint (hr) Value: 6
  misc_feature: MA Experiment 20000173 PARAMETER Experiment Name: At_42deg_Heat_P Parameter: Tissue Value: Aerial
  misc_feature: MA Experiment ID: 20000184 Result: Down-regulated in Transcription
  misc_feature: MA Experiment 20000184 PARAMETER Experiment Name: At_Shoots__P Parameter: Age (day) Value: 7
  misc_feature: MA Experiment 20000184 PARAMETER Experiment Name: At_Shoots__P Parameter: Tissue Value: Shoots vs. Whole Plant
  misc_feature: MA Experiment ID: 20000185 Result: Down-regulated in Transcription
  misc_feature: MA Experiment 20000185 PARAMETER Experiment Name: At_Roots__P Parameter: Age (day) Value: 7 vs. 21
  misc_feature: MA Experiment 20000185 PARAMETER Experiment Name: At_Roots__P Parameter: Organism Value: A. thaliana
  misc_feature: MA Experiment 20000185 PARAMETER Experiment Name: At_Roots__P Parameter: Tissue Value: Roots vs. Whole Plant
  misc_feature: MA Experiment ID: 20000234 Result: Down-regulated in Transcription
  misc_feature: MA Experiment 20000234 PARAMETER Experiment Name: At_Siliques_P Parameter: Age (day) Value: 21
  misc_feature: MA Experiment 20000234 PARAMETER Experiment Name: At_Siliques_P Parameter: Organism Value: A. thaliana
  misc_feature: MA Experiment 20000234 PARAMETER Experiment Name: At_Siliques_P Parameter: Plant Line Value: WS
  misc_feature: MA Experiment 20000234 PARAMETER Experiment Name: At_Siliques_P Parameter: Tissue Value: Less Than 5mm Siliques vs. Whole Plant
  misc_feature: MA Experiment ID: 20000264 Result: Down-regulated in Transcription
  misc_feature: MA Experiment 20000264 PARAMETER Experiment Name: At_Open_Flower_P Parameter: Age (day) Value: 21
  misc_feature: MA Experiment 20000264 PARAMETER Experiment Name: At_Open_Flower_P Parameter: Plant Line Value: WS
  misc_feature: MA Experiment 20000264 PARAMETER Experiment Name: At_Open_Flower_P Parameter: Tissue Value: Open Flower vs. Whole Plant
  misc_feature: MA Experiment ID: 20000265 Result: Down-regulated in Transcription
  misc_feature: MA Experiment 20000265 PARAMETER Experiment Name: At_Open_Flower_P Parameter: Age (day) Value: 21
  misc_feature: MA Experiment 20000265 PARAMETER Experiment Name: At_Open_Flower_P Parameter: Plant Line Value: WS
  misc_feature: MA Experiment 20000265 PARAMETER Experiment Name: At_Open_Flower_P Parameter: Tissue Value: Closed Flower vs. Whole Plant
  misc_feature: MA Experiment ID: 20000286 Result: Down-regulated in Transcription
  misc_feature: MA Experiment 20000286 PARAMETER Experiment Name: At_Open_Flower_P Parameter: Age (day) Value: 21
  misc_feature: MA Experiment 20000286 PARAMETER Experiment Name: At_Open_Flower_P Parameter: Plant Line Value: WS
  misc_feature: MA Experiment 20000286 PARAMETER Experiment Name: At_Open_Flower_P Parameter: Tissue Value: Half Open vs. Whole Plant
  misc_feature: MA Experiment ID: 20000439 Result: Down-regulated in Transcription
  misc_feature: MA Experiment 20000439 PARAMETER Experiment Name: At_Roots__P Parameter: Age (day) Value: 14 vs. 21
  misc_feature: MA Experiment 20000439 PARAMETER Experiment Name: At_Roots__P Parameter: Organism Value: A. thaliana
  misc_feature: MA Experiment 20000439 PARAMETER Experiment Name: At_Roots__P Parameter: Tissue Value: Roots vs. Whole Plant
  misc_feature: MA Experiment ID: 20000794 Result: Down-regulated in Transcription
  misc_feature: MA Experiment 20000794 PARAMETER Experiment Name: At_Petals_P Parameter: Age (day) Value: 23-25 days
  misc_feature: MA Experiment 20000794 PARAMETER Experiment Name: At_Petals_P Parameter: Plant Line Value: WS
  misc_feature: MA Experiment 20000794 PARAMETER Experiment Name: At_Petals_P Parameter: Tissue Value: Petals vs. Whole plant
  misc_feature: MA Experiment ID: 20001555 Result: Down-regulated in Transcription
  misc_feature: MA Experiment 20001555 PARAMETER Experiment Name: At_Drought_Soil_Dry_P Parameter: Age (day) Value: 24
  misc_feature: MA Experiment 20001555 PARAMETER Experiment Name: At_Drought_Soil_Dry_P Parameter: Organism Value: A. thaliana
  misc_feature: MA Experiment 20001555 PARAMETER Experiment Name: At_Drought_Soil_Dry_P Parameter: Plant Line Value: WS
  misc_feature: MA Experiment 20001555 PARAMETER Experiment Name: At_Drought_Soil_Dry_P Parameter: Post Timepoint (hr) Value: None
  misc_feature: MA Experiment 20001555 PARAMETER Experiment Name: At_Drought_Soil_Dry_P Parameter: Post-Treatment Value: None
  misc_feature: MA Experiment 20001555 PARAMETER Experiment Name: At_Drought_Soil_Dry_P Parameter: Timepoint (day) Value: 10
  misc_feature: MA Experiment 20001555 PARAMETER Experiment Name: At_Drought_Soil_Dry_P Parameter: Treatment Value: Drought vs. No Drought
  misc_feature: MA Experiment ID: 20001904 Result: Down-regulated in Transcription
  misc_feature: MA Experiment 20001904 PARAMETER Experiment Name: At_Drought_Reproduction_P Parameter: Age (day) Value: 37
  misc_feature: MA Experiment 20001904 PARAMETER Experiment Name: At_Drought_Reproduction_P Parameter: Organism Value: A. thaliana
  misc_feature: MA Experiment 20001904 PARAMETER Experiment Name: At_Drought_Reproduction_P Parameter: Plant Line Value: WS
  misc_feature: MA Experiment 20001904 PARAMETER Experiment Name: At_Drought_Reproduction_P Parameter: Timepoint (day) Value: 7
  misc_feature: MA Experiment 20001904 PARAMETER Experiment Name: At_Drought_Reproduction_P Parameter: Tissue Value: Rosettes
  misc_feature: MA Experiment 20001904 PARAMETER Experiment Name: At_Drought_Reproduction_P Parameter: Treatment Value: Drought vs. No Drought

SEQ ID NO: 95104 - protein, 830 aa, Arabidopsis thaliana; identical to SEQ ID NO: 91348
  peptide (1)..(830): Ceres Seq. ID no. 12727379
  misc_feature (68)..(182): Pfam Name: D-mannose binding lectin Pfam Description: D-mannose binding lectin
  misc_feature (5)..(830): Homolog of NCBI NO: 15220348 NR Description: receptor-like protein kinase, putative; protein
  misc_feature (5)..(582): Homolog of NCBI NO: 25287698 NR Description: hypothetical protein [imported] - Arabidopsis
  misc_feature (628)..(830): Homolog of NCBI NO: 25287698 NR Description: hypothetical protein [imported] - Arabidopsis
  misc_feature (6)..(830): Homolog of NCBI NO: 25287696 NR Description: hypothetical protein [imported] - Arabidopsis
  misc_feature (6)..(487): Homolog of NCBI NO: 15220338 NR Description: serine/threonine kinase, putative; protein id:
  misc_feature (422)..(829): Homolog of NCBI NO: 15220338 NR Description: serine/threonine kinase, putative; protein id:
  misc_feature (5)..(830): Homolog of NCBI NO: 15220338 NR Description: serine/threonine kinase, putative; protein id:
  misc_feature (5)..(830): Homolog of NCBI NO: 25287697 NR Description: hypothetical protein [imported] - Arabidopsis
  misc_feature (9)..(830): Homolog of NCBI NO: 7434416 NR Description: serine/threonine kinase (EC 2.7.1.-) BRLK - wild >gi|2181190|emb|CAA73134.1| serine/threonine kinase [Brassica
  misc_feature (5)..(830): Homolog of NCBI NO: 15234429 NR Description: serine/threonine kinase - like protein; protein

SEQ ID NO: 95105 - protein, 744 aa, Arabidopsis thaliana; identical to SEQ ID NO: 91349
  peptide (1)..(744): Ceres Seq. ID no. 12727380
  misc_feature (1)..(96): Pfam Name: D-mannose binding lectin Pfam Description: D-mannose binding lectin
  misc_feature (1)..(744): Homolog of NCBI NO: 15220348 NR Description: receptor-like protein kinase, putative; protein
  misc_feature (1)..(496): Homolog of NCBI NO: 25287698 NR Description: hypothetical protein [imported] - Arabidopsis
  misc_feature (542)..(744): Homolog of NCBI NO: 25287698 NR Description: hypothetical protein [imported] - Arabidopsis
  misc_feature (1)..(744): Homolog of NCBI NO: 25287696 NR Description: hypothetical protein [imported] - Arabidopsis
  misc_feature (1)..(401): Homolog of NCBI NO: 15220338 NR Description: serine/threonine kinase, putative; protein id:
  misc_feature (336)..(743): Homolog of NCBI NO: 15220338 NR Description: serine/threonine kinase, putative; protein id:
  misc_feature (1)..(744): Homolog of NCBI NO: 15220338 NR Description: serine/threonine kinase, putative; protein id:
  misc_feature (1)..(744): Homolog of NCBI NO: 25287697 NR Description: hypothetical protein [imported] - Arabidopsis
  misc_feature (1)..(744): Homolog of NCBI NO: 7434416 NR Description: serine/threonine kinase (EC 2.7.1.-) BRLK - wild >gi|2181190|emb|CAA73134.1| serine/threonine kinase [Brassica
  misc_feature (1)..(744): Homolog of NCBI NO: 15234429 NR Description: serine/threonine kinase - like protein; protein

SEQ ID NO: 95106 - protein, 732 aa, Arabidopsis thaliana; identical to SEQ ID NO: 91350
  peptide (1)..(732): Ceres Seq. ID no. 12727381
  misc_feature (1)..(84): Pfam Name: D-mannose binding lectin Pfam Description: D-mannose binding lectin
  misc_feature (1)..(732): Homolog of NCBI NO: 15220348 NR Description: receptor-like protein kinase, putative; protein
  misc_feature (1)..(484): Homolog of NCBI NO: 25287698 NR Description: hypothetical protein [imported] - Arabidopsis
  misc_feature (530)..(732): Homolog of NCBI NO: 25287698 NR Description: hypothetical protein [imported] - Arabidopsis
  misc_feature (1)..(732): Homolog of NCBI NO: 25287696 NR Description: hypothetical protein [imported] - Arabidopsis
  misc_feature (1)..(389): Homolog of NCBI NO: 15220338 NR Description: serine/threonine kinase, putative; protein id:
  misc_feature (324)..(731): Homolog of NCBI NO: 15220338 NR Description: serine/threonine kinase, putative; protein id:
  misc_feature (1)..(732): Homolog of NCBI NO: 15220338 NR Description: serine/threonine kinase, putative; protein id:
  misc_feature (1)..(732): Homolog of NCBI NO: 25287697 NR Description: hypothetical protein [imported] - Arabidopsis
  misc_feature (1)..(732): Homolog of NCBI NO: 7434416 NR Description: serine/threonine kinase (EC 2.7.1.-) BRLK - wild >gi|2181190|emb|CAA73134.1| serine/threonine kinase [Brassica
  misc_feature (1)..(732): Homolog of NCBI NO: 15234429 NR Description: serine/threonine kinase - like protein; protein

SEQ ID NO: 95107 - DNA, 1059 bp, Arabidopsis thaliana; identical to SEQ ID NO: 91351
  misc_feature (1)..(1059): Ceres Seq. ID no. 12727382
  misc_feature: MA Experiment ID: 20000173 Result: Down-regulated in Transcription
  misc_feature: MA Experiment 20000173 PARAMETER Experiment Name: At_42deg_Heat_P Parameter: Age (day) Value: 14
  misc_feature: MA Experiment 20000173 PARAMETER Experiment Name: At_42deg_Heat_P Parameter: Organism Value: A. thaliana
  misc_feature: MA Experiment 20000173 PARAMETER Experiment Name: At_42deg_Heat_P Parameter: Plant Line Value: WS
  misc_feature: MA Experiment 20000173 PARAMETER Experiment Name: At_42deg_Heat_P Parameter: Temperature (deg C) Value: 42 vs. 22
  misc_feature: MA Experiment 20000173 PARAMETER Experiment Name: At_42deg_Heat_P Parameter: Timepoint (hr) Value: 6
  misc_feature: MA Experiment 20000173 PARAMETER Experiment Name: At_42deg_Heat_P Parameter: Tissue Value: Aerial
  misc_feature: MA Experiment ID: 20000227 Result: Down-regulated in Transcription
  misc_feature: MA Experiment 20000227 PARAMETER Experiment Name: At_Root-Tips-vs-Tops_P Parameter: Tissue Value: Root Tips vs. Root Tops
  misc_feature: MA Experiment ID: 20000264 Result: Up-regulated in Transcription
  misc_feature: MA Experiment 20000264 PARAMETER Experiment Name: At_Open_Flower_P Parameter: Age (day) Value: 21
  misc_feature: MA Experiment 20000264 PARAMETER Experiment Name: At_Open_Flower_P Parameter: Plant Line Value: WS
  misc_feature: MA Experiment 20000264 PARAMETER Experiment Name: At_Open_Flower_P Parameter: Tissue Value: Open Flower vs. Whole Plant
  misc_feature: MA Experiment ID: 20000265 Result: Up-regulated in Transcription
  misc_feature: MA Experiment 20000265 PARAMETER Experiment Name: At_Open_Flower_P Parameter: Age (day) Value: 21
  misc_feature: MA Experiment 20000265 PARAMETER Experiment Name: At_Open_Flower_P Parameter: Plant Line Value: WS
  misc_feature: MA Experiment 20000265 PARAMETER Experiment Name: At_Open_Flower_P Parameter: Tissue Value: Closed Flower vs. Whole Plant
  misc_feature: MA Experiment ID: 20000269 Result: Down-regulated in Transcription
  misc_feature: MA Experiment 20000269 PARAMETER Experiment Name: At_1mM_KNO3_L-vs-H_Roots_P Parameter: Age (day) Value: 7,10,12
  misc_feature: MA Experiment 20000269 PARAMETER Experiment Name: At_1mM_KNO3_L-vs-H_Roots_P Parameter: Organism Value: A. thaliana
  misc_feature: MA Experiment 20000269 PARAMETER Experiment Name: At_1mM_KNO3_L-vs-H_Roots_P Parameter: Plant Line Value: WS
  misc_feature: MA Experiment 20000269 PARAMETER Experiment Name: At_1mM_KNO3_L-vs-H_Roots_P Parameter: Timepoint (day) Value: 7,10,12
  misc_feature: MA Experiment 20000269 PARAMETER Experiment Name: At_1mM_KNO3_L-vs-H_Roots_P Parameter: Tissue Value: Roots
  misc_feature: MA Experiment 20000269 PARAMETER Experiment Name: At_1mM_KNO3_L-vs-H_Roots_P Parameter: Treatment Value: 1mM KNO3 vs. 50mM KNO3
  misc_feature: MA Experiment ID: 20000439 Result: Up-regulated in Transcription
  misc_feature: MA Experiment 20000439 PARAMETER Experiment Name: At_Roots__P Parameter: Age (day) Value: 14 vs. 21
  misc_feature: MA Experiment 20000439 PARAMETER Experiment Name: At_Roots__P Parameter: Organism Value: A. thaliana
  misc_feature: MA Experiment 20000439 PARAMETER Experiment Name: At_Roots__P Parameter: Tissue Value: Roots vs. Whole Plant
  misc_feature: MA Experiment ID: 20000441 Result: Down-regulated in Transcription
  misc_feature: MA Experiment 20000441 PARAMETER Experiment Name: At_1uM_BR-BRZ__P Parameter: Tissue Value: Shoot Apices
  misc_feature: MA Experiment 20000441 PARAMETER Experiment Name: At_1uM_BR-BRZ__P Parameter: Treatment Value: 1uM BR vs. No Treatment
  misc_feature: MA Experiment ID: 20000574 Result: Down-regulated in Transcription
  misc_feature: MA Experiment 20000574 PARAMETER Experiment Name: At_100uM_ABA_Mutants__P Parameter: Organism Value: A. thaliana
  misc_feature: MA Experiment 20000574 PARAMETER Experiment Name: At_100uM_ABA_Mutants__P Parameter: Plant Line Value: CS23 vs. Ler wt
  misc_feature: MA Experiment 20000574 PARAMETER Experiment Name: At_100uM_ABA_Mutants__P Parameter: Timepoint (hr) Value: N/A
  misc_feature: MA Experiment 20000574 PARAMETER Experiment Name: At_100uM_ABA_Mutants__P Parameter: Tissue Value: Whole Plant
  misc_feature: MA Experiment 20000574 PARAMETER Experiment Name: At_100uM_ABA_Mutants__P Parameter: Treatment Value: None

SEQ ID NO: 95108 - protein, 352 aa, Arabidopsis thaliana; identical to SEQ ID NO: 91352
  peptide (1)..(352): Ceres Seq. ID no. 12727383
  misc_feature (199)..(328): Pfam Name: Integral membrane protein DUF6 Pfam Description: Integral membrane protein DUF6
  misc_feature (1)..(336): Homolog of NCBI NO: 15220389 NR Description: hypothetical protein; protein id: At1g11460.1
  misc_feature (1)..(350): Homolog of NCBI NO: 18378792 NR Description: expressed protein; protein id: At1g01070.1,
  misc_feature (93)..(352): Homolog of NCBI NO: 30682241 NR Description: nodulin MtN21 family protein [Arabidopsis
  misc_feature (13)..(352): Homolog of NCBI NO: 15234179 NR Description: unknown protein; protein id: At4g01430.1, by cDNA: gi_20260641 [Arabidopsis thaliana]
  misc_feature (90)..(352): Homolog of NCBI NO: 7486354 NR Description: hypothetical protein F3D13.4 - Arabidopsis >gi|3193309|gb|AAC19292.1| F3D13.4 gene product [Arabidopsis
  misc_feature (13)..(78): Homolog of NCBI NO: 7486354 NR Description: hypothetical protein F3D13.4 - Arabidopsis >gi|3193309|gb|AAC19292.1| F3D13.4 gene product [Arabidopsis
  misc_feature (90)..(350): Homolog of NCBI NO: 25406714 NR Description: protein T25K16.7 [imported] - Arabidopsis >gi|6715646|gb|AAF26473.1|AC007323_14 T25K16.7 [Arabidopsis
  misc_feature (13)..(350): Homolog of NCBI NO: 15234185 NR Description: unknown protein; protein id: At4g01450.1
  misc_feature (13)..(350): Homolog of NCBI NO: 15234182 NR Description: hypothetical protein; protein id: At4g01440.1, by cDNA: 40560. [Arabidopsis thaliana] >gi|25407108|pir||G85018
  misc_feature (90)..(350): Homolog of NCBI NO: 7485384 NR Description: hypothetical protein F11O4.14 - Arabidopsis >gi|3695385|gb|AAC62788.1| similar to Medicago truncatula MtN21

SEQ ID NO: 95109 - protein, 348 aa, Arabidopsis thaliana; identical to SEQ ID NO: 91353
  peptide (1)..(348): Ceres Seq. ID no. 12727384
  misc_feature (195)..(324): Pfam Name: Integral membrane protein DUF6 Pfam Description: Integral membrane protein DUF6
  misc_feature (1)..(332): Homolog of NCBI NO: 15220389 NR Description: hypothetical protein; protein id: At1g11460.1
  misc_feature (1)..(346): Homolog of NCBI NO: 18378792 NR Description: expressed protein; protein id: At1g01070.1,
  misc_feature (89)..(348): Homolog of NCBI NO: 30682241 NR Description: nodulin MtN21 family protein [Arabidopsis
  misc_feature (9)..(348): Homolog of NCBI NO: 15234179 NR Description: unknown protein; protein id: At4g01430.1, by cDNA: gi_20260641 [Arabidopsis thaliana]
  misc_feature (86)..(348): Homolog of NCBI NO: 7486354 NR Description: hypothetical protein F3D13.4 - Arabidopsis >gi|3193309|gb|AAC19292.1| F3D13.4 gene product [Arabidopsis
  misc_feature (9)..(74): Homolog of NCBI NO: 7486354 NR Description: hypothetical protein F3D13.4 - Arabidopsis >gi|3193309|gb|AAC19292.1| F3D13.4 gene product [Arabidopsis
  misc_feature (86)..(346): Homolog of NCBI NO: 25406714 NR Description: protein T25K16.7 [imported] - Arabidopsis >gi|6715646|gb|AAF26473.1|AC007323_14 T25K16.7 [Arabidopsis
  misc_feature (9)..(346): Homolog of NCBI NO: 15234185 NR Description: unknown protein; protein id: At4g01450.1
  misc_feature (9)..(346): Homolog of NCBI NO: 15234182 NR Description: hypothetical protein; protein id: At4g01440.1, by cDNA: 40560. [Arabidopsis thaliana] >gi|25407108|pir||G85018
  misc_feature (86)..(346): Homolog of NCBI NO: 7485384 NR Description: hypothetical protein F11O4.14 - Arabidopsis >gi|3695385|gb|AAC62788.1| similar to Medicago truncatula MtN21

SEQ ID NO: 95110 - protein, 336 aa, Arabidopsis thaliana; identical to SEQ ID NO: 91354
  peptide (1)..(336): Ceres Seq. ID no. 12727385
  misc_feature (183)..(312): Pfam Name: Integral membrane protein DUF6 Pfam Description: Integral membrane protein DUF6
  misc_feature (1)..(320): Homolog of NCBI NO: 15220389 NR Description: hypothetical protein; protein id: At1g11460.1
  misc_feature (1)..(334): Homolog of NCBI NO: 18378792 NR Description: expressed protein; protein id: At1g01070.1,
  misc_feature (77)..(336): Homolog of NCBI NO: 30682241 NR Description: nodulin MtN21 family protein [Arabidopsis
  misc_feature (1)..(336): Homolog of NCBI NO: 15234179 NR Description: unknown protein; protein id: At4g01430.1, by cDNA: gi_20260641 [Arabidopsis thaliana]
  misc_feature (74)..(336): Homolog of NCBI NO: 7486354 NR Description: hypothetical protein F3D13.4 - Arabidopsis >gi|3193309|gb|AAC19292.1| F3D13.4 gene product [Arabidopsis
  misc_feature (1)..(62): Homolog of NCBI NO: 7486354 NR Description: hypothetical protein F3D13.4 - Arabidopsis >gi|3193309|gb|AAC19292.1| F3D13.4 gene product [Arabidopsis
  misc_feature (74)..(334): Homolog of NCBI NO: 25406714 NR Description: protein T25K16.7 [imported] - Arabidopsis >gi|6715646|gb|AAF26473.1|AC007323_14 T25K16.7 [Arabidopsis
  misc_feature (1)..(334): Homolog of NCBI NO: 15234185 NR Description: unknown protein; protein id: At4g01450.1
  misc_feature (1)..(334): Homolog of NCBI NO: 15234182 NR Description: hypothetical protein; protein id: At4g01440.1, by cDNA: 40560. [Arabidopsis thaliana] >gi|25407108|pir||G85018
  misc_feature (74)..(334): Homolog of NCBI NO: 7485384 NR Description: hypothetical protein F11O4.14 - Arabidopsis >gi|3695385|gb|AAC62788.1| similar to Medicago truncatula MtN21

SEQ ID NO: 95111 - DNA, 1014 bp, Arabidopsis thaliana; identical to SEQ ID NO: 91355
  misc_feature (1)..(1014): Ceres Seq. ID no. 12727386
  misc_feature: MA Experiment ID: 20000355 Result: Down-regulated in Transcription
  misc_feature: MA Experiment 20000355 PARAMETER Experiment Name: At_Siliques_Sub_P Parameter: Age (day) Value: 21
  misc_feature: MA Experiment 20000355 PARAMETER Experiment Name: At_Siliques_Sub_P Parameter: Organism Value: A. thaliana
  misc_feature: MA Experiment 20000355 PARAMETER Experiment Name: At_Siliques_Sub_P Parameter: Plant Line Value: WS
  misc_feature: MA Experiment 20000355 PARAMETER Experiment Name: At_Siliques_Sub_P Parameter: Tissue Value: Less Than 5mm Siliques vs. Whole Plant
  misc_feature: MA Experiment ID: 20000440 Result: Down-regulated in Transcription
  misc_feature: MA Experiment 20000440 PARAMETER Experiment Name: At_Closed-Flower__Sub_P Parameter: Tissue Value: Closed Flower vs. Whole Plant

SEQ ID NO: 95112 - protein, 337 aa, Arabidopsis thaliana; identical to SEQ ID NO: 91356
  peptide (1)..(337): Ceres Seq. ID no. 12727387
  misc_feature (200)..(329): Pfam Name: Integral membrane protein DUF6 Pfam Description: Integral membrane protein DUF6
  misc_feature (1)..(337): Homolog of NCBI NO: 15220389 NR Description: hypothetical protein; protein id: At1g11460.1
  misc_feature (1)..(337): Homolog of NCBI NO: 18378792 NR Description: expressed protein; protein id: At1g01070.1,
  misc_feature (11)..(336): Homolog of NCBI NO: 15234179 NR Description: unknown protein; protein id: At4g01430.1, by cDNA: gi_20260641 [Arabidopsis thaliana]
  misc_feature (93)..(337): Homolog of NCBI NO: 30682241 NR Description: nodulin MtN21 family protein [Arabidopsis
  misc_feature (90)..(336): Homolog of NCBI NO: 7486354 NR Description: hypothetical protein F3D13.4 - Arabidopsis >gi|3193309|gb|AAC19292.1| F3D13.4 gene product [Arabidopsis
  misc_feature (11)..(78): Homolog of NCBI NO: 7486354 NR Description: hypothetical protein F3D13.4 - Arabidopsis >gi|3193309|gb|AAC19292.1| F3D13.4 gene product [Arabidopsis
  misc_feature (90)..(337): Homolog of NCBI NO: 25406714 NR Description: protein T25K16.7 [imported] - Arabidopsis >gi|6715646|gb|AAF26473.1|AC007323_14 T25K16.7 [Arabidopsis
  misc_feature (11)..(336): Homolog of NCBI NO: 15234182 NR Description: hypothetical protein; protein id: At4g01440.1, by cDNA: 40560. [Arabidopsis thaliana] >gi|25407108|pir||G85018
  misc_feature (10)..(335): Homolog of NCBI NO: 15234185 NR Description: unknown protein; protein id: At4g01450.1
  misc_feature (76)..(262): Homolog of NCBI NO: 25402664 NR Description: protein T23J18.13 [imported] - Arabidopsis >gi|6554185|gb|AAF16631.1|AC011661_9 T23J18.13 [Arabidopsis

SEQ ID NO: 95113 - protein, 333 aa, Arabidopsis thaliana; identical to SEQ ID NO: 91357
  peptide (1)..(333): Ceres Seq. ID no. 12727388
  misc_feature (196)..(325): Pfam Name: Integral membrane protein DUF6 Pfam Description: Integral membrane protein DUF6
  misc_feature (1)..(333): Homolog of NCBI NO: 15220389 NR Description: hypothetical protein; protein id: At1g11460.1
  misc_feature (1)..(333): Homolog of NCBI NO: 18378792 NR Description: expressed protein; protein id: At1g01070.1,
  misc_feature (7)..(332): Homolog of NCBI NO: 15234179 NR Description: unknown protein; protein id: At4g01430.1, by cDNA: gi_20260641 [Arabidopsis thaliana]
  misc_feature (89)..(333): Homolog of NCBI NO: 30682241 NR Description: nodulin MtN21 family protein [Arabidopsis
  misc_feature (86)..(332): Homolog of NCBI NO: 7486354 NR Description: hypothetical protein F3D13.4 - Arabidopsis >gi|3193309|gb|AAC19292.1| F3D13.4 gene product [Arabidopsis
  misc_feature (7)..(74): Homolog of NCBI NO: 7486354 NR Description: hypothetical protein F3D13.4 - Arabidopsis >gi|3193309|gb|AAC19292.1| F3D13.4 gene product [Arabidopsis
  misc_feature (86)..(333): Homolog of NCBI NO: 25406714 NR Description: protein T25K16.7 [imported] - Arabidopsis >gi|6715646|gb|AAF26473.1|AC007323_14 T25K16.7 [Arabidopsis
  misc_feature (7)..(332): Homolog of NCBI NO: 15234182 NR Description: hypothetical protein; protein id: At4g01440.1, by cDNA: 40560. [Arabidopsis thaliana] >gi|25407108|pir||G85018
  misc_feature (6)..(331): Homolog of NCBI NO: 15234185 NR Description: unknown protein; protein id: At4g01450.1
  misc_feature (72)..(258): Homolog of NCBI NO: 25402664 NR Description: protein T23J18.13 [imported] - Arabidopsis >gi|6554185|gb|AAF16631.1|AC011661_9 T23J18.13 [Arabidopsis

SEQ ID NO: 95114 - protein, 318 aa, Arabidopsis thaliana; identical to SEQ ID NO: 91358
  peptide (1)..(318): Ceres Seq. ID no. 12727389
  misc_feature (181)..(310): Pfam Name: Integral membrane protein DUF6 Pfam Description: Integral membrane protein DUF6
  misc_feature (1)..(318): Homolog of NCBI NO: 15220389 NR Description: hypothetical protein; protein id: At1g11460.1
  misc_feature (1)..(318): Homolog of NCBI NO: 18378792 NR Description: expressed protein; protein id: At1g01070.1,
  misc_feature (1)..(317): Homolog of NCBI NO: 15234179 NR Description: unknown protein; protein id: At4g01430.1, by cDNA: gi_20260641 [Arabidopsis thaliana]
  misc_feature (74)..(318): Homolog of NCBI NO: 30682241 NR Description: nodulin MtN21 family protein [Arabidopsis
  misc_feature (71)..(317): Homolog of NCBI NO: 7486354 NR Description: hypothetical protein F3D13.4 - Arabidopsis >gi|3193309|gb|AAC19292.1| F3D13.4 gene product [Arabidopsis
  misc_feature (1)..(59): Homolog of NCBI NO: 7486354 NR Description: hypothetical protein F3D13.4 - Arabidopsis >gi|3193309|gb|AAC19292.1| F3D13.4 gene product [Arabidopsis
  misc_feature (71)..(318): Homolog of NCBI NO: 25406714 NR Description: protein T25K16.7 [imported] - Arabidopsis >gi|6715646|gb|AAF26473.1|AC007323_14 T25K16.7 [Arabidopsis
  misc_feature (1)..(317): Homolog of NCBI NO: 15234182 NR Description: hypothetical protein; protein id: At4g01440.1, by cDNA: 40560. [Arabidopsis thaliana] >gi|25407108|pir||G85018
  misc_feature (1)..(316): Homolog of NCBI NO: 15234185 NR Description: unknown protein; protein id: At4g01450.1
  misc_feature (57)..(243): Homolog of NCBI NO: 25402664 NR Description: protein T23J18.13 [imported] - Arabidopsis >gi|6554185|gb|AAF16631.1|AC011661_9 T23J18.13 [Arabidopsis

SEQ ID NO: 95115 - DNA, 1521 bp, Arabidopsis thaliana; identical to SEQ ID NO: 91359
  misc_feature (1)..(1521): Ceres Seq. ID no. 12727390
  misc_feature: MA Experiment ID: 20000235 Result: Up-regulated in Transcription
  misc_feature: MA Experiment 20000235 PARAMETER Experiment Name: At_Siliques_P Parameter: Age (day) Value: 21
  misc_feature: MA Experiment 20000235 PARAMETER Experiment Name: At_Siliques_P Parameter: Organism Value: A. thaliana
  misc_feature: MA Experiment 20000235 PARAMETER Experiment Name: At_Siliques_P Parameter: Plant Line Value: WS
  misc_feature: MA Experiment 20000235 PARAMETER Experiment Name: At_Siliques_P Parameter: Tissue Value: 5-10mm Siliques vs. Whole Plant

SEQ ID NO: 95116 - protein, 506 aa, Arabidopsis thaliana; identical to SEQ ID NO: 91360
  peptide (1)..(506): Ceres Seq. ID no. 12727391
  misc_feature (197)..(281): Pfam Name: Pectinesterase Pfam Description: Pectinesterase
  misc_feature (1)..(506): Homolog of NCBI NO: 30682309 NR Description: pectin methylesterase, putative [Arabidopsis
  misc_feature (1)..(506): Homolog of NCBI NO: 28393148 NR Description: putative pectin methylesterase [Arabidopsis >gi|28827352|gb|AAO50520.1| putative pectin methylesterase
  misc_feature (1)..(281): Homolog of NCBI NO: 6554192 NR Description: T23J18.25 [Arabidopsis thaliana]
  misc_feature (279)..(506): Homolog of NCBI NO: 6554192 NR Description: T23J18.25 [Arabidopsis thaliana]
  misc_feature (1)..(506): Homolog of NCBI NO: 22328305 NR Description: pectin methylesterase, putative; protein id:
  misc_feature (1)..(506): Homolog of NCBI NO: 7447391 NR Description: probable pectinesterase (EC 3.1.1.11) - thaliana >gi|3319371|gb|AAC28220.1| Similar to pectinesterase; [Arabidopsis thaliana] >gi|7267148|emb|CAB80816.1| putative
  misc_feature (46)..(506): Homolog of NCBI NO: 15232875 NR Description: pectinesterase family; protein id: At3g27980.1
  misc_feature (13)..(506): Homolog of NCBI NO: 14334992 NR Description: At1g11580/T23J18_33 [Arabidopsis thaliana]
  misc_feature (13)..(506): Homolog of NCBI NO: 15220424 NR Description: pectin methylesterase, putative; protein id:
  misc_feature (13)..(506): Homolog of NCBI NO: 6174913 NR Description: Pectinesterase 1 precursor (Pectin methylesterase

SEQ ID NO: 95117 - protein, 454 aa, Arabidopsis thaliana; identical to SEQ ID NO: 91361
  peptide (1)..(454): Ceres Seq. ID no. 12727392
  misc_feature (145)..(229): Pfam Name: Pectinesterase Pfam Description: Pectinesterase
  misc_feature (1)..(454): Homolog of NCBI NO: 30682309 NR Description: pectin methylesterase, putative [Arabidopsis
  misc_feature (1)..(454): Homolog of NCBI NO: 28393148 NR Description: putative pectin methylesterase [Arabidopsis >gi|28827352|gb|AAO50520.1| putative pectin methylesterase
  misc_feature (1)..(229): Homolog of NCBI NO: 6554192 NR Description: T23J18.25 [Arabidopsis thaliana]
  misc_feature (227)..(454): Homolog of NCBI NO: 6554192 NR Description: T23J18.25 [Arabidopsis thaliana]
  misc_feature (1)..(454): Homolog of NCBI NO: 22328305 NR Description: pectin methylesterase, putative; protein id:
  misc_feature (1)..(454): Homolog of NCBI NO: 7447391 NR Description: probable pectinesterase (EC 3.1.1.11) - thaliana >gi|3319371|gb|AAC28220.1| Similar to pectinesterase; [Arabidopsis thaliana] >gi|7267148|emb|CAB80816.1| putative
  misc_feature (1)..(454): Homolog of NCBI NO: 15232875 NR Description: pectinesterase family; protein id: At3g27980.1
  misc_feature (1)..(454): Homolog of NCBI NO: 14334992 NR Description: At1g11580/T23J18_33 [Arabidopsis thaliana]
  misc_feature (1)..(454): Homolog of NCBI NO: 15220424 NR Description: pectin methylesterase, putative; protein id:
  misc_feature (1)..(454): Homolog of NCBI NO: 6174913 NR Description: Pectinesterase 1 precursor (Pectin methylesterase

SEQ ID NO: 95118 - protein, 452 aa, Arabidopsis thaliana; identical to SEQ ID NO: 91362
  peptide (1)..(452): Ceres Seq. ID no. 12727393
  misc_feature (143)..(227): Pfam Name: Pectinesterase Pfam Description: Pectinesterase
  misc_feature (1)..(452): Homolog of NCBI NO: 30682309 NR Description: pectin methylesterase, putative [Arabidopsis
  misc_feature (1)..(452): Homolog of NCBI NO: 28393148 NR Description: putative pectin methylesterase [Arabidopsis >gi|28827352|gb|AAO50520.1| putative pectin methylesterase
  misc_feature (1)..(227): Homolog of NCBI NO: 6554192 NR Description: T23J18.25 [Arabidopsis thaliana]
  misc_feature (225)..(452): Homolog of NCBI NO: 6554192 NR Description: T23J18.25 [Arabidopsis thaliana]
  misc_feature (1)..(452): Homolog of NCBI NO: 22328305 NR Description: pectin methylesterase, putative; protein id:
  misc_feature (1)..(452): Homolog of NCBI NO: 7447391 NR Description: probable pectinesterase (EC 3.1.1.11) - thaliana >gi|3319371|gb|AAC28220.1| Similar to pectinesterase; [Arabidopsis thaliana] >gi|7267148|emb|CAB80816.1| putative
  misc_feature (1)..(452): Homolog of NCBI NO: 15232875 NR Description: pectinesterase family; protein id: At3g27980.1
  misc_feature (1)..(452): Homolog of NCBI NO: 14334992 NR Description: At1g11580/T23J18_33 [Arabidopsis thaliana]
  misc_feature (1)..(452): Homolog of NCBI NO: 15220424 NR Description: pectin methylesterase, putative; protein id:
  misc_feature (1)..(452): Homolog of NCBI NO: 6174913 NR Description: Pectinesterase 1 precursor (Pectin methylesterase

SEQ ID NO: 95119 - DNA, 1494 bp, Arabidopsis thaliana; identical to SEQ ID NO: 91363
  misc_feature (1)..(1494): Ceres Seq. ID no. 12727394
  misc_feature: MA Experiment ID: 20000173 Result: Down-regulated in Transcription
  misc_feature: MA Experiment 20000173 PARAMETER Experiment Name: At_42deg_Heat_P Parameter: Age (day) Value: 14
  misc_feature: MA Experiment 20000173 PARAMETER Experiment Name: At_42deg_Heat_P Parameter: Organism Value: A. thaliana
  misc_feature: MA Experiment 20000173 PARAMETER Experiment Name: At_42deg_Heat_P Parameter: Plant Line Value: WS
  misc_feature: MA Experiment 20000173 PARAMETER Experiment Name: At_42deg_Heat_P Parameter: Temperature (deg C) Value: 42 vs. 22
  misc_feature: MA Experiment 20000173 PARAMETER Experiment Name: At_42deg_Heat_P Parameter: Timepoint (hr) Value: 6
  misc_feature: MA Experiment 20000173 PARAMETER Experiment Name: At_42deg_Heat_P Parameter: Tissue Value: Aerial
  misc_feature: MA Experiment ID: 20000182 Result: Up-regulated in Transcription
  misc_feature: MA Experiment 20000182 PARAMETER Experiment Name: At_2mM_SA_P Parameter: Age (day) Value: 14
  misc_feature: MA Experiment 20000182 PARAMETER Experiment Name: At_2mM_SA_P Parameter: Organism Value: A. thaliana
  misc_feature: MA Experiment 20000182 PARAMETER Experiment Name: At_2mM_SA_P Parameter: Plant Line Value: WS
  misc_feature: MA Experiment 20000182 PARAMETER Experiment Name: At_2mM_SA_P Parameter: Timepoint (hr) Value: 6
  misc_feature: MA Experiment 20000182 PARAMETER Experiment Name: At_2mM_SA_P Parameter: Tissue Value: Aerial
  misc_feature: MA Experiment 20000182 PARAMETER Experiment Name: At_2mM_SA_P Parameter: Treatment Value: 2mM SA vs. No Treatment
  misc_feature: MA Experiment ID: 20000445 Result: Up-regulated in Transcription
  misc_feature: MA Experiment 20000445 PARAMETER Experiment Name: At_100uM_NAA__P Parameter: Age (day) Value: 14
  misc_feature: MA Experiment 20000445 PARAMETER Experiment Name: At_100uM_NAA__P Parameter: Organism Value: A. thaliana
  misc_feature: MA Experiment 20000445 PARAMETER Experiment Name: At_100uM_NAA__P Parameter: Plant Line Value: WS
  misc_feature: MA Experiment 20000445 PARAMETER Experiment Name: At_100uM_NAA__P Parameter: Timepoint (hr) Value: 6
  misc_feature: MA Experiment 20000445 PARAMETER Experiment Name: At_100uM_NAA__P Parameter: Tissue Value: Aerial
  misc_feature: MA Experiment 20000445 PARAMETER Experiment Name: At_100uM_NAA__P Parameter: Treatment Value: 100uM NAA vs. No Treatment
  misc_feature: MA Experiment ID: 20000527 Result: Down-regulated in Transcription
  misc_feature: MA Experiment 20000527 PARAMETER Experiment Name: At_10percent_PEG_P Parameter: Age (day) Value: 20
  misc_feature: MA Experiment 20000527 PARAMETER Experiment Name: At_10percent_PEG_P Parameter: Organism Value: A. thaliana
  misc_feature: MA Experiment 20000527 PARAMETER Experiment Name: At_10percent_PEG_P Parameter: Plant Line Value: WS
  misc_feature: MA Experiment 20000527 PARAMETER Experiment Name: At_10percent_PEG_P Parameter: Timepoint (day) Value: 20
  misc_feature: MA Experiment 20000527 PARAMETER Experiment Name: At_10percent_PEG_P Parameter: Tissue Value: Whole Plant
  misc_feature: MA Experiment 20000527 PARAMETER Experiment Name: At_10percent_PEG_P Parameter: Treatment Value: 10percent PEG vs. No Treatment
  misc_feature: MA Experiment ID: 20000573 Result: Up-regulated in Transcription
  misc_feature: MA Experiment 20000573 PARAMETER Experiment Name: At_100uM_ABA_Mutants__P Parameter: Organism Value: A. thaliana
  misc_feature: MA Experiment 20000573 PARAMETER Experiment Name: At_100uM_ABA_Mutants__P Parameter: Plant Line Value: CS22 vs. Ler wt
  misc_feature: MA Experiment 20000573 PARAMETER Experiment Name: At_100uM_ABA_Mutants__P Parameter: Timepoint (hr) Value: N/A
  misc_feature: MA Experiment 20000573 PARAMETER Experiment Name: At_100uM_ABA_Mutants__P Parameter: Tissue Value: Whole Plant
  misc_feature: MA Experiment 20000573 PARAMETER Experiment Name: At_100uM_ABA_Mutants__P Parameter: Treatment Value: None
  misc_feature: MA Experiment ID: 20000574 Result: Up-regulated in Transcription
  misc_feature: MA Experiment 20000574 PARAMETER Experiment Name: At_100uM_ABA_Mutants__P Parameter: Organism Value: A. thaliana
  misc_feature: MA Experiment 20000574 PARAMETER Experiment Name: At_100uM_ABA_Mutants__P Parameter: Plant Line Value: CS23 vs. Ler wt
  misc_feature: MA Experiment 20000574 PARAMETER Experiment Name: At_100uM_ABA_Mutants__P Parameter: Timepoint (hr) Value: N/A
  misc_feature: MA Experiment 20000574 PARAMETER Experiment Name: At_100uM_ABA_Mutants__P Parameter: Tissue Value: Whole Plant
  misc_feature: MA Experiment 20000574 PARAMETER Experiment Name: At_100uM_ABA_Mutants__P Parameter: Treatment Value: None
  misc_feature: MA Experiment ID: 20001554 Result: Down-regulated in Transcription
  misc_feature: MA Experiment 20001554 PARAMETER Experiment Name: At_Drought_Soil_Dry_P Parameter: Age (day) Value: 21
  misc_feature: MA Experiment 20001554 PARAMETER Experiment Name: At_Drought_Soil_Dry_P Parameter: Organism Value: A. thaliana
  misc_feature: MA Experiment 20001554 PARAMETER Experiment Name: At_Drought_Soil_Dry_P Parameter: Plant Line Value: WS
  misc_feature: MA Experiment 20001554 PARAMETER Experiment Name: At_Drought_Soil_Dry_P Parameter: Post Timepoint (hr) Value: None
  misc_feature: MA Experiment 20001554 PARAMETER Experiment Name: At_Drought_Soil_Dry_P Parameter: Post-Treatment Value: None
  misc_feature: MA Experiment 20001554 PARAMETER Experiment Name: At_Drought_Soil_Dry_P Parameter: Timepoint (day) Value: 7
  misc_feature: MA Experiment 20001554 PARAMETER Experiment Name: At_Drought_Soil_Dry_P Parameter: Treatment Value: Drought vs. No Drought
  misc_feature: MA Experiment ID: 20001556 Result: Down-regulated in Transcription
  misc_feature: MA Experiment 20001556 PARAMETER Experiment Name: At_Drought_Soil_Dry_P Parameter: Age (day) Value: 26
  misc_feature: MA Experiment 20001556 PARAMETER Experiment Name: At_Drought_Soil_Dry_P Parameter: Organism Value: A. thaliana
  misc_feature: MA Experiment 20001556 PARAMETER Experiment Name: At_Drought_Soil_Dry_P Parameter: Plant Line Value: WS
  misc_feature: MA Experiment 20001556 PARAMETER Experiment Name: At_Drought_Soil_Dry_P Parameter: Post Timepoint (hr) Value: None
  misc_feature: MA Experiment 20001556 PARAMETER Experiment Name: At_Drought_Soil_Dry_P Parameter: Post-Treatment Value: None
  misc_feature: MA Experiment 20001556 PARAMETER Experiment Name: At_Drought_Soil_Dry_P Parameter: Timepoint (day) Value: 12
  misc_feature: MA Experiment 20001556 PARAMETER Experiment Name: At_Drought_Soil_Dry_P Parameter: Treatment Value: Drought vs. No Drought
  misc_feature: MA Experiment ID: 20001558 Result: Down-regulated in Transcription
  misc_feature: MA Experiment 20001558 PARAMETER Experiment Name: At_Drought_Soil_Dry_P Parameter: Age (day) Value: 27
  misc_feature: MA Experiment 20001558 PARAMETER Experiment Name: At_Drought_Soil_Dry_P Parameter: Organism Value: A. thaliana
  misc_feature: MA Experiment 20001558 PARAMETER Experiment Name: At_Drought_Soil_Dry_P Parameter: Plant Line Value: WS
  misc_feature: MA Experiment 20001558 PARAMETER Experiment Name: At_Drought_Soil_Dry_P Parameter: Post Timepoint (hr) Value: 6
  misc_feature: MA Experiment 20001558 PARAMETER Experiment Name: At_Drought_Soil_Dry_P Parameter: Post-Treatment Value: Re-Water vs. No Drought
  misc_feature: MA Experiment 20001558 PARAMETER Experiment Name: At_Drought_Soil_Dry_P Parameter: Timepoint (day) Value: 13
  misc_feature: MA Experiment 20001558 PARAMETER Experiment Name: At_Drought_Soil_Dry_P Parameter: Treatment Value: Drought vs. No Drought
  misc_feature: MA Experiment ID: 20001560 Result: Down-regulated in Transcription
  misc_feature: MA Experiment 20001560 PARAMETER Experiment Name: At_Drought_Soil_Dry_P Parameter: Age (day) Value: 28
  misc_feature: MA Experiment 20001560 PARAMETER Experiment Name: At_Drought_Soil_Dry_P Parameter: Organism Value: A. thaliana
  misc_feature: MA Experiment 20001560 PARAMETER Experiment Name: At_Drought_Soil_Dry_P Parameter: Plant Line Value: WS
  misc_feature: MA Experiment 20001560 PARAMETER Experiment Name: At_Drought_Soil_Dry_P Parameter: Post Timepoint (hr) Value: None
  misc_feature: MA Experiment 20001560 PARAMETER Experiment Name: At_Drought_Soil_Dry_P Parameter: Post-Treatment Value: None
  misc_feature: MA Experiment 20001560 PARAMETER Experiment Name: At_Drought_Soil_Dry_P Parameter: Timepoint (day) Value: 14
  misc_feature: MA Experiment 20001560 PARAMETER Experiment Name: At_Drought_Soil_Dry_P Parameter: Treatment Value: Drought vs. No Drought
  misc_feature: MA Experiment ID: 20001904 Result: Down-regulated in Transcription
  misc_feature: MA Experiment 20001904 PARAMETER Experiment Name: At_Drought_Reproduction_P Parameter: Age (day) Value: 37
  misc_feature: MA Experiment 20001904 PARAMETER Experiment Name: At_Drought_Reproduction_P Parameter: Organism Value: A. thaliana
  misc_feature: MA Experiment 20001904 PARAMETER Experiment Name: At_Drought_Reproduction_P Parameter: Plant Line Value: WS
  misc_feature: MA Experiment 20001904 PARAMETER Experiment Name: At_Drought_Reproduction_P Parameter: Timepoint (day) Value: 7
  misc_feature: MA Experiment 20001904 PARAMETER Experiment Name: At_Drought_Reproduction_P Parameter: Tissue Value: Rosettes
  misc_feature: MA Experiment 20001904 PARAMETER Experiment Name: At_Drought_Reproduction_P Parameter: Treatment Value: Drought vs. No Drought

SEQ ID NO: 95120 - protein, 497 aa, Arabidopsis thaliana; identical to SEQ ID NO: 91364
  peptide (1)..(497): Ceres Seq. ID no. 12727395
  misc_feature (1)..(497): Homolog of NCBI NO: 22329490 NR Description: cytochrome P450, putative; protein id: [Arabidopsis thaliana] >gi|13878394|sp|Q9SAB6|C71I_ARATH
  misc_feature (56)..(497): Homolog of NCBI NO: 25282567 NR Description: hypothetical protein [imported] - Arabidopsis >gi|4835796|gb|AAD30262.1|AC007296_23 Strong similarity to T11J7.14 putative cytochrome P450 from Arabidopsis thaliana and
  misc_feature (1)..(90): Homolog of NCBI NO: 25282567 NR Description: hypothetical protein [imported] - Arabidopsis >gi|4835796|gb|AAD30262.1|AC007296_23 Strong similarity to T11J7.14 putative cytochrome P450 from Arabidopsis thaliana and
  misc_feature (1)..(496): Homolog of NCBI NO: 13878362 NR Description: Cytochrome P450 71A12 >gi|25282591|pir||C84712
  misc_feature (1)..(496): Homolog of NCBI NO: 30684709 NR Description: cytochrome p450 71A12 [Arabidopsis thaliana] At2g30750/T11J7.14 [Arabidopsis thaliana]
  misc_feature (1)..(496): Homolog of NCBI NO: 15224570 NR Description: cytochrome p450 family; protein id: At2g30770.1
  misc_feature (1)..(413): Homolog of NCBI NO: 26452759 NR Description: putative cytochrome P450 [Arabidopsis thaliana]
  misc_feature (1)..(494): Homolog of NCBI NO: 15238664 NR Description: cytochrome P450-like protein; protein id: [Arabidopsis thaliana] >gi|13878366|sp|P58045|C71E_ARATH
  misc_feature (1)..(495): Homolog of NCBI NO: 15238652 NR Description: cytochrome p450 family; protein id: At5g24950.1
  misc_feature (1)..(495): Homolog of NCBI NO: 15239008 NR Description: cytochrome p450, putative; protein id: [Arabidopsis thaliana] >gi|13878374|sp|Q9FH66|C71G_ARATH P450 71A16 >gi|9759017|dbj|BAB09330.1| cytochrome P450

SEQ ID NO: 95121 - protein, 495 aa, Arabidopsis thaliana; identical to SEQ ID NO: 91365
  peptide (1)..(495): Ceres Seq. ID no. 12727396
  misc_feature (1)..(495): Homolog of NCBI NO: 22329490 NR Description: cytochrome P450, putative; protein id: [Arabidopsis thaliana] >gi|13878394|sp|Q9SAB6|C71I_ARATH
  misc_feature (54)..(495): Homolog of NCBI NO: 25282567 NR Description: hypothetical protein [imported] - Arabidopsis >gi|4835796|gb|AAD30262.1|AC007296_23 Strong similarity to T11J7.14 putative cytochrome P450 from Arabidopsis thaliana and
  misc_feature (1)..(88): Homolog of NCBI NO: 25282567 NR Description: hypothetical protein [imported] - Arabidopsis >gi|4835796|gb|AAD30262.1|AC007296_23 Strong similarity to T11J7.14 putative cytochrome P450 from Arabidopsis thaliana and
  misc_feature (1)..(494): Homolog of NCBI NO: 13878362 NR Description: Cytochrome P450 71A12 >gi|25282591|pir||C84712
  misc_feature (1)..(494): Homolog of NCBI NO: 30684709 NR Description: cytochrome p450 71A12 [Arabidopsis thaliana] At2g30750/T11J7.14 [Arabidopsis thaliana]
  misc_feature (1)..(494): Homolog of NCBI NO: 15224570 NR Description: cytochrome p450 family; protein id: At2g30770.1
  misc_feature (1)..(411): Homolog of NCBI NO: 26452759 NR Description: putative cytochrome P450 [Arabidopsis thaliana]
  misc_feature (1)..(492): Homolog of NCBI NO: 15238664 NR Description: cytochrome P450-like protein; protein id: [Arabidopsis thaliana] >gi|13878366|sp|P58045|C71E_ARATH
  misc_feature (1)..(493): Homolog of NCBI NO: 15238652 NR Description: cytochrome p450 family; protein id: At5g24950.1
  misc_feature (1)..(493): Homolog of NCBI NO: 15239008 NR Description: cytochrome p450, putative; protein id: [Arabidopsis thaliana] >gi|13878374|sp|Q9FH66|C71G_ARATH P450 71A16 >gi|9759017|dbj|BAB09330.1| cytochrome P450

SEQ ID NO: 95122 - protein, 492 aa, Arabidopsis thaliana; identical to SEQ ID NO: 91366
  peptide (1)..(492): Ceres Seq. ID no. 12727397
  misc_feature (1)..(492): Homolog of NCBI NO: 22329490 NR Description: cytochrome P450, putative; protein id: [Arabidopsis thaliana] >gi|13878394|sp|Q9SAB6|C71I_ARATH
  misc_feature (51)..(492): Homolog of NCBI NO: 25282567 NR Description: hypothetical protein [imported] - Arabidopsis >gi|4835796|gb|AAD30262.1|AC007296_23 Strong similarity to T11J7.14 putative cytochrome P450 from Arabidopsis thaliana and
  misc_feature (1)..(85): Homolog of NCBI NO: 25282567 NR Description: hypothetical protein [imported] - Arabidopsis >gi|4835796|gb|AAD30262.1|AC007296_23 Strong similarity to T11J7.14 putative cytochrome P450 from Arabidopsis thaliana and
  misc_feature (1)..(491): Homolog of NCBI NO: 13878362 NR Description: Cytochrome P450 71A12 >gi|25282591|pir||C84712
  misc_feature (1)..(491): Homolog of NCBI NO: 30684709 NR Description: cytochrome p450 71A12 [Arabidopsis thaliana] At2g30750/T11J7.14 [Arabidopsis thaliana]
  misc_feature (1)..(491): Homolog of NCBI NO: 15224570 NR Description: cytochrome p450 family; protein id: At2g30770.1
  misc_feature (1)..(408): Homolog of NCBI NO: 26452759 NR Description: putative cytochrome P450 [Arabidopsis thaliana]
  misc_feature (1)..(489): Homolog of NCBI NO: 15238664 NR Description: cytochrome P450-like protein; protein id: [Arabidopsis thaliana] >gi|13878366|sp|P58045|C71E_ARATH
  misc_feature (1)..(490): Homolog of NCBI NO: 15238652 NR Description: cytochrome p450 family; protein id: At5g24950.1
  misc_feature (1)..(490): Homolog of NCBI NO: 15239008 NR Description: cytochrome p450, putative; protein id: [Arabidopsis thaliana] >gi|13878374|sp|Q9FH66|C71G_ARATH P450 71A16 >gi|9759017|dbj|BAB09330.1| cytochrome P450

SEQ ID NO: 95123 - DNA, 1324 bp, Arabidopsis thaliana; identical to SEQ ID NO: 91367
  misc_feature (1)..(1324): Ceres Seq. ID no. 12727409
  misc_feature: MA Experiment ID: 20000180 Result: Up-regulated in Transcription
  misc_feature: MA Experiment 20000180 PARAMETER Experiment Name: At_Germinating_Seeds_P Parameter: Age (hr) Value: 24 vs. 0
  misc_feature: MA Experiment 20000180 PARAMETER Experiment Name: At_Germinating_Seeds_P Parameter: Tissue Value: Germinating Seeds
  misc_feature: MA Experiment ID: 20000184 Result: Up-regulated in Transcription
  misc_feature: MA Experiment 20000184 PARAMETER Experiment Name: At_Shoots__P Parameter: Age (day) Value: 7
  misc_feature: MA Experiment 20000184 PARAMETER Experiment Name: At_Shoots__P Parameter: Tissue Value: Shoots vs. Whole Plant
  misc_feature: MA Experiment ID: 20000185 Result: Up-regulated in Transcription
  misc_feature: MA Experiment 20000185 PARAMETER Experiment Name: At_Roots__P Parameter: Age (day) Value: 7 vs. 21
  misc_feature: MA Experiment 20000185 PARAMETER Experiment Name: At_Roots__P Parameter: Organism Value: A. thaliana
  misc_feature: MA Experiment 20000185 PARAMETER Experiment Name: At_Roots__P Parameter: Tissue Value: Roots vs. Whole Plant
  misc_feature: MA Experiment ID: 20000227 Result: Up-regulated in Transcription
  misc_feature: MA Experiment 20000227 PARAMETER Experiment Name: At_Root-Tips-vs-Tops_P Parameter: Tissue Value: Root Tips vs. Root Tops
  misc_feature: MA Experiment ID: 20000439 Result: Up-regulated in Transcription
  misc_feature: MA Experiment 20000439 PARAMETER Experiment Name: At_Roots__P Parameter: Age (day) Value: 14 vs. 21
  misc_feature: MA Experiment 20000439 PARAMETER Experiment Name: At_Roots__P Parameter: Organism Value: A. thaliana
  misc_feature: MA Experiment 20000439 PARAMETER Experiment Name: At_Roots__P Parameter: Tissue Value: Roots vs. Whole Plant
  misc_feature: MA Experiment ID: 20000527 Result: Down-regulated in Transcription
  misc_feature: MA Experiment 20000527 PARAMETER Experiment Name: At_10percent_PEG_P Parameter: Age (day) Value: 20
  misc_feature: MA Experiment 20000527 PARAMETER Experiment Name: At_10percent_PEG_P Parameter: Organism Value: A. thaliana
  misc_feature: MA Experiment 20000527 PARAMETER Experiment Name: At_10percent_PEG_P Parameter: Plant Line Value: WS
  misc_feature: MA Experiment 20000527 PARAMETER Experiment Name: At_10percent_PEG_P Parameter: Timepoint (day) Value: 20
  misc_feature: MA Experiment 20000527 PARAMETER Experiment Name: At_10percent_PEG_P Parameter: Tissue Value: Whole Plant
  misc_feature: MA Experiment 20000527 PARAMETER Experiment Name: At_10percent_PEG_P Parameter: Treatment Value: 10percent PEG vs. No Treatment

SEQ ID NO: 95124 - protein, 361 aa, Arabidopsis thaliana; identical to SEQ ID NO: 91368
  peptide (1)..(361): Ceres Seq. ID no. 12727410
  misc_feature (19)..(343): Pfam Name: NAD dependent epimerase/dehydratase family Pfam Description: NAD dependent epimerase/dehydratase family
  misc_feature (1)..(361): Homolog of NCBI NO: 15239334 NR Description: GDP-D-mannose 4,6-dehydratase; GMD1 protein id: At5g66280.1, supported by cDNA: gi_6319185
  misc_feature (9)..(361): Homolog of NCBI NO: 1764100 NR Description: GDP-D-mannose-4,6-dehydratase [Arabidopsis
  misc_feature (9)..(361): Homolog of NCBI NO: 28373938 NR Description: Chain A, Crystal Structure Of The Gdp-Mannose 4,6-
  misc_feature (9)..(361): Homolog of NCBI NO: 21536808 NR Description: GDP-D-mannose-4,6-dehydratase MUR1 [Arabidopsis
  misc_feature (9)..(361): Homolog of NCBI NO: 15230418 NR Description: GDP-D-mannose-4,6-dehydratase (MUR1); protein id:
  misc_feature (16)..(361): Homolog of NCBI NO: 7939611 NR Description: root cap-specific protein [Zea mays]
  misc_feature (16)..(340): Homolog of NCBI NO: 22298176 NR Description: GDP-mannose 4,6-dehydratase [Thermosynechococcus
  misc_feature (17)..(340): Homolog of NCBI NO: 16329177 NR Description: GDP-D-mannose dehydratase [Synechocystis sp. PCC
  misc_feature (16)..(341): Homolog of NCBI NO: 23128163 NR Description: hypothetical protein [Nostoc punctiforme]
  misc_feature (17)..(341): Homolog of NCBI NO: 4097914 NR Description: putative GDP-D-mannose dehydratase [Anabaena sp.

SEQ ID NO: 95125 - protein, 289 aa, Arabidopsis thaliana; identical to SEQ ID NO: 91369
  peptide (1)..(289): Ceres Seq. ID no. 12727411
  misc_feature (1)..(271): Pfam Name: NAD dependent epimerase/dehydratase family Pfam Description: NAD dependent epimerase/dehydratase family
  misc_feature (1)..(289): Homolog of NCBI NO: 15239334 NR Description: GDP-D-mannose 4,6-dehydratase; GMD1 protein id: At5g66280.1, supported by cDNA: gi_6319185
  misc_feature (1)..(289): Homolog of NCBI NO: 1764100 NR Description: GDP-D-mannose-4,6-dehydratase [Arabidopsis
  misc_feature (1)..(289): Homolog of NCBI NO: 28373938 NR Description: Chain A, Crystal Structure Of The Gdp-Mannose 4,6-
  misc_feature (1)..(289): Homolog of NCBI NO: 21536808 NR Description: GDP-D-mannose-4,6-dehydratase MUR1 [Arabidopsis
  misc_feature (1)..(289): Homolog of NCBI NO: 15230418 NR Description: GDP-D-mannose-4,6-dehydratase (MUR1); protein id:
  misc_feature (1)..(289): Homolog of NCBI NO: 7939611 NR Description: root cap-specific protein [Zea mays]
  misc_feature (1)..(268): Homolog of NCBI NO: 22298176 NR Description: GDP-mannose 4,6-dehydratase [Thermosynechococcus
  misc_feature (1)..(268): Homolog of NCBI NO: 16329177 NR Description: GDP-D-mannose dehydratase [Synechocystis sp. PCC
  misc_feature (1)..(269): Homolog of NCBI NO: 23128163 NR Description: hypothetical protein [Nostoc punctiforme]
  misc_feature (1)..(269): Homolog of NCBI NO: 4097914 NR Description: putative GDP-D-mannose dehydratase [Anabaena sp.

SEQ ID NO: 95126 - protein, 209 aa, Arabidopsis thaliana; identical to SEQ ID NO: 91370
  peptide (1)..(209): Ceres Seq. ID no. 12727412
  misc_feature (1)..(191): Pfam Name: NAD dependent epimerase/dehydratase family Pfam Description: NAD dependent epimerase/dehydratase family
  misc_feature (1)..(209): Homolog of NCBI NO: 15239334 NR Description: GDP-D-mannose 4,6-dehydratase; GMD1 protein id: At5g66280.1, supported by cDNA: gi_6319185
  misc_feature (1)..(209): Homolog of NCBI NO: 1764100 NR Description: GDP-D-mannose-4,6-dehydratase [Arabidopsis
  misc_feature (1)..(209): Homolog of NCBI NO: 28373938 NR Description: Chain A, Crystal Structure Of The Gdp-Mannose 4,6-
  misc_feature (1)..(209): Homolog of NCBI NO: 21536808 NR Description: GDP-D-mannose-4,6-dehydratase MUR1 [Arabidopsis
  misc_feature (1)..(209): Homolog of NCBI NO: 15230418 NR Description: GDP-D-mannose-4,6-dehydratase (MUR1); protein id:
  misc_feature (1)..(209): Homolog of NCBI NO: 7939611 NR Description: root cap-specific protein [Zea mays]
  misc_feature (1)..(188): Homolog of NCBI NO: 22298176 NR Description: GDP-mannose 4,6-dehydratase [Thermosynechococcus
  misc_feature (1)..(188): Homolog of NCBI NO: 16329177 NR Description: GDP-D-mannose dehydratase [Synechocystis sp. PCC
  misc_feature (1)..(189): Homolog of NCBI NO: 23128163 NR Description: hypothetical protein [Nostoc punctiforme]
  misc_feature (1)..(189): Homolog of NCBI NO: 4097914 NR Description: putative GDP-D-mannose dehydratase [Anabaena sp.

SEQ ID NO: 95127 - DNA, 1669 bp, Arabidopsis thaliana; identical to SEQ ID NO: 91371
  misc_feature (1)..(1669): Ceres Seq. ID no. 12727415
  misc_feature: MA Experiment ID: 20000264 Result: Up-regulated in Transcription
  misc_feature: MA Experiment 20000264 PARAMETER Experiment Name: At_Open_Flower_P Parameter: Age (day) Value: 21
  misc_feature: MA Experiment 20000264 PARAMETER Experiment Name: At_Open_Flower_P Parameter: Plant Line Value: WS
  misc_feature: MA Experiment 20000264 PARAMETER Experiment Name: At_Open_Flower_P Parameter: Tissue Value: Open Flower vs. Whole Plant
  misc_feature: MA Experiment ID: 20000265 Result: Up-regulated in Transcription
  misc_feature: MA Experiment 20000265 PARAMETER Experiment Name: At_Open_Flower_P Parameter: Age (day) Value: 21
  misc_feature: MA Experiment 20000265 PARAMETER Experiment Name: At_Open_Flower_P Parameter: Plant Line Value: WS
  misc_feature: MA Experiment 20000265 PARAMETER Experiment Name: At_Open_Flower_P Parameter: Tissue Value: Closed Flower vs. Whole Plant
  misc_feature: MA Experiment ID: 20000286 Result: Up-regulated in Transcription
  misc_feature: MA Experiment 20000286 PARAMETER Experiment Name: At_Open_Flower_P Parameter: Age (day) Value: 21
  misc_feature: MA Experiment 20000286 PARAMETER Experiment Name: At_Open_Flower_P Parameter: Plant Line Value: WS
  misc_feature: MA Experiment 20000286 PARAMETER Experiment Name: At_Open_Flower_P Parameter: Tissue Value: Half Open vs. Whole Plant
  misc_feature: MA Experiment ID: 20000451 Result: Up-regulated in Transcription
  misc_feature: MA Experiment 20000451 PARAMETER Experiment Name: At_CS6879_Shoots-Roots_P Parameter: Age (day) Value: 14
  misc_feature: MA Experiment 20000451 PARAMETER Experiment Name: At_CS6879_Shoots-Roots_P Parameter: Organism Value: A. thaliana
  misc_feature: MA Experiment 20000451 PARAMETER Experiment Name: At_CS6879_Shoots-Roots_P Parameter: Plant Line Value: CS6879 vs. WS
  misc_feature: MA Experiment 20000451 PARAMETER Experiment Name: At_CS6879_Shoots-Roots_P Parameter: Tissue Value: Roots
  misc_feature: MA Experiment ID: 20000573 Result: Up-regulated in Transcription
  misc_feature: MA Experiment 20000573 PARAMETER Experiment Name: At_100uM_ABA_Mutants__P Parameter: Organism Value: A. thaliana
  misc_feature: MA Experiment 20000573 PARAMETER Experiment Name: At_100uM_ABA_Mutants__P Parameter: Plant Line Value: CS22 vs. Ler wt
  misc_feature: MA Experiment 20000573 PARAMETER Experiment Name: At_100uM_ABA_Mutants__P Parameter: Timepoint (hr) Value: N/A
  misc_feature: MA Experiment 20000573 PARAMETER Experiment Name: At_100uM_ABA_Mutants__P Parameter: Tissue Value: Whole Plant
  misc_feature: MA Experiment 20000573 PARAMETER Experiment Name: At_100uM_ABA_Mutants__P Parameter: Treatment Value: None

SEQ ID NO: 95128 - protein, 331 aa, Arabidopsis thaliana; identical to SEQ ID NO: 91372
  peptide (1)..(331): Ceres Seq. ID no. 12727416
  misc_feature (111)..(264): Pfam Name: Domain of unknown function (DUF702) Pfam Description: Domain of unknown function (DUF702)
  misc_feature (1)..(331): Homolog of NCBI NO: 15239350 NR Description: zinc finger protein SHI-like; protein id: supported by cDNA: gi_4929802 [Arabidopsis thaliana] putative zinc finger protein SHI [Arabidopsis thaliana]
  misc_feature (39)..(227): Homolog of NCBI NO: 15230389 NR Description: putative protein; protein id: At3g51060.1
  misc_feature (1)..(330): Homolog of NCBI NO: 15223669 NR Description: hypothetical protein; protein id: At1g19790.1
  misc_feature (58)..(328): Homolog of NCBI NO: 15234365 NR Description: putative protein; protein id: At4g36260.1
  misc_feature (1)..(331): Homolog of NCBI NO: 15222285 NR Description: unknown protein; protein id: At1g75520.1
  misc_feature (82)..(260): Homolog of NCBI NO: 34906658 NR Description: putative LRP(lateral root primordia) 1 [Oryza
  misc_feature (109)..(265): Homolog of NCBI NO: 15224110 NR Description: unknown protein; protein id: At2g18120.1
  misc_feature (90)..(202): Homolog of NCBI NO: 15242760 NR Description: putative protein; protein id: At5g33210.1
  misc_feature (107)..(291): Homolog of NCBI NO: 33945875 NR Description: hypothetical protein [Lotus corniculatus var.
  misc_feature (1)..(231): Homolog of NCBI NO: 15230389 NR Description: putative protein; protein id: At3g51060.1

SEQ ID NO: 95129 - protein, 225 aa, Arabidopsis thaliana; identical to SEQ ID NO: 91373
  peptide (1)..(225): Ceres Seq. ID no. 12727417
  misc_feature (5)..(158): Pfam Name: Domain of unknown function (DUF702) Pfam Description: Domain of unknown function (DUF702)
  misc_feature (1)..(225): Homolog of NCBI NO: 15239350 NR Description: zinc finger protein SHI-like; protein id: supported by cDNA: gi_4929802 [Arabidopsis thaliana] putative zinc finger protein SHI [Arabidopsis thaliana]
  misc_feature (1)..(121): Homolog of NCBI NO: 15230389 NR Description: putative protein; protein id: At3g51060.1
  misc_feature (1)..(224): Homolog of NCBI NO: 15223669 NR Description: hypothetical protein; protein id: At1g19790.1
  misc_feature (1)..(222): Homolog of NCBI NO: 15234365 NR Description: putative protein; protein id: At4g36260.1
  misc_feature (1)..(225): Homolog of NCBI NO: 15222285 NR Description: unknown protein; protein id: At1g75520.1
  misc_feature (1)..(154): Homolog of NCBI NO: 34906658 NR Description: putative LRP(lateral root primordia) 1 [Oryza
  misc_feature (3)..(159): Homolog of NCBI NO: 15224110 NR Description: unknown protein; protein id: At2g18120.1
  misc_feature (1)..(96): Homolog of NCBI NO: 15242760 NR Description: putative protein; protein id: At5g33210.1
  misc_feature (1)..(185): Homolog of NCBI NO: 33945875 NR Description: hypothetical protein [Lotus corniculatus var.
  misc_feature (1)..(125): Homolog of NCBI NO: 15230389 NR Description: putative protein; protein id: At3g51060.1

SEQ ID NO: 95130 - protein, 224 aa, Arabidopsis thaliana; identical to SEQ ID NO: 91374
  peptide (1)..(224): Ceres Seq. ID no. 12727418
  misc_feature (4)..(157): Pfam Name: Domain of unknown function (DUF702) Pfam Description: Domain of unknown function (DUF702)
  misc_feature (1)..(224): Homolog of NCBI NO: 15239350 NR Description: zinc finger protein SHI-like; protein id: supported by cDNA: gi_4929802 [Arabidopsis thaliana] putative zinc finger protein SHI [Arabidopsis thaliana]
  misc_feature (1)..(120): Homolog of NCBI NO: 15230389 NR Description: putative protein; protein id: At3g51060.1
  misc_feature (1)..(223): Homolog of NCBI NO: 15223669 NR Description: hypothetical protein; protein id: At1g19790.1
  misc_feature (1)..(221): Homolog of NCBI NO: 15234365 NR Description: putative protein; protein id: At4g36260.1
  misc_feature (1)..(224): Homolog of NCBI NO: 15222285 NR Description: unknown protein; protein id: At1g75520.1
  misc_feature (1)..(153): Homolog of NCBI NO: 34906658 NR Description: putative LRP(lateral root primordia) 1 [Oryza
  misc_feature (2)..(158): Homolog of NCBI NO: 15224110 NR Description: unknown protein; protein id: At2g18120.1
  misc_feature (1)..(95): Homolog of NCBI NO: 15242760 NR Description: putative protein; protein id: At5g33210.1
  misc_feature (1)..(184): Homolog of NCBI NO: 33945875 NR Description: hypothetical protein [Lotus corniculatus var.
  misc_feature (1)..(124): Homolog of NCBI NO: 15230389 NR Description: putative protein; protein id: At3g51060.1

SEQ ID NO: 95131 - DNA, 1599 bp, Arabidopsis thaliana; identical to SEQ ID NO: 91375
  misc_feature (1)..(1599): Ceres Seq. ID no. 12727429
  misc_feature: MA Experiment ID: 20000307 Result: Down-regulated in Transcription
  misc_feature: MA Experiment 20000307 PARAMETER Experiment Name: At_Germinating_Seeds_Sub_P Parameter: Age (hr) Value: 24 vs. 0
  misc_feature: MA Experiment 20000307 PARAMETER Experiment Name: At_Germinating_Seeds_Sub_P Parameter: Organism Value: A. thaliana
  misc_feature: MA Experiment 20000307 PARAMETER Experiment Name: At_Germinating_Seeds_Sub_P Parameter: Plant Line Value: WS
  misc_feature: MA Experiment 20000307 PARAMETER Experiment Name: At_Germinating_Seeds_Sub_P Parameter: Tissue Value: Germinating Seeds
  misc_feature: MA Experiment ID: 20000328 Result: Down-regulated in Transcription
  misc_feature: MA Experiment 20000328 PARAMETER Experiment Name: At_42deg_Heat_Sub_P Parameter: Age (day) Value: 14
  misc_feature: MA Experiment 20000328 PARAMETER Experiment Name: At_42deg_Heat_Sub_P Parameter: Organism Value: A. thaliana
  misc_feature: MA Experiment 20000328 PARAMETER Experiment Name: At_42deg_Heat_Sub_P Parameter: Plant Line Value: WS
  misc_feature: MA Experiment 20000328 PARAMETER Experiment Name: At_42deg_Heat_Sub_P Parameter: Temperature (deg C) Value: 42 vs. 22
  misc_feature: MA Experiment 20000328 PARAMETER Experiment Name: At_42deg_Heat_Sub_P Parameter: Timepoint (hr) Value: 6
  misc_feature: MA Experiment 20000328 PARAMETER Experiment Name: At_42deg_Heat_Sub_P Parameter: Tissue Value: Aerial

SEQ ID NO: 95132 - protein, 532 aa, Arabidopsis thaliana; identical to SEQ ID NO: 91376
  peptide (1)..(532): Ceres Seq. ID no. 12727430
  misc_feature (421)..(455): Pfam Name: PPR repeat Pfam Description: PPR repeat
  misc_feature (1)..(532): Homolog of NCBI NO: 15239977 NR Description: putative protein; protein id: At5g66500.1
  misc_feature (96)..(529): Homolog of NCBI NO: 40737026 NR Description: putative pentatricopeptide repeat protein [Oryza
  misc_feature (13)..(529): Homolog of NCBI NO: 15228590 NR Description: hypothetical protein; protein id: At3g03580.1 thaliana] >gi|6091764|gb|AAF03474.1|AC009327_13 hypothetical [Arabidopsis thaliana] >gi|28393735|gb|AAO42278.1| unknown
  misc_feature (37)..(529): Homolog of NCBI NO: 34906110 NR Description: P0020E09.15 [Oryza sativa (japonica
  misc_feature (37)..(529): Homolog of NCBI NO: 15241714 NR Description: putative protein; protein id: At5g39350.1
  misc_feature (15)..(529): Homolog of NCBI NO: 15240444 NR Description: putative protein; protein id: At5g27110.1
  misc_feature (40)..(529): Homolog of NCBI NO: 18418348 NR Description: putative protein; protein id: At4g33990.1
  misc_feature (37)..(530): Homolog of NCBI NO: 34897884 NR Description: Similar to Arabidopsis thaliana DNA chromosome 4,
  misc_feature (16)..(529): Homolog of NCBI NO: 18483237 NR Description: putative vegetative storage protein [Sorghum
  misc_feature (40)..(529): Homolog of NCBI NO: 15226150 NR Description: hypothetical protein; protein id: At2g33680.1

SEQ ID NO: 95133 - protein, 423 aa, Arabidopsis thaliana; identical to SEQ ID NO: 91377
  peptide (1)..(423): Ceres Seq. ID no. 12727431
  misc_feature (312)..(346): Pfam Name: PPR repeat Pfam Description: PPR repeat
  misc_feature (1)..(423): Homolog of NCBI NO: 15239977 NR Description: putative protein; protein id: At5g66500.1
  misc_feature (1)..(420): Homolog of NCBI NO: 40737026 NR Description: putative pentatricopeptide repeat protein [Oryza
  misc_feature (1)..(420): Homolog of NCBI NO: 15228590 NR Description: hypothetical protein; protein id: At3g03580.1 thaliana] >gi|6091764|gb|AAF03474.1|AC009327_13 hypothetical [Arabidopsis thaliana] >gi|28393735|gb|AAO42278.1| unknown
  misc_feature (1)..(420): Homolog of NCBI NO: 34906110 NR Description: P0020E09.15 [Oryza sativa (japonica
  misc_feature (1)..(420): Homolog of NCBI NO: 15241714 NR Description: putative protein; protein id: At5g39350.1
  misc_feature (1)..(420): Homolog of NCBI NO: 15240444 NR Description: putative protein; protein id: At5g27110.1
  misc_feature (1)..(420): Homolog of NCBI NO: 18418348 NR Description: putative protein; protein id: At4g33990.1
  misc_feature (1)..(421): Homolog of NCBI NO: 34897884 NR Description: Similar to Arabidopsis thaliana DNA chromosome 4,
  misc_feature (1)..(420): Homolog of NCBI NO: 18483237 NR Description: putative vegetative storage protein [Sorghum
  misc_feature (1)..(420): Homolog of NCBI NO: 15226150 NR Description: hypothetical protein; protein id: At2g33680.1

SEQ ID NO: 95134 - protein, 405 aa, Arabidopsis thaliana; identical to SEQ ID NO: 91378
  peptide (1)..(405): Ceres Seq. ID no. 12727432
  misc_feature (294)..(328): Pfam Name: PPR repeat Pfam Description: PPR repeat
  misc_feature (1)..(405): Homolog of NCBI NO: 15239977 NR Description: putative protein; protein id: At5g66500.1
  misc_feature (1)..(402): Homolog of NCBI NO: 40737026 NR Description: putative pentatricopeptide repeat protein [Oryza
  misc_feature (1)..(402): Homolog of NCBI NO: 15228590 NR Description: hypothetical protein; protein id: At3g03580.1 thaliana] >gi|6091764|gb|AAF03474.1|AC009327_13 hypothetical [Arabidopsis thaliana] >gi|28393735|gb|AAO42278.1| unknown
  misc_feature (1)..(402): Homolog of NCBI NO: 34906110 NR Description: P0020E09.15 [Oryza sativa (japonica
  misc_feature (1)..(402): Homolog of NCBI NO: 15241714 NR Description: putative protein; protein id: At5g39350.1
  misc_feature (1)..(402): Homolog of NCBI NO: 15240444 NR Description: putative protein; protein id: At5g27110.1
  misc_feature (1)..(402): Homolog of NCBI NO: 18418348 NR Description: putative protein; protein id: At4g33990.1
  misc_feature (1)..(403): Homolog of NCBI NO: 34897884 NR Description: Similar to Arabidopsis thaliana DNA chromosome 4,
  misc_feature (1)..(402): Homolog of NCBI NO: 18483237 NR Description: putative vegetative storage protein [Sorghum
  misc_feature (1)..(402): Homolog of NCBI NO: 15226150 NR Description: hypothetical protein; protein id: At2g33680.1

SEQ ID NO: 95135 - DNA, 1863 bp, Arabidopsis thaliana; identical to SEQ ID NO: 91379
  misc_feature (1)..(1863): Ceres Seq. ID no. 12727433
  misc_feature: MA Experiment ID: 20000307 Result: Up-regulated in Transcription
  misc_feature: MA Experiment 20000307 PARAMETER Experiment Name: At_Germinating_Seeds_Sub_P Parameter: Age (hr) Value: 24 vs. 0
  misc_feature: MA Experiment 20000307 PARAMETER Experiment Name: At_Germinating_Seeds_Sub_P Parameter: Organism Value: A. thaliana
  misc_feature: MA Experiment 20000307 PARAMETER Experiment Name: At_Germinating_Seeds_Sub_P Parameter: Plant Line Value: WS
  misc_feature: MA Experiment 20000307 PARAMETER Experiment Name: At_Germinating_Seeds_Sub_P Parameter: Tissue Value: Germinating Seeds
  misc_feature: MA Experiment ID: 20000314 Result: Down-regulated in Transcription
  misc_feature: MA Experiment 20000314 PARAMETER Experiment Name: At_14day_Shoots-Roots_Sub_P Parameter: Age (day) Value: 14
  misc_feature: MA Experiment 20000314 PARAMETER Experiment Name: At_14day_Shoots-Roots_Sub_P Parameter: Organism Value: A. thaliana
  misc_feature: MA Experiment 20000314 PARAMETER Experiment Name: At_14day_Shoots-Roots_Sub_P Parameter: Plant Line Value: WS
  misc_feature: MA Experiment 20000314 PARAMETER Experiment Name: At_14day_Shoots-Roots_Sub_P Parameter: Tissue Value: Roots vs. Whole Plant
  misc_feature: MA Experiment ID: 20000347 Result: Down-regulated in Transcription
  misc_feature: MA Experiment 20000347 PARAMETER Experiment Name: At_2mM_SA_Sub_P Parameter: Age (day) Value: 14
  misc_feature: MA Experiment 20000347 PARAMETER Experiment Name: At_2mM_SA_Sub_P Parameter: Organism Value: A. thaliana
  misc_feature: MA Experiment 20000347 PARAMETER Experiment Name: At_2mM_SA_Sub_P Parameter: Plant Line Value: WS
  misc_feature: MA Experiment 20000347 PARAMETER Experiment Name: At_2mM_SA_Sub_P Parameter: Timepoint (hr) Value: 6
  misc_feature: MA Experiment 20000347 PARAMETER Experiment Name: At_2mM_SA_Sub_P Parameter: Tissue Value: Aerial
  misc_feature: MA Experiment 20000347 PARAMETER Experiment Name: At_2mM_SA_Sub_P Parameter: Treatment Value: 2mM SA vs. No Treatment

SEQ ID NO: 95136 - protein, 620 aa, Arabidopsis thaliana; identical to SEQ ID NO: 91380
  peptide (1)..(620): Ceres Seq. ID no. 12727434
  misc_feature (81)..(115): Pfam Name: PPR repeat Pfam Description: PPR repeat
  misc_feature (2)..(620): Homolog of NCBI NO: 15240085 NR Description: selenium-binding protein-like; protein id:
  misc_feature (28)..(620): Homolog of NCBI NO: 10178152 NR Description: selenium-binding protein-like [Arabidopsis
  misc_feature (21)..(620): Homolog of NCBI NO: 15235537 NR Description: putative protein; protein id: At4g37380.1
  misc_feature (31)..(620): Homolog of NCBI NO: 15227619 NR Description: hypothetical protein; protein id: At2g29760.1
  misc_feature (28)..(611): Homolog of NCBI NO: 15242684 NR Description: putative protein; protein id: At5g40410.1
  misc_feature (33)..(620): Homolog of NCBI NO: 34910298 NR Description: P0013F10.8 [Oryza sativa (japonica
  misc_feature (101)..(620): Homolog of NCBI NO: 15239745 NR Description: selenium-binding protein-like; protein id:
  misc_feature (3)..(620): Homolog of NCBI NO: 15223099 NR Description: unknown protein; protein id: At1g08070.1 thaliana] >gi|8778839|gb|AAF79838.1|AC026875_18 T6D22.15
  misc_feature (25)..(620): Homolog of NCBI NO: 34910594 NR Description: putative selenium-binding protein [Oryza sativa
  misc_feature (185)..(620): Homolog of NCBI NO: 11281371 NR Description: hypothetical protein T8H10.30 - Arabidopsis >gi|6706414|emb|CAB66100.1| putative protein [Arabidopsis

SEQ ID NO: 95137 - protein, 603 aa, Arabidopsis thaliana; identical to SEQ ID NO: 91381
  peptide (1)..(603): Ceres Seq. ID no. 12727435
  misc_feature (64)..(98): Pfam Name: PPR repeat Pfam Description: PPR repeat
  misc_feature (1)..(603): Homolog of NCBI NO: 15240085 NR Description: selenium-binding protein-like; protein id:
  misc_feature (11)..(603): Homolog of NCBI NO: 10178152 NR Description: selenium-binding protein-like [Arabidopsis
  misc_feature (4)..(603): Homolog of NCBI NO: 15235537 NR Description: putative protein; protein id: At4g37380.1
  misc_feature (14)..(603): Homolog of NCBI NO: 15227619 NR Description: hypothetical protein; protein id: At2g29760.1
  misc_feature (11)..(594): Homolog of NCBI NO: 15242684 NR Description: putative protein; protein id: At5g40410.1
  misc_feature (16)..(603): Homolog of NCBI NO: 34910298 NR Description: P0013F10.8 [Oryza sativa (japonica
  misc_feature (84)..(603): Homolog of NCBI NO: 15239745 NR Description: selenium-binding protein-like; protein id:
  misc_feature (1)..(603): Homolog of NCBI NO: 15223099 NR Description: unknown protein; protein id: At1g08070.1 thaliana] >gi|8778839|gb|AAF79838.1|AC026875_18 T6D22.15
  misc_feature (8)..(603): Homolog of NCBI NO: 34910594 NR Description: putative selenium-binding protein [Oryza sativa
  misc_feature (168)..(603): Homolog of NCBI NO: 11281371 NR Description: hypothetical protein T8H10.30 - Arabidopsis >gi|6706414|emb|CAB66100.1| putative protein [Arabidopsis

SEQ ID NO: 95138 - protein, 584 aa, Arabidopsis thaliana; identical to SEQ ID NO: 91382
  peptide (1)..(584): Ceres Seq. ID no. 12727436
  misc_feature (45)..(79): Pfam Name: PPR repeat Pfam Description: PPR repeat
  misc_feature (1)..(584): Homolog of NCBI NO: 15240085 NR Description: selenium-binding protein-like; protein id:
  misc_feature (1)..(584): Homolog of NCBI NO: 10178152 NR Description: selenium-binding protein-like [Arabidopsis
  misc_feature (1)..(584): Homolog of NCBI NO: 15235537 NR Description: putative protein; protein id: At4g37380.1
  misc_feature (1)..(584): Homolog of NCBI NO: 15227619 NR Description: hypothetical protein; protein id: At2g29760.1
  misc_feature (1)..(575): Homolog of NCBI NO: 15242684 NR Description: putative protein; protein id: At5g40410.1
  misc_feature (1)..(584): Homolog of NCBI NO: 34910298 NR Description: P0013F10.8 [Oryza sativa (japonica
  misc_feature (65)..(584): Homolog of NCBI NO: 15239745 NR Description: selenium-binding protein-like; protein id:
  misc_feature (1)..(584): Homolog of NCBI NO: 15223099 NR Description: unknown protein; protein id: At1g08070.1 thaliana] >gi|8778839|gb|AAF79838.1|AC026875_18 T6D22.15
  misc_feature (1)..(584): Homolog of NCBI NO: 34910594 NR Description: putative selenium-binding protein [Oryza sativa
  misc_feature (149)..(584): Homolog of NCBI NO: 11281371 NR Description: hypothetical protein T8H10.30 - Arabidopsis >gi|6706414|emb|CAB66100.1| putative protein [Arabidopsis

SEQ ID NO: 95139 - DNA, 967 bp, Arabidopsis thaliana; identical to SEQ ID NO: 91383
  misc_feature (1)..(967): Ceres Seq. ID no. 12727437
  misc_feature: MA Experiment ID: 108434 Result: Up-regulated in Transcription
  misc_feature: MA Experiment 108434 PARAMETER Experiment Name: At_Root_Tips_cDNA_P Parameter: Tissue Value: Root Tips
  misc_feature: MA Experiment ID: 108461 Result: Up-regulated in Transcription
  misc_feature: MA Experiment 108461 PARAMETER Experiment Name: At_Germinating_Seeds_cDNA_P Parameter: Age (day) Value: 1 vs. 0
  misc_feature: MA Experiment 108461 PARAMETER Experiment Name: At_Germinating_Seeds_cDNA_P Parameter: Tissue Value: Germinating Seeds
  misc_feature: MA Experiment ID: 108501 Result: Down-regulated in Transcription
  misc_feature: MA Experiment 108501 PARAMETER Experiment Name: At_ap2_floral_buds_cDNA_P Parameter: Plant Line Value: ap2 (Ler.)
  misc_feature: MA Experiment 108501 PARAMETER Experiment Name: At_ap2_floral_buds_cDNA_P Parameter: Tissue Value: Closed Flower
  misc_feature: MA Experiment ID: 108561 Result: Down-regulated in Transcription
  misc_feature: MA Experiment 108561 PARAMETER Experiment Name: At_100uM_ABA_cDNA_P Parameter: Timepoint (hr) Value: 6
  misc_feature: MA Experiment 108561 PARAMETER Experiment Name: At_100uM_ABA_cDNA_P Parameter: Tissue Value: Aerial
  misc_feature: MA Experiment 108561 PARAMETER Experiment Name: At_100uM_ABA_cDNA_P Parameter: Treatment Value: 100uM ABA vs. No Treatment
  misc_feature: MA Experiment ID: 108577 Result: Down-regulated in Transcription
  misc_feature: MA Experiment 108577 PARAMETER Experiment Name: At_42deg_Heat_cDNA_P Parameter: Temperature (deg C) Value: 42 vs. 22
  misc_feature: MA Experiment 108577 PARAMETER Experiment Name: At_42deg_Heat_cDNA_P Parameter: Timepoint (hr) Value: 6
  misc_feature: MA Experiment 108577 PARAMETER Experiment Name: At_42deg_Heat_cDNA_P Parameter: Tissue Value: Aerial
  misc_feature: MA Experiment ID: 108585 Result: Down-regulated in Transcription
  misc_feature: MA Experiment 108585 PARAMETER Experiment Name: At_5mM_NaNP_cDNA_P Parameter: Timepoint (hr) Value: 6
  misc_feature: MA Experiment 108585 PARAMETER Experiment Name: At_5mM_NaNP_cDNA_P Parameter: Tissue Value: Aerial
  misc_feature: MA Experiment 108585 PARAMETER Experiment Name: At_5mM_NaNP_cDNA_P Parameter: Treatment Value: null
  misc_feature: MA Experiment ID: 108595 Result: Down-regulated in Transcription
  misc_feature: MA Experiment 108595 PARAMETER Experiment Name: At_Ler-pi_Ovule_cDNA_P Parameter: Plant Line Value: null
  misc_feature: MA Experiment ID: 108609 Result: Down-regulated in Transcription
  misc_feature: MA Experiment 108609 PARAMETER Experiment Name: At_100uM_ABA_cDNA_P Parameter: Timepoint (hr) Value: 24
  misc_feature: MA Experiment 108609 PARAMETER Experiment Name: At_100uM_ABA_cDNA_P Parameter: Tissue Value: Aerial
  misc_feature: MA Experiment 108609 PARAMETER Experiment Name: At_100uM_ABA_cDNA_P Parameter: Treatment Value: 100uM ABA vs. No Treatment
  misc_feature: MA Experiment ID: 20000111 Result: Down-regulated in Transcription
  misc_feature: MA Experiment 20000111 PARAMETER Experiment Name: At_42deg_Heat_cDNA_P Parameter: Temperature (deg C) Value: 42 vs. 22
  misc_feature: MA Experiment 20000111 PARAMETER Experiment Name: At_42deg_Heat_cDNA_P Parameter: Timepoint (hr) Value: 6
  misc_feature: MA Experiment 20000111 PARAMETER Experiment Name: At_42deg_Heat_cDNA_P Parameter: Tissue Value: Aerial
  misc_feature: MA Experiment ID: 20000113 Result: Down-regulated in Transcription
  misc_feature: MA Experiment 20000113 PARAMETER Experiment Name: At_42deg_Heat_cDNA_P Parameter: Temperature (deg C) Value: 42 vs. 22
  misc_feature: MA Experiment 20000113 PARAMETER Experiment Name: At_42deg_Heat_cDNA_P Parameter: Timepoint (hr) Value: 8
  misc_feature: MA Experiment 20000113 PARAMETER Experiment Name: At_42deg_Heat_cDNA_P Parameter: Tissue Value: Aerial
  misc_feature: MA Experiment ID: 20000173 Result: Down-regulated in Transcription
  misc_feature: MA Experiment 20000173 PARAMETER Experiment Name: At_42deg_Heat_P Parameter: Age (day) Value: 14
  misc_feature: MA Experiment 20000173 PARAMETER Experiment Name: At_42deg_Heat_P Parameter: Organism Value: A. thaliana
  misc_feature: MA Experiment 20000173 PARAMETER Experiment Name: At_42deg_Heat_P Parameter: Plant Line Value: WS
  misc_feature: MA Experiment 20000173 PARAMETER Experiment Name: At_42deg_Heat_P Parameter: Temperature (deg C) Value: 42 vs. 22
  misc_feature: MA Experiment 20000173 PARAMETER Experiment Name: At_42deg_Heat_P Parameter: Timepoint (hr) Value: 6
  misc_feature: MA Experiment 20000173 PARAMETER Experiment Name: At_42deg_Heat_P Parameter: Tissue Value: Aerial
  misc_feature: MA Experiment ID: 20000185 Result: Down-regulated in Transcription
  misc_feature: MA Experiment 20000185 PARAMETER Experiment Name: At_Roots__P Parameter: Age (day) Value: 7 vs. 21
  misc_feature: MA Experiment 20000185 PARAMETER Experiment Name: At_Roots__P Parameter: Organism Value: A. thaliana
  misc_feature: MA Experiment 20000185 PARAMETER Experiment Name: At_Roots__P Parameter: Tissue Value: Roots vs. Whole Plant
  misc_feature: MA Experiment ID: 20000437 Result: Down-regulated in Transcription
  misc_feature: MA Experiment 20000437 PARAMETER Experiment Name: At_Drought_P Parameter: Age (day) Value: 8
  misc_feature: MA Experiment 20000437 PARAMETER Experiment Name: At_Drought_P Parameter: Organism Value: A. thaliana
  misc_feature: MA Experiment 20000437 PARAMETER Experiment Name: At_Drought_P Parameter: Plant Line Value: WS
  misc_feature: MA Experiment 20000437 PARAMETER Experiment Name: At_Drought_P Parameter: Timepoint (hr) Value: 24
  misc_feature: MA Experiment 20000437 PARAMETER Experiment Name: At_Drought_P Parameter: Tissue Value: Whole Plant
  misc_feature: MA Experiment 20000437 PARAMETER Experiment Name: At_Drought_P Parameter: Treatment Value: Drought vs. No Drought
  misc_feature: MA Experiment ID: 20000453 Result: Down-regulated in Transcription
  misc_feature: MA Experiment 20000453 PARAMETER Experiment Name: At_100uM_ABA_P Parameter: Age (day) Value: 15
  misc_feature: MA Experiment 20000453 PARAMETER Experiment Name: At_100uM_ABA_P Parameter: Organism Value: A. thaliana
  misc_feature: MA Experiment 20000453 PARAMETER Experiment Name: At_100uM_ABA_P Parameter: Plant Line Value: WS
  misc_feature: MA Experiment 20000453 PARAMETER Experiment Name: At_100uM_ABA_P Parameter: Timepoint (hr) Value: 24
  misc_feature: MA Experiment 20000453 PARAMETER Experiment Name: At_100uM_ABA_P Parameter: Tissue Value: Aerial
  misc_feature: MA Experiment 20000453 PARAMETER Experiment Name: At_100uM_ABA_P Parameter: Treatment Value: 100uM ABA vs. No Treatment
  misc_feature: MA Experiment ID: 20000794 Result: Down-regulated in Transcription
  misc_feature: MA Experiment 20000794 PARAMETER Experiment Name: At_Petals_P Parameter: Age (day) Value: 23-25 days
  misc_feature: MA Experiment 20000794 PARAMETER Experiment Name: At_Petals_P Parameter: Plant Line Value: WS
  misc_feature: MA Experiment 20000794 PARAMETER Experiment Name: At_Petals_P Parameter: Tissue Value: Petals vs. Whole plant
  misc_feature: MA Experiment ID: 20001247 Result: Down-regulated in Transcription
  misc_feature: MA Experiment 20001247 PARAMETER Experiment Name: At_Far-red-induction_P Parameter: Age (day) Value: 7
  misc_feature: MA Experiment 20001247 PARAMETER Experiment Name: At_Far-red-induction_P Parameter: Light Value: Far-red vs. White
  misc_feature: MA Experiment 20001247 PARAMETER Experiment Name: At_Far-red-induction_P Parameter: Organism Value: A. thaliana
  misc_feature: MA Experiment 20001247 PARAMETER Experiment Name: At_Far-red-induction_P Parameter: Plant Line Value: Columbia
  misc_feature: MA Experiment 20001247 PARAMETER Experiment Name: At_Far-red-induction_P Parameter: Timepoint (hr) Value: 1
  misc_feature: MA Experiment 20001247 PARAMETER Experiment Name: At_Far-red-induction_P Parameter: Tissue Value: Whole Plant
  misc_feature: MA Experiment ID: 20001451 Result: Down-regulated in Transcription
  misc_feature: MA Experiment 20001451 PARAMETER Experiment Name: At_Far-red-induction_P Parameter: Age (day) Value: 7
  misc_feature: MA Experiment 20001451 PARAMETER Experiment Name: At_Far-red-induction_P Parameter: Light Value: Far-red vs. White
  misc_feature: MA Experiment 20001451 PARAMETER Experiment Name: At_Far-red-induction_P Parameter: Organism Value: A. thaliana
  misc_feature: MA Experiment 20001451 PARAMETER Experiment Name: At_Far-red-induction_P Parameter: Plant Line Value: Columbia
  misc_feature: MA Experiment 20001451 PARAMETER Experiment Name: At_Far-red-induction_P Parameter: Timepoint (hr) Value: 24
  misc_feature: MA Experiment 20001451 PARAMETER Experiment Name: At_Far-red-induction_P Parameter: Tissue Value: Whole Plant
  misc_feature: MA Experiment ID: 20001458 Result: Up-regulated in Transcription
  misc_feature: MA Experiment 20001458 PARAMETER Experiment Name: At_50mM_NH4NO3_L-to-H_P Parameter: Age (day) Value: Undefined
  misc_feature: MA Experiment 20001458 PARAMETER Experiment Name: At_50mM_NH4NO3_L-to-H_P Parameter: Organism Value: Undefined
  misc_feature: MA Experiment 20001458 PARAMETER Experiment Name: At_50mM_NH4NO3_L-to-H_P Parameter: Plant Line Value: Undefined
  misc_feature: MA Experiment 20001458 PARAMETER Experiment Name: At_50mM_NH4NO3_L-to-H_P Parameter: Timepoint (hr) Value: 2
  misc_feature: MA Experiment 20001458 PARAMETER Experiment Name: At_50mM_NH4NO3_L-to-H_P Parameter: Tissue Value: Siliques
  misc_feature: MA Experiment 20001458 PARAMETER Experiment Name: At_50mM_NH4NO3_L-to-H_P Parameter: Treatment Value: 50mM NH4NO3 vs. 100mM Manitol
  misc_feature: MA Experiment ID: 20001557 Result: Down-regulated in Transcription
  misc_feature: MA Experiment 20001557 PARAMETER Experiment Name: At_Drought_Soil_Dry_P Parameter: Age (day) Value: 27
  misc_feature: MA Experiment 20001557 PARAMETER Experiment Name: At_Drought_Soil_Dry_P Parameter: Organism Value: A. thaliana
  misc_feature: MA Experiment 20001557 PARAMETER Experiment Name: At_Drought_Soil_Dry_P Parameter: Plant Line Value: WS
  misc_feature: MA Experiment 20001557 PARAMETER Experiment Name: At_Drought_Soil_Dry_P Parameter: Post Timepoint (hr) Value: 3
  misc_feature: MA Experiment 20001557 PARAMETER Experiment Name: At_Drought_Soil_Dry_P Parameter: Post-Treatment Value: Re-Water vs. No Drought
  misc_feature: MA Experiment 20001557 PARAMETER Experiment Name: At_Drought_Soil_Dry_P Parameter: Timepoint (day) Value: 13
  misc_feature: MA Experiment 20001557 PARAMETER Experiment Name: At_Drought_Soil_Dry_P Parameter: Treatment Value: Drought vs. No Drought
  misc_feature: MA Experiment ID: 20001757 Result: Up-regulated in Transcription
  misc_feature: MA Experiment 20001757 PARAMETER Experiment Name: At_50mM_NH4NO3_L-to-H_P Parameter: Timepoint (hr) Value: 6
  misc_feature: MA Experiment 20001757 PARAMETER Experiment Name: At_50mM_NH4NO3_L-to-H_P Parameter: Tissue Value: Leaf
  misc_feature: MA Experiment 20001757 PARAMETER Experiment Name: At_50mM_NH4NO3_L-to-H_P Parameter: Treatment Value: 50mM NH4NO3 vs 100mM Mannitol
  misc_feature: MA Experiment ID: 20001904 Result: Down-regulated in Transcription
  misc_feature: MA Experiment 20001904 PARAMETER Experiment Name: At_Drought_Reproduction_P Parameter: Age (day) Value: 37
  misc_feature: MA Experiment 20001904 PARAMETER Experiment Name: At_Drought_Reproduction_P Parameter: Organism Value: A. thaliana
  misc_feature: MA Experiment 20001904 PARAMETER Experiment Name: At_Drought_Reproduction_P Parameter: Plant Line Value: WS
  misc_feature: MA Experiment 20001904 PARAMETER Experiment Name: At_Drought_Reproduction_P Parameter: Timepoint (day) Value: 7
  misc_feature: MA Experiment 20001904 PARAMETER Experiment Name: At_Drought_Reproduction_P Parameter: Tissue Value: Rosettes
  misc_feature: MA Experiment 20001904 PARAMETER Experiment Name: At_Drought_Reproduction_P Parameter: Treatment Value: Drought vs. No Drought
  misc_feature: MA Experiment ID: 20001906 Result: Down-regulated in Transcription
  misc_feature: MA Experiment 20001906 PARAMETER Experiment Name: At_Drought_Reproduction_P Parameter: Age (day) Value: 35
  misc_feature: MA Experiment 20001906 PARAMETER Experiment Name: At_Drought_Reproduction_P Parameter: Organism Value: A. thaliana
  misc_feature: MA Experiment 20001906 PARAMETER Experiment Name: At_Drought_Reproduction_P Parameter: Plant Line Value: WS
  misc_feature: MA Experiment 20001906 PARAMETER Experiment Name: At_Drought_Reproduction_P Parameter: Timepoint (day) Value: 5
  misc_feature: MA Experiment 20001906 PARAMETER Experiment Name: At_Drought_Reproduction_P Parameter: Tissue Value: Siliques
  misc_feature: MA Experiment 20001906 PARAMETER Experiment Name: At_Drought_Reproduction_P Parameter: Treatment Value: Drought vs. No Drought
  misc_feature: MA Experiment ID: 20001908 Result: Down-regulated in Transcription
  misc_feature: MA Experiment 20001908 PARAMETER Experiment Name: At_Drought_Reproduction_P Parameter: Age (day) Value: 40
  misc_feature: MA Experiment 20001908 PARAMETER Experiment Name: At_Drought_Reproduction_P Parameter: Organism Value: A. thaliana
  misc_feature: MA Experiment 20001908 PARAMETER Experiment Name: At_Drought_Reproduction_P Parameter: Plant Line Value: WS
  misc_feature: MA Experiment 20001908 PARAMETER Experiment Name: At_Drought_Reproduction_P Parameter: Timepoint (day) Value: 10
  misc_feature: MA Experiment 20001908 PARAMETER Experiment Name: At_Drought_Reproduction_P Parameter: Tissue Value: Siliques
  misc_feature: MA Experiment 20001908 PARAMETER Experiment Name: At_Drought_Reproduction_P Parameter: Treatment Value: Drought vs. No Drought

SEQ ID NO: 95140 - protein, 307 aa, Arabidopsis thaliana; identical to SEQ ID NO: 23063
  peptide (1)..(307): Ceres Seq. ID no. 12727438
  misc_feature (46)..(305): Pfam Name: Aldose 1-epimerase Pfam Description: Aldose 1-epimerase
  misc_feature (1)..(307): Homolog of NCBI NO: 15240009 NR Description: apospory-associated protein C-like; protein id:
  misc_feature (36)..(306): Homolog of NCBI NO: 6970044 NR Description: apospory-associated protein C; APOC
  misc_feature (36)..(279): Homolog of NCBI NO: 38344152 NR Description: OSJNBa0041A02.19 [Oryza sativa (japonica
  misc_feature (29)..(287): Homolog of NCBI NO: 15242099 NR Description: apospory-associated protein C; protein id:
  misc_feature (45)..(279): Homolog of NCBI NO: 2501555 NR Description: POSSIBLE APOSPORY-ASSOCIATED PROTEIN C
  misc_feature (38)..(279): Homolog of NCBI NO: 40253263 NR Description: putative Aldose 1-epimerase [Oryza sativa
  misc_feature (36)..(287): Homolog of NCBI NO: 19387263 NR Description: putative apospory-associated protein C [Oryza
  misc_feature (40)..(307): Homolog of NCBI NO: 16612258 NR Description: AT3g01590/F4P13_13 [Arabidopsis thaliana]
  misc_feature (40)..(307): Homolog of NCBI NO: 18395868 NR Description: expressed protein; protein id: At3g01590.1, by cDNA: 41354., supported by cDNA: gi_16612257, supported by gi_20258972 [Arabidopsis thaliana]
  misc_feature (40)..(306): Homolog of NCBI NO: 21593295 NR Description: possible apospory-associated like protein

SEQ ID NO: 95141 - protein, 279 aa, Arabidopsis thaliana; identical to SEQ ID NO: 23064
  peptide (1)..(279): Ceres Seq. ID no. 12727439
  misc_feature (18)..(277): Pfam Name: Aldose 1-epimerase Pfam Description: Aldose 1-epimerase
  misc_feature (1)..(279): Homolog of NCBI NO: 15240009 NR Description: apospory-associated protein C-like; protein id:
  misc_feature (8)..(278): Homolog of NCBI NO: 6970044 NR Description: apospory-associated protein C; APOC
  misc_feature (8)..(251): Homolog of NCBI NO: 38344152 NR Description: OSJNBa0041A02.19 [Oryza sativa (japonica
  misc_feature (1)..(259): Homolog of NCBI NO: 15242099 NR Description: apospory-associated protein C; protein id:
  misc_feature (17)..(251): Homolog of NCBI NO: 2501555 NR Description: POSSIBLE APOSPORY-ASSOCIATED PROTEIN C
  misc_feature (10)..(251): Homolog of NCBI NO: 40253263 NR Description: putative Aldose 1-epimerase [Oryza sativa
  misc_feature (8)..(259): Homolog of NCBI NO: 19387263 NR Description: putative apospory-associated protein C [Oryza
  misc_feature (12)..(279): Homolog of NCBI NO: 16612258 NR Description: AT3g01590/F4P13_13 [Arabidopsis thaliana]
  misc_feature (12)..(279): Homolog of NCBI NO: 18395868 NR Description: expressed protein; protein id: At3g01590.1, by cDNA: 41354., supported by cDNA: gi_16612257, supported by gi_20258972 [Arabidopsis thaliana]
  misc_feature (12)..(278): Homolog of NCBI NO: 21593295 NR Description: possible apospory-associated like protein

SEQ ID NO: 95142 - protein, 190 aa, Arabidopsis thaliana; identical to SEQ ID NO: 23065
  peptide (1)..(190): Ceres Seq. ID no. 12727440
  misc_feature (1)..(188): Pfam Name: Aldose 1-epimerase Pfam Description: Aldose 1-epimerase
  misc_feature (1)..(190): Homolog of NCBI NO: 15240009 NR Description: apospory-associated protein C-like; protein id:
  misc_feature (1)..(189): Homolog of NCBI NO: 6970044 NR Description: apospory-associated protein C; APOC
  misc_feature (1)..(162): Homolog of NCBI NO: 38344152 NR Description: OSJNBa0041A02.19 [Oryza sativa (japonica
  misc_feature (1)..(170): Homolog of NCBI NO: 15242099 NR Description: apospory-associated protein C; protein id:
  misc_feature (1)..(162): Homolog of NCBI NO: 2501555 NR Description: POSSIBLE APOSPORY-ASSOCIATED PROTEIN C
  misc_feature (1)..(162): Homolog of NCBI NO: 40253263 NR Description: putative Aldose 1-epimerase [Oryza sativa
  misc_feature (1)..(170): Homolog of NCBI NO: 19387263 NR Description: putative apospory-associated protein C [Oryza
  misc_feature (1)..(190): Homolog of NCBI NO: 16612258 NR Description: AT3g01590/F4P13_13 [Arabidopsis thaliana]
  misc_feature (1)..(190): Homolog of NCBI NO: 18395868 NR Description: expressed protein; protein id: At3g01590.1, by cDNA: 41354., supported by cDNA: gi_16612257, supported by gi_20258972 [Arabidopsis thaliana]
  misc_feature (1)..(189): Homolog of NCBI NO: 21593295 NR Description: possible apospory-associated like protein

SEQ ID NO: 95143 - DNA, 1917 bp, Arabidopsis thaliana; identical to SEQ ID NO: 91387
  misc_feature (1)..(1917): Ceres Seq. ID no. 12727441
  misc_feature: MA Experiment ID: 20000169 Result: Down-regulated in Transcription
  misc_feature: MA Experiment 20000169 PARAMETER Experiment Name: At_100uM_ABA_P Parameter: Age (day) Value: 14
  misc_feature: MA Experiment 20000169 PARAMETER Experiment Name: At_100uM_ABA_P Parameter: Organism Value: A. thaliana
  misc_feature: MA Experiment 20000169 PARAMETER Experiment Name: At_100uM_ABA_P Parameter: Plant Line Value: WS
  misc_feature: MA Experiment 20000169 PARAMETER Experiment Name: At_100uM_ABA_P Parameter: Timepoint (hr) Value: 6
  misc_feature: MA Experiment 20000169 PARAMETER Experiment Name: At_100uM_ABA_P Parameter: Tissue Value: Aerial
  misc_feature: MA Experiment 20000169 PARAMETER Experiment Name: At_100uM_ABA_P Parameter: Treatment Value: 100uM ABA vs. No Treatment
  misc_feature: MA Experiment ID: 20000180 Result: Down-regulated in Transcription
  misc_feature: MA Experiment 20000180 PARAMETER Experiment Name: At_Germinating_Seeds_P Parameter: Age (hr) Value: 24 vs. 0
  misc_feature: MA Experiment 20000180 PARAMETER Experiment Name: At_Germinating_Seeds_P Parameter: Tissue Value: Germinating Seeds
  misc_feature: MA Experiment ID: 20000227 Result: Up-regulated in Transcription
  misc_feature: MA Experiment 20000227 PARAMETER Experiment Name: At_Root-Tips-vs-Tops_P Parameter: Tissue Value: Root Tips vs. Root Tops
  misc_feature: MA Experiment ID: 20000234 Result: Up-regulated in Transcription
  misc_feature: MA Experiment 20000234 PARAMETER Experiment Name: At_Siliques_P Parameter: Age (day) Value: 21
  misc_feature: MA Experiment 20000234 PARAMETER Experiment Name: At_Siliques_P Parameter: Organism Value: A. thaliana
  misc_feature: MA Experiment 20000234 PARAMETER Experiment Name: At_Siliques_P Parameter: Plant Line Value: WS
  misc_feature: MA Experiment 20000234 PARAMETER Experiment Name: At_Siliques_P Parameter: Tissue Value: Less Than 5mm Siliques vs. Whole Plant
  misc_feature: MA Experiment ID: 20000264 Result: Up-regulated in Transcription
  misc_feature: MA Experiment 20000264 PARAMETER Experiment Name: At_Open_Flower_P Parameter: Age (day) Value: 21
  misc_feature: MA Experiment 20000264 PARAMETER Experiment Name: At_Open_Flower_P Parameter: Plant Line Value: WS
  misc_feature: MA Experiment 20000264 PARAMETER Experiment Name: At_Open_Flower_P Parameter: Tissue Value: Open Flower vs. Whole Plant
  misc_feature: MA Experiment ID: 20000286 Result: Up-regulated in Transcription
  misc_feature: MA Experiment 20000286 PARAMETER Experiment Name: At_Open_Flower_P Parameter: Age (day) Value: 21
  misc_feature: MA Experiment 20000286 PARAMETER Experiment Name: At_Open_Flower_P Parameter: Plant Line Value: WS
  misc_feature: MA Experiment 20000286 PARAMETER Experiment Name: At_Open_Flower_P Parameter: Tissue Value: Half Open vs. Whole Plant
  misc_feature: MA Experiment ID: 20001458 Result: Up-regulated in Transcription
  misc_feature: MA Experiment 20001458 PARAMETER Experiment Name: At_50mM_NH4NO3_L-to-H_P Parameter: Age (day) Value: Undefined
  misc_feature: MA Experiment 20001458 PARAMETER Experiment Name: At_50mM_NH4NO3_L-to-H_P Parameter: Organism Value: Undefined
  misc_feature: MA Experiment 20001458 PARAMETER Experiment Name: At_50mM_NH4NO3_L-to-H_P Parameter: Plant Line Value: Undefined
  misc_feature: MA Experiment 20001458 PARAMETER Experiment Name: At_50mM_NH4NO3_L-to-H_P Parameter: Timepoint (hr) Value: 2
  misc_feature: MA Experiment 20001458 PARAMETER Experiment Name: At_50mM_NH4NO3_L-to-H_P Parameter: Tissue Value: Siliques
  misc_feature: MA Experiment 20001458 PARAMETER Experiment Name: At_50mM_NH4NO3_L-to-H_P Parameter: Treatment Value: 50mM NH4NO3 vs. 100mM Manitol
  misc_feature: MA Experiment ID: 20001556 Result: Up-regulated in Transcription
  misc_feature: MA Experiment 20001556 PARAMETER Experiment Name: At_Drought_Soil_Dry_P Parameter: Age (day) Value: 26
  misc_feature: MA Experiment 20001556 PARAMETER Experiment Name: At_Drought_Soil_Dry_P Parameter: Organism Value: A. thaliana
  misc_feature: MA Experiment 20001556 PARAMETER Experiment Name: At_Drought_Soil_Dry_P Parameter: Plant Line Value: WS
  misc_feature: MA Experiment 20001556 PARAMETER Experiment Name: At_Drought_Soil_Dry_P Parameter: Post Timepoint (hr) Value: None
  misc_feature: MA Experiment 20001556 PARAMETER Experiment Name: At_Drought_Soil_Dry_P Parameter: Post-Treatment Value: None
  misc_feature: MA Experiment 20001556 PARAMETER Experiment Name: At_Drought_Soil_Dry_P Parameter: Timepoint (day) Value: 12
  misc_feature: MA Experiment 20001556 PARAMETER Experiment Name: At_Drought_Soil_Dry_P Parameter: Treatment Value: Drought vs. No Drought
  misc_feature: MA Experiment ID: 20001557 Result: Up-regulated in Transcription
  misc_feature: MA Experiment 20001557 PARAMETER Experiment Name: At_Drought_Soil_Dry_P Parameter: Age (day) Value: 27
  misc_feature: MA Experiment 20001557 PARAMETER Experiment Name: At_Drought_Soil_Dry_P Parameter: Organism Value: A. thaliana
  misc_feature: MA Experiment 20001557 PARAMETER Experiment Name: At_Drought_Soil_Dry_P Parameter: Plant Line Value: WS
  misc_feature: MA Experiment 20001557 PARAMETER Experiment Name: At_Drought_Soil_Dry_P Parameter: Post Timepoint (hr) Value: 3
  misc_feature: MA Experiment 20001557 PARAMETER Experiment Name: At_Drought_Soil_Dry_P Parameter: Post-Treatment Value: Re-Water vs. No Drought
  misc_feature: MA Experiment 20001557 PARAMETER Experiment Name: At_Drought_Soil_Dry_P Parameter: Timepoint (day) Value: 13
  misc_feature: MA Experiment 20001557 PARAMETER Experiment Name: At_Drought_Soil_Dry_P Parameter: Treatment Value: Drought vs. No Drought
  misc_feature: MA Experiment ID: 20001558 Result: Up-regulated in Transcription
  misc_feature: MA Experiment 20001558 PARAMETER Experiment Name: At_Drought_Soil_Dry_P Parameter: Age (day) Value: 27
  misc_feature: MA Experiment 20001558 PARAMETER Experiment Name: At_Drought_Soil_Dry_P Parameter: Organism Value: A. thaliana
  misc_feature: MA Experiment 20001558 PARAMETER Experiment Name: At_Drought_Soil_Dry_P Parameter: Plant Line Value: WS
  misc_feature: MA Experiment 20001558 PARAMETER Experiment Name: At_Drought_Soil_Dry_P Parameter: Post Timepoint (hr) Value: 6
  misc_feature: MA Experiment 20001558 PARAMETER Experiment Name: At_Drought_Soil_Dry_P Parameter: Post-Treatment Value: Re-Water vs. No Drought
  misc_feature: MA Experiment 20001558 PARAMETER Experiment Name: At_Drought_Soil_Dry_P Parameter: Timepoint (day) Value: 13
  misc_feature: MA Experiment 20001558 PARAMETER Experiment Name: At_Drought_Soil_Dry_P Parameter: Treatment Value: Drought vs. No Drought
  misc_feature: MA Experiment ID: 20001560 Result: Up-regulated in Transcription
  misc_feature: MA Experiment 20001560 PARAMETER Experiment Name: At_Drought_Soil_Dry_P Parameter: Age (day) Value: 28
  misc_feature: MA Experiment 20001560 PARAMETER Experiment Name: At_Drought_Soil_Dry_P Parameter: Organism Value: A. thaliana
  misc_feature: MA Experiment 20001560 PARAMETER Experiment Name: At_Drought_Soil_Dry_P Parameter: Plant Line Value: WS
  misc_feature: MA Experiment 20001560 PARAMETER Experiment Name: At_Drought_Soil_Dry_P Parameter: Post Timepoint (hr) Value: None
  misc_feature: MA Experiment 20001560 PARAMETER Experiment Name: At_Drought_Soil_Dry_P Parameter: Post-Treatment Value: None
  misc_feature: MA Experiment 20001560 PARAMETER Experiment Name: At_Drought_Soil_Dry_P Parameter: Timepoint (day) Value: 14
  misc_feature: MA Experiment 20001560 PARAMETER Experiment Name: At_Drought_Soil_Dry_P Parameter: Treatment Value: Drought vs. No Drought
  misc_feature: MA Experiment ID: 20001757 Result: Up-regulated in Transcription
  misc_feature: MA Experiment 20001757 PARAMETER Experiment Name: At_50mM_NH4NO3_L-to-H_P Parameter: Timepoint (hr) Value: 6
  misc_feature: MA Experiment 20001757 PARAMETER Experiment Name: At_50mM_NH4NO3_L-to-H_P Parameter: Tissue Value: Leaf
  misc_feature: MA Experiment 20001757 PARAMETER Experiment Name: At_50mM_NH4NO3_L-to-H_P Parameter: Treatment Value: 50mM NH4NO3 vs 100mM Mannitol

SEQ ID NO: 95144 - protein, 524 aa, Arabidopsis thaliana; identical to SEQ ID NO: 91388
  peptide (1)..(524): Ceres Seq. ID no. 12727442
  misc_feature (11)..(523): Pfam Name: Mpp10 protein Pfam Description: Mpp10 protein
  misc_feature (1)..(524): Homolog of NCBI NO: 18425086 NR Description: expressed protein; protein id: At5g66540.1, by cDNA: gi_14488062 [Arabidopsis thaliana] gene_id:K1F13.21~unknown protein [Arabidopsis thaliana]
  misc_feature (124)..(524): Homolog of NCBI NO: 29351667 NR Description: similar to U3 small nucleolar ribonucleoprotein
  misc_feature (124)..(521): Homolog of NCBI NO: 2230873 NR Description: M phase phosphoprotein 10 [Homo sapiens]
  misc_feature (29)..(522): Homolog of NCBI NO: 28175284 NR Description: Unknown (protein for IMAGE:5543289) [Xenopus
  misc_feature (124)..(524): Homolog of NCBI NO: 34856326 NR Description: similar to U3 small nucleolar ribonucleoprotein
  misc_feature (110)..(510): Homolog of NCBI NO: 6322461 NR Description: part of small (ribosomal) subunit (SSU) (contains U3 snoRNA); Mpp10p [Saccharomyces cerevisiae] U3 small nucleolar ribonucleoprotein protein MPP10
  misc_feature (124)..(511): Homolog of NCBI NO: 19920954 NR Description: CG13097-PA [Drosophila melanogaster]
  misc_feature (261)..(523): Homolog of NCBI NO: 40740848 NR Description: hypothetical protein AN4298.2 [Aspergillus
  misc_feature (55)..(277): Homolog of NCBI NO: 40740848 NR Description: hypothetical protein AN4298.2 [Aspergillus
  misc_feature (109)..(490): Homolog of NCBI NO: 19114546 NR Description: putative component of the U3 small nucleolar [Schizosaccharomyces pombe] >gi|3183346|sp|O13910|YDW3_SCHPO protein C23C11.03 in chromosome I >gi|7493124|pir||T38241

SEQ ID NO: 95145 - protein, 483 aa, Arabidopsis thaliana; identical to SEQ ID NO: 91389
  peptide (1)..(483): Ceres Seq. ID no. 12727443
  misc_feature (1)..(482): Pfam Name: Mpp10 protein Pfam Description: Mpp10 protein
  misc_feature (1)..(483): Homolog of NCBI NO: 18425086 NR Description: expressed protein; protein id: At5g66540.1, by cDNA: gi_14488062 [Arabidopsis thaliana] gene_id:K1F13.21~unknown protein [Arabidopsis thaliana]
  misc_feature (83)..(483): Homolog of NCBI NO: 29351667 NR Description: similar to U3 small nucleolar ribonucleoprotein
  misc_feature (83)..(480): Homolog of NCBI NO: 2230873 NR Description: M phase phosphoprotein 10 [Homo sapiens]
  misc_feature (1)..(481): Homolog of NCBI NO: 28175284 NR Description: Unknown (protein for IMAGE:5543289) [Xenopus
  misc_feature (83)..(483): Homolog of NCBI NO: 34856326 NR Description: similar to U3 small nucleolar ribonucleoprotein
  misc_feature (69)..(469): Homolog of NCBI NO: 6322461 NR Description: part of small (ribosomal) subunit (SSU) (contains U3 snoRNA); Mpp10p [Saccharomyces cerevisiae] U3 small nucleolar ribonucleoprotein protein MPP10
  misc_feature (83)..(470): Homolog of NCBI NO: 19920954 NR Description: CG13097-PA [Drosophila melanogaster]
  misc_feature (220)..(482): Homolog of NCBI NO: 40740848 NR Description: hypothetical protein AN4298.2 [Aspergillus
  misc_feature (14)..(236): Homolog of NCBI NO: 40740848 NR Description: hypothetical protein AN4298.2 [Aspergillus
  misc_feature (68)..(449): Homolog of NCBI NO: 19114546 NR Description: putative component of the U3 small nucleolar [Schizosaccharomyces pombe] >gi|3183346|sp|O13910|YDW3_SCHPO protein C23C11.03 in chromosome I >gi|7493124|pir||T38241

SEQ ID NO: 95146 - protein, 453 aa, Arabidopsis thaliana; identical to SEQ ID NO: 91390
  peptide (1)..(453): Ceres Seq. ID no. 12727444
  misc_feature (1)..(452): Pfam Name: Mpp10 protein Pfam Description: Mpp10 protein
  misc_feature (1)..(453): Homolog of NCBI NO: 18425086 NR Description: expressed protein; protein id: At5g66540.1, by cDNA: gi_14488062 [Arabidopsis thaliana] gene_id:K1F13.21~unknown protein [Arabidopsis thaliana]
  misc_feature (53)..(453): Homolog of NCBI NO: 29351667 NR Description: similar to U3 small nucleolar ribonucleoprotein
  misc_feature (53)..(450): Homolog of NCBI NO: 2230873 NR Description: M phase phosphoprotein 10 [Homo sapiens]
  misc_feature (1)..(451): Homolog of NCBI NO: 28175284 NR Description: Unknown (protein for IMAGE:5543289) [Xenopus
  misc_feature (53)..(453): Homolog of NCBI NO: 34856326 NR Description: similar to U3 small nucleolar ribonucleoprotein
  misc_feature (39)..(439): Homolog of NCBI NO: 6322461 NR Description: part of small (ribosomal) subunit (SSU) (contains U3 snoRNA); Mpp10p [Saccharomyces cerevisiae] U3 small nucleolar ribonucleoprotein protein MPP10
  misc_feature (53)..(440): Homolog of NCBI NO: 19920954 NR Description: CG13097-PA [Drosophila melanogaster]
  misc_feature (190)..(452): Homolog of NCBI NO: 40740848 NR Description: hypothetical protein AN4298.2 [Aspergillus
  misc_feature (1)..(206): Homolog of NCBI NO: 40740848 NR Description: hypothetical protein AN4298.2 [Aspergillus
  misc_feature (38)..(419): Homolog of NCBI NO: 19114546 NR Description: putative component of the U3 small nucleolar [Schizosaccharomyces pombe] >gi|3183346|sp|O13910|YDW3_SCHPO protein C23C11.03 in chromosome I >gi|7493124|pir||T38241

SEQ ID NO: 95147 - DNA, 1845 bp, Arabidopsis thaliana; identical to SEQ ID NO: 91391
  misc_feature (1)..(1845): Ceres Seq. ID no. 12727449
  misc_feature: MA Experiment ID: 20000185 Result: Up-regulated in Transcription
  misc_feature: MA Experiment 20000185 PARAMETER Experiment Name: At_Roots__P Parameter: Age (day) Value: 7 vs. 21
  misc_feature: MA Experiment 20000185 PARAMETER Experiment Name: At_Roots__P Parameter: Organism Value: A. thaliana
  misc_feature: MA Experiment 20000185 PARAMETER Experiment Name: At_Roots__P Parameter: Tissue Value: Roots vs. Whole Plant
  misc_feature: MA Experiment ID: 20000227 Result: Up-regulated in Transcription
  misc_feature: MA Experiment 20000227 PARAMETER Experiment Name: At_Root-Tips-vs-Tops_P Parameter: Tissue Value: Root Tips vs. Root Tops
  misc_feature: MA Experiment ID: 20000234 Result: Up-regulated in Transcription
  misc_feature: MA Experiment 20000234 PARAMETER Experiment Name: At_Siliques_P Parameter: Age (day) Value: 21
  misc_feature: MA Experiment 20000234 PARAMETER Experiment Name: At_Siliques_P Parameter: Organism Value: A. thaliana
  misc_feature: MA Experiment 20000234 PARAMETER Experiment Name: At_Siliques_P Parameter: Plant Line Value: WS
  misc_feature: MA Experiment 20000234 PARAMETER Experiment Name: At_Siliques_P Parameter: Tissue Value: Less Than 5mm Siliques vs. Whole Plant
  misc_feature: MA Experiment ID: 20000235 Result: Up-regulated in Transcription
  misc_feature: MA Experiment 20000235 PARAMETER Experiment Name: At_Siliques_P Parameter: Age (day) Value: 21
  misc_feature: MA Experiment 20000235 PARAMETER Experiment Name: At_Siliques_P Parameter: Organism Value: A. thaliana
  misc_feature: MA Experiment 20000235 PARAMETER Experiment Name: At_Siliques_P Parameter: Plant Line Value: WS
  misc_feature: MA Experiment 20000235 PARAMETER Experiment Name: At_Siliques_P Parameter: Tissue Value: 5-10mm Siliques vs. Whole Plant
  misc_feature: MA Experiment ID: 20000264 Result: Up-regulated in Transcription
  misc_feature: MA Experiment 20000264 PARAMETER Experiment Name: At_Open_Flower_P Parameter: Age (day) Value: 21
  misc_feature: MA Experiment 20000264 PARAMETER Experiment Name: At_Open_Flower_P Parameter: Plant Line Value: WS
  misc_feature: MA Experiment 20000264 PARAMETER Experiment Name: At_Open_Flower_P Parameter: Tissue Value: Open Flower vs. Whole Plant
  misc_feature: MA Experiment ID: 20000265 Result: Up-regulated in Transcription
  misc_feature: MA Experiment 20000265 PARAMETER Experiment Name: At_Open_Flower_P Parameter: Age (day) Value: 21
  misc_feature: MA Experiment 20000265 PARAMETER Experiment Name: At_Open_Flower_P Parameter: Plant Line Value: WS
  misc_feature: MA Experiment 20000265 PARAMETER Experiment Name: At_Open_Flower_P Parameter: Tissue Value: Closed Flower vs. Whole Plant
  misc_feature: MA Experiment ID: 20000286 Result: Up-regulated in Transcription
  misc_feature: MA Experiment 20000286 PARAMETER Experiment Name: At_Open_Flower_P Parameter: Age (day) Value: 21
  misc_feature: MA Experiment 20000286 PARAMETER Experiment Name: At_Open_Flower_P Parameter: Plant Line Value: WS
  misc_feature: MA Experiment 20000286 PARAMETER Experiment Name: At_Open_Flower_P Parameter: Tissue Value: Half Open vs. Whole Plant
  misc_feature: MA Experiment ID: 20000439 Result: Up-regulated in Transcription
  misc_feature: MA Experiment 20000439 PARAMETER Experiment Name: At_Roots__P Parameter: Age (day) Value: 14 vs. 21
  misc_feature: MA Experiment 20000439 PARAMETER Experiment Name: At_Roots__P Parameter: Organism Value: A. thaliana
  misc_feature: MA Experiment 20000439 PARAMETER Experiment Name: At_Roots__P Parameter: Tissue Value: Roots vs. Whole Plant
  misc_feature: MA Experiment ID: 20001556 Result: Up-regulated in Transcription
  misc_feature: MA Experiment 20001556 PARAMETER Experiment Name: At_Drought_Soil_Dry_P Parameter: Age (day) Value: 26
  misc_feature: MA Experiment 20001556 PARAMETER Experiment Name: At_Drought_Soil_Dry_P Parameter: Organism Value: A. thaliana
  misc_feature: MA Experiment 20001556 PARAMETER Experiment Name: At_Drought_Soil_Dry_P Parameter: Plant Line Value: WS
  misc_feature: MA Experiment 20001556 PARAMETER Experiment Name: At_Drought_Soil_Dry_P Parameter: Post Timepoint (hr) Value: None
  misc_feature: MA Experiment 20001556 PARAMETER Experiment Name: At_Drought_Soil_Dry_P Parameter: Post-Treatment Value: None
  misc_feature: MA Experiment 20001556 PARAMETER Experiment Name: At_Drought_Soil_Dry_P Parameter: Timepoint (day) Value: 12
  misc_feature: MA Experiment 20001556 PARAMETER Experiment Name: At_Drought_Soil_Dry_P Parameter: Treatment Value: Drought vs. No Drought

SEQ ID NO: 95148 - protein, 614 aa, Arabidopsis thaliana; identical to SEQ ID NO: 91392
  peptide (1)..(614): Ceres Seq. ID no. 12727450
  misc_feature (389)..(534): Pfam Name: Protein of unknown function, DUF547 Pfam Description: Protein of unknown function, DUF547
  misc_feature (213)..(614): Homolog of NCBI NO: 15224054 NR Description: unknown protein; protein id: At2g23700.1 thaliana] >gi|20197175|gb|AAC17092.2| unknown protein thaliana] >gi|26451207|dbj|BAC42707.1| unknown protein
  misc_feature (19)..(186): Homolog of NCBI NO: 15224054 NR Description: unknown protein; protein id: At2g23700.1 thaliana] >gi|20197175|gb|AAC17092.2| unknown protein thaliana] >gi|26451207|dbj|BAC42707.1| unknown protein
  misc_feature (213)..(614): Homolog of NCBI NO: 39104579 NR Description: unknown protein [Arabidopsis thaliana]
  misc_feature (19)..(186): Homolog of NCBI NO: 39104579 NR Description: unknown protein [Arabidopsis thaliana]
  misc_feature (213)..(614): Homolog of NCBI NO: 7486263 NR Description: hypothetical protein At2g23700 [imported] -
  misc_feature (19)..(186): Homolog of NCBI NO: 7486263 NR Description: hypothetical protein At2g23700 [imported] -
  misc_feature (227)..(613): Homolog of NCBI NO: 40539066 NR Description: hypothetical protein [Oryza sativa (japonica
  misc_feature (19)..(171): Homolog of NCBI NO: 40539066 NR Description: hypothetical protein [Oryza sativa (japonica
  misc_feature (60)..(614): Homolog of NCBI NO: 28916180 NR Description: putative ternary complex factor MIP1 [Antirrhinum
  misc_feature (57)..(439): Homolog of NCBI NO: 20330763 NR Description: Hypothetical protein [Oryza sativa (japonica

SEQ ID NO: 95149 - protein, 603 aa, Arabidopsis thaliana; identical to SEQ ID NO: 91393
  peptide (1)..(603): Ceres Seq. ID no. 12727451
  misc_feature (378)..(523): Pfam Name: Protein of unknown function, DUF547 Pfam Description: Protein of unknown function, DUF547
  misc_feature (202)..(603): Homolog of NCBI NO: 15224054 NR Description: unknown protein; protein id: At2g23700.1 thaliana] >gi|20197175|gb|AAC17092.2| unknown protein thaliana] >gi|26451207|dbj|BAC42707.1| unknown protein
  misc_feature (8)..(175): Homolog of NCBI NO: 15224054 NR Description: unknown protein; protein id: At2g23700.1 thaliana] >gi|20197175|gb|AAC17092.2| unknown protein thaliana] >gi|26451207|dbj|BAC42707.1| unknown protein
  misc_feature (202)..(603): Homolog of NCBI NO: 39104579 NR Description: unknown protein [Arabidopsis thaliana]
  misc_feature (8)..(175): Homolog of NCBI NO: 39104579 NR Description: unknown protein [Arabidopsis thaliana]
  misc_feature (202)..(603): Homolog of NCBI NO: 7486263 NR Description: hypothetical protein At2g23700 [imported] -
  misc_feature (8)..(175): Homolog of NCBI NO: 7486263 NR Description: hypothetical protein At2g23700 [imported] -
  misc_feature (216)..(602): Homolog of NCBI NO: 40539066 NR Description: hypothetical protein [Oryza sativa (japonica
  misc_feature (8)..(160): Homolog of NCBI NO: 40539066 NR Description: hypothetical protein [Oryza sativa (japonica
  misc_feature (49)..(603): Homolog of NCBI NO: 28916180 NR Description: putative ternary complex factor MIP1 [Antirrhinum
  misc_feature (46)..(428): Homolog of NCBI NO: 20330763 NR Description: Hypothetical protein [Oryza sativa (japonica

SEQ ID NO: 95150 - protein, 564 aa, Arabidopsis thaliana; identical to SEQ ID NO: 91394
  peptide (1)..(564): Ceres Seq. ID no. 12727452
  misc_feature (339)..(484): Pfam Name: Protein of unknown function, DUF547 Pfam Description: Protein of unknown function, DUF547
  misc_feature (163)..(564): Homolog of NCBI NO: 15224054 NR Description: unknown protein; protein id: At2g23700.1 thaliana] >gi|20197175|gb|AAC17092.2| unknown protein thaliana] >gi|26451207|dbj|BAC42707.1| unknown protein
  misc_feature (1)..(136): Homolog of NCBI NO: 15224054 NR Description: unknown protein; protein id: At2g23700.1 thaliana] >gi|20197175|gb|AAC17092.2| unknown protein thaliana] >gi|26451207|dbj|BAC42707.1| unknown protein
  misc_feature (163)..(564): Homolog of NCBI NO: 39104579 NR Description: unknown protein [Arabidopsis thaliana]
  misc_feature (1)..(136): Homolog of NCBI NO: 39104579 NR Description: unknown protein [Arabidopsis thaliana]
  misc_feature (163)..(564): Homolog of NCBI NO: 7486263 NR Description: hypothetical protein At2g23700 [imported] -
  misc_feature (1)..(136): Homolog of NCBI NO: 7486263 NR Description: hypothetical protein At2g23700 [imported] -
  misc_feature (177)..(563): Homolog of NCBI NO: 40539066 NR Description: hypothetical protein [Oryza sativa (japonica
  misc_feature (1)..(121): Homolog of NCBI NO: 40539066 NR Description: hypothetical protein [Oryza sativa (japonica
  misc_feature (10)..(564): Homolog of NCBI NO: 28916180 NR Description: putative ternary complex factor MIP1 [Antirrhinum
  misc_feature (7)..(389): Homolog of NCBI NO: 20330763 NR Description: Hypothetical protein [Oryza sativa (japonica

SEQ ID NO: 95151 - DNA, 1356 bp, Arabidopsis thaliana; identical to SEQ ID NO: 91395
  misc_feature (1)..(1356): Ceres Seq. ID no. 12727453
  misc_feature: MA Experiment ID: 20000328 Result: Down-regulated in Transcription
  misc_feature: MA Experiment 20000328 PARAMETER Experiment Name: At_42deg_Heat_Sub_P Parameter: Age (day) Value: 14
  misc_feature: MA Experiment 20000328 PARAMETER Experiment Name: At_42deg_Heat_Sub_P Parameter: Organism Value: A. thaliana
  misc_feature: MA Experiment 20000328 PARAMETER Experiment Name: At_42deg_Heat_Sub_P Parameter: Plant Line Value: WS
  misc_feature: MA Experiment 20000328 PARAMETER Experiment Name: At_42deg_Heat_Sub_P Parameter: Temperature (deg C) Value: 42 vs. 22
  misc_feature: MA Experiment 20000328 PARAMETER Experiment Name: At_42deg_Heat_Sub_P Parameter: Timepoint (hr) Value: 6
  misc_feature: MA Experiment 20000328 PARAMETER Experiment Name: At_42deg_Heat_Sub_P Parameter: Tissue Value: Aerial
  misc_feature: MA Experiment ID: 20000329 Result: Up-regulated in Transcription
  misc_feature: MA Experiment 20000329 PARAMETER Experiment Name: At_4deg_Cold_Sub_P Parameter: Age (day) Value: 14
  misc_feature: MA Experiment 20000329 PARAMETER Experiment Name: At_4deg_Cold_Sub_P Parameter: Organism Value: A. thaliana
  misc_feature: MA Experiment 20000329 PARAMETER Experiment Name: At_4deg_Cold_Sub_P Parameter: Plant Line Value: WS
  misc_feature: MA Experiment 20000329 PARAMETER Experiment Name: At_4deg_Cold_Sub_P Parameter: Temperature (deg C) Value: 4 vs. 22
  misc_feature: MA Experiment 20000329 PARAMETER Experiment Name: At_4deg_Cold_Sub_P Parameter: Timepoint (hr) Value: 6
  misc_feature: MA Experiment 20000329 PARAMETER Experiment Name: At_4deg_Cold_Sub_P Parameter: Tissue Value: Aerial
  misc_feature: MA Experiment ID: 20000347 Result: Up-regulated in Transcription
  misc_feature: MA Experiment 20000347 PARAMETER Experiment Name: At_2mM_SA_Sub_P Parameter: Age (day) Value: 14
  misc_feature: MA Experiment 20000347 PARAMETER Experiment Name: At_2mM_SA_Sub_P Parameter: Organism Value: A. thaliana
  misc_feature: MA Experiment 20000347 PARAMETER Experiment Name: At_2mM_SA_Sub_P Parameter: Plant Line Value: WS
  misc_feature: MA Experiment 20000347 PARAMETER Experiment Name: At_2mM_SA_Sub_P Parameter: Timepoint (hr) Value: 6
  misc_feature: MA Experiment 20000347 PARAMETER Experiment Name: At_2mM_SA_Sub_P Parameter: Tissue Value: Aerial
  misc_feature: MA Experiment 20000347 PARAMETER Experiment Name: At_2mM_SA_Sub_P Parameter: Treatment Value: 2mM SA vs. No Treatment
  misc_feature: MA Experiment ID: 20000348 Result: Down-regulated in Transcription
  misc_feature: MA Experiment 20000348 PARAMETER Experiment Name: At_100uM_ABA_Sub_P Parameter: Age (day) Value: 14
  misc_feature: MA Experiment 20000348 PARAMETER Experiment Name: At_100uM_ABA_Sub_P Parameter: Organism Value: A. thaliana
  misc_feature: MA Experiment 20000348 PARAMETER Experiment Name: At_100uM_ABA_Sub_P Parameter: Plant Line Value: WS
  misc_feature: MA Experiment 20000348 PARAMETER Experiment Name: At_100uM_ABA_Sub_P Parameter: Timepoint (hr) Value: 1
  misc_feature: MA Experiment 20000348 PARAMETER Experiment Name: At_100uM_ABA_Sub_P Parameter: Tissue Value: Aerial
  misc_feature: MA Experiment 20000348 PARAMETER Experiment Name: At_100uM_ABA_Sub_P Parameter: Treatment Value: 100uM ABA vs. No Treatment
  misc_feature: MA Experiment ID: 20000440 Result: Down-regulated in Transcription
  misc_feature: MA Experiment 20000440 PARAMETER Experiment Name: At_Closed-Flower__Sub_P Parameter: Tissue Value: Closed Flower vs. Whole Plant

SEQ ID NO: 95152 - protein, 451 aa, Arabidopsis thaliana; identical to SEQ ID NO: 91396
  peptide (1)..(451): Ceres Seq. ID no. 12727454
  misc_feature (1)..(451): Homolog of NCBI NO: 8843722 NR Description: emb|CAB16816.1~gene_id:MSN2.2~similar to unknown
  misc_feature (1)..(451): Homolog of NCBI NO: 30698242 NR Description: expressed protein [Arabidopsis thaliana]
  misc_feature (3)..(447): Homolog of NCBI NO: 22326876 NR Description: disease resistance protein (TIR-NBS-LRR class), protein id: At5g17890.1, supported by cDNA: gi_19310532
  misc_feature (6)..(440): Homolog of NCBI NO: 15240018 NR Description: putative protein; protein id: At5g66620.1 thaliana] >gi|10177543|dbj|BAB10938.1|
  misc_feature (109)..(447): Homolog of NCBI NO: 10177891 NR Description: emb|CAB16816.1|~gene_id:MPI7.6~similar to unknown
  misc_feature (67)..(440): Homolog of NCBI NO: 27808630 NR Description: At5g66630 [Arabidopsis thaliana]
  misc_feature (67)..(440): Homolog of NCBI NO: 30698240 NR Description: expressed protein [Arabidopsis thaliana]
  misc_feature (132)..(451): Homolog of NCBI NO: 15240017 NR Description: putative protein; protein id: At5g66610.1 thaliana] >gi|10177542|dbj|BAB10937.1|
  misc_feature (2)..(439): Homolog of NCBI NO: 17065046 NR Description: Unknown protein [Arabidopsis thaliana]
  misc_feature (94)..(439): Homolog of NCBI NO: 22329212 NR Description: putative protein; protein id: At4g36860.1,

SEQ ID NO: 95153 - protein, 343 aa, Arabidopsis thaliana; identical to SEQ ID NO: 91397
  peptide (1)..(343): Ceres Seq. ID no. 12727455
  misc_feature (1)..(343): Homolog of NCBI NO: 8843722 NR Description: emb|CAB16816.1~gene_id:MSN2.2~similar to unknown
  misc_feature (1)..(343): Homolog of NCBI NO: 30698242 NR Description: expressed protein [Arabidopsis thaliana]
  misc_feature (1)..(339): Homolog of NCBI NO: 22326876 NR Description: disease resistance protein (TIR-NBS-LRR class), protein id: At5g17890.1, supported by cDNA: gi_19310532
  misc_feature (1)..(332): Homolog of NCBI NO: 15240018 NR Description: putative protein; protein id: At5g66620.1 thaliana] >gi|10177543|dbj|BAB10938.1|
  misc_feature (1)..(339): Homolog of NCBI NO: 10177891 NR Description: emb|CAB16816.1|~gene_id:MPI7.6~similar to unknown
  misc_feature (1)..(332): Homolog of NCBI NO: 27808630 NR Description: At5g66630 [Arabidopsis thaliana]
  misc_feature (1)..(332): Homolog of NCBI NO: 30698240 NR Description: expressed protein [Arabidopsis thaliana]
  misc_feature (24)..(343): Homolog of NCBI NO: 15240017 NR Description: putative protein; protein id: At5g66610.1 thaliana] >gi|10177542|dbj|BAB10937.1|
  misc_feature (1)..(331): Homolog of NCBI NO: 17065046 NR Description: Unknown protein [Arabidopsis thaliana]
  misc_feature (1)..(331): Homolog of NCBI NO: 22329212 NR Description: putative protein; protein id: At4g36860.1,

SEQ ID NO: 95154 - protein, 266 aa, Arabidopsis thaliana; identical to SEQ ID NO: 91398
  peptide (1)..(266): Ceres Seq. ID no. 12727456
  misc_feature (1)..(266): Homolog of NCBI NO: 8843722 NR Description: emb|CAB16816.1~gene_id:MSN2.2~similar to unknown
  misc_feature (1)..(266): Homolog of NCBI NO: 30698242 NR Description: expressed protein [Arabidopsis thaliana]
  misc_feature (1)..(262): Homolog of NCBI NO: 22326876 NR Description: disease resistance protein (TIR-NBS-LRR class), protein id: At5g17890.1, supported by cDNA: gi_19310532
  misc_feature (1)..(255): Homolog of NCBI NO: 15240018 NR Description: putative protein; protein id: At5g66620.1 thaliana] >gi|10177543|dbj|BAB10938.1|
  misc_feature (1)..(262): Homolog of NCBI NO: 10177891 NR Description: emb|CAB16816.1|~gene_id:MPI7.6~similar to unknown
  misc_feature (1)..(255): Homolog of NCBI NO: 27808630 NR Description: At5g66630 [Arabidopsis thaliana]
  misc_feature (1)..(255): Homolog of NCBI NO: 30698240 NR Description: expressed protein [Arabidopsis thaliana]
  misc_feature (1)..(266): Homolog of NCBI NO: 15240017 NR Description: putative protein; protein id: At5g66610.1 thaliana] >gi|10177542|dbj|BAB10937.1|
  misc_feature (1)..(254): Homolog of NCBI NO: 17065046 NR Description: Unknown protein [Arabidopsis thaliana]
  misc_feature (1)..(254): Homolog of NCBI NO: 22329212 NR Description: putative protein; protein id: At4g36860.1,

SEQ ID NO: 95155 - DNA, 687 bp, Arabidopsis thaliana; identical to SEQ ID NO: 91399
  misc_feature (1)..(687): Ceres Seq. ID no. 12727465
  misc_feature: MA Experiment ID: 20000439 Result: Up-regulated in Transcription
  misc_feature: MA Experiment 20000439 PARAMETER Experiment Name: At_Roots__P Parameter: Age (day) Value: 14 vs. 21
  misc_feature: MA Experiment 20000439 PARAMETER Experiment Name: At_Roots__P Parameter: Organism Value: A. thaliana
  misc_feature: MA Experiment 20000439 PARAMETER Experiment Name: At_Roots__P Parameter: Tissue Value: Roots vs. Whole Plant
  misc_feature: MA Experiment ID: 20000709 Result: Down-regulated in Transcription
  misc_feature: MA Experiment 20000709 PARAMETER Experiment Name: At_15mM_NH4NO3_L-to-H_P Parameter: Age (hr) Value: 14
  misc_feature: MA Experiment 20000709 PARAMETER Experiment Name: At_15mM_NH4NO3_L-to-H_P Parameter: Organism Value: A. thaliana
  misc_feature: MA Experiment 20000709 PARAMETER Experiment Name: At_15mM_NH4NO3_L-to-H_P Parameter: Plant Line Value: WS
  misc_feature: MA Experiment 20000709 PARAMETER Experiment Name: At_15mM_NH4NO3_L-to-H_P Parameter: Timepoint (hr) Value: 4
  misc_feature: MA Experiment 20000709 PARAMETER Experiment Name: At_15mM_NH4NO3_L-to-H_P Parameter: Tissue Value: Aerial
  misc_feature: MA Experiment 20000709 PARAMETER Experiment Name: At_15mM_NH4NO3_L-to-H_P Parameter: Treatment Value: 15mM NH4NO3 vs. 30mM Mannitol
  misc_feature: MA Experiment ID: 20001554 Result: Up-regulated in Transcription
  misc_feature: MA Experiment 20001554 PARAMETER Experiment Name: At_Drought_Soil_Dry_P Parameter: Age (day) Value: 21
  misc_feature: MA Experiment 20001554 PARAMETER Experiment Name: At_Drought_Soil_Dry_P Parameter: Organism Value: A. thaliana
  misc_feature: MA Experiment 20001554 PARAMETER Experiment Name: At_Drought_Soil_Dry_P Parameter: Plant Line Value: WS
  misc_feature: MA Experiment 20001554 PARAMETER Experiment Name: At_Drought_Soil_Dry_P Parameter: Post Timepoint (hr) Value: None
  misc_feature: MA Experiment 20001554 PARAMETER Experiment Name: At_Drought_Soil_Dry_P Parameter: Post-Treatment Value: None
  misc_feature: MA Experiment 20001554 PARAMETER Experiment Name: At_Drought_Soil_Dry_P Parameter: Timepoint (day) Value: 7
  misc_feature: MA Experiment 20001554 PARAMETER Experiment Name: At_Drought_Soil_Dry_P Parameter: Treatment Value: Drought vs. No Drought
  misc_feature: MA Experiment ID: 20001557 Result: Down-regulated in Transcription
  misc_feature: MA Experiment 20001557 PARAMETER Experiment Name: At_Drought_Soil_Dry_P Parameter: Age (day) Value: 27
  misc_feature: MA Experiment 20001557 PARAMETER Experiment Name: At_Drought_Soil_Dry_P Parameter: Organism Value: A. thaliana
  misc_feature: MA Experiment 20001557 PARAMETER Experiment Name: At_Drought_Soil_Dry_P Parameter: Plant Line Value: WS
  misc_feature: MA Experiment 20001557 PARAMETER Experiment Name: At_Drought_Soil_Dry_P Parameter: Post Timepoint (hr) Value: 3
  misc_feature: MA Experiment 20001557 PARAMETER Experiment Name: At_Drought_Soil_Dry_P Parameter: Post-Treatment Value: Re-Water vs. No Drought
  misc_feature: MA Experiment 20001557 PARAMETER Experiment Name: At_Drought_Soil_Dry_P Parameter: Timepoint (day) Value: 13
  misc_feature: MA Experiment 20001557 PARAMETER Experiment Name: At_Drought_Soil_Dry_P Parameter: Treatment Value: Drought vs. No Drought
  misc_feature: MA Experiment ID: 20001558 Result: Down-regulated in Transcription
  misc_feature: MA Experiment 20001558 PARAMETER Experiment Name: At_Drought_Soil_Dry_P Parameter: Age (day) Value: 27
  misc_feature: MA Experiment 20001558 PARAMETER Experiment Name: At_Drought_Soil_Dry_P Parameter: Organism Value: A. thaliana
  misc_feature: MA Experiment 20001558 PARAMETER Experiment Name: At_Drought_Soil_Dry_P Parameter: Plant Line Value: WS
  misc_feature: MA Experiment 20001558 PARAMETER Experiment Name: At_Drought_Soil_Dry_P Parameter: Post Timepoint (hr) Value: 6
  misc_feature: MA Experiment 20001558 PARAMETER Experiment Name: At_Drought_Soil_Dry_P Parameter: Post-Treatment Value: Re-Water vs. No Drought
  misc_feature: MA Experiment 20001558 PARAMETER Experiment Name: At_Drought_Soil_Dry_P Parameter: Timepoint (day) Value: 13
  misc_feature: MA Experiment 20001558 PARAMETER Experiment Name: At_Drought_Soil_Dry_P Parameter: Treatment Value: Drought vs. No Drought

SEQ ID NO: 95156 - protein, 228 aa, Arabidopsis thaliana; identical to SEQ ID NO: 91400
  peptide (1)..(228): Ceres Seq. ID no. 12727466
  misc_feature (72)..(125): Pfam Name: Homeobox domain Pfam Description: Homeobox domain
  misc_feature (1)..(228): Homolog of NCBI NO: 15240052 NR Description: homeodomain transcription factor-like; protein At5g66700.1 [Arabidopsis thaliana] >gi|8843728|dbj|BAA97276.1|
  misc_feature (7)..(228): Homolog of NCBI NO: 15234508 NR Description: homeodomain protein; protein id: At4g36740.1
  misc_feature (1)..(226): Homolog of NCBI NO: 15224190 NR Description: homeodomain protein; protein id: At2g18550.1 thaliana] >gi|25411880|pir||F84565 probable homeodomain
  misc_feature (42)..(170): Homolog of NCBI NO: 33146844 NR Description: homeodomain protein-like [Oryza sativa (japonica
  misc_feature (115)..(222): Homolog of NCBI NO: 11231049 NR Description: homeobox-leucine zipper protein [Zinnia elegans]
  misc_feature (59)..(194): Homolog of NCBI NO: 7446256 NR Description: homeotic protein VAHOX1 - tomato
  misc_feature (39)..(194): Homolog of NCBI NO: 18034441 NR Description: homeodomain leucine zipper protein CPHB-5
  misc_feature (42)..(196): Homolog of NCBI NO: 3868841 NR Description: CRHB7 [Ceratopteris richardii]
  misc_feature (37)..(227): Homolog of NCBI NO: 15232122 NR Description: homeobox-leucine zipper protein HAT5 (HD-ZIP
  misc_feature (68)..(183): Homolog of NCBI NO: 3868839 NR Description: CRHB6 [Ceratopteris richardii]

SEQ ID NO: 95157 - protein, 222 aa, Arabidopsis thaliana; identical to SEQ ID NO: 91401
  peptide (1)..(222): Ceres Seq. ID no. 12727467
  misc_feature (66)..(119): Pfam Name: Homeobox domain Pfam Description: Homeobox domain
  misc_feature (1)..(222): Homolog of NCBI NO: 15240052 NR Description: homeodomain transcription factor-like; protein At5g66700.1 [Arabidopsis thaliana] >gi|8843728|dbj|BAA97276.1|
  misc_feature (1)..(222): Homolog of NCBI NO: 15234508 NR Description: homeodomain protein; protein id: At4g36740.1
  misc_feature (1)..(220): Homolog of NCBI NO: 15224190 NR Description: homeodomain protein; protein id: At2g18550.1 thaliana] >gi|25411880|pir||F84565 probable homeodomain
  misc_feature (36)..(164): Homolog of NCBI NO: 33146844 NR Description: homeodomain protein-like [Oryza sativa (japonica
  misc_feature (109)..(216): Homolog of NCBI NO: 11231049 NR Description: homeobox-leucine zipper protein [Zinnia elegans]
  misc_feature (53)..(188): Homolog of NCBI NO: 7446256 NR Description: homeotic protein VAHOX1 - tomato
  misc_feature (33)..(188): Homolog of NCBI NO: 18034441 NR Description: homeodomain leucine zipper protein CPHB-5
  misc_feature (36)..(190): Homolog of NCBI NO: 3868841 NR Description: CRHB7 [Ceratopteris richardii]
  misc_feature (31)..(221): Homolog of NCBI NO: 15232122 NR Description: homeobox-leucine zipper protein HAT5 (HD-ZIP
  misc_feature (62)..(177): Homolog of NCBI NO: 3868839 NR Description: CRHB6 [Ceratopteris richardii]

SEQ ID NO: 95158 - protein, 218 aa, Arabidopsis thaliana; identical to SEQ ID NO: 91402
  peptide (1)..(218): Ceres Seq. ID no. 12727468
  misc_feature (62)..(115): Pfam Name: Homeobox domain Pfam Description: Homeobox domain
  misc_feature (1)..(218): Homolog of NCBI NO: 15240052 NR Description: homeodomain transcription factor-like; protein At5g66700.1 [Arabidopsis thaliana] >gi|8843728|dbj|BAA97276.1|
  misc_feature (1)..(218): Homolog of NCBI NO: 15234508 NR Description: homeodomain protein; protein id: At4g36740.1
  misc_feature (1)..(216): Homolog of NCBI NO: 15224190 NR Description: homeodomain protein; protein id: At2g18550.1 thaliana] >gi|25411880|pir||F84565 probable homeodomain
  misc_feature (32)..(160): Homolog of NCBI NO: 33146844 NR Description: homeodomain protein-like [Oryza sativa (japonica
  misc_feature (105)..(212): Homolog of NCBI NO: 11231049 NR Description: homeobox-leucine zipper protein [Zinnia elegans]
  misc_feature (49)..(184): Homolog of NCBI NO: 7446256 NR Description: homeotic protein VAHOX1 - tomato
  misc_feature (29)..(184): Homolog of NCBI NO: 18034441 NR Description: homeodomain leucine zipper protein CPHB-5
  misc_feature (32)..(186): Homolog of NCBI NO: 3868841 NR Description: CRHB7 [Ceratopteris richardii]
  misc_feature (27)..(217): Homolog of NCBI NO: 15232122 NR Description: homeobox-leucine zipper protein HAT5 (HD-ZIP
  misc_feature (58)..(173): Homolog of NCBI NO: 3868839 NR Description: CRHB6 [Ceratopteris richardii]

SEQ ID NO: 95159 - DNA, 893 bp, Arabidopsis thaliana; identical to SEQ ID NO: 91403
  misc_feature (1)..(893): Ceres Seq. ID no. 12727485
  misc_feature: MA Experiment ID: 20000180 Result: Down-regulated in Transcription
  misc_feature: MA Experiment 20000180 PARAMETER Experiment Name: At_Germinating_Seeds_P Parameter: Age (hr) Value: 24 vs. 0
  misc_feature: MA Experiment 20000180 PARAMETER Experiment Name: At_Germinating_Seeds_P Parameter: Tissue Value: Germinating Seeds

SEQ ID NO: 95160 - protein, 261 aa, Arabidopsis thaliana; identical to SEQ ID NO: 91404
  peptide (1)..(261): Ceres Seq. ID no. 12727486
  misc_feature (13)..(261): Homolog of NCBI NO: 15240108 NR Description: putative protein; protein id: At5g66860.1, by cDNA: gi_15450929, supported by cDNA: gi_17978762 [Arabidopsis >gi|9758136|dbj|BAB08628.1| gene_id:MUD21.12~pir||T05594~similar
  misc_feature (46)..(247): Homolog of NCBI NO: 15236554 NR Description: putative protein; protein id: At4g23620.1, by cDNA: 6527., supported by cDNA: gi_18253004 [Arabidopsis
  misc_feature (46)..(213): Homolog of NCBI NO: 34912284 NR Description: P0451D05.2 [Oryza sativa (japonica
  misc_feature (78)..(258): Homolog of NCBI NO: 22961530 NR Description: hypothetical protein [Rhodopseudomonas palustris]
  misc_feature (103)..(261): Homolog of NCBI NO: 15644375 NR Description: general stress protein Ctc [Thermotoga maritima]
  misc_feature (103)..(257): Homolog of NCBI NO: 23106991 NR Description: hypothetical protein [Novosphingobium

SEQ ID NO: 95161 - protein, 249 aa, Arabidopsis thaliana; identical to SEQ ID NO: 91405
  peptide (1)..(249): Ceres Seq. ID no. 12727487
  misc_feature (1)..(249): Homolog of NCBI NO: 15240108 NR Description: putative protein; protein id: At5g66860.1, by cDNA: gi_15450929, supported by cDNA: gi_17978762 [Arabidopsis >gi|9758136|dbj|BAB08628.1| gene_id:MUD21.12~pir||T05594~similar
  misc_feature (34)..(235): Homolog of NCBI NO: 15236554 NR Description: putative protein; protein id: At4g23620.1, by cDNA: 6527., supported by cDNA: gi_18253004 [Arabidopsis
  misc_feature (34)..(201): Homolog of NCBI NO: 34912284 NR Description: P0451D05.2 [Oryza sativa (japonica
  misc_feature (66)..(246): Homolog of NCBI NO: 22961530 NR Description: hypothetical protein [Rhodopseudomonas palustris]
  misc_feature (91)..(249): Homolog of NCBI NO: 15644375 NR Description: general stress protein Ctc [Thermotoga maritima]
  misc_feature (91)..(245): Homolog of NCBI NO: 23106991 NR Description: hypothetical protein [Novosphingobium

SEQ ID NO: 95162 - DNA, 2430 bp, Arabidopsis thaliana; identical to SEQ ID NO: 91406
  misc_feature (1)..(2430): Ceres Seq. ID no. 12727496
  misc_feature: MA Experiment ID: 20000184 Result: Down-regulated in Transcription
  misc_feature: MA Experiment 20000184 PARAMETER Experiment Name: At_Shoots__P Parameter: Age (day) Value: 7
  misc_feature: MA Experiment 20000184 PARAMETER Experiment Name: At_Shoots__P Parameter: Tissue Value: Shoots vs. Whole Plant
  misc_feature: MA Experiment ID: 20000234 Result: Down-regulated in Transcription
  misc_feature: MA Experiment 20000234 PARAMETER Experiment Name: At_Siliques_P Parameter: Age (day) Value: 21
  misc_feature: MA Experiment 20000234 PARAMETER Experiment Name: At_Siliques_P Parameter: Organism Value: A. thaliana
  misc_feature: MA Experiment 20000234 PARAMETER Experiment Name: At_Siliques_P Parameter: Plant Line Value: WS
  misc_feature: MA Experiment 20000234 PARAMETER Experiment Name: At_Siliques_P Parameter: Tissue Value: Less Than 5mm Siliques vs. Whole Plant
  misc_feature: MA Experiment ID: 20000264 Result: Down-regulated in Transcription
  misc_feature: MA Experiment 20000264 PARAMETER Experiment Name: At_Open_Flower_P Parameter: Age (day) Value: 21
  misc_feature: MA Experiment 20000264 PARAMETER Experiment Name: At_Open_Flower_P Parameter: Plant Line Value: WS
  misc_feature: MA Experiment 20000264 PARAMETER Experiment Name: At_Open_Flower_P Parameter: Tissue Value: Open Flower vs. Whole Plant
  misc_feature: MA Experiment ID: 20000265 Result: Down-regulated in Transcription
  misc_feature: MA Experiment 20000265 PARAMETER Experiment Name: At_Open_Flower_P Parameter: Age (day) Value: 21
  misc_feature: MA Experiment 20000265 PARAMETER Experiment Name: At_Open_Flower_P Parameter: Plant Line Value: WS
  misc_feature: MA Experiment 20000265 PARAMETER Experiment Name: At_Open_Flower_P Parameter: Tissue Value: Closed Flower vs. Whole Plant
  misc_feature: MA Experiment ID: 20000495 Result: Down-regulated in Transcription
  misc_feature: MA Experiment 20000495 PARAMETER Experiment Name: At_Guard_Cells_P Parameter: Harvest Date Value: 8/2/2002
  misc_feature: MA Experiment 20000495 PARAMETER Experiment Name: At_Guard_Cells_P Parameter: Organism Value: A. thaliana
  misc_feature: MA Experiment 20000495 PARAMETER Experiment Name: At_Guard_Cells_P Parameter: Tissue Value: Guard Cells vs. Leaves
  misc_feature: MA Experiment ID: 20001451 Result: Down-regulated in Transcription
  misc_feature: MA Experiment 20001451 PARAMETER Experiment Name: At_Far-red-induction_P Parameter: Age (day) Value: 7
  misc_feature: MA Experiment 20001451 PARAMETER Experiment Name: At_Far-red-induction_P Parameter: Light Value: Far-red vs. White
  misc_feature: MA Experiment 20001451 PARAMETER Experiment Name: At_Far-red-induction_P Parameter: Organism Value: A. thaliana
  misc_feature: MA Experiment 20001451 PARAMETER Experiment Name: At_Far-red-induction_P Parameter: Plant Line Value: Columbia
  misc_feature: MA Experiment 20001451 PARAMETER Experiment Name: At_Far-red-induction_P Parameter: Timepoint (hr) Value: 24
  misc_feature: MA Experiment 20001451 PARAMETER Experiment Name: At_Far-red-induction_P Parameter: Tissue Value: Whole Plant

SEQ ID NO: 95163 - protein, 809 aa, Arabidopsis thaliana; identical to SEQ ID NO: 91407
  peptide (1)..(809): Ceres Seq. ID no. 12727497
  misc_feature (153)..(280): Pfam Name: NB-ARC domain Pfam Description: NB-ARC domain
  misc_feature (3)..(809): Homolog of NCBI NO: 15240127 NR Description: disease resistance protein (CC-NBS-LRR class), protein id: At5g66910.1, supported by cDNA: gi_18087525
  misc_feature (404)..(809): Homolog of NCBI NO: 15240125 NR Description: disease resistance protein (NBS-LRR class), protein id: At5g66890.1 [Arabidopsis thaliana] contains similarity to disease resistance
  misc_feature (12)..(798): Homolog of NCBI NO: 15238281 NR Description: disease resistance protein (CC-NBS-LRR class), protein id: At5g04720.1, supported by cDNA: gi_15292720,
  misc_feature (13)..(798): Homolog of NCBI NO: 30689664 NR Description: disease resistance protein (CC-NBS-LRR class),
  misc_feature (183)..(803): Homolog of NCBI NO: 15238054 NR Description: disease resistance protein (NBS-LRR class), protein id: At5g47280.1 [Arabidopsis thaliana]
  misc_feature (273)..(795): Homolog of NCBI NO: 30692890 NR Description: disease resistance protein (CC-NBS-LRR class),
  misc_feature (273)..(795): Homolog of NCBI NO: 25403197 NR Description: probable disease resistance protein [imported] - thaliana >gi|10998939|gb|AAG26078.1|AC069299_4 disease resistance putative [Arabidopsis thaliana]
  misc_feature (1)..(323): Homolog of NCBI NO: 27808630 NR Description: At5g66630 [Arabidopsis thaliana]
  misc_feature (1)..(323): Homolog of NCBI NO: 30698240 NR Description: expressed protein [Arabidopsis thaliana]
  misc_feature (153)..(752): Homolog of NCBI NO: 34391519 NR Description: disease resistance protein-like protein MsR1

SEQ ID NO: 95164 - protein, 765 aa, Arabidopsis thaliana; identical to SEQ ID NO: 91408
  peptide (1)..(765): Ceres Seq. ID no. 12727498
  misc_feature (109)..(236): Pfam Name: NB-ARC domain Pfam Description: NB-ARC domain
  misc_feature (1)..(765): Homolog of NCBI NO: 15240127 NR Description: disease resistance protein (CC-NBS-LRR class), protein id: At5g66910.1, supported by cDNA: gi_18087525
  misc_feature (360)..(765): Homolog of NCBI NO: 15240125 NR Description: disease resistance protein (NBS-LRR class), protein id: At5g66890.1 [Arabidopsis thaliana] contains similarity to disease resistance
  misc_feature (1)..(754): Homolog of NCBI NO: 15238281 NR Description: disease resistance protein (CC-NBS-LRR class), protein id: At5g04720.1, supported by cDNA: gi_15292720,
  misc_feature (1)..(754): Homolog of NCBI NO: 30689664 NR Description: disease resistance protein (CC-NBS-LRR class),
  misc_feature (139)..(759): Homolog of NCBI NO: 15238054 NR Description: disease resistance protein (NBS-LRR class), protein id: At5g47280.1 [Arabidopsis thaliana]
  misc_feature (229)..(751): Homolog of NCBI NO: 30692890 NR Description: disease resistance protein (CC-NBS-LRR class),
  misc_feature (229)..(751): Homolog of NCBI NO: 25403197 NR Description: probable disease resistance protein [imported] - thaliana >gi|10998939|gb|AAG26078.1|AC069299_4 disease resistance putative [Arabidopsis thaliana]
  misc_feature (1)..(279): Homolog of NCBI NO: 27808630 NR Description: At5g66630 [Arabidopsis thaliana]
  misc_feature (1)..(279): Homolog of NCBI NO: 30698240 NR Description: expressed protein [Arabidopsis thaliana]
  misc_feature (109)..(708): Homolog of NCBI NO: 34391519 NR Description: disease resistance protein-like protein MsR1

SEQ ID NO: 95165 - protein, 752 aa, Arabidopsis thaliana; identical to SEQ ID NO: 91409
  peptide (1)..(752): Ceres Seq. ID no. 12727499
  misc_feature (96)..(223): Pfam Name: NB-ARC domain Pfam Description: NB-ARC domain
  misc_feature (1)..(752): Homolog of NCBI NO: 15240127 NR Description: disease resistance protein (CC-NBS-LRR class), protein id: At5g66910.1, supported by cDNA: gi_18087525
  misc_feature (347)..(752): Homolog of NCBI NO: 15240125 NR Description: disease resistance protein (NBS-LRR class), protein id: At5g66890.1 [Arabidopsis thaliana] contains similarity to disease resistance
  misc_feature (1)..(741): Homolog of NCBI NO: 15238281 NR Description: disease resistance protein (CC-NBS-LRR class), protein id: At5g04720.1, supported by cDNA: gi_15292720,
  misc_feature (1)..(741): Homolog of NCBI NO: 30689664 NR Description: disease resistance protein (CC-NBS-LRR class),
  misc_feature (126)..(746): Homolog of NCBI NO: 15238054 NR Description: disease resistance protein (NBS-LRR class), protein id: At5g47280.1 [Arabidopsis thaliana]
  misc_feature (216)..(738): Homolog of NCBI NO: 30692890 NR Description: disease resistance protein (CC-NBS-LRR class),
  misc_feature (216)..(738): Homolog of NCBI NO: 25403197 NR Description: probable disease resistance protein [imported] - thaliana >gi|10998939|gb|AAG26078.1|AC069299_4 disease resistance putative [Arabidopsis thaliana]
  misc_feature (1)..(266): Homolog of NCBI NO: 27808630 NR Description: At5g66630 [Arabidopsis thaliana]
  misc_feature (1)..(266): Homolog of NCBI NO: 30698240 NR Description: expressed protein [Arabidopsis thaliana]
  misc_feature (96)..(695): Homolog of NCBI NO: 34391519 NR Description: disease resistance protein-like protein MsR1

SEQ ID NO: 95166 - DNA, 2670 bp, Arabidopsis thaliana; identical to SEQ ID NO: 91410
  misc_feature (1)..(2670): Ceres Seq. ID no. 12727500
  misc_feature: MA Experiment ID: 20000173 Result: Down-regulated in Transcription
  misc_feature: MA Experiment 20000173 PARAMETER Experiment Name: At_42deg_Heat_P Parameter: Age (day) Value: 14
  misc_feature: MA Experiment 20000173 PARAMETER Experiment Name: At_42deg_Heat_P Parameter: Organism Value: A. thaliana
  misc_feature: MA Experiment 20000173 PARAMETER Experiment Name: At_42deg_Heat_P Parameter: Plant Line Value: WS
  misc_feature: MA Experiment 20000173 PARAMETER Experiment Name: At_42deg_Heat_P Parameter: Temperature (deg C) Value: 42 vs. 22
  misc_feature: MA Experiment 20000173 PARAMETER Experiment Name: At_42deg_Heat_P Parameter: Timepoint (hr) Value: 6
  misc_feature: MA Experiment 20000173 PARAMETER Experiment Name: At_42deg_Heat_P Parameter: Tissue Value: Aerial
  misc_feature: MA Experiment ID: 20000182 Result: Up-regulated in Transcription
  misc_feature: MA Experiment 20000182 PARAMETER Experiment Name: At_2mM_SA_P Parameter: Age (day) Value: 14
  misc_feature: MA Experiment 20000182 PARAMETER Experiment Name: At_2mM_SA_P Parameter: Organism Value: A. thaliana
  misc_feature: MA Experiment 20000182 PARAMETER Experiment Name: At_2mM_SA_P Parameter: Plant Line Value: WS
  misc_feature: MA Experiment 20000182 PARAMETER Experiment Name: At_2mM_SA_P Parameter: Timepoint (hr) Value: 6
  misc_feature: MA Experiment 20000182 PARAMETER Experiment Name: At_2mM_SA_P Parameter: Tissue Value: Aerial
  misc_feature: MA Experiment 20000182 PARAMETER Experiment Name: At_2mM_SA_P Parameter: Treatment Value: 2mM SA vs. No Treatment
  misc_feature: MA Experiment ID: 20000227 Result: Down-regulated in Transcription
  misc_feature: MA Experiment 20000227 PARAMETER Experiment Name: At_Root-Tips-vs-Tops_P Parameter: Tissue Value: Root Tips vs. Root Tops
  misc_feature: MA Experiment ID: 20000234 Result: Down-regulated in Transcription
  misc_feature: MA Experiment 20000234 PARAMETER Experiment Name: At_Siliques_P Parameter: Age (day) Value: 21
  misc_feature: MA Experiment 20000234 PARAMETER Experiment Name: At_Siliques_P Parameter: Organism Value: A. thaliana
  misc_feature: MA Experiment 20000234 PARAMETER Experiment Name: At_Siliques_P Parameter: Plant Line Value: WS
  misc_feature: MA Experiment 20000234 PARAMETER Experiment Name: At_Siliques_P Parameter: Tissue Value: Less Than 5mm Siliques vs. Whole Plant
  misc_feature: MA Experiment ID: 20000264 Result: Down-regulated in Transcription
  misc_feature: MA Experiment 20000264 PARAMETER Experiment Name: At_Open_Flower_P Parameter: Age (day) Value: 21
  misc_feature: MA Experiment 20000264 PARAMETER Experiment Name: At_Open_Flower_P Parameter: Plant Line Value: WS
  misc_feature: MA Experiment 20000264 PARAMETER Experiment Name: At_Open_Flower_P Parameter: Tissue Value: Open Flower vs. Whole Plant
  misc_feature: MA Experiment ID: 20000495 Result: Down-regulated in Transcription
  misc_feature: MA Experiment 20000495 PARAMETER Experiment Name: At_Guard_Cells_P Parameter: Harvest Date Value: 8/2/2002
  misc_feature: MA Experiment 20000495 PARAMETER Experiment Name: At_Guard_Cells_P Parameter: Organism Value: A. thaliana
  misc_feature: MA Experiment 20000495 PARAMETER Experiment Name: At_Guard_Cells_P Parameter: Tissue Value: Guard Cells vs. Leaves

SEQ ID NO: 95167 - protein, 815 aa, Arabidopsis thaliana; identical to SEQ ID NO: 91411
  peptide (1)..(815): Ceres Seq. ID no. 12727501
  misc_feature (11)..(153): Pfam Name: Arabidopsis broad-spectrum mildew resistance Pfam Description: Arabidopsis broad-spectrum mildew resistance
  misc_feature (5)..(815): Homolog of NCBI NO: 15240126 NR Description: disease resistance protein (CC-NBS-LRR class), protein id: At5g66900.1 [Arabidopsis thaliana]
  misc_feature (406)..(815): Homolog of NCBI NO: 15240125 NR Description: disease resistance protein (NBS-LRR class), protein id: At5g66890.1 [Arabidopsis thaliana] contains similarity to disease resistance
  misc_feature (261)..(795): Homolog of NCBI NO: 30692890 NR Description: disease resistance protein (CC-NBS-LRR class),
  misc_feature (15)..(233): Homolog of NCBI NO: 30692890 NR Description: disease resistance protein (CC-NBS-LRR class),
  misc_feature (14)..(804): Homolog of NCBI NO: 15238281 NR Description: disease resistance protein (CC-NBS-LRR class), protein id: At5g04720.1, supported by cDNA: gi_15292720,
  misc_feature (15)..(804): Homolog of NCBI NO: 30689664 NR Description: disease resistance protein (CC-NBS-LRR class),
  misc_feature (15)..(795): Homolog of NCBI NO: 25403197 NR Description: probable disease resistance protein [imported] - thaliana >gi|10998939|gb|AAG26078.1|AC069299_4 disease resistance putative [Arabidopsis thaliana]
  misc_feature (191)..(809): Homolog of NCBI NO: 15238054 NR Description: disease resistance protein (NBS-LRR class), protein id: At5g47280.1 [Arabidopsis thaliana]
  misc_feature (1)..(321): Homolog of NCBI NO: 27808630 NR Description: At5g66630 [Arabidopsis thaliana]
  misc_feature (1)..(321): Homolog of NCBI NO: 30698240 NR Description: expressed protein [Arabidopsis thaliana]

SEQ ID NO: 95168 - protein, 769 aa, Arabidopsis thaliana; identical to SEQ ID NO: 91412
  peptide (1)..(769): Ceres Seq. ID no. 12727502
  misc_feature (1)..(107): Pfam Name: Arabidopsis broad-spectrum mildew resistance Pfam Description: Arabidopsis broad-spectrum mildew resistance
  misc_feature (1)..(769): Homolog of NCBI NO: 15240126 NR Description: disease resistance protein (CC-NBS-LRR class), protein id: At5g66900.1 [Arabidopsis thaliana]
  misc_feature (360)..(769): Homolog of NCBI NO: 15240125 NR Description: disease resistance protein (NBS-LRR class), protein id: At5g66890.1 [Arabidopsis thaliana] contains similarity to disease resistance
  misc_feature (215)..(749): Homolog of NCBI NO: 30692890 NR Description: disease resistance protein (CC-NBS-LRR class),
  misc_feature (1)..(187): Homolog of NCBI NO: 30692890 NR Description: disease resistance protein (CC-NBS-LRR class),
  misc_feature (1)..(758): Homolog of NCBI NO: 15238281 NR Description: disease resistance protein (CC-NBS-LRR class), protein id: At5g04720.1, supported by cDNA: gi_15292720,
  misc_feature (1)..(758): Homolog of NCBI NO: 30689664 NR Description: disease resistance protein (CC-NBS-LRR class),
  misc_feature (1)..(749): Homolog of NCBI NO: 25403197 NR Description: probable disease resistance protein [imported] - thaliana >gi|10998939|gb|AAG26078.1|AC069299_4 disease resistance putative [Arabidopsis thaliana]
  misc_feature (145)..(763): Homolog of NCBI NO: 15238054 NR Description: disease resistance protein (NBS-LRR class), protein id: At5g47280.1 [Arabidopsis thaliana]
  misc_feature (1)..(275): Homolog of NCBI NO: 27808630 NR Description: At5g66630 [Arabidopsis thaliana]
  misc_feature (1)..(275): Homolog of NCBI NO: 30698240 NR Description: expressed protein [Arabidopsis thaliana]

SEQ ID NO: 95169 - protein, 756 aa, Arabidopsis thaliana; identical to SEQ ID NO: 91413
  peptide (1)..(756): Ceres Seq. ID no. 12727503
  misc_feature (1)..(94): Pfam Name: Arabidopsis broad-spectrum mildew resistance Pfam Description: Arabidopsis broad-spectrum mildew resistance
  misc_feature (1)..(756): Homolog of NCBI NO: 15240126 NR Description: disease resistance protein (CC-NBS-LRR class), protein id: At5g66900.1 [Arabidopsis thaliana]
  misc_feature (347)..(756): Homolog of NCBI NO: 15240125 NR Description: disease resistance protein (NBS-LRR class), protein id: At5g66890.1 [Arabidopsis thaliana] contains similarity to disease resistance
  misc_feature (202)..(736): Homolog of NCBI NO: 30692890 NR Description: disease resistance protein (CC-NBS-LRR class),
  misc_feature (1)..(174): Homolog of NCBI NO: 30692890 NR Description: disease resistance protein (CC-NBS-LRR class),
  misc_feature (1)..(745): Homolog of NCBI NO: 15238281 NR Description: disease resistance protein (CC-NBS-LRR class), protein id: At5g04720.1, supported by cDNA: gi_15292720,
  misc_feature (1)..(745): Homolog of NCBI NO: 30689664 NR Description: disease resistance protein (CC-NBS-LRR class),
  misc_feature (1)..(736): Homolog of NCBI NO: 25403197 NR Description: probable disease resistance protein [imported] - thaliana >gi|10998939|gb|AAG26078.1|AC069299_4 disease resistance putative [Arabidopsis thaliana]
  misc_feature (132)..(750): Homolog of NCBI NO: 15238054 NR Description: disease resistance protein (NBS-LRR class), protein id: At5g47280.1 [Arabidopsis thaliana]
  misc_feature (1)..(262): Homolog of NCBI NO: 27808630 NR Description: At5g66630 [Arabidopsis thaliana]
  misc_feature (1)..(262): Homolog of NCBI NO: 30698240 NR Description: expressed protein [Arabidopsis thaliana]

SEQ ID NO: 95170 - DNA, 1016 bp, Arabidopsis thaliana; identical to SEQ ID NO: 91414
  misc_feature (1)..(1016): Ceres Seq. ID no. 12727504
  misc_feature: MA Experiment ID: 20000794 Result: Up-regulated in Transcription
  misc_feature: MA Experiment 20000794 PARAMETER Experiment Name: At_Petals_P Parameter: Age (day) Value: 23-25 days
  misc_feature: MA Experiment 20000794 PARAMETER Experiment Name: At_Petals_P Parameter: Plant Line Value: WS
  misc_feature: MA Experiment 20000794 PARAMETER Experiment Name: At_Petals_P Parameter: Tissue Value: Petals vs. Whole plant
  misc_feature: MA Experiment ID: 20001905 Result: Up-regulated in Transcription
  misc_feature: MA Experiment 20001905 PARAMETER Experiment Name: At_Drought_Reproduction_P Parameter: Age (day) Value: 40
  misc_feature: MA Experiment 20001905 PARAMETER Experiment Name: At_Drought_Reproduction_P Parameter: Organism Value: A. thaliana
  misc_feature: MA Experiment 20001905 PARAMETER Experiment Name: At_Drought_Reproduction_P Parameter: Plant Line Value: WS
  misc_feature: MA Experiment 20001905 PARAMETER Experiment Name: At_Drought_Reproduction_P Parameter: Timepoint (day) Value: 10
  misc_feature: MA Experiment 20001905 PARAMETER Experiment Name: At_Drought_Reproduction_P Parameter: Tissue Value: Rosettes
  misc_feature: MA Experiment 20001905 PARAMETER Experiment Name: At_Drought_Reproduction_P Parameter: Treatment Value: Drought vs. No Drought
  misc_feature: MA Experiment ID: 20001911 Result: Up-regulated in Transcription
  misc_feature: MA Experiment 20001911 PARAMETER Experiment Name: At_Drought_Reproduction_P Parameter: Age (day) Value: 40
  misc_feature: MA Experiment 20001911 PARAMETER Experiment Name: At_Drought_Reproduction_P Parameter: Organism Value: A. thaliana
  misc_feature: MA Experiment 20001911 PARAMETER Experiment Name: At_Drought_Reproduction_P Parameter: Plant Line Value: WS
  misc_feature: MA Experiment 20001911 PARAMETER Experiment Name: At_Drought_Reproduction_P Parameter: Timepoint (day) Value: 10
  misc_feature: MA Experiment 20001911 PARAMETER Experiment Name: At_Drought_Reproduction_P Parameter: Tissue Value: Flowers
  misc_feature: MA Experiment 20001911 PARAMETER Experiment Name: At_Drought_Reproduction_P Parameter: Treatment Value: Drought vs. No Drought

SEQ ID NO: 95171 - protein, 179 aa, Arabidopsis thaliana; identical to SEQ ID NO: 91415
  peptide (1)..(179): Ceres Seq. ID no. 12727505
  misc_feature (23)..(165): Homolog of NCBI NO: 30698268 NR Description: expressed protein [Arabidopsis thaliana]
  misc_feature (34)..(165): Homolog of NCBI NO: 9758143 NR Description: gene_id:MUD21.19~pir||T38383~similar to unknown
  misc_feature (23)..(179): Homolog of NCBI NO: 30698266 NR Description: expressed protein [Arabidopsis thaliana]
  misc_feature (23)..(179): Homolog of NCBI NO: 15810345 NR Description: unknown protein [Arabidopsis thaliana]

SEQ ID NO: 95172 - protein, 157 aa, Arabidopsis thaliana; identical to SEQ ID NO: 91416
  peptide (1)..(157): Ceres Seq. ID no. 12727506
  misc_feature (1)..(143): Homolog of NCBI NO: 30698268 NR Description: expressed protein [Arabidopsis thaliana]
  misc_feature (12)..(143): Homolog of NCBI NO: 9758143 NR Description: gene_id:MUD21.19~pir||T38383~similar to unknown
  misc_feature (1)..(157): Homolog of NCBI NO: 30698266 NR Description: expressed protein [Arabidopsis thaliana]
  misc_feature (1)..(157): Homolog of NCBI NO: 15810345 NR Description: unknown protein [Arabidopsis thaliana]

SEQ ID NO: 95173 - DNA, 726 bp, Arabidopsis thaliana; identical to SEQ ID NO: 91417
  misc_feature (1)..(726): Ceres Seq. ID no. 12727525
  misc_feature: MA Experiment ID: 20000179 Result: Up-regulated in Transcription
  misc_feature: MA Experiment 20000179 PARAMETER Experiment Name: At_Germinating_Seeds_P Parameter: Age (hr) Value: 6 vs. 0
  misc_feature: MA Experiment 20000179 PARAMETER Experiment Name: At_Germinating_Seeds_P Parameter: Tissue Value: Germinating Seeds
  misc_feature: MA Experiment ID: 20000180 Result: Up-regulated in Transcription
  misc_feature: MA Experiment 20000180 PARAMETER Experiment Name: At_Germinating_Seeds_P Parameter: Age (hr) Value: 24 vs. 0
  misc_feature: MA Experiment 20000180 PARAMETER Experiment Name: At_Germinating_Seeds_P Parameter: Tissue Value: Germinating Seeds
  misc_feature: MA Experiment ID: 20001248 Result: Up-regulated in Transcription
  misc_feature: MA Experiment 20001248 PARAMETER Experiment Name: At_Far-red-induction_P Parameter: Age (day) Value: 7
  misc_feature: MA Experiment 20001248 PARAMETER Experiment Name: At_Far-red-induction_P Parameter: Light Value: Far-red vs. White
  misc_feature: MA Experiment 20001248 PARAMETER Experiment Name: At_Far-red-induction_P Parameter: Organism Value: A. thaliana
  misc_feature: MA Experiment 20001248 PARAMETER Experiment Name: At_Far-red-induction_P Parameter: Plant Line Value: Columbia
  misc_feature: MA Experiment 20001248 PARAMETER Experiment Name: At_Far-red-induction_P Parameter: Timepoint (hr) Value: 4
  misc_feature: MA Experiment 20001248 PARAMETER Experiment Name: At_Far-red-induction_P Parameter: Tissue Value: Whole Plant

SEQ ID NO: 95174 - protein, 241 aa, Arabidopsis thaliana; identical to SEQ ID NO: 91418
  peptide (1)..(241): Ceres Seq. ID no. 12727526
  misc_feature (131)..(178): Pfam Name: Helix-loop-helix DNA-binding domain Pfam Description: Helix-loop-helix DNA-binding domain
  misc_feature (1)..(241): Homolog of NCBI NO: 15240189 NR Description: putative protein; protein id: At5g67060.1, by cDNA: gi_20127096 [Arabidopsis thaliana] emb|CAB62312.1~gene_id:K21H1.2~similar to unknown protein
  misc_feature (1)..(241): Homolog of NCBI NO: 15229725 NR Description: putative protein; protein id: At3g50330.1
  misc_feature (21)..(191): Homolog of NCBI NO: 15242494 NR Description: putative protein; protein id: At5g09750.1
  misc_feature (94)..(190): Homolog of NCBI NO: 15236714 NR Description: hypothetical protein; protein id: At4g00120.1
  misc_feature (95)..(191): Homolog of NCBI NO: 34910410 NR Description: P0692C11.28 [Oryza sativa (japonica
  misc_feature (95)..(185): Homolog of NCBI NO: 9294680 NR Description: emb|CAB62312.1~gene_id:MHC9.1~similar to unknown
  misc_feature (95)..(185): Homolog of NCBI NO: 15232534 NR Description: hypothetical protein; protein id: At3g21330.1, by cDNA: gi_20127094 [Arabidopsis thaliana]
  misc_feature (95)..(185): Homolog of NCBI NO: 28393737 NR Description: unknown protein [Arabidopsis thaliana]
  misc_feature (95)..(185): Homolog of NCBI NO: 15289790 NR Description: P0002B05.9 [Oryza sativa (japonica
  misc_feature (95)..(185): Homolog of NCBI NO: 34914234 NR Description: P0697C12.24 [Oryza sativa (japonica

SEQ ID NO: 95175 - protein, 236 aa, Arabidopsis thaliana; identical to SEQ ID NO: 91419
  peptide (1)..(236): Ceres Seq. ID no. 12727527
  misc_feature (126)..(173): Pfam Name: Helix-loop-helix DNA-binding domain Pfam Description: Helix-loop-helix DNA-binding domain
  misc_feature (1)..(236): Homolog of NCBI NO: 15240189 NR Description: putative protein; protein id: At5g67060.1, by cDNA: gi_20127096 [Arabidopsis thaliana] emb|CAB62312.1~gene_id:K21H1.2~similar to unknown protein
  misc_feature (1)..(236): Homolog of NCBI NO: 15229725 NR Description: putative protein; protein id: At3g50330.1
  misc_feature (16)..(186): Homolog of NCBI NO: 15242494 NR Description: putative protein; protein id: At5g09750.1
  misc_feature (89)..(185): Homolog of NCBI NO: 15236714 NR Description: hypothetical protein; protein id: At4g00120.1
  misc_feature (90)..(186): Homolog of NCBI NO: 34910410 NR Description: P0692C11.28 [Oryza sativa (japonica
  misc_feature (90)..(180): Homolog of NCBI NO: 9294680 NR Description: emb|CAB62312.1~gene_id:MHC9.1~similar to unknown
  misc_feature (90)..(180): Homolog of NCBI NO: 15232534 NR Description: hypothetical protein; protein id: At3g21330.1, by cDNA: gi_20127094 [Arabidopsis thaliana]
  misc_feature (90)..(180): Homolog of NCBI NO: 28393737 NR Description: unknown protein [Arabidopsis thaliana]
  misc_feature (90)..(180): Homolog of NCBI NO: 15289790 NR Description: P0002B05.9 [Oryza sativa (japonica
  misc_feature (90)..(180): Homolog of NCBI NO: 34914234 NR Description: P0697C12.24 [Oryza sativa (japonica

SEQ ID NO: 95176 - protein, 234 aa, Arabidopsis thaliana; identical to SEQ ID NO: 91420
  peptide (1)..(234): Ceres Seq. ID no. 12727528
  misc_feature (124)..(171): Pfam Name: Helix-loop-helix DNA-binding domain Pfam Description: Helix-loop-helix DNA-binding domain
  misc_feature (1)..(234): Homolog of NCBI NO: 15240189 NR Description: putative protein; protein id: At5g67060.1, by cDNA: gi_20127096 [Arabidopsis thaliana] emb|CAB62312.1~gene_id:K21H1.2~similar to unknown protein
  misc_feature (1)..(234): Homolog of NCBI NO: 15229725 NR Description: putative protein; protein id: At3g50330.1
  misc_feature (14)..(184): Homolog of NCBI NO: 15242494 NR Description: putative protein; protein id: At5g09750.1
  misc_feature (87)..(183): Homolog of NCBI NO: 15236714 NR Description: hypothetical protein; protein id: At4g00120.1
  misc_feature (88)..(184): Homolog of NCBI NO: 34910410 NR Description: P0692C11.28 [Oryza sativa (japonica
  misc_feature (88)..(178): Homolog of NCBI NO: 9294680 NR Description: emb|CAB62312.1~gene_id:MHC9.1~similar to unknown
  misc_feature (88)..(178): Homolog of NCBI NO: 15232534 NR Description: hypothetical protein; protein id: At3g21330.1, by cDNA: gi_20127094 [Arabidopsis thaliana]
  misc_feature (88)..(178): Homolog of NCBI NO: 28393737 NR Description: unknown protein [Arabidopsis thaliana]
  misc_feature (88)..(178): Homolog of NCBI NO: 15289790 NR Description: P0002B05.9 [Oryza sativa (japonica
  misc_feature (88)..(178): Homolog of NCBI NO: 34914234 NR Description: P0697C12.24 [Oryza sativa (japonica

SEQ ID NO: 95177 - DNA, 954 bp, Arabidopsis thaliana; identical to SEQ ID NO: 91421
  misc_feature (1)..(954): Ceres Seq. ID no. 12727547
  misc_feature: MA Experiment ID: 20000315 Result: Down-regulated in Transcription
  misc_feature: MA Experiment 20000315 PARAMETER Experiment Name: At_14day_Shoots-Roots_Sub_P Parameter: Age (day) Value: 14
  misc_feature: MA Experiment 20000315 PARAMETER Experiment Name: At_14day_Shoots-Roots_Sub_P Parameter: Organism Value: A. thaliana
  misc_feature: MA Experiment 20000315 PARAMETER Experiment Name: At_14day_Shoots-Roots_Sub_P Parameter: Plant Line Value: WS
  misc_feature: MA Experiment 20000315 PARAMETER Experiment Name: At_14day_Shoots-Roots_Sub_P Parameter: Tissue Value: Shoots vs. Whole Plant
  misc_feature: MA Experiment ID: 20000327 Result: Down-regulated in Transcription
  misc_feature: MA Experiment 20000327 PARAMETER Experiment Name: At_42deg_Heat_Sub_P Parameter: Age (day) Value: 14
  misc_feature: MA Experiment 20000327 PARAMETER Experiment Name: At_42deg_Heat_Sub_P Parameter: Organism Value: A. thaliana
  misc_feature: MA Experiment 20000327 PARAMETER Experiment Name: At_42deg_Heat_Sub_P Parameter: Plant Line Value: WS
  misc_feature: MA Experiment 20000327 PARAMETER Experiment Name: At_42deg_Heat_Sub_P Parameter: Temperature (deg C) Value: 42 vs. 22
  misc_feature: MA Experiment 20000327 PARAMETER Experiment Name: At_42deg_Heat_Sub_P Parameter: Timepoint (hr) Value: 1
  misc_feature: MA Experiment 20000327 PARAMETER Experiment Name: At_42deg_Heat_Sub_P Parameter: Tissue Value: Aerial
  misc_feature: MA Experiment ID: 20000355 Result: Down-regulated in Transcription
  misc_feature: MA Experiment 20000355 PARAMETER Experiment Name: At_Siliques_Sub_P Parameter: Age (day) Value: 21
  misc_feature: MA Experiment 20000355 PARAMETER Experiment Name: At_Siliques_Sub_P Parameter: Organism Value: A. thaliana
  misc_feature: MA Experiment 20000355 PARAMETER Experiment Name: At_Siliques_Sub_P Parameter: Plant Line Value: WS
  misc_feature: MA Experiment 20000355 PARAMETER Experiment Name: At_Siliques_Sub_P Parameter: Tissue Value: Less Than 5mm Siliques vs. Whole Plant

SEQ ID NO: 95178 - protein, 317 aa, Arabidopsis thaliana; identical to SEQ ID NO: 91422
  peptide (1)..(317): Ceres Seq. ID no. 12727548
  misc_feature (59)..(303): Pfam Name: Protein of unknown function (DUF579) Pfam Description: Protein of unknown function (DUF579)
  misc_feature (1)..(317): Homolog of NCBI NO: 15240242 NR Description: putative protein; protein id: At5g67210.1 thaliana] >gi|10177608|dbj|BAB10955.1| to unknown protein [Arabidopsis thaliana]
  misc_feature (1)..(316): Homolog of NCBI NO: 21593034 NR Description: unknown [Arabidopsis thaliana]
  misc_feature (1)..(316): Homolog of NCBI NO: 15229700 NR Description: putative protein; protein id: At3g50220.1, by cDNA: 35440. [Arabidopsis thaliana] >gi|11282604|pir||T45568
  misc_feature (1)..(304): Homolog of NCBI NO: 18397819 NR Description: expressed protein; protein id: At2g15440.1, by cDNA: 32729. [Arabidopsis thaliana] >gi|25354650|pir||A84529
  misc_feature (22)..(306): Homolog of NCBI NO: 10241434 NR Description: putative protein [Oryza sativa (indica
  misc_feature (22)..(306): Homolog of NCBI NO: 32488916 NR Description: OSJNBb0059K02.7 [Oryza sativa (japonica
  misc_feature (24)..(292): Homolog of NCBI NO: 18409879 NR Description: hypothetical protein; protein id: At1g71690.1
  misc_feature (24)..(292): Homolog of NCBI NO: 25354648 NR Description: hypothetical protein F14O23.3 [imported] - thaliana >gi|7239492|gb|AAF43218.1|AC012654_2 EST gb|AI999169
  misc_feature (70)..(292): Homolog of NCBI NO: 18398986 NR Description: expressed protein; protein id: At1g33800.1, by cDNA: 114466., supported by cDNA: gi_17979548, supported by gi_20453344 [Arabidopsis thaliana] >gi|25354651|pir||E86461
  misc_feature (20)..(303): Homolog of NCBI NO: 15220402 NR Description: unknown protein; protein id: At1g67330.1 thaliana] >gi|9828617|gb|AAG00240.1|AC002130_5 F1N21.15

SEQ ID NO: 95179 - protein, 233 aa, Arabidopsis thaliana; identical to SEQ ID NO: 91423
  peptide (1)..(233): Ceres Seq. ID no. 12727549
  misc_feature (1)..(219): Pfam Name: Protein of unknown function (DUF579) Pfam Description: Protein of unknown function (DUF579)
  misc_feature (1)..(233): Homolog of NCBI NO: 15240242 NR Description: putative protein; protein id: At5g67210.1 thaliana] >gi|10177608|dbj|BAB10955.1| to unknown protein [Arabidopsis thaliana]
  misc_feature (1)..(232): Homolog of NCBI NO: 21593034 NR Description: unknown [Arabidopsis thaliana]
  misc_feature (1)..(232): Homolog of NCBI NO: 15229700 NR Description: putative protein; protein id: At3g50220.1, by cDNA: 35440. [Arabidopsis thaliana] >gi|11282604|pir||T45568
  misc_feature (1)..(220): Homolog of NCBI NO: 18397819 NR Description: expressed protein; protein id: At2g15440.1, by cDNA: 32729. [Arabidopsis thaliana] >gi|25354650|pir||A84529
  misc_feature (1)..(222): Homolog of NCBI NO: 10241434 NR Description: putative protein [Oryza sativa (indica
  misc_feature (1)..(222): Homolog of NCBI NO: 32488916 NR Description: OSJNBb0059K02.7 [Oryza sativa (japonica
  misc_feature (1)..(208): Homolog of NCBI NO: 18409879 NR Description: hypothetical protein; protein id: At1g71690.1
  misc_feature (1)..(208): Homolog of NCBI NO: 25354648 NR Description: hypothetical protein F14O23.3 [imported] - thaliana >gi|7239492|gb|AAF43218.1|AC012654_2 EST gb|AI999169
  misc_feature (1)..(208): Homolog of NCBI NO: 18398986 NR Description: expressed protein; protein id: At1g33800.1, by cDNA: 114466., supported by cDNA: gi_17979548, supported by gi_20453344 [Arabidopsis thaliana] >gi|25354651|pir||E86461
  misc_feature (1)..(219): Homolog of NCBI NO: 15220402 NR Description: unknown protein; protein id: At1g67330.1 thaliana] >gi|9828617|gb|AAG00240.1|AC002130_5 F1N21.15

SEQ ID NO: 95180 - protein, 220 aa, Arabidopsis thaliana; identical to SEQ ID NO: 91424
  peptide (1)..(220): Ceres Seq. ID no. 12727550
  misc_feature (1)..(206): Pfam Name: Protein of unknown function (DUF579) Pfam Description: Protein of unknown function (DUF579)
  misc_feature (1)..(220): Homolog of NCBI NO: 15240242 NR Description: putative protein; protein id: At5g67210.1 thaliana] >gi|10177608|dbj|BAB10955.1| to unknown protein [Arabidopsis thaliana]
  misc_feature (1)..(219): Homolog of NCBI NO: 21593034 NR Description: unknown [Arabidopsis thaliana]
  misc_feature (1)..(219): Homolog of NCBI NO: 15229700 NR Description: putative protein; protein id: At3g50220.1, by cDNA: 35440. [Arabidopsis thaliana] >gi|11282604|pir||T45568
  misc_feature (1)..(207): Homolog of NCBI NO: 18397819 NR Description: expressed protein; protein id: At2g15440.1, by cDNA: 32729. [Arabidopsis thaliana] >gi|25354650|pir||A84529
  misc_feature (1)..(209): Homolog of NCBI NO: 10241434 NR Description: putative protein [Oryza sativa (indica
  misc_feature (1)..(209): Homolog of NCBI NO: 32488916 NR Description: OSJNBb0059K02.7 [Oryza sativa (japonica
  misc_feature (1)..(195): Homolog of NCBI NO: 18409879 NR Description: hypothetical protein; protein id: At1g71690.1
  misc_feature (1)..(195): Homolog of NCBI NO: 25354648 NR Description: hypothetical protein F14O23.3 [imported] - thaliana >gi|7239492|gb|AAF43218.1|AC012654_2 EST gb|AI999169
  misc_feature (1)..(195): Homolog of NCBI NO: 18398986 NR Description: expressed protein; protein id: At1g33800.1, by cDNA: 114466., supported by cDNA: gi_17979548, supported by gi_20453344 [Arabidopsis thaliana] >gi|25354651|pir||E86461
  misc_feature (1)..(206): Homolog of NCBI NO: 15220402 NR Description: unknown protein; protein id: At1g67330.1 thaliana] >gi|9828617|gb|AAG00240.1|AC002130_5 F1N21.15

SEQ ID NO: 95181 - DNA, 1956 bp, Arabidopsis thaliana; identical to SEQ ID NO: 91425
  misc_feature (1)..(1956): Ceres Seq. ID no. 12727555
  misc_feature: MA Experiment ID: 20000495 Result: Down-regulated in Transcription
  misc_feature: MA Experiment 20000495 PARAMETER Experiment Name: At_Guard_Cells_P Parameter: Harvest Date Value: 8/2/2002
  misc_feature: MA Experiment 20000495 PARAMETER Experiment Name: At_Guard_Cells_P Parameter: Organism Value: A. thaliana
  misc_feature: MA Experiment 20000495 PARAMETER Experiment Name: At_Guard_Cells_P Parameter: Tissue Value: Guard Cells vs. Leaves

SEQ ID NO: 95182 - protein, 549 aa, Arabidopsis thaliana; identical to SEQ ID NO: 91426
  peptide (1)..(549): Ceres Seq. ID no. 12727556
  misc_feature (23)..(549): Homolog of NCBI NO: 18425169 NR Description: SKP1 interacting partner 2 (SKIP2); protein id: supported by cDNA: gi_10716948, supported by cDNA: gi_15810226
  misc_feature (23)..(547): Homolog of NCBI NO: 18409012 NR Description: F-box protein family, AtFBL16; protein id:
  misc_feature (52)..(548): Homolog of NCBI NO: 30013671 NR Description: Avr9/Cf-9 rapidly elicited protein 189 [Nicotiana
  misc_feature (23)..(324): Homolog of NCBI NO: 15810227 NR Description: putative SKP1 interacting partner SKIP2
  misc_feature (7)..(538): Homolog of NCBI NO: 18412996 NR Description: F-box protein family, AtFBL8/AtFBL24; protein id: [Arabidopsis thaliana] >gi|25407371|pir||B85072 hypothetical
  misc_feature (23)..(538): Homolog of NCBI NO: 15220130 NR Description: F-box protein family; protein id: At1g47056.1
  misc_feature (49)..(472): Homolog of NCBI NO: 21743072 NR Description: OSJNBb0002J11.1 [Oryza sativa (japonica
  misc_feature (68)..(441): Homolog of NCBI NO: 25151694 NR Description: Rad-51 (Fifty one) like, Short RFS-1, F-box domain
  misc_feature (68)..(441): Homolog of NCBI NO: 25151696 NR Description: Rad-51 (Fifty one) like, Short RFS-1, F-box domain
  misc_feature (68)..(431): Homolog of NCBI NO: 630513 NR Description: hypothetical protein C02F5.7 - Caenorhabditis

SEQ ID NO: 95183 - protein, 527 aa, Arabidopsis thaliana; identical to SEQ ID NO: 91427
  peptide (1)..(527): Ceres Seq. ID no. 12727557
  misc_feature (1)..(527): Homolog of NCBI NO: 18425169 NR Description: SKP1 interacting partner 2 (SKIP2); protein id: supported by cDNA: gi_10716948, supported by cDNA: gi_15810226
  misc_feature (1)..(525): Homolog of NCBI NO: 18409012 NR Description: F-box protein family, AtFBL16; protein id:
  misc_feature (30)..(526): Homolog of NCBI NO: 30013671 NR Description: Avr9/Cf-9 rapidly elicited protein 189 [Nicotiana
  misc_feature (1)..(302): Homolog of NCBI NO: 15810227 NR Description: putative SKP1 interacting partner SKIP2
  misc_feature (1)..(516): Homolog of NCBI NO: 18412996 NR Description: F-box protein family, AtFBL8/AtFBL24; protein id: [Arabidopsis thaliana] >gi|25407371|pir||B85072 hypothetical
  misc_feature (1)..(516): Homolog of NCBI NO: 15220130 NR Description: F-box protein family; protein id: At1g47056.1
  misc_feature (27)..(450): Homolog of NCBI NO: 21743072 NR Description: OSJNBb0002J11.1 [Oryza sativa (japonica
  misc_feature (46)..(419): Homolog of NCBI NO: 25151694 NR Description: Rad-51 (Fifty one) like, Short RFS-1, F-box domain
  misc_feature (46)..(419): Homolog of NCBI NO: 25151696 NR Description: Rad-51 (Fifty one) like, Short RFS-1, F-box domain
  misc_feature (46)..(409): Homolog of NCBI NO: 630513 NR Description: hypothetical protein C02F5.7 - Caenorhabditis

SEQ ID NO: 95184 - protein, 496 aa, Arabidopsis thaliana; identical to SEQ ID NO: 91428
  peptide (1)..(496): Ceres Seq. ID no. 12727558
  misc_feature (1)..(496): Homolog of NCBI NO: 18425169 NR Description: SKP1 interacting partner 2 (SKIP2); protein id: supported by cDNA: gi_10716948, supported by cDNA: gi_15810226
  misc_feature (1)..(494): Homolog of NCBI NO: 18409012 NR Description: F-box protein family, AtFBL16; protein id:
  misc_feature (1)..(495): Homolog of NCBI NO: 30013671 NR Description: Avr9/Cf-9 rapidly elicited protein 189 [Nicotiana
  misc_feature (1)..(271): Homolog of NCBI NO: 15810227 NR Description: putative SKP1 interacting partner SKIP2
  misc_feature (1)..(485): Homolog of NCBI NO: 18412996 NR Description: F-box protein family, AtFBL8/AtFBL24; protein id: [Arabidopsis thaliana] >gi|25407371|pir||B85072 hypothetical
  misc_feature (1)..(485): Homolog of NCBI NO: 15220130 NR Description: F-box protein family; protein id: At1g47056.1
  misc_feature (1)..(419): Homolog of NCBI NO: 21743072 NR Description: OSJNBb0002J11.1 [Oryza sativa (japonica
  misc_feature (15)..(388): Homolog of NCBI NO: 25151694 NR Description: Rad-51 (Fifty one) like, Short RFS-1, F-box domain
  misc_feature (15)..(388): Homolog of NCBI NO: 25151696 NR Description: Rad-51 (Fifty one) like, Short RFS-1, F-box domain
  misc_feature (15)..(378): Homolog of NCBI NO: 630513 NR Description: hypothetical protein C02F5.7 - Caenorhabditis

SEQ ID NO: 95185 - DNA, 1207 bp, Arabidopsis thaliana; identical to SEQ ID NO: 91429
  misc_feature (1)..(1207): Ceres Seq. ID no. 12727579
  misc_feature: MA Experiment ID: 20000171 Result: Up-regulated in Transcription
  misc_feature: MA Experiment 20000171 PARAMETER Experiment Name: At_42deg_Heat_P Parameter: Age (day) Value: 14
  misc_feature: MA Experiment 20000171 PARAMETER Experiment Name: At_42deg_Heat_P Parameter: Organism Value: A. thaliana
  misc_feature: MA Experiment 20000171 PARAMETER Experiment Name: At_42deg_Heat_P Parameter: Plant Line Value: WS
  misc_feature: MA Experiment 20000171 PARAMETER Experiment Name: At_42deg_Heat_P Parameter: Temperature (deg C) Value: 42 vs. 22
  misc_feature: MA Experiment 20000171 PARAMETER Experiment Name: At_42deg_Heat_P Parameter: Timepoint (hr) Value: 1
  misc_feature: MA Experiment 20000171 PARAMETER Experiment Name: At_42deg_Heat_P Parameter: Tissue Value: Aerial
  misc_feature: MA Experiment ID: 20000173 Result: Up-regulated in Transcription
  misc_feature: MA Experiment 20000173 PARAMETER Experiment Name: At_42deg_Heat_P Parameter: Age (day) Value: 14
  misc_feature: MA Experiment 20000173 PARAMETER Experiment Name: At_42deg_Heat_P Parameter: Organism Value: A. thaliana
  misc_feature: MA Experiment 20000173 PARAMETER Experiment Name: At_42deg_Heat_P Parameter: Plant Line Value: WS
  misc_feature: MA Experiment 20000173 PARAMETER Experiment Name: At_42deg_Heat_P Parameter: Temperature (deg C) Value: 42 vs. 22
  misc_feature: MA Experiment 20000173 PARAMETER Experiment Name: At_42deg_Heat_P Parameter: Timepoint (hr) Value: 6
  misc_feature: MA Experiment 20000173 PARAMETER Experiment Name: At_42deg_Heat_P Parameter: Tissue Value: Aerial
  misc_feature: MA Experiment ID: 20000180 Result: Up-regulated in Transcription
  misc_feature: MA Experiment 20000180 PARAMETER Experiment Name: At_Germinating_Seeds_P Parameter: Age (hr) Value: 24 vs. 0
  misc_feature: MA Experiment 20000180 PARAMETER Experiment Name: At_Germinating_Seeds_P Parameter: Tissue Value: Germinating Seeds
  misc_feature: MA Experiment ID: 20000185 Result: Up-regulated in Transcription
  misc_feature: MA Experiment 20000185 PARAMETER Experiment Name: At_Roots__P Parameter: Age (day) Value: 7 vs. 21
  misc_feature: MA Experiment 20000185 PARAMETER Experiment Name: At_Roots__P Parameter: Organism Value: A. thaliana
  misc_feature: MA Experiment 20000185 PARAMETER Experiment Name: At_Roots__P Parameter: Tissue Value: Roots vs. Whole Plant
  misc_feature: MA Experiment ID: 20000439 Result: Up-regulated in Transcription
  misc_feature: MA Experiment 20000439 PARAMETER Experiment Name: At_Roots__P Parameter: Age (day) Value: 14 vs. 21
  misc_feature: MA Experiment 20000439 PARAMETER Experiment Name: At_Roots__P Parameter: Organism Value: A. thaliana
  misc_feature: MA Experiment 20000439 PARAMETER Experiment Name: At_Roots__P Parameter: Tissue Value: Roots vs. Whole Plant
  misc_feature: MA Experiment ID: 20000460 Result: Down-regulated in Transcription
  misc_feature: MA Experiment 20000460 PARAMETER Experiment Name: At_10percent_PEG_P Parameter: Age (day) Value: 12
  misc_feature: MA Experiment 20000460 PARAMETER Experiment Name: At_10percent_PEG_P Parameter: Organism Value: A. thaliana
  misc_feature: MA Experiment 20000460 PARAMETER Experiment Name: At_10percent_PEG_P Parameter: Plant Line Value: WS
  misc_feature: MA Experiment 20000460 PARAMETER Experiment Name: At_10percent_PEG_P Parameter: Timepoint (day) Value: 12
  misc_feature: MA Experiment 20000460 PARAMETER Experiment Name: At_10percent_PEG_P Parameter: Tissue Value: Whole Plant
  misc_feature: MA Experiment 20000460 PARAMETER Experiment Name: At_10percent_PEG_P Parameter: Treatment Value: 10percent PEG vs. No Treatment
  misc_feature: MA Experiment ID: 20000527 Result: Down-regulated in Transcription
  misc_feature: MA Experiment 20000527 PARAMETER Experiment Name: At_10percent_PEG_P Parameter: Age (day) Value: 20
  misc_feature: MA Experiment 20000527 PARAMETER Experiment Name: At_10percent_PEG_P Parameter: Organism Value: A. thaliana
  misc_feature: MA Experiment 20000527 PARAMETER Experiment Name: At_10percent_PEG_P Parameter: Plant Line Value: WS
  misc_feature: MA Experiment 20000527 PARAMETER Experiment Name: At_10percent_PEG_P Parameter: Timepoint (day) Value: 20
  misc_feature: MA Experiment 20000527 PARAMETER Experiment Name: At_10percent_PEG_P Parameter: Tissue Value: Whole Plant
  misc_feature: MA Experiment 20000527 PARAMETER Experiment Name: At_10percent_PEG_P Parameter: Treatment Value: 10percent PEG vs. No Treatment
  misc_feature: MA Experiment ID: 20001450 Result: Down-regulated in Transcription
  misc_feature: MA Experiment 20001450 PARAMETER Experiment Name: At_Far-red-induction_P Parameter: Age (day) Value: 7
  misc_feature: MA Experiment 20001450 PARAMETER Experiment Name: At_Far-red-induction_P Parameter: Light Value: Far-red vs. White
  misc_feature: MA Experiment 20001450 PARAMETER Experiment Name: At_Far-red-induction_P Parameter: Organism Value: A. thaliana
  misc_feature: MA Experiment 20001450 PARAMETER Experiment Name: At_Far-red-induction_P Parameter: Plant Line Value: Columbia
  misc_feature: MA Experiment 20001450 PARAMETER Experiment Name: At_Far-red-induction_P Parameter: Timepoint (hr) Value: 8
  misc_feature: MA Experiment 20001450 PARAMETER Experiment Name: At_Far-red-induction_P Parameter: Tissue Value: Whole Plant

SEQ ID NO: 95186 - protein, 329 aa, Arabidopsis thaliana; identical to SEQ ID NO: 91430
  peptide (1)..(329): Ceres Seq. ID no. 12727580
  misc_feature (43)..(293): Pfam Name: Peroxidase Pfam Description: Peroxidase
  misc_feature (1)..(329): Homolog of NCBI NO: 15240737 NR Description: peroxidase, putative; protein id: At5g67400.1 thaliana] >gi|26397661|sp|Q43873|PE73_ARATH Peroxidase 73 (Atperox P73) (PRXR11) (ATP10a) >gi|1402902|emb|CAA66967.1|
  misc_feature (1)..(329): Homolog of NCBI NO: 15229646 NR Description: peroxidase, putative; protein id: At3g49960.1 thaliana] >gi|25453201|sp|Q96510|PE35_ARATH Peroxidase 35
  misc_feature (7)..(329): Homolog of NCBI NO: 15235597 NR Description: peroxidase, putative; protein id: At4g37520.1, by cDNA: 2583., supported by cDNA: gi_17065479, supported by gi_20148496 [Arabidopsis thaliana]
  misc_feature (7)..(329): Homolog of NCBI NO: 21554605 NR Description: peroxidase, prxr2 [Arabidopsis thaliana]
  misc_feature (6)..(329): Homolog of NCBI NO: 15235600 NR Description: peroxidase, putative; protein id: At4g37530.1, by cDNA: gi_18874553 [Arabidopsis thaliana] Peroxidase 51 precursor (Atperox P51) (ATP37)
  misc_feature (21)..(329): Homolog of NCBI NO: 1546708 NR Description: peroxidase ATP9a [Arabidopsis thaliana]
  misc_feature (6)..(329): Homolog of NCBI NO: 17979440 NR Description: putative peroxidase [Arabidopsis thaliana]
  misc_feature (6)..(329): Homolog of NCBI NO: 28629828 NR Description: peroxidase 1 [Artemisia annua]
  misc_feature (1)..(329): Homolog of NCBI NO: 14485511 NR Description: putative peroxidase [Solanum tuberosum]
  misc_feature (1)..(325): Homolog of NCBI NO: 4138647 NR Description: peroxidase [Trifolium repens]

SEQ ID NO: 95187 - protein, 312 aa, Arabidopsis thaliana; identical to SEQ ID NO: 91431
  peptide (1)..(312): Ceres Seq. ID no. 12727581
  misc_feature (26)..(276): Pfam Name: Peroxidase Pfam Description: Peroxidase
  misc_feature (1)..(312): Homolog of NCBI NO: 15240737 NR Description: peroxidase, putative; protein id: At5g67400.1 thaliana] >gi|26397661|sp|Q43873|PE73_ARATH Peroxidase 73 (Atperox P73) (PRXR11) (ATP10a) >gi|1402902|emb|CAA66967.1|
  misc_feature (1)..(312): Homolog of NCBI NO: 15229646 NR Description: peroxidase, putative; protein id: At3g49960.1 thaliana] >gi|25453201|sp|Q96510|PE35_ARATH Peroxidase 35
  misc_feature (1)..(312): Homolog of NCBI NO: 15235597 NR Description: peroxidase, putative; protein id: At4g37520.1, by cDNA: 2583., supported by cDNA: gi_17065479, supported by gi_20148496 [Arabidopsis thaliana]
  misc_feature (1)..(312): Homolog of NCBI NO: 21554605 NR Description: peroxidase, prxr2 [Arabidopsis thaliana]
  misc_feature (1)..(312): Homolog of NCBI NO: 15235600 NR Description: peroxidase, putative; protein id: At4g37530.1, by cDNA: gi_18874553 [Arabidopsis thaliana] Peroxidase 51 precursor (Atperox P51) (ATP37)
  misc_feature (4)..(312): Homolog of NCBI NO: 1546708 NR Description: peroxidase ATP9a [Arabidopsis thaliana]
  misc_feature (1)..(312): Homolog of NCBI NO: 17979440 NR Description: putative peroxidase [Arabidopsis thaliana]
  misc_feature (1)..(312): Homolog of NCBI NO: 28629828 NR Description: peroxidase 1 [Artemisia annua]
  misc_feature (1)..(312): Homolog of NCBI NO: 14485511 NR Description: putative peroxidase [Solanum tuberosum]
  misc_feature (1)..(308): Homolog of NCBI NO: 4138647 NR Description: peroxidase [Trifolium repens]

SEQ ID NO: 95188 - protein, 251 aa, Arabidopsis thaliana; identical to SEQ ID NO: 91432
  peptide (1)..(251): Ceres Seq. ID no. 12727582
  misc_feature (1)..(215): Pfam Name: Peroxidase Pfam Description: Peroxidase
  misc_feature (1)..(251): Homolog of NCBI NO: 15240737 NR Description: peroxidase, putative; protein id: At5g67400.1 thaliana] >gi|26397661|sp|Q43873|PE73_ARATH Peroxidase 73 (Atperox P73) (PRXR11) (ATP10a) >gi|1402902|emb|CAA66967.1|
  misc_feature (1)..(251): Homolog of NCBI NO: 15229646 NR Description: peroxidase, putative; protein id: At3g49960.1 thaliana] >gi|25453201|sp|Q96510|PE35_ARATH Peroxidase 35
  misc_feature (1)..(251): Homolog of NCBI NO: 15235597 NR Description: peroxidase, putative; protein id: At4g37520.1, by cDNA: 2583., supported by cDNA: gi_17065479, supported by gi_20148496 [Arabidopsis thaliana]
  misc_feature (1)..(251): Homolog of NCBI NO: 21554605 NR Description: peroxidase, prxr2 [Arabidopsis thaliana]
  misc_feature (1)..(251): Homolog of NCBI NO: 15235600 NR Description: peroxidase, putative; protein id: At4g37530.1, by cDNA: gi_18874553 [Arabidopsis thaliana] Peroxidase 51 precursor (Atperox P51) (ATP37)
  misc_feature (1)..(251): Homolog of NCBI NO: 1546708 NR Description: peroxidase ATP9a [Arabidopsis thaliana]
  misc_feature (1)..(251): Homolog of NCBI NO: 17979440 NR Description: putative peroxidase [Arabidopsis thaliana]
  misc_feature (1)..(251): Homolog of NCBI NO: 28629828 NR Description: peroxidase 1 [Artemisia annua]
  misc_feature (1)..(251): Homolog of NCBI NO: 14485511 NR Description: putative peroxidase [Solanum tuberosum]
  misc_feature (1)..(247): Homolog of NCBI NO: 4138647 NR Description: peroxidase [Trifolium repens]

SEQ ID NO: 95189 - DNA, 1356 bp, Arabidopsis thaliana; identical to SEQ ID NO: 91433
  misc_feature (1)..(1356): Ceres Seq. ID no. 12727622
  misc_feature: MA Experiment ID: 20000171 Result: Up-regulated in Transcription
  misc_feature: MA Experiment 20000171 PARAMETER Experiment Name: At_42deg_Heat_P Parameter: Age (day) Value: 14
  misc_feature: MA Experiment 20000171 PARAMETER Experiment Name: At_42deg_Heat_P Parameter: Organism Value: A. thaliana
  misc_feature: MA Experiment 20000171 PARAMETER Experiment Name: At_42deg_Heat_P Parameter: Plant Line Value: WS
  misc_feature: MA Experiment 20000171 PARAMETER Experiment Name: At_42deg_Heat_P Parameter: Temperature (deg C) Value: 42 vs. 22
  misc_feature: MA Experiment 20000171 PARAMETER Experiment Name: At_42deg_Heat_P Parameter: Timepoint (hr) Value: 1
  misc_feature: MA Experiment 20000171 PARAMETER Experiment Name: At_42deg_Heat_P Parameter: Tissue Value: Aerial
  misc_feature: MA Experiment ID: 20000184 Result: Down-regulated in Transcription
  misc_feature: MA Experiment 20000184 PARAMETER Experiment Name: At_Shoots__P Parameter: Age (day) Value: 7
  misc_feature: MA Experiment 20000184 PARAMETER Experiment Name: At_Shoots__P Parameter: Tissue Value: Shoots vs. Whole Plant
  misc_feature: MA Experiment ID: 20000185 Result: Down-regulated in Transcription
  misc_feature: MA Experiment 20000185 PARAMETER Experiment Name: At_Roots__P Parameter: Age (day) Value: 7 vs. 21
  misc_feature: MA Experiment 20000185 PARAMETER Experiment Name: At_Roots__P Parameter: Organism Value: A. thaliana
  misc_feature: MA Experiment 20000185 PARAMETER Experiment Name: At_Roots__P Parameter: Tissue Value: Roots vs. Whole Plant
  misc_feature: MA Experiment ID: 20000227 Result: Up-regulated in Transcription
  misc_feature: MA Experiment 20000227 PARAMETER Experiment Name: At_Root-Tips-vs-Tops_P Parameter: Tissue Value: Root Tips vs. Root Tops
  misc_feature: MA Experiment ID: 20000438 Result: Down-regulated in Transcription
  misc_feature: MA Experiment 20000438 PARAMETER Experiment Name: At_Shoots__P Parameter: Age (day) Value: 14
  misc_feature: MA Experiment 20000438 PARAMETER Experiment Name: At_Shoots__P Parameter: Tissue Value: Shoots vs. Whole Plant
  misc_feature: MA Experiment ID: 20000439 Result: Down-regulated in Transcription
  misc_feature: MA Experiment 20000439 PARAMETER Experiment Name: At_Roots__P Parameter: Age (day) Value: 14 vs. 21
  misc_feature: MA Experiment 20000439 PARAMETER Experiment Name: At_Roots__P Parameter: Organism Value: A. thaliana
  misc_feature: MA Experiment 20000439 PARAMETER Experiment Name: At_Roots__P Parameter: Tissue Value: Roots vs. Whole Plant
  misc_feature: MA Experiment ID: 20000451 Result: Down-regulated in Transcription
  misc_feature: MA Experiment 20000451 PARAMETER Experiment Name: At_CS6879_Shoots-Roots_P Parameter: Age (day) Value: 14
  misc_feature: MA Experiment 20000451 PARAMETER Experiment Name: At_CS6879_Shoots-Roots_P Parameter: Organism Value: A. thaliana
  misc_feature: MA Experiment 20000451 PARAMETER Experiment Name: At_CS6879_Shoots-Roots_P Parameter: Plant Line Value: CS6879 vs. WS
  misc_feature: MA Experiment 20000451 PARAMETER Experiment Name: At_CS6879_Shoots-Roots_P Parameter: Tissue Value: Roots
  misc_feature: MA Experiment ID: 20000495 Result: Down-regulated in Transcription
  misc_feature: MA Experiment 20000495 PARAMETER Experiment Name: At_Guard_Cells_P Parameter: Harvest Date Value: 8/2/2002
  misc_feature: MA Experiment 20000495 PARAMETER Experiment Name: At_Guard_Cells_P Parameter: Organism Value: A. thaliana
  misc_feature: MA Experiment 20000495 PARAMETER Experiment Name: At_Guard_Cells_P Parameter: Tissue Value: Guard Cells vs. Leaves
  misc_feature: MA Experiment ID: 20001451 Result: Down-regulated in Transcription
  misc_feature: MA Experiment 20001451 PARAMETER Experiment Name: At_Far-red-induction_P Parameter: Age (day) Value: 7
  misc_feature: MA Experiment 20001451 PARAMETER Experiment Name: At_Far-red-induction_P Parameter: Light Value: Far-red vs. White
  misc_feature: MA Experiment 20001451 PARAMETER Experiment Name: At_Far-red-induction_P Parameter: Organism Value: A. thaliana
  misc_feature: MA Experiment 20001451 PARAMETER Experiment Name: At_Far-red-induction_P Parameter: Plant Line Value: Columbia
  misc_feature: MA Experiment 20001451 PARAMETER Experiment Name: At_Far-red-induction_P Parameter: Timepoint (hr) Value: 24
  misc_feature: MA Experiment 20001451 PARAMETER Experiment Name: At_Far-red-induction_P Parameter: Tissue Value: Whole Plant

SEQ ID NO: 95190 - protein, 451 aa, Arabidopsis thaliana; identical to SEQ ID NO: 91434
  peptide (1)..(451): Ceres Seq. ID no. 12727623
  misc_feature (19)..(274): Pfam Name: Protein kinase domain Pfam Description: Protein kinase domain
  misc_feature (1)..(451): Homolog of NCBI NO: 30677901 NR Description: CBL-interacting protein kinase 9 [Arabidopsis
  misc_feature (1)..(451): Homolog of NCBI NO: 25387057 NR Description: protein T25K16.13 [imported] - Arabidopsis >gi|6715641|gb|AAF26468.1|AC007323_9 T25K16.13 [Arabidopsis
  misc_feature (1)..(451): Homolog of NCBI NO: 15223317 NR Description: serine threonine kinase, putative; protein id: supported by cDNA: gi_14423523, supported by cDNA: gi_20259787
  misc_feature (1)..(451): Homolog of NCBI NO: 14423524 NR Description: similar to wpk4 protein kinase [Arabidopsis >gi|20259788|gb|AAM13241.1| similar to wpk4 protein kinase
  misc_feature (1)..(451): Homolog of NCBI NO: 30677898 NR Description: CBL-interacting protein kinase 9 [Arabidopsis
  misc_feature (2)..(451): Homolog of NCBI NO: 34902248 NR Description: Putative serine/threonine kinase [Oryza sativa
  misc_feature (8)..(448): Homolog of NCBI NO: 18397430 NR Description: serine/threonine kinase, putative; protein id: supported by cDNA: gi_14486385, supported by cDNA: gi_15912282,
  misc_feature (8)..(448): Homolog of NCBI NO: 25387051 NR Description: probable serine/threonine kinase [imported] - thaliana >gi|12320856|gb|AAG50566.1|AC073506_8 serine/threonine
  misc_feature (8)..(443): Homolog of NCBI NO: 7446371 NR Description: probable serine/threonine kinase (EC 2.7.1.-) - sorghum >gi|2632252|emb|CAA73067.1| serine/threonine kinase
  misc_feature (8)..(443): Homolog of NCBI NO: 7446372 NR Description: probable serine/threonine kinase (EC 2.7.1.-) - sorghum >gi|2632254|emb|CAA73068.1| serine/threonine kinase

SEQ ID NO: 95191 - protein, 431 aa, Arabidopsis thaliana; identical to SEQ ID NO: 91435
  peptide (1)..(431): Ceres Seq. ID no. 12727624
  misc_feature (1)..(254): Pfam Name: Protein kinase domain Pfam Description: Protein kinase domain
  misc_feature (1)..(431): Homolog of NCBI NO: 30677901 NR Description: CBL-interacting protein kinase 9 [Arabidopsis
  misc_feature (1)..(431): Homolog of NCBI NO: 25387057 NR Description: protein T25K16.13 [imported] - Arabidopsis >gi|6715641|gb|AAF26468.1|AC007323_9 T25K16.13 [Arabidopsis
  misc_feature (1)..(431): Homolog of NCBI NO: 15223317 NR Description: serine threonine kinase, putative; protein id: supported by cDNA: gi_14423523, supported by cDNA: gi_20259787
  misc_feature (1)..(431): Homolog of NCBI NO: 14423524 NR Description: similar to wpk4 protein kinase [Arabidopsis >gi|20259788|gb|AAM13241.1| similar to wpk4 protein kinase
  misc_feature (1)..(431): Homolog of NCBI NO: 30677898 NR Description: CBL-interacting protein kinase 9 [Arabidopsis
  misc_feature (1)..(431): Homolog of NCBI NO: 34902248 NR Description: Putative serine/threonine kinase [Oryza sativa
  misc_feature (1)..(428): Homolog of NCBI NO: 18397430 NR Description: serine/threonine kinase, putative; protein id: supported by cDNA: gi_14486385, supported by cDNA: gi_15912282,
  misc_feature (1)..(428): Homolog of NCBI NO: 25387051 NR Description: probable serine/threonine kinase [imported] - thaliana >gi|12320856|gb|AAG50566.1|AC073506_8 serine/threonine
  misc_feature (1)..(423): Homolog of NCBI NO: 7446371 NR Description: probable serine/threonine kinase (EC 2.7.1.-) - sorghum >gi|2632252|emb|CAA73067.1| serine/threonine kinase
  misc_feature (1)..(423): Homolog of NCBI NO: 7446372 NR Description: probable serine/threonine kinase (EC 2.7.1.-) - sorghum >gi|2632254|emb|CAA73068.1| serine/threonine kinase

SEQ ID NO: 95192 - protein, 392 aa, Arabidopsis thaliana; identical to SEQ ID NO: 91436
  peptide (1)..(392): Ceres Seq. ID no. 12727625
  misc_feature (1)..(215): Pfam Name: Protein kinase domain Pfam Description: Protein kinase domain
  misc_feature (1)..(392): Homolog of NCBI NO: 30677901 NR Description: CBL-interacting protein kinase 9 [Arabidopsis
  misc_feature (1)..(392): Homolog of NCBI NO: 25387057 NR Description: protein T25K16.13 [imported] - Arabidopsis >gi|6715641|gb|AAF26468.1|AC007323_9 T25K16.13 [Arabidopsis
  misc_feature (1)..(392): Homolog of NCBI NO: 15223317 NR Description: serine threonine kinase, putative; protein id: supported by cDNA: gi_14423523, supported by cDNA: gi_20259787
  misc_feature (1)..(392): Homolog of NCBI NO: 14423524 NR Description: similar to wpk4 protein kinase [Arabidopsis >gi|20259788|gb|AAM13241.1| similar to wpk4 protein kinase
  misc_feature (1)..(392): Homolog of NCBI NO: 30677898 NR Description: CBL-interacting protein kinase 9 [Arabidopsis
  misc_feature (1)..(392): Homolog of NCBI NO: 34902248 NR Description: Putative serine/threonine kinase [Oryza sativa
  misc_feature (1)..(389): Homolog of NCBI NO: 18397430 NR Description: serine/threonine kinase, putative; protein id: supported by cDNA: gi_14486385, supported by cDNA: gi_15912282,
  misc_feature (1)..(389): Homolog of NCBI NO: 25387051 NR Description: probable serine/threonine kinase [imported] - thaliana >gi|12320856|gb|AAG50566.1|AC073506_8 serine/threonine
  misc_feature (1)..(384): Homolog of NCBI NO: 7446371 NR Description: probable serine/threonine kinase (EC 2.7.1.-) - sorghum >gi|2632252|emb|CAA73067.1| serine/threonine kinase
  misc_feature (1)..(384): Homolog of NCBI NO: 7446372 NR Description: probable serine/threonine kinase (EC 2.7.1.-) - sorghum >gi|2632254|emb|CAA73068.1| serine/threonine kinase

SEQ ID NO: 95193 - DNA, 780 bp, Arabidopsis thaliana; identical to SEQ ID NO: 91437
  misc_feature (1)..(780): Ceres Seq. ID no. 12727654
  misc_feature: MA Experiment ID: 20000439 Result: Up-regulated in Transcription
  misc_feature: MA Experiment 20000439 PARAMETER Experiment Name: At_Roots__P Parameter: Age (day) Value: 14 vs. 21
  misc_feature: MA Experiment 20000439 PARAMETER Experiment Name: At_Roots__P Parameter: Organism Value: A. thaliana
  misc_feature: MA Experiment 20000439 PARAMETER Experiment Name: At_Roots__P Parameter: Tissue Value: Roots vs. Whole Plant

SEQ ID NO: 95194 - protein, 259 aa, Arabidopsis thaliana; identical to SEQ ID NO: 91438
  peptide (1)..(259): Ceres Seq. ID no. 12727655
  misc_feature (59)..(104): Pfam Name: Zinc finger, C3HC4 type (RING finger) Pfam Description: Zinc finger, C3HC4 type (RING finger)
  misc_feature (1)..(259): Homolog of NCBI NO: 22325409 NR Description: similar to nucleoside triphosphatase, putative;
  misc_feature (1)..(243): Homolog of NCBI NO: 15240828 NR Description: putative protein; protein id: At5g38070.1 thaliana] >gi|8885610|dbj|BAA97540.1| contains similarity to
  misc_feature (37)..(225): Homolog of NCBI NO: 15227065 NR Description: unknown protein; protein id: At2g02960.1, by cDNA: gi_17529099, supported by cDNA: gi_20259116 [Arabidopsis >gi|25365876|pir||F84442 hypothetical protein At2g02960
  misc_feature (54)..(225): Homolog of NCBI NO: 18424590 NR Description: expressed protein; protein id: At5g62460.1, by cDNA: gi_16974606 [Arabidopsis thaliana] gene_id:K19B1.7~unknown protein [Arabidopsis thaliana]
  misc_feature (1)..(225): Homolog of NCBI NO: 15232824 NR Description: putative protein; protein id: At3g47550.1
  misc_feature (1)..(225): Homolog of NCBI NO: 30692888 NR Description: expressed protein [Arabidopsis thaliana]
  misc_feature (4)..(228): Homolog of NCBI NO: 15223693 NR Description: nucleoside triphosphatase, putative; protein id:
  misc_feature (4)..(228): Homolog of NCBI NO: 26451292 NR Description: unknown protein [Arabidopsis thaliana]
  misc_feature (4)..(228): Homolog of NCBI NO: 21537046 NR Description: nucleoside triphosphatase, putative [Arabidopsis
  misc_feature (55)..(228): Homolog of NCBI NO: 34905532 NR Description: B1146F03.23 [Oryza sativa (japonica

SEQ ID NO: 95195 - protein, 232 aa, Arabidopsis thaliana; identical to SEQ ID NO: 91439
  peptide (1)..(232): Ceres Seq. ID no. 12727656
  misc_feature (32)..(77): Pfam Name: Zinc finger, C3HC4 type (RING finger) Pfam Description: Zinc finger, C3HC4 type (RING finger)
  misc_feature (1)..(232): Homolog of NCBI NO: 22325409 NR Description: similar to nucleoside triphosphatase, putative;
  misc_feature (1)..(216): Homolog of NCBI NO: 15240828 NR Description: putative protein; protein id: At5g38070.1 thaliana] >gi|8885610|dbj|BAA97540.1| contains similarity to
  misc_feature (10)..(198): Homolog of NCBI NO: 15227065 NR Description: unknown protein; protein id: At2g02960.1, by cDNA: gi_17529099, supported by cDNA: gi_20259116 [Arabidopsis >gi|25365876|pir||F84442 hypothetical protein At2g02960
  misc_feature (27)..(198): Homolog of NCBI NO: 18424590 NR Description: expressed protein; protein id: At5g62460.1, by cDNA: gi_16974606 [Arabidopsis thaliana] gene_id:K19B1.7~unknown protein [Arabidopsis thaliana]
  misc_feature (1)..(198): Homolog of NCBI NO: 15232824 NR Description: putative protein; protein id: At3g47550.1
  misc_feature (1)..(198): Homolog of NCBI NO: 30692888 NR Description: expressed protein [Arabidopsis thaliana]
  misc_feature (1)..(201): Homolog of NCBI NO: 15223693 NR Description: nucleoside triphosphatase, putative; protein id:
  misc_feature (1)..(201): Homolog of NCBI NO: 26451292 NR Description: unknown protein [Arabidopsis thaliana]
  misc_feature (1)..(201): Homolog of NCBI NO: 21537046 NR Description: nucleoside triphosphatase, putative [Arabidopsis
  misc_feature (28)..(201): Homolog of NCBI NO: 34905532 NR Description: B1146F03.23 [Oryza sativa (japonica

SEQ ID NO: 95196 - protein, 212 aa, Arabidopsis thaliana; identical to SEQ ID NO: 91440
  peptide (1)..(212): Ceres Seq. ID no. 12727657
  misc_feature (12)..(57): Pfam Name: Zinc finger, C3HC4 type (RING finger) Pfam Description: Zinc finger, C3HC4 type (RING finger)
  misc_feature (1)..(212): Homolog of NCBI NO: 22325409 NR Description: similar to nucleoside triphosphatase, putative;
  misc_feature (1)..(196): Homolog of NCBI NO: 15240828 NR Description: putative protein; protein id: At5g38070.1 thaliana] >gi|8885610|dbj|BAA97540.1| contains similarity to
  misc_feature (1)..(178): Homolog of NCBI NO: 15227065 NR Description: unknown protein; protein id: At2g02960.1, by cDNA: gi_17529099, supported by cDNA: gi_20259116 [Arabidopsis >gi|25365876|pir||F84442 hypothetical protein At2g02960
  misc_feature (7)..(178): Homolog of NCBI NO: 18424590 NR Description: expressed protein; protein id: At5g62460.1, by cDNA: gi_16974606 [Arabidopsis thaliana] gene_id:K19B1.7~unknown protein [Arabidopsis thaliana]
  misc_feature (1)..(178): Homolog of NCBI NO: 15232824 NR Description: putative protein; protein id: At3g47550.1
  misc_feature (1)..(178): Homolog of NCBI NO: 30692888 NR Description: expressed protein [Arabidopsis thaliana]
  misc_feature (1)..(181): Homolog of NCBI NO: 15223693 NR Description: nucleoside triphosphatase, putative; protein id:
  misc_feature (1)..(181): Homolog of NCBI NO: 26451292 NR Description: unknown protein [Arabidopsis thaliana]
  misc_feature (1)..(181): Homolog of NCBI NO: 21537046 NR Description: nucleoside triphosphatase, putative [Arabidopsis
  misc_feature (8)..(181): Homolog of NCBI NO: 34905532 NR Description: B1146F03.23 [Oryza sativa (japonica

SEQ ID NO: 95197 - DNA, 1755 bp, Arabidopsis thaliana; identical to SEQ ID NO: 91441
  misc_feature (1)..(1755): Ceres Seq. ID no. 12727681
  misc_feature: MA Experiment ID: 20000307 Result: Down-regulated in Transcription
  misc_feature: MA Experiment 20000307 PARAMETER Experiment Name: At_Germinating_Seeds_Sub_P Parameter: Age (hr) Value: 24 vs. 0
  misc_feature: MA Experiment 20000307 PARAMETER Experiment Name: At_Germinating_Seeds_Sub_P Parameter: Organism Value: A. thaliana
  misc_feature: MA Experiment 20000307 PARAMETER Experiment Name: At_Germinating_Seeds_Sub_P Parameter: Plant Line Value: WS
  misc_feature: MA Experiment 20000307 PARAMETER Experiment Name: At_Germinating_Seeds_Sub_P Parameter: Tissue Value: Germinating Seeds

SEQ ID NO: 95198 - protein, 584 aa, Arabidopsis thaliana; identical to SEQ ID NO: 91442
  peptide (1)..(584): Ceres Seq. ID no. 12727682
  misc_feature (350)..(384): Pfam Name: PPR repeat Pfam Description: PPR repeat
  misc_feature (1)..(584): Homolog of NCBI NO: 15226299 NR Description: hypothetical protein; protein id: At2g01510.1
  misc_feature (7)..(569): Homolog of NCBI NO: 7486979 NR Description: hypothetical protein T13K14.230 - Arabidopsis
  misc_feature (28)..(584): Homolog of NCBI NO: 15220337 NR Description: hypothetical protein; protein id: At1g11290.1
  misc_feature (28)..(584): Homolog of NCBI NO: 34897884 NR Description: Similar to Arabidopsis thaliana DNA chromosome 4,
  misc_feature (28)..(584): Homolog of NCBI NO: 34394298 NR Description: putative pentatricopeptide (PPR)
  misc_feature (2)..(584): Homolog of NCBI NO: 11994419 NR Description: selenium-binding protein-like [Arabidopsis
  misc_feature (2)..(583): Homolog of NCBI NO: 15230593 NR Description: unknown protein; protein id: At3g12770.1
  misc_feature (16)..(584): Homolog of NCBI NO: 15226158 NR Description: hypothetical protein; protein id: At2g33760.1
  misc_feature (29)..(584): Homolog of NCBI NO: 15234831 NR Description: putative protein; protein id: At4g30700.1
  misc_feature (2)..(584): Homolog of NCBI NO: 34393394 NR Description: putative pentatricopeptide (PPR)

SEQ ID NO: 95199 - protein, 573 aa, Arabidopsis thaliana; identical to SEQ ID NO: 91443
  peptide (1)..(573): Ceres Seq. ID no. 12727683
  misc_feature (339)..(373): Pfam Name: PPR repeat Pfam Description: PPR repeat
  misc_feature (1)..(573): Homolog of NCBI NO: 15226299 NR Description: hypothetical protein; protein id: At2g01510.1
  misc_feature (1)..(558): Homolog of NCBI NO: 7486979 NR Description: hypothetical protein T13K14.230 - Arabidopsis
  misc_feature (17)..(573): Homolog of NCBI NO: 15220337 NR Description: hypothetical protein; protein id: At1g11290.1
  misc_feature (17)..(573): Homolog of NCBI NO: 34897884 NR Description: Similar to Arabidopsis thaliana DNA chromosome 4,
  misc_feature (17)..(573): Homolog of NCBI NO: 34394298 NR Description: putative pentatricopeptide (PPR)
  misc_feature (1)..(573): Homolog of NCBI NO: 11994419 NR Description: selenium-binding protein-like [Arabidopsis
  misc_feature (1)..(572): Homolog of NCBI NO: 15230593 NR Description: unknown protein; protein id: At3g12770.1
  misc_feature (5)..(573): Homolog of NCBI NO: 15226158 NR Description: hypothetical protein; protein id: At2g33760.1
  misc_feature (18)..(573): Homolog of NCBI NO: 15234831 NR Description: putative protein; protein id: At4g30700.1
  misc_feature (1)..(573): Homolog of NCBI NO: 34393394 NR Description: putative pentatricopeptide (PPR)

SEQ ID NO: 95200 - protein, 526 aa, Arabidopsis thaliana; identical to SEQ ID NO: 91444
  peptide (1)..(526): Ceres Seq. ID no. 12727684
  misc_feature (292)..(326): Pfam Name: PPR repeat Pfam Description: PPR repeat
  misc_feature (1)..(526): Homolog of NCBI NO: 15226299 NR Description: hypothetical protein; protein id: At2g01510.1
  misc_feature (1)..(511): Homolog of NCBI NO: 7486979 NR Description: hypothetical protein T13K14.230 - Arabidopsis
  misc_feature (1)..(526): Homolog of NCBI NO: 15220337 NR Description: hypothetical protein; protein id: At1g11290.1
  misc_feature (1)..(526): Homolog of NCBI NO: 34897884 NR Description: Similar to Arabidopsis thaliana DNA chromosome 4,
  misc_feature (1)..(526): Homolog of NCBI NO: 34394298 NR Description: putative pentatricopeptide (PPR)
  misc_feature (1)..(526): Homolog of NCBI NO: 11994419 NR Description: selenium-binding protein-like [Arabidopsis
  misc_feature (1)..(525): Homolog of NCBI NO: 15230593 NR Description: unknown protein; protein id: At3g12770.1
  misc_feature (1)..(526): Homolog of NCBI NO: 15226158 NR Description: hypothetical protein; protein id: At2g33760.1
  misc_feature (1)..(526): Homolog of NCBI NO: 15234831 NR Description: putative protein; protein id: At4g30700.1
  misc_feature (1)..(526): Homolog of NCBI NO: 34393394 NR Description: putative pentatricopeptide (PPR)

SEQ ID NO: 95201 - DNA, 576 bp, Arabidopsis thaliana; identical to SEQ ID NO: 91445
  misc_feature (1)..(576): Ceres Seq. ID no. 12727685

SEQ ID NO: 95202 - protein, 191 aa, Arabidopsis thaliana; identical to SEQ ID NO: 91446
  peptide (1)..(191): Ceres Seq. ID no. 12727686
  misc_feature (1)..(191): Homolog of NCBI NO: 15226312 NR Description: hypothetical protein; protein id: At2g01580.1
  misc_feature (7)..(189): Homolog of NCBI NO: 18397969 NR Description: expressed protein; protein id: At3g07510.1, by cDNA: gi_13877548, supported by cDNA: gi_20148734 [Arabidopsis >gi|13877549|gb|AAK43852.1|AF370475_1 Unknown protein
  misc_feature (18)..(189): Homolog of NCBI NO: 6041846 NR Description: unknown protein [Arabidopsis thaliana]
  misc_feature (22)..(189): Homolog of NCBI NO: 37531676 NR Description: hypothetical protein [Oryza sativa (japonica group)] >gi|21671930|gb|AAM74292.1| Hypothetical protein [Oryza
  misc_feature (25)..(191): Homolog of NCBI NO: 15239293 NR Description: putative protein; protein id: At5g05950.1, by cDNA: 252000. [Arabidopsis thaliana] gene_id:K18J17.12~pir||T12959~similar to unknown protein
  misc_feature (28)..(114): Homolog of NCBI NO: 38345578 NR Description: OSJNBa0027H06.14 [Oryza sativa (japonica
  misc_feature (120)..(188): Homolog of NCBI NO: 38345578 NR Description: OSJNBa0027H06.14 [Oryza sativa (japonica
  misc_feature (26)..(191): Homolog of NCBI NO: 34395171 NR Description: unknown protein [Oryza sativa (japonica
  misc_feature (26)..(191): Homolog of NCBI NO: 34900646 NR Description: hypothetical protein~similar to Arabidopsis
  misc_feature (74)..(189): Homolog of NCBI NO: 15232676 NR Description: putative protein; protein id: At3g46890.1

SEQ ID NO: 95203 - DNA, 1680 bp, Arabidopsis thaliana; identical to SEQ ID NO: 91447
  misc_feature (1)..(1680): Ceres Seq. ID no. 12727701
  misc_feature: MA Experiment ID: 20000180 Result: Down-regulated in Transcription
  misc_feature: MA Experiment 20000180 PARAMETER Experiment Name: At_Germinating_Seeds_P Parameter: Age (hr) Value: 24 vs. 0
  misc_feature: MA Experiment 20000180 PARAMETER Experiment Name: At_Germinating_Seeds_P Parameter: Tissue Value: Germinating Seeds
  misc_feature: MA Experiment ID: 20001558 Result: Up-regulated in Transcription
  misc_feature: MA Experiment 20001558 PARAMETER Experiment Name: At_Drought_Soil_Dry_P Parameter: Age (day) Value: 27
  misc_feature: MA Experiment 20001558 PARAMETER Experiment Name: At_Drought_Soil_Dry_P Parameter: Organism Value: A. thaliana
  misc_feature: MA Experiment 20001558 PARAMETER Experiment Name: At_Drought_Soil_Dry_P Parameter: Plant Line Value: WS
  misc_feature: MA Experiment 20001558 PARAMETER Experiment Name: At_Drought_Soil_Dry_P Parameter: Post Timepoint (hr) Value: 6
  misc_feature: MA Experiment 20001558 PARAMETER Experiment Name: At_Drought_Soil_Dry_P Parameter: Post-Treatment Value: Re-Water vs. No Drought
  misc_feature: MA Experiment 20001558 PARAMETER Experiment Name: At_Drought_Soil_Dry_P Parameter: Timepoint (day) Value: 13
  misc_feature: MA Experiment 20001558 PARAMETER Experiment Name: At_Drought_Soil_Dry_P Parameter: Treatment Value: Drought vs. No Drought

SEQ ID NO: 95204 - protein, 559 aa, Arabidopsis thaliana; identical to SEQ ID NO: 91448
  peptide (1)..(559): Ceres Seq. ID no. 12727702
  misc_feature (57)..(91): Pfam Name: PPR repeat Pfam Description: PPR repeat
  misc_feature (1)..(559): Homolog of NCBI NO: 15226343 NR Description: hypothetical protein; protein id: At2g01740.1
  misc_feature (1)..(545): Homolog of NCBI NO: 25410964 NR Description: hypothetical protein At2g02150 [imported] - thaliana >gi|4038037|gb|AAC97219.1| hypothetical protein
  misc_feature (1)..(545): Homolog of NCBI NO: 30677982 NR Description: pentatricopeptide (PPR) repeat-containing protein
  misc_feature (1)..(512): Homolog of NCBI NO: 15221232 NR Description: putative indole-3-acetate protein id: At1g05670.1 [Arabidopsis thaliana]
  misc_feature (2)..(540): Homolog of NCBI NO: 18407744 NR Description: expressed protein; protein id: At1g63150.1, by cDNA: gi_15810426 [Arabidopsis thaliana]
  misc_feature (31)..(539): Homolog of NCBI NO: 32527604 NR Description: pentatricopeptide repeat-containing protein
  misc_feature (58)..(535): Homolog of NCBI NO: 22531122 NR Description: putative membrane-associated salt-inducible
  misc_feature (58)..(535): Homolog of NCBI NO: 15221515 NR Description: putative membrane-associated salt-inducible (AL021637); similar to EST gb|AA728420; protein id: At1g62590.1
  misc_feature (4)..(556): Homolog of NCBI NO: 15221635 NR Description: unknown protein; protein id: At1g62930.1
  misc_feature (4)..(540): Homolog of NCBI NO: 25404380 NR Description: hypothetical protein F16P17.7 [imported] - thaliana >gi|8493580|gb|AAF75803.1|AC011000_6 Contains weak to leaf protein from Ipomea nil gb|D85101 and contains a RepB

SEQ ID NO: 95205 - protein, 478 aa, Arabidopsis thaliana; identical to SEQ ID NO: 91449
  peptide (1)..(478): Ceres Seq. ID no. 12727703
  misc_feature (1)..(478): Homolog of NCBI NO: 15226343 NR Description: hypothetical protein; protein id: At2g01740.1
  misc_feature (1)..(464): Homolog of NCBI NO: 25410964 NR Description: hypothetical protein At2g02150 [imported] - thaliana >gi|4038037|gb|AAC97219.1| hypothetical protein
  misc_feature (1)..(464): Homolog of NCBI NO: 30677982 NR Description: pentatricopeptide (PPR) repeat-containing protein
  misc_feature (1)..(431): Homolog of NCBI NO: 15221232 NR Description: putative indole-3-acetate protein id: At1g05670.1 [Arabidopsis thaliana]
  misc_feature (1)..(459): Homolog of NCBI NO: 18407744 NR Description: expressed protein; protein id: At1g63150.1, by cDNA: gi_15810426 [Arabidopsis thaliana]
  misc_feature (1)..(458): Homolog of NCBI NO: 32527604 NR Description: pentatricopeptide repeat-containing protein
  misc_feature (1)..(454): Homolog of NCBI NO: 22531122 NR Description: putative membrane-associated salt-inducible
  misc_feature (1)..(454): Homolog of NCBI NO: 15221515 NR Description: putative membrane-associated salt-inducible (AL021637); similar to EST gb|AA728420; protein id: At1g62590.1
  misc_feature (1)..(475): Homolog of NCBI NO: 15221635 NR Description: unknown protein; protein id: At1g62930.1
  misc_feature (1)..(459): Homolog of NCBI NO: 25404380 NR Description: hypothetical protein F16P17.7 [imported] - thaliana >gi|8493580|gb|AAF75803.1|AC011000_6 Contains weak to leaf protein from Ipomea nil gb|D85101 and contains a RepB

SEQ ID NO: 95206 - protein, 418 aa, Arabidopsis thaliana; identical to SEQ ID NO: 91450
  peptide (1)..(418): Ceres Seq. ID no. 12727704
  misc_feature (1)..(418): Homolog of NCBI NO: 15226343 NR Description: hypothetical protein; protein id: At2g01740.1
  misc_feature (1)..(404): Homolog of NCBI NO: 25410964 NR Description: hypothetical protein At2g02150 [imported] - thaliana >gi|4038037|gb|AAC97219.1| hypothetical protein
  misc_feature (1)..(404): Homolog of NCBI NO: 30677982 NR Description: pentatricopeptide (PPR) repeat-containing protein
  misc_feature (1)..(371): Homolog of NCBI NO: 15221232 NR Description: putative indole-3-acetate protein id: At1g05670.1 [Arabidopsis thaliana]
  misc_feature (1)..(399): Homolog of NCBI NO: 18407744 NR Description: expressed protein; protein id: At1g63150.1, by cDNA: gi_15810426 [Arabidopsis thaliana]
  misc_feature (1)..(398): Homolog of NCBI NO: 32527604 NR Description: pentatricopeptide repeat-containing protein
  misc_feature (1)..(394): Homolog of NCBI NO: 22531122 NR Description: putative membrane-associated salt-inducible
  misc_feature (1)..(394): Homolog of NCBI NO: 15221515 NR Description: putative membrane-associated salt-inducible (AL021637); similar to EST gb|AA728420; protein id: At1g62590.1
  misc_feature (1)..(415): Homolog of NCBI NO: 15221635 NR Description: unknown protein; protein id: At1g62930.1
  misc_feature (1)..(399): Homolog of NCBI NO: 25404380 NR Description: hypothetical protein F16P17.7 [imported] - thaliana >gi|8493580|gb|AAF75803.1|AC011000_6 Contains weak to leaf protein from Ipomea nil gb|D85101 and contains a RepB

SEQ ID NO: 95207 - DNA, 1214 bp, Arabidopsis thaliana; identical to SEQ ID NO: 91451
  misc_feature (1)..(1214): Ceres Seq. ID no. 12727733
  misc_feature: MA Experiment ID: 20000307 Result: Up-regulated in Transcription
  misc_feature: MA Experiment 20000307 PARAMETER Experiment Name: At_Germinating_Seeds_Sub_P Parameter: Age (hr) Value: 24 vs. 0
  misc_feature: MA Experiment 20000307 PARAMETER Experiment Name: At_Germinating_Seeds_Sub_P Parameter: Organism Value: A. thaliana
  misc_feature: MA Experiment 20000307 PARAMETER Experiment Name: At_Germinating_Seeds_Sub_P Parameter: Plant Line Value: WS
  misc_feature: MA Experiment 20000307 PARAMETER Experiment Name: At_Germinating_Seeds_Sub_P Parameter: Tissue Value: Germinating Seeds
  misc_feature: MA Experiment ID: 20000314 Result: Up-regulated in Transcription
  misc_feature: MA Experiment 20000314 PARAMETER Experiment Name: At_14day_Shoots-Roots_Sub_P Parameter: Age (day) Value: 14
  misc_feature: MA Experiment 20000314 PARAMETER Experiment Name: At_14day_Shoots-Roots_Sub_P Parameter: Organism Value: A. thaliana
  misc_feature: MA Experiment 20000314 PARAMETER Experiment Name: At_14day_Shoots-Roots_Sub_P Parameter: Plant Line Value: WS
  misc_feature: MA Experiment 20000314 PARAMETER Experiment Name: At_14day_Shoots-Roots_Sub_P Parameter: Tissue Value: Roots vs. Whole Plant
  misc_feature: MA Experiment ID: 20000315 Result: Up-regulated in Transcription
  misc_feature: MA Experiment 20000315 PARAMETER Experiment Name: At_14day_Shoots-Roots_Sub_P Parameter: Age (day) Value: 14
  misc_feature: MA Experiment 20000315 PARAMETER Experiment Name: At_14day_Shoots-Roots_Sub_P Parameter: Organism Value: A. thaliana
  misc_feature: MA Experiment 20000315 PARAMETER Experiment Name: At_14day_Shoots-Roots_Sub_P Parameter: Plant Line Value: WS
  misc_feature: MA Experiment 20000315 PARAMETER Experiment Name: At_14day_Shoots-Roots_Sub_P Parameter: Tissue Value: Shoots vs. Whole Plant
  misc_feature: MA Experiment ID: 20000327 Result: Down-regulated in Transcription
  misc_feature: MA Experiment 20000327 PARAMETER Experiment Name: At_42deg_Heat_Sub_P Parameter: Age (day) Value: 14
  misc_feature: MA Experiment 20000327 PARAMETER Experiment Name: At_42deg_Heat_Sub_P Parameter: Organism Value: A. thaliana
  misc_feature: MA Experiment 20000327 PARAMETER Experiment Name: At_42deg_Heat_Sub_P Parameter: Plant Line Value: WS
  misc_feature: MA Experiment 20000327 PARAMETER Experiment Name: At_42deg_Heat_Sub_P Parameter: Temperature (deg C) Value: 42 vs. 22
  misc_feature: MA Experiment 20000327 PARAMETER Experiment Name: At_42deg_Heat_Sub_P Parameter: Timepoint (hr) Value: 1
  misc_feature: MA Experiment 20000327 PARAMETER Experiment Name: At_42deg_Heat_Sub_P Parameter: Tissue Value: Aerial
  misc_feature: MA Experiment ID: 20000328 Result: Down-regulated in Transcription
  misc_feature: MA Experiment 20000328 PARAMETER Experiment Name: At_42deg_Heat_Sub_P Parameter: Age (day) Value: 14
  misc_feature: MA Experiment 20000328 PARAMETER Experiment Name: At_42deg_Heat_Sub_P Parameter: Organism Value: A. thaliana
  misc_feature: MA Experiment 20000328 PARAMETER Experiment Name: At_42deg_Heat_Sub_P Parameter: Plant Line Value: WS
  misc_feature: MA Experiment 20000328 PARAMETER Experiment Name: At_42deg_Heat_Sub_P Parameter: Temperature (deg C) Value: 42 vs. 22
  misc_feature: MA Experiment 20000328 PARAMETER Experiment Name: At_42deg_Heat_Sub_P Parameter: Timepoint (hr) Value: 6
  misc_feature: MA Experiment 20000328 PARAMETER Experiment Name: At_42deg_Heat_Sub_P Parameter: Tissue Value: Aerial
  misc_feature: MA Experiment ID: 20000355 Result: Down-regulated in Transcription
  misc_feature: MA Experiment 20000355 PARAMETER Experiment Name: At_Siliques_Sub_P Parameter: Age (day) Value: 21
  misc_feature: MA Experiment 20000355 PARAMETER Experiment Name: At_Siliques_Sub_P Parameter: Organism Value: A. thaliana
  misc_feature: MA Experiment 20000355 PARAMETER Experiment Name: At_Siliques_Sub_P Parameter: Plant Line Value: WS
  misc_feature: MA Experiment 20000355 PARAMETER Experiment Name: At_Siliques_Sub_P Parameter: Tissue Value: Less Than 5mm Siliques vs. Whole Plant
  misc_feature: MA Experiment ID: 20000440 Result: Down-regulated in Transcription
  misc_feature: MA Experiment 20000440 PARAMETER Experiment Name: At_Closed-Flower__Sub_P Parameter: Tissue Value: Closed Flower vs. Whole Plant

SEQ ID NO: 95208 - protein, 348 aa, Arabidopsis thaliana; identical to SEQ ID NO: 91452
  peptide (1)..(348): Ceres Seq. ID no. 12727734
  misc_feature (58)..(269): Pfam Name: Calcineurin-like phosphoesterase Pfam Description: Calcineurin-like phosphoesterase
  misc_feature (14)..(348): Homolog of NCBI NO: 22325419 NR Description: putative purple acid phosphatase; protein id: supported by cDNA: gi_17529295, supported by cDNA: gi_20257478 thaliana] >gi|17529296|gb|AAL38875.1| putative purple acid
  misc_feature (14)..(348): Homolog of NCBI NO: 25752251 NR Description: probable acid phosphatase (EC 3.1.3.2) At2g01890
  misc_feature (14)..(322): Homolog of NCBI NO: 6635445 NR Description: putative purple acid phosphatase precursor
  misc_feature (5)..(345): Homolog of NCBI NO: 30683951 NR Description: calcineurin-like phosphoesterase family thaliana] >gi|24030193|gb|AAN41277.1| putative purple acid
  misc_feature (5)..(345): Homolog of NCBI NO: 30911094 NR Description: putative purple acid phosphatase [Arabidopsis
  misc_feature (5)..(345): Homolog of NCBI NO: 25752249 NR Description: probable acid phosphatase (EC 3.1.3.2) F10B6.10
  misc_feature (14)..(341): Homolog of NCBI NO: 22329781 NR Description: hypothetical protein; protein id: At1g25230.1, by cDNA: gi_17978996 [Arabidopsis thaliana] At1g25230/F4F7_8 [Arabidopsis thaliana]

SEQ ID NO: 95209 - protein, 335 aa, Arabidopsis thaliana; identical to SEQ ID NO: 91453
  peptide (1)..(335): Ceres Seq. ID no. 12727735
  misc_feature (45)..(256): Pfam Name: Calcineurin-like phosphoesterase Pfam Description: Calcineurin-like phosphoesterase
  misc_feature (1)..(335): Homolog of NCBI NO: 22325419 NR Description: putative purple acid phosphatase; protein id: supported by cDNA: gi_17529295, supported by cDNA: gi_20257478 thaliana] >gi|17529296|gb|AAL38875.1| putative purple acid
  misc_feature (1)..(335): Homolog of NCBI NO: 25752251 NR Description: probable acid phosphatase (EC 3.1.3.2) At2g01890
  misc_feature (1)..(309): Homolog of NCBI NO: 6635445 NR Description: putative purple acid phosphatase precursor
  misc_feature (1)..(332): Homolog of NCBI NO: 30683951 NR Description: calcineurin-like phosphoesterase family thaliana] >gi|24030193|gb|AAN41277.1| putative purple acid
  misc_feature (1)..(332): Homolog of NCBI NO: 30911094 NR Description: putative purple acid phosphatase [Arabidopsis
  misc_feature (1)..(332): Homolog of NCBI NO: 25752249 NR Description: probable acid phosphatase (EC 3.1.3.2) F10B6.10
  misc_feature (1)..(328): Homolog of NCBI NO: 22329781 NR Description: hypothetical protein; protein id: At1g25230.1, by cDNA: gi_17978996 [Arabidopsis thaliana] At1g25230/F4F7_8 [Arabidopsis thaliana]

SEQ ID NO: 95210 - protein, 268 aa, Arabidopsis thaliana; identical to SEQ ID NO: 91454
  peptide (1)..(268): Ceres Seq. ID no. 12727736
  misc_feature (1)..(189): Pfam Name: Calcineurin-like phosphoesterase Pfam Description: Calcineurin-like phosphoesterase
  misc_feature (1)..(268): Homolog of NCBI NO: 22325419 NR Description: putative purple acid phosphatase; protein id: supported by cDNA: gi_17529295, supported by cDNA: gi_20257478 thaliana] >gi|17529296|gb|AAL38875.1| putative purple acid
  misc_feature (1)..(268): Homolog of NCBI NO: 25752251 NR Description: probable acid phosphatase (EC 3.1.3.2) At2g01890
  misc_feature (1)..(242): Homolog of NCBI NO: 6635445 NR Description: putative purple acid phosphatase precursor
  misc_feature (1)..(265): Homolog of NCBI NO: 30683951 NR Description: calcineurin-like phosphoesterase family thaliana] >gi|24030193|gb|AAN41277.1| putative purple acid
  misc_feature (1)..(265): Homolog of NCBI NO: 30911094 NR Description: putative purple acid phosphatase [Arabidopsis
  misc_feature (1)..(265): Homolog of NCBI NO: 25752249 NR Description: probable acid phosphatase (EC 3.1.3.2) F10B6.10
  misc_feature (1)..(261): Homolog of NCBI NO: 22329781 NR Description: hypothetical protein; protein id: At1g25230.1, by cDNA: gi_17978996 [Arabidopsis thaliana] At1g25230/F4F7_8 [Arabidopsis thaliana]

SEQ ID NO: 95211 - DNA, 1827 bp, Arabidopsis thaliana; identical to SEQ ID NO: 91455
  misc_feature (1)..(1827): Ceres Seq. ID no. 12727741
  misc_feature: MA Experiment ID: 20000180 Result: Up-regulated in Transcription
  misc_feature: MA Experiment 20000180 PARAMETER Experiment Name: At_Germinating_Seeds_P Parameter: Age (hr) Value: 24 vs. 0
  misc_feature: MA Experiment 20000180 PARAMETER Experiment Name: At_Germinating_Seeds_P Parameter: Tissue Value: Germinating Seeds
  misc_feature: MA Experiment ID: 20000437 Result: Down-regulated in Transcription
  misc_feature: MA Experiment 20000437 PARAMETER Experiment Name: At_Drought_P Parameter: Age (day) Value: 8
  misc_feature: MA Experiment 20000437 PARAMETER Experiment Name: At_Drought_P Parameter: Organism Value: A. thaliana
  misc_feature: MA Experiment 20000437 PARAMETER Experiment Name: At_Drought_P Parameter: Plant Line Value: WS
  misc_feature: MA Experiment 20000437 PARAMETER Experiment Name: At_Drought_P Parameter: Timepoint (hr) Value: 24
  misc_feature: MA Experiment 20000437 PARAMETER Experiment Name: At_Drought_P Parameter: Tissue Value: Whole Plant
  misc_feature: MA Experiment 20000437 PARAMETER Experiment Name: At_Drought_P Parameter: Treatment Value: Drought vs. No Drought
  misc_feature: MA Experiment ID: 20001904 Result: Down-regulated in Transcription
  misc_feature: MA Experiment 20001904 PARAMETER Experiment Name: At_Drought_Reproduction_P Parameter: Age (day) Value: 37
  misc_feature: MA Experiment 20001904 PARAMETER Experiment Name: At_Drought_Reproduction_P Parameter: Organism Value: A. thaliana
  misc_feature: MA Experiment 20001904 PARAMETER Experiment Name: At_Drought_Reproduction_P Parameter: Plant Line Value: WS
  misc_feature: MA Experiment 20001904 PARAMETER Experiment Name: At_Drought_Reproduction_P Parameter: Timepoint (day) Value: 7
  misc_feature: MA Experiment 20001904 PARAMETER Experiment Name: At_Drought_Reproduction_P Parameter: Tissue Value: Rosettes
  misc_feature: MA Experiment 20001904 PARAMETER Experiment Name: At_Drought_Reproduction_P Parameter: Treatment Value: Drought vs. No Drought
  misc_feature: MA Experiment ID: 20001905 Result: Down-regulated in Transcription
  misc_feature: MA Experiment 20001905 PARAMETER Experiment Name: At_Drought_Reproduction_P Parameter: Age (day) Value: 40
  misc_feature: MA Experiment 20001905 PARAMETER Experiment Name: At_Drought_Reproduction_P Parameter: Organism Value: A. thaliana
  misc_feature: MA Experiment 20001905 PARAMETER Experiment Name: At_Drought_Reproduction_P Parameter: Plant Line Value: WS
  misc_feature: MA Experiment 20001905 PARAMETER Experiment Name: At_Drought_Reproduction_P Parameter: Timepoint (day) Value: 10
  misc_feature: MA Experiment 20001905 PARAMETER Experiment Name: At_Drought_Reproduction_P Parameter: Tissue Value: Rosettes
  misc_feature: MA Experiment 20001905 PARAMETER Experiment Name: At_Drought_Reproduction_P Parameter: Treatment Value: Drought vs. No Drought
  misc_feature: MA Experiment ID: 20001906 Result: Down-regulated in Transcription
  misc_feature: MA Experiment 20001906 PARAMETER Experiment Name: At_Drought_Reproduction_P Parameter: Age (day) Value: 35
  misc_feature: MA Experiment 20001906 PARAMETER Experiment Name: At_Drought_Reproduction_P Parameter: Organism Value: A. thaliana
  misc_feature: MA Experiment 20001906 PARAMETER Experiment Name: At_Drought_Reproduction_P Parameter: Plant Line Value: WS
  misc_feature: MA Experiment 20001906 PARAMETER Experiment Name: At_Drought_Reproduction_P Parameter: Timepoint (day) Value: 5
  misc_feature: MA Experiment 20001906 PARAMETER Experiment Name: At_Drought_Reproduction_P Parameter: Tissue Value: Siliques
  misc_feature: MA Experiment 20001906 PARAMETER Experiment Name: At_Drought_Reproduction_P Parameter: Treatment Value: Drought vs. No Drought

SEQ ID NO: 95212 - protein, 608 aa, Arabidopsis thaliana; identical to SEQ ID NO: 91456
  peptide (1)..(608): Ceres Seq. ID no. 12727742
  misc_feature (38)..(605): Pfam Name: Microtubule associated protein (MAP65/ASE1 family) Pfam Description: Microtubule associated protein (MAP65/ASE1
  misc_feature (42)..(608): Homolog of NCBI NO: 30677965 NR Description: microtubule associated protein (MAP65/ASE1)
  misc_feature (1)..(606): Homolog of NCBI NO: 21539547 NR Description: unknown protein [Arabidopsis thaliana]
  misc_feature (16)..(606): Homolog of NCBI NO: 27357984 NR Description: Unknown protein [Oryza sativa (japonica
  misc_feature (19)..(606): Homolog of NCBI NO: 8778239 NR Description: F10B6.9 [Arabidopsis thaliana]
  misc_feature (18)..(586): Homolog of NCBI NO: 28301942 NR Description: unknown protein [Oryza sativa (japonica
  misc_feature (26)..(257): Homolog of NCBI NO: 15223872 NR Description: hypothetical protein; protein id: At1g14690.1
  misc_feature (475)..(605): Homolog of NCBI NO: 15223872 NR Description: hypothetical protein; protein id: At1g14690.1
  misc_feature (17)..(605): Homolog of NCBI NO: 15240485 NR Description: putative protein; protein id: At5g55230.1 thaliana] >gi|9758120|dbj|BAB08592.1| similarity to unknown protein [Arabidopsis thaliana]
  misc_feature (16)..(605): Homolog of NCBI NO: 11558252 NR Description: microtubule-associated protein MAP65-1a
  misc_feature (1)..(591): Homolog of NCBI NO: 11558254 NR Description: microtubule-associated protein MAP65-1b

SEQ ID NO: 95213 - protein, 567 aa, Arabidopsis thaliana; identical to SEQ ID NO: 91457
  peptide (1)..(567): Ceres Seq. ID no. 12727743
  misc_feature (1)..(564): Pfam Name: Microtubule associated protein (MAP65/ASE1 family) Pfam Description: Microtubule associated protein (MAP65/ASE1
  misc_feature (1)..(567): Homolog of NCBI NO: 30677965 NR Description: microtubule associated protein (MAP65/ASE1)
  misc_feature (1)..(565): Homolog of NCBI NO: 21539547 NR Description: unknown protein [Arabidopsis thaliana]
  misc_feature (1)..(565): Homolog of NCBI NO: 27357984 NR Description: Unknown protein [Oryza sativa (japonica
  misc_feature (1)..(565): Homolog of NCBI NO: 8778239 NR Description: F10B6.9 [Arabidopsis thaliana]
  misc_feature (1)..(545): Homolog of NCBI NO: 28301942 NR Description: unknown protein [Oryza sativa (japonica
  misc_feature (1)..(216): Homolog of NCBI NO: 15223872 NR Description: hypothetical protein; protein id: At1g14690.1
  misc_feature (434)..(564): Homolog of NCBI NO: 15223872 NR Description: hypothetical protein; protein id: At1g14690.1
  misc_feature (1)..(564): Homolog of NCBI NO: 15240485 NR Description: putative protein; protein id: At5g55230.1 thaliana] >gi|9758120|dbj|BAB08592.1| similarity to unknown protein [Arabidopsis thaliana]
  misc_feature (1)..(564): Homolog of NCBI NO: 11558252 NR Description: microtubule-associated protein MAP65-1a
  misc_feature (1)..(550): Homolog of NCBI NO: 11558254 NR Description: microtubule-associated protein MAP65-1b

SEQ ID NO: 95214 - protein, 565 aa, Arabidopsis thaliana; identical to SEQ ID NO: 91458
  peptide (1)..(565): Ceres Seq. ID no. 12727744
  misc_feature (1)..(562): Pfam Name: Microtubule associated protein (MAP65/ASE1 family) Pfam Description: Microtubule associated protein (MAP65/ASE1
  misc_feature (1)..(565): Homolog of NCBI NO: 30677965 NR Description: microtubule associated protein (MAP65/ASE1)
  misc_feature (1)..(563): Homolog of NCBI NO: 21539547 NR Description: unknown protein [Arabidopsis thaliana]
  misc_feature (1)..(563): Homolog of NCBI NO: 27357984 NR Description: Unknown protein [Oryza sativa (japonica
  misc_feature (1)..(563): Homolog of NCBI NO: 8778239 NR Description: F10B6.9 [Arabidopsis thaliana]
  misc_feature (1)..(543): Homolog of NCBI NO: 28301942 NR Description: unknown protein [Oryza sativa (japonica
  misc_feature (1)..(214): Homolog of NCBI NO: 15223872 NR Description: hypothetical protein; protein id: At1g14690.1
  misc_feature (432)..(562): Homolog of NCBI NO: 15223872 NR Description: hypothetical protein; protein id: At1g14690.1
  misc_feature (1)..(562): Homolog of NCBI NO: 15240485 NR Description: putative protein; protein id: At5g55230.1 thaliana] >gi|9758120|dbj|BAB08592.1| similarity to unknown protein [Arabidopsis thaliana]
  misc_feature (1)..(562): Homolog of NCBI NO: 11558252 NR Description: microtubule-associated protein MAP65-1a
  misc_feature (1)..(548): Homolog of NCBI NO: 11558254 NR Description: microtubule-associated protein MAP65-1b

SEQ ID NO: 95215 - DNA, 1881 bp, Arabidopsis thaliana; identical to SEQ ID NO: 91459
  misc_feature (1)..(1881): Ceres Seq. ID no. 12727775
  misc_feature: MA Experiment ID: 20000328 Result: Up-regulated in Transcription
  misc_feature: MA Experiment 20000328 PARAMETER Experiment Name: At_42deg_Heat_Sub_P Parameter: Age (day) Value: 14
  misc_feature: MA Experiment 20000328 PARAMETER Experiment Name: At_42deg_Heat_Sub_P Parameter: Organism Value: A. thaliana
  misc_feature: MA Experiment 20000328 PARAMETER Experiment Name: At_42deg_Heat_Sub_P Parameter: Plant Line Value: WS
  misc_feature: MA Experiment 20000328 PARAMETER Experiment Name: At_42deg_Heat_Sub_P Parameter: Temperature (deg C) Value: 42 vs. 22
  misc_feature: MA Experiment 20000328 PARAMETER Experiment Name: At_42deg_Heat_Sub_P Parameter: Timepoint (hr) Value: 6
  misc_feature: MA Experiment 20000328 PARAMETER Experiment Name: At_42deg_Heat_Sub_P Parameter: Tissue Value: Aerial
  misc_feature: MA Experiment ID: 20000347 Result: Up-regulated in Transcription
  misc_feature: MA Experiment 20000347 PARAMETER Experiment Name: At_2mM_SA_Sub_P Parameter: Age (day) Value: 14
  misc_feature: MA Experiment 20000347 PARAMETER Experiment Name: At_2mM_SA_Sub_P Parameter: Organism Value: A. thaliana
  misc_feature: MA Experiment 20000347 PARAMETER Experiment Name: At_2mM_SA_Sub_P Parameter: Plant Line Value: WS
  misc_feature: MA Experiment 20000347 PARAMETER Experiment Name: At_2mM_SA_Sub_P Parameter: Timepoint (hr) Value: 6
  misc_feature: MA Experiment 20000347 PARAMETER Experiment Name: At_2mM_SA_Sub_P Parameter: Tissue Value: Aerial
  misc_feature: MA Experiment 20000347 PARAMETER Experiment Name: At_2mM_SA_Sub_P Parameter: Treatment Value: 2mM SA vs. No Treatment

SEQ ID NO: 95216 - protein, 626 aa, Arabidopsis thaliana; identical to SEQ ID NO: 91460
  peptide (1)..(626): Ceres Seq. ID no. 12727776
  misc_feature (31)..(82): Pfam Name: Myb-like DNA-binding domain Pfam Description: Myb-like DNA-binding domain
  misc_feature (279)..(624): Homolog of NCBI NO: 15223826 NR Description: hypothetical protein common family; protein id:
  misc_feature (1)..(220): Homolog of NCBI NO: 30793861 NR Description: unknown protein [Arabidopsis thaliana]
  misc_feature (235)..(605): Homolog of NCBI NO: 21536907 NR Description: regulatory protein [Arabidopsis thaliana]
  misc_feature (266)..(604): Homolog of NCBI NO: 38344278 NR Description: OSJNBa0013K16.10 [Oryza sativa (japonica
  misc_feature (263)..(603): Homolog of NCBI NO: 15235236 NR Description: hypothetical protein common family; protein id:
  misc_feature (285)..(607): Homolog of NCBI NO: 23306127 NR Description: Putataive InsB from Escherichia coli [Oryza
  misc_feature (337)..(602): Homolog of NCBI NO: 6063544 NR Description: similar to Arabidopsis thaliana chromosome 2, BAC
  misc_feature (262)..(599): Homolog of NCBI NO: 15235236 NR Description: hypothetical protein common family; protein id:
  misc_feature (291)..(602): Homolog of NCBI NO: 34897442 NR Description: putative regulatory protein [Oryza sativa
  misc_feature (325)..(602): Homolog of NCBI NO: 18414558 NR Description: hypothetical protein common family; protein id:

SEQ ID NO: 95217 - protein, 564 aa, Arabidopsis thaliana; identical to SEQ ID NO: 91461
  peptide (1)..(564): Ceres Seq. ID no. 12727777
  misc_feature (217)..(562): Homolog of NCBI NO: 15223826 NR Description: hypothetical protein common family; protein id:
  misc_feature (1)..(158): Homolog of NCBI NO: 30793861 NR Description: unknown protein [Arabidopsis thaliana]
  misc_feature (173)..(543): Homolog of NCBI NO: 21536907 NR Description: regulatory protein [Arabidopsis thaliana]
  misc_feature (204)..(542): Homolog of NCBI NO: 38344278 NR Description: OSJNBa0013K16.10 [Oryza sativa (japonica
  misc_feature (201)..(541): Homolog of NCBI NO: 15235236 NR Description: hypothetical protein common family; protein id:
  misc_feature (223)..(545): Homolog of NCBI NO: 23306127 NR Description: Putataive InsB from Escherichia coli [Oryza
  misc_feature (275)..(540): Homolog of NCBI NO: 6063544 NR Description: similar to Arabidopsis thaliana chromosome 2, BAC
  misc_feature (200)..(537): Homolog of NCBI NO: 15235236 NR Description: hypothetical protein common family; protein id:
  misc_feature (229)..(540): Homolog of NCBI NO: 34897442 NR Description: putative regulatory protein [Oryza sativa
  misc_feature (263)..(540): Homolog of NCBI NO: 18414558 NR Description: hypothetical protein common family; protein id:

SEQ ID NO: 95218 - protein, 563 aa, Arabidopsis thaliana; identical to SEQ ID NO: 91462
  peptide (1)..(563): Ceres Seq. ID no. 12727778
  misc_feature (216)..(561): Homolog of NCBI NO: 15223826 NR Description: hypothetical protein common family; protein id:
  misc_feature (1)..(157): Homolog of NCBI NO: 30793861 NR Description: unknown protein [Arabidopsis thaliana]
  misc_feature (172)..(542): Homolog of NCBI NO: 21536907 NR Description: regulatory protein [Arabidopsis thaliana]
  misc_feature (203)..(541): Homolog of NCBI NO: 38344278 NR Description: OSJNBa0013K16.10 [Oryza sativa (japonica
  misc_feature (200)..(540): Homolog of NCBI NO: 15235236 NR Description: hypothetical protein common family; protein id:
  misc_feature (222)..(544): Homolog of NCBI NO: 23306127 NR Description: Putataive InsB from Escherichia coli [Oryza
  misc_feature (274)..(539): Homolog of NCBI NO: 6063544 NR Description: similar to Arabidopsis thaliana chromosome 2, BAC
  misc_feature (199)..(536): Homolog of NCBI NO: 15235236 NR Description: hypothetical protein common family; protein id:
  misc_feature (228)..(539): Homolog of NCBI NO: 34897442 NR Description: putative regulatory protein [Oryza sativa
  misc_feature (262)..(539): Homolog of NCBI NO: 18414558 NR Description: hypothetical protein common family; protein id:

SEQ ID NO: 95219 - DNA, 1647 bp, Arabidopsis thaliana; identical to SEQ ID NO: 91463
  misc_feature (1)..(1647): Ceres Seq. ID no. 12727851
  misc_feature: MA Experiment ID: 20000185 Result: Up-regulated in Transcription
  misc_feature: MA Experiment 20000185 PARAMETER Experiment Name: At_Roots__P Parameter: Age (day) Value: 7 vs. 21
  misc_feature: MA Experiment 20000185 PARAMETER Experiment Name: At_Roots__P Parameter: Organism Value: A. thaliana
  misc_feature: MA Experiment 20000185 PARAMETER Experiment Name: At_Roots__P Parameter: Tissue Value: Roots vs. Whole Plant
  misc_feature: MA Experiment ID: 20000268 Result: Up-regulated in Transcription
  misc_feature: MA Experiment 20000268 PARAMETER Experiment Name: At_100mM_NaCl__P Parameter: Age (day) Value: 14
  misc_feature: MA Experiment 20000268 PARAMETER Experiment Name: At_100mM_NaCl__P Parameter: Organism Value: A. thaliana
  misc_feature: MA Experiment 20000268 PARAMETER Experiment Name: At_100mM_NaCl__P Parameter: Plant Line Value: WS
  misc_feature: MA Experiment 20000268 PARAMETER Experiment Name: At_100mM_NaCl__P Parameter: Timepoint (hr) Value: 6
  misc_feature: MA Experiment 20000268 PARAMETER Experiment Name: At_100mM_NaCl__P Parameter: Tissue Value: Whole Plant
  misc_feature: MA Experiment 20000268 PARAMETER Experiment Name: At_100mM_NaCl__P Parameter: Treatment Value: 100mM NaCl vs. No Treatment
  misc_feature: MA Experiment ID: 20000286 Result: Down-regulated in Transcription
  misc_feature: MA Experiment 20000286 PARAMETER Experiment Name: At_Open_Flower_P Parameter: Age (day) Value: 21
  misc_feature: MA Experiment 20000286 PARAMETER Experiment Name: At_Open_Flower_P Parameter: Plant Line Value: WS
  misc_feature: MA Experiment 20000286 PARAMETER Experiment Name: At_Open_Flower_P Parameter: Tissue Value: Half Open vs. Whole Plant
  misc_feature: MA Experiment ID: 20000436 Result: Up-regulated in Transcription
  misc_feature: MA Experiment 20000436 PARAMETER Experiment Name: At_Drought_P Parameter: Age (day) Value: 7
  misc_feature: MA Experiment 20000436 PARAMETER Experiment Name: At_Drought_P Parameter: Organism Value: A. thaliana
  misc_feature: MA Experiment 20000436 PARAMETER Experiment Name: At_Drought_P Parameter: Plant Line Value: WS
  misc_feature: MA Experiment 20000436 PARAMETER Experiment Name: At_Drought_P Parameter: Timepoint (hr) Value: 12
  misc_feature: MA Experiment 20000436 PARAMETER Experiment Name: At_Drought_P Parameter: Tissue Value: Whole Plant
  misc_feature: MA Experiment 20000436 PARAMETER Experiment Name: At_Drought_P Parameter: Treatment Value: Drought vs. No Drought
  misc_feature: MA Experiment ID: 20000437 Result: Up-regulated in Transcription
  misc_feature: MA Experiment 20000437 PARAMETER Experiment Name: At_Drought_P Parameter: Age (day) Value: 8
  misc_feature: MA Experiment 20000437 PARAMETER Experiment Name: At_Drought_P Parameter: Organism Value: A. thaliana
  misc_feature: MA Experiment 20000437 PARAMETER Experiment Name: At_Drought_P Parameter: Plant Line Value: WS
  misc_feature: MA Experiment 20000437 PARAMETER Experiment Name: At_Drought_P Parameter: Timepoint (hr) Value: 24
  misc_feature: MA Experiment 20000437 PARAMETER Experiment Name: At_Drought_P Parameter: Tissue Value: Whole Plant
  misc_feature: MA Experiment 20000437 PARAMETER Experiment Name: At_Drought_P Parameter: Treatment Value: Drought vs. No Drought
  misc_feature: MA Experiment ID: 20000438 Result: Up-regulated in Transcription
  misc_feature: MA Experiment 20000438 PARAMETER Experiment Name: At_Shoots__P Parameter: Age (day) Value: 14
  misc_feature: MA Experiment 20000438 PARAMETER Experiment Name: At_Shoots__P Parameter: Tissue Value: Shoots vs. Whole Plant
  misc_feature: MA Experiment ID: 20000439 Result: Up-regulated in Transcription
  misc_feature: MA Experiment 20000439 PARAMETER Experiment Name: At_Roots__P Parameter: Age (day) Value: 14 vs. 21
  misc_feature: MA Experiment 20000439 PARAMETER Experiment Name: At_Roots__P Parameter: Organism Value: A. thaliana
  misc_feature: MA Experiment 20000439 PARAMETER Experiment Name: At_Roots__P Parameter: Tissue Value: Roots vs. Whole Plant
  misc_feature: MA Experiment ID: 20000460 Result: Down-regulated in Transcription
  misc_feature: MA Experiment 20000460 PARAMETER Experiment Name: At_10percent_PEG_P Parameter: Age (day) Value: 12
  misc_feature: MA Experiment 20000460 PARAMETER Experiment Name: At_10percent_PEG_P Parameter: Organism Value: A. thaliana
  misc_feature: MA Experiment 20000460 PARAMETER Experiment Name: At_10percent_PEG_P Parameter: Plant Line Value: WS
  misc_feature: MA Experiment 20000460 PARAMETER Experiment Name: At_10percent_PEG_P Parameter: Timepoint (day) Value: 12
  misc_feature: MA Experiment 20000460 PARAMETER Experiment Name: At_10percent_PEG_P Parameter: Tissue Value: Whole Plant
  misc_feature: MA Experiment 20000460 PARAMETER Experiment Name: At_10percent_PEG_P Parameter: Treatment Value: 10percent PEG vs. No Treatment
  misc_feature: MA Experiment ID: 20000573 Result: Down-regulated in Transcription
  misc_feature: MA Experiment 20000573 PARAMETER Experiment Name: At_100uM_ABA_Mutants__P Parameter: Organism Value: A. thaliana
  misc_feature: MA Experiment 20000573 PARAMETER Experiment Name: At_100uM_ABA_Mutants__P Parameter: Plant Line Value: CS22 vs. Ler wt
  misc_feature: MA Experiment 20000573 PARAMETER Experiment Name: At_100uM_ABA_Mutants__P Parameter: Timepoint (hr) Value: N/A
  misc_feature: MA Experiment 20000573 PARAMETER Experiment Name: At_100uM_ABA_Mutants__P Parameter: Tissue Value: Whole Plant
  misc_feature: MA Experiment 20000573 PARAMETER Experiment Name: At_100uM_ABA_Mutants__P Parameter: Treatment Value: None
  misc_feature: MA Experiment ID: 20001247 Result: Down-regulated in Transcription
  misc_feature: MA Experiment 20001247 PARAMETER Experiment Name: At_Far-red-induction_P Parameter: Age (day) Value: 7
  misc_feature: MA Experiment 20001247 PARAMETER Experiment Name: At_Far-red-induction_P Parameter: Light Value: Far-red vs. White
  misc_feature: MA Experiment 20001247 PARAMETER Experiment Name: At_Far-red-induction_P Parameter: Organism Value: A. thaliana
  misc_feature: MA Experiment 20001247 PARAMETER Experiment Name: At_Far-red-induction_P Parameter: Plant Line Value: Columbia
  misc_feature: MA Experiment 20001247 PARAMETER Experiment Name: At_Far-red-induction_P Parameter: Timepoint (hr) Value: 1
  misc_feature: MA Experiment 20001247 PARAMETER Experiment Name: At_Far-red-induction_P Parameter: Tissue Value: Whole Plant
  misc_feature: MA Experiment ID: 20001248 Result: Down-regulated in Transcription
  misc_feature: MA Experiment 20001248 PARAMETER Experiment Name: At_Far-red-induction_P Parameter: Age (day) Value: 7
  misc_feature: MA Experiment 20001248 PARAMETER Experiment Name: At_Far-red-induction_P Parameter: Light Value: Far-red vs. White
  misc_feature: MA Experiment 20001248 PARAMETER Experiment Name: At_Far-red-induction_P Parameter: Organism Value: A. thaliana
  misc_feature: MA Experiment 20001248 PARAMETER Experiment Name: At_Far-red-induction_P Parameter: Plant Line Value: Columbia
  misc_feature: MA Experiment 20001248 PARAMETER Experiment Name: At_Far-red-induction_P Parameter: Timepoint (hr) Value: 4
  misc_feature: MA Experiment 20001248 PARAMETER Experiment Name: At_Far-red-induction_P Parameter: Tissue Value: Whole Plant
  misc_feature: MA Experiment ID: 20001451 Result: Down-regulated in Transcription
  misc_feature: MA Experiment 20001451 PARAMETER Experiment Name: At_Far-red-induction_P Parameter: Age (day) Value: 7
  misc_feature: MA Experiment 20001451 PARAMETER Experiment Name: At_Far-red-induction_P Parameter: Light Value: Far-red vs. White
  misc_feature: MA Experiment 20001451 PARAMETER Experiment Name: At_Far-red-induction_P Parameter: Organism Value: A. thaliana
  misc_feature: MA Experiment 20001451 PARAMETER Experiment Name: At_Far-red-induction_P Parameter: Plant Line Value: Columbia
  misc_feature: MA Experiment 20001451 PARAMETER Experiment Name: At_Far-red-induction_P Parameter: Timepoint (hr) Value: 24
  misc_feature: MA Experiment 20001451 PARAMETER Experiment Name: At_Far-red-induction_P Parameter: Tissue Value: Whole Plant
  misc_feature: MA Experiment ID: 20001554 Result: Up-regulated in Transcription
  misc_feature: MA Experiment 20001554 PARAMETER Experiment Name: At_Drought_Soil_Dry_P Parameter: Age (day) Value: 21
  misc_feature: MA Experiment 20001554 PARAMETER Experiment Name: At_Drought_Soil_Dry_P Parameter: Organism Value: A. thaliana
  misc_feature: MA Experiment 20001554 PARAMETER Experiment Name: At_Drought_Soil_Dry_P Parameter: Plant Line Value: WS
  misc_feature: MA Experiment 20001554 PARAMETER Experiment Name: At_Drought_Soil_Dry_P Parameter: Post Timepoint (hr) Value: None
  misc_feature: MA Experiment 20001554 PARAMETER Experiment Name: At_Drought_Soil_Dry_P Parameter: Post-Treatment Value: None
  misc_feature: MA Experiment 20001554 PARAMETER Experiment Name: At_Drought_Soil_Dry_P Parameter: Timepoint (day) Value: 7
  misc_feature: MA Experiment 20001554 PARAMETER Experiment Name: At_Drought_Soil_Dry_P Parameter: Treatment Value: Drought vs. No Drought
  misc_feature: MA Experiment ID: 20001555 Result: Up-regulated in Transcription
  misc_feature: MA Experiment 20001555 PARAMETER Experiment Name: At_Drought_Soil_Dry_P Parameter: Age (day) Value: 24
  misc_feature: MA Experiment 20001555 PARAMETER Experiment Name: At_Drought_Soil_Dry_P Parameter: Organism Value: A. thaliana
  misc_feature: MA Experiment 20001555 PARAMETER Experiment Name: At_Drought_Soil_Dry_P Parameter: Plant Line Value: WS
  misc_feature: MA Experiment 20001555 PARAMETER Experiment Name: At_Drought_Soil_Dry_P Parameter: Post Timepoint (hr) Value: None
  misc_feature: MA Experiment 20001555 PARAMETER Experiment Name: At_Drought_Soil_Dry_P Parameter: Post-Treatment Value: None
  misc_feature: MA Experiment 20001555 PARAMETER Experiment Name: At_Drought_Soil_Dry_P Parameter: Timepoint (day) Value: 10
  misc_feature: MA Experiment 20001555 PARAMETER Experiment Name: At_Drought_Soil_Dry_P Parameter: Treatment Value: Drought vs. No Drought
  misc_feature: MA Experiment ID: 20001559 Result: Up-regulated in Transcription
  misc_feature: MA Experiment 20001559 PARAMETER Experiment Name: At_Drought_Soil_Dry_P Parameter: Age (day) Value: 28
  misc_feature: MA Experiment 20001559 PARAMETER Experiment Name: At_Drought_Soil_Dry_P Parameter: Organism Value: A. thaliana
  misc_feature: MA Experiment 20001559 PARAMETER Experiment Name: At_Drought_Soil_Dry_P Parameter: Plant Line Value: WS
  misc_feature: MA Experiment 20001559 PARAMETER Experiment Name: At_Drought_Soil_Dry_P Parameter: Post Timepoint (hr) Value: 29
  misc_feature: MA Experiment 20001559 PARAMETER Experiment Name: At_Drought_Soil_Dry_P Parameter: Post-Treatment Value: Re-Water vs. No Drought
  misc_feature: MA Experiment 20001559 PARAMETER Experiment Name: At_Drought_Soil_Dry_P Parameter: Timepoint (day) Value: 14
  misc_feature: MA Experiment 20001559 PARAMETER Experiment Name: At_Drought_Soil_Dry_P Parameter: Treatment Value: Drought vs. No Drought

SEQ ID NO: 95220 - protein, 500 aa, Arabidopsis thaliana; identical to SEQ ID NO: 91464
  peptide (1)..(500): Ceres Seq. ID no. 12727852
  misc_feature (32)..(493): Pfam Name: Cytochrome P450 Pfam Description: Cytochrome P450
  misc_feature (1)..(500): Homolog of NCBI NO: 15227003 NR Description: cytochrome p450 family; protein id: At2g02580.1, by cDNA: gi_18175890 [Arabidopsis thaliana] Cytochrome P450 71B9 >gi|20197089|gb|AAC18928.2| putative
  misc_feature (1)..(500): Homolog of NCBI NO: 18175891 NR Description: putative cytochrome P450 protein [Arabidopsis
  misc_feature (1)..(500): Homolog of NCBI NO: 7430672 NR Description: probable cytochrome P450 At2g02580 [imported] -
  misc_feature (1)..(498): Homolog of NCBI NO: 15231542 NR Description: cytochrome p450 family; protein id: At3g26330.1
  misc_feature (1)..(498): Homolog of NCBI NO: 9294291 NR Description: cytochrome p450 [Arabidopsis thaliana]
  misc_feature (1)..(500): Homolog of NCBI NO: 15231541 NR Description: cytochrome p450 family; protein id: At3g26320.1 thaliana] >gi|13878377|sp|Q9LIP4|C72X_ARATH Cytochrome P450 71B36
  misc_feature (1)..(498): Homolog of NCBI NO: 15231538 NR Description: cytochrome p450 family; protein id: At3g26300.1 thaliana] >gi|13878379|sp|Q9LIP6|C72V_ARATH Cytochrome P450 71B34
  misc_feature (1)..(494): Homolog of NCBI NO: 15231539 NR Description: cytochrome p450 family; protein id: At3g26310.1 thaliana] >gi|13878378|sp|Q9LIP5|C72W_ARATH Cytochrome P450 71B35
  misc_feature (1)..(500): Homolog of NCBI NO: 15231537 NR Description: cytochrome p450 family; protein id: At3g26290.1 thaliana] >gi|13878380|sp|Q9LTL0|C72Q_ARATH Cytochrome P450 71B26
  misc_feature (1)..(498): Homolog of NCBI NO: 30696845 NR Description: cytochrome P450 71B10 [Arabidopsis thaliana]

SEQ ID NO: 95221 - protein, 435 aa, Arabidopsis thaliana; identical to SEQ ID NO: 91465
  peptide (1)..(435): Ceres Seq. ID no. 12727853
  misc_feature (1)..(428): Pfam Name: Cytochrome P450 Pfam Description: Cytochrome P450
  misc_feature (1)..(435): Homolog of NCBI NO: 15227003 NR Description: cytochrome p450 family; protein id: At2g02580.1, by cDNA: gi_18175890 [Arabidopsis thaliana] Cytochrome P450 71B9 >gi|20197089|gb|AAC18928.2| putative
  misc_feature (1)..(435): Homolog of NCBI NO: 18175891 NR Description: putative cytochrome P450 protein [Arabidopsis
  misc_feature (1)..(435): Homolog of NCBI NO: 7430672 NR Description: probable cytochrome P450 At2g02580 [imported] -
  misc_feature (1)..(433): Homolog of NCBI NO: 15231542 NR Description: cytochrome p450 family; protein id: At3g26330.1
  misc_feature (1)..(433): Homolog of NCBI NO: 9294291 NR Description: cytochrome p450 [Arabidopsis thaliana]
  misc_feature (1)..(435): Homolog of NCBI NO: 15231541 NR Description: cytochrome p450 family; protein id: At3g26320.1 thaliana] >gi|13878377|sp|Q9LIP4|C72X_ARATH Cytochrome P450 71B36
  misc_feature (1)..(433): Homolog of NCBI NO: 15231538 NR Description: cytochrome p450 family; protein id: At3g26300.1 thaliana] >gi|13878379|sp|Q9LIP6|C72V_ARATH Cytochrome P450 71B34
  misc_feature (1)..(429): Homolog of NCBI NO: 15231539 NR Description: cytochrome p450 family; protein id: At3g26310.1 thaliana] >gi|13878378|sp|Q9LIP5|C72W_ARATH Cytochrome P450 71B35
  misc_feature (1)..(435): Homolog of NCBI NO: 15231537 NR Description: cytochrome p450 family; protein id: At3g26290.1 thaliana] >gi|13878380|sp|Q9LTL0|C72Q_ARATH Cytochrome P450 71B26
  misc_feature (1)..(433): Homolog of NCBI NO: 30696845 NR Description: cytochrome P450 71B10 [Arabidopsis thaliana]

SEQ ID NO: 95222 - DNA, 768 bp, Arabidopsis thaliana; identical to SEQ ID NO: 91466
  misc_feature (1)..(768): Ceres Seq. ID no. 12727892
  misc_feature: MA Experiment ID: 20000437 Result: Up-regulated in Transcription
  misc_feature: MA Experiment 20000437 PARAMETER Experiment Name: At_Drought_P Parameter: Age (day) Value: 8
  misc_feature: MA Experiment 20000437 PARAMETER Experiment Name: At_Drought_P Parameter: Organism Value: A. thaliana
  misc_feature: MA Experiment 20000437 PARAMETER Experiment Name: At_Drought_P Parameter: Plant Line Value: WS
  misc_feature: MA Experiment 20000437 PARAMETER Experiment Name: At_Drought_P Parameter: Timepoint (hr) Value: 24
  misc_feature: MA Experiment 20000437 PARAMETER Experiment Name: At_Drought_P Parameter: Tissue Value: Whole Plant
  misc_feature: MA Experiment 20000437 PARAMETER Experiment Name: At_Drought_P Parameter: Treatment Value: Drought vs. No Drought
  misc_feature: MA Experiment ID: 20000451 Result: Up-regulated in Transcription
  misc_feature: MA Experiment 20000451 PARAMETER Experiment Name: At_CS6879_Shoots-Roots_P Parameter: Age (day) Value: 14
  misc_feature: MA Experiment 20000451 PARAMETER Experiment Name: At_CS6879_Shoots-Roots_P Parameter: Organism Value: A. thaliana
  misc_feature: MA Experiment 20000451 PARAMETER Experiment Name: At_CS6879_Shoots-Roots_P Parameter: Plant Line Value: CS6879 vs. WS
  misc_feature: MA Experiment 20000451 PARAMETER Experiment Name: At_CS6879_Shoots-Roots_P Parameter: Tissue Value: Roots
  misc_feature: MA Experiment ID: 20000453 Result: Up-regulated in Transcription
  misc_feature: MA Experiment 20000453 PARAMETER Experiment Name: At_100uM_ABA_P Parameter: Age (day) Value: 15
  misc_feature: MA Experiment 20000453 PARAMETER Experiment Name: At_100uM_ABA_P Parameter: Organism Value: A. thaliana
  misc_feature: MA Experiment 20000453 PARAMETER Experiment Name: At_100uM_ABA_P Parameter: Plant Line Value: WS
  misc_feature: MA Experiment 20000453 PARAMETER Experiment Name: At_100uM_ABA_P Parameter: Timepoint (hr) Value: 24
  misc_feature: MA Experiment 20000453 PARAMETER Experiment Name: At_100uM_ABA_P Parameter: Tissue Value: Aerial
  misc_feature: MA Experiment 20000453 PARAMETER Experiment Name: At_100uM_ABA_P Parameter: Treatment Value: 100uM ABA vs. No Treatment
  misc_feature: MA Experiment ID: 20001248 Result: Down-regulated in Transcription
  misc_feature: MA Experiment 20001248 PARAMETER Experiment Name: At_Far-red-induction_P Parameter: Age (day) Value: 7
  misc_feature: MA Experiment 20001248 PARAMETER Experiment Name: At_Far-red-induction_P Parameter: Light Value: Far-red vs. White
  misc_feature: MA Experiment 20001248 PARAMETER Experiment Name: At_Far-red-induction_P Parameter: Organism Value: A. thaliana
  misc_feature: MA Experiment 20001248 PARAMETER Experiment Name: At_Far-red-induction_P Parameter: Plant Line Value: Columbia
  misc_feature: MA Experiment 20001248 PARAMETER Experiment Name: At_Far-red-induction_P Parameter: Timepoint (hr) Value: 4
  misc_feature: MA Experiment 20001248 PARAMETER Experiment Name: At_Far-red-induction_P Parameter: Tissue Value: Whole Plant
  misc_feature: MA Experiment ID: 20001459 Result: Up-regulated in Transcription
  misc_feature: MA Experiment 20001459 PARAMETER Experiment Name: At_50mM_NH4NO3_L-to-H_P Parameter: Age (day) Value: Undefined
  misc_feature: MA Experiment 20001459 PARAMETER Experiment Name: At_50mM_NH4NO3_L-to-H_P Parameter: Organism Value: Undefined
  misc_feature: MA Experiment 20001459 PARAMETER Experiment Name: At_50mM_NH4NO3_L-to-H_P Parameter: Plant Line Value: Undefined
  misc_feature: MA Experiment 20001459 PARAMETER Experiment Name: At_50mM_NH4NO3_L-to-H_P Parameter: Timepoint (hr) Value: 4
  misc_feature: MA Experiment 20001459 PARAMETER Experiment Name: At_50mM_NH4NO3_L-to-H_P Parameter: Tissue Value: Siliques
  misc_feature: MA Experiment 20001459 PARAMETER Experiment Name: At_50mM_NH4NO3_L-to-H_P Parameter: Treatment Value: 50mM NH4NO3 vs. 100mM Manitol
  misc_feature: MA Experiment ID: 20001557 Result: Up-regulated in Transcription
  misc_feature: MA Experiment 20001557 PARAMETER Experiment Name: At_Drought_Soil_Dry_P Parameter: Age (day) Value: 27
  misc_feature: MA Experiment 20001557 PARAMETER Experiment Name: At_Drought_Soil_Dry_P Parameter: Organism Value: A. thaliana
  misc_feature: MA Experiment 20001557 PARAMETER Experiment Name: At_Drought_Soil_Dry_P Parameter: Plant Line Value: WS
  misc_feature: MA Experiment 20001557 PARAMETER Experiment Name: At_Drought_Soil_Dry_P Parameter: Post Timepoint (hr) Value: 3
  misc_feature: MA Experiment 20001557 PARAMETER Experiment Name: At_Drought_Soil_Dry_P Parameter: Post-Treatment Value: Re-Water vs. No Drought
  misc_feature: MA Experiment 20001557 PARAMETER Experiment Name: At_Drought_Soil_Dry_P Parameter: Timepoint (day) Value: 13
  misc_feature: MA Experiment 20001557 PARAMETER Experiment Name: At_Drought_Soil_Dry_P Parameter: Treatment Value: Drought vs. No Drought
  misc_feature: MA Experiment ID: 20001558 Result: Up-regulated in Transcription
  misc_feature: MA Experiment 20001558 PARAMETER Experiment Name: At_Drought_Soil_Dry_P Parameter: Age (day) Value: 27
  misc_feature: MA Experiment 20001558 PARAMETER Experiment Name: At_Drought_Soil_Dry_P Parameter: Organism Value: A. thaliana
  misc_feature: MA Experiment 20001558 PARAMETER Experiment Name: At_Drought_Soil_Dry_P Parameter: Plant Line Value: WS
  misc_feature: MA Experiment 20001558 PARAMETER Experiment Name: At_Drought_Soil_Dry_P Parameter: Post Timepoint (hr) Value: 6
  misc_feature: MA Experiment 20001558 PARAMETER Experiment Name: At_Drought_Soil_Dry_P Parameter: Post-Treatment Value: Re-Water vs. No Drought
  misc_feature: MA Experiment 20001558 PARAMETER Experiment Name: At_Drought_Soil_Dry_P Parameter: Timepoint (day) Value: 13
  misc_feature: MA Experiment 20001558 PARAMETER Experiment Name: At_Drought_Soil_Dry_P Parameter: Treatment Value: Drought vs. No Drought

SEQ ID NO: 95223 - protein, 255 aa, Arabidopsis thaliana; identical to SEQ ID NO: 91467
  peptide (1)..(255): Ceres Seq. ID no. 12727893
  misc_feature (20)..(249): Pfam Name: Phospholipase/Carboxylesterase Pfam Description: Phospholipase/Carboxylesterase
  misc_feature (1)..(255): Homolog of NCBI NO: 15232645 NR Description: putative lysophospholipase; protein id:
  misc_feature (1)..(166): Homolog of NCBI NO: 15219072 NR Description: unknown protein; protein id: At1g52700.1
  misc_feature (197)..(255): Homolog of NCBI NO: 15219072 NR Description: unknown protein; protein id: At1g52700.1
  misc_feature (1)..(253): Homolog of NCBI NO: 15241251 NR Description: putative protein; protein id: At5g20060.1, by cDNA: 42475. [Arabidopsis thaliana] putative lysophospholipase [Arabidopsis thaliana]
  misc_feature (4)..(254): Homolog of NCBI NO: 34910274 NR Description: OSJNBa0089K24.24 [Oryza sativa (japonica
  misc_feature (1)..(166): Homolog of NCBI NO: 5903036 NR Description: F6D8.5 [Arabidopsis thaliana]
  misc_feature (197)..(228): Homolog of NCBI NO: 5903036 NR Description: F6D8.5 [Arabidopsis thaliana]
  misc_feature (1)..(254): Homolog of NCBI NO: 29409364 NR Description: biostress-resistance-related protein [Triticum
  misc_feature (65)..(255): Homolog of NCBI NO: 34912598 NR Description: P0046B10.16 [Oryza sativa (japonica
  misc_feature (102)..(253): Homolog of NCBI NO: 28932772 NR Description: FPh1 [Gossypium hirsutum]

SEQ ID NO: 95224 - protein, 248 aa, Arabidopsis thaliana; identical to SEQ ID NO: 91468
  peptide (1)..(248): Ceres Seq. ID no. 12727894
  misc_feature (13)..(242): Pfam Name: Phospholipase/Carboxylesterase Pfam Description: Phospholipase/Carboxylesterase
  misc_feature (1)..(248): Homolog of NCBI NO: 15232645 NR Description: putative lysophospholipase; protein id:
  misc_feature (1)..(159): Homolog of NCBI NO: 15219072 NR Description: unknown protein; protein id: At1g52700.1
  misc_feature (190)..(248): Homolog of NCBI NO: 15219072 NR Description: unknown protein; protein id: At1g52700.1
  misc_feature (1)..(246): Homolog of NCBI NO: 15241251 NR Description: putative protein; protein id: At5g20060.1, by cDNA: 42475. [Arabidopsis thaliana] putative lysophospholipase [Arabidopsis thaliana]
  misc_feature (1)..(247): Homolog of NCBI NO: 34910274 NR Description: OSJNBa0089K24.24 [Oryza sativa (japonica
  misc_feature (1)..(159): Homolog of NCBI NO: 5903036 NR Description: F6D8.5 [Arabidopsis thaliana]
  misc_feature (190)..(221): Homolog of NCBI NO: 5903036 NR Description: F6D8.5 [Arabidopsis thaliana]
  misc_feature (1)..(247): Homolog of NCBI NO: 29409364 NR Description: biostress-resistance-related protein [Triticum
  misc_feature (58)..(248): Homolog of NCBI NO: 34912598 NR Description: P0046B10.16 [Oryza sativa (japonica
  misc_feature (95)..(246): Homolog of NCBI NO: 28932772 NR Description: FPh1 [Gossypium hirsutum]

SEQ ID NO: 95225 - protein, 128 aa, Arabidopsis thaliana; identical to SEQ ID NO: 91469
  peptide (1)..(128): Ceres Seq. ID no. 12727895
  misc_feature (1)..(122): Pfam Name: Phospholipase/Carboxylesterase Pfam Description: Phospholipase/Carboxylesterase
  misc_feature (1)..(128): Homolog of NCBI NO: 15232645 NR Description: putative lysophospholipase; protein id:
  misc_feature (1)..(39): Homolog of NCBI NO: 15219072 NR Description: unknown protein; protein id: At1g52700.1
  misc_feature (70)..(128): Homolog of NCBI NO: 15219072 NR Description: unknown protein; protein id: At1g52700.1
  misc_feature (1)..(126): Homolog of NCBI NO: 15241251 NR Description: putative protein; protein id: At5g20060.1, by cDNA: 42475. [Arabidopsis thaliana] putative lysophospholipase [Arabidopsis thaliana]
  misc_feature (1)..(127): Homolog of NCBI NO: 34910274 NR Description: OSJNBa0089K24.24 [Oryza sativa (japonica
  misc_feature (1)..(39): Homolog of NCBI NO: 5903036 NR Description: F6D8.5 [Arabidopsis thaliana]
  misc_feature (70)..(101): Homolog of NCBI NO: 5903036 NR Description: F6D8.5 [Arabidopsis thaliana]
  misc_feature (1)..(127): Homolog of NCBI NO: 29409364 NR Description: biostress-resistance-related protein [Triticum
  misc_feature (1)..(128): Homolog of NCBI NO: 34912598 NR Description: P0046B10.16 [Oryza sativa (japonica
  misc_feature (1)..(126): Homolog of NCBI NO: 28932772 NR Description: FPh1 [Gossypium hirsutum]

SEQ ID NO: 95226 - DNA, 1200 bp, Arabidopsis thaliana; identical to SEQ ID NO: 91470
  misc_feature (1)..(1200): Ceres Seq. ID no. 12727909
  misc_feature: MA Experiment ID: 20000437 Result: Up-regulated in Transcription
  misc_feature: MA Experiment 20000437 PARAMETER Experiment Name: At_Drought_P Parameter: Age (day) Value: 8
  misc_feature: MA Experiment 20000437 PARAMETER Experiment Name: At_Drought_P Parameter: Organism Value: A. thaliana
  misc_feature: MA Experiment 20000437 PARAMETER Experiment Name: At_Drought_P Parameter: Plant Line Value: WS
  misc_feature: MA Experiment 20000437 PARAMETER Experiment Name: At_Drought_P Parameter: Timepoint (hr) Value: 24
  misc_feature: MA Experiment 20000437 PARAMETER Experiment Name: At_Drought_P Parameter: Tissue Value: Whole Plant
  misc_feature: MA Experiment 20000437 PARAMETER Experiment Name: At_Drought_P Parameter: Treatment Value: Drought vs. No Drought
  misc_feature: MA Experiment ID: 20000439 Result: Up-regulated in Transcription
  misc_feature: MA Experiment 20000439 PARAMETER Experiment Name: At_Roots__P Parameter: Age (day) Value: 14 vs. 21
  misc_feature: MA Experiment 20000439 PARAMETER Experiment Name: At_Roots__P Parameter: Organism Value: A. thaliana
  misc_feature: MA Experiment 20000439 PARAMETER Experiment Name: At_Roots__P Parameter: Tissue Value: Roots vs. Whole Plant

SEQ ID NO: 95227 - protein, 399 aa, Arabidopsis thaliana; identical to SEQ ID NO: 91471
  peptide (1)..(399): Ceres Seq. ID no. 12727910
  misc_feature (43)..(363): Pfam Name: Glycosyl hydrolases family 17 Pfam Description: Glycosyl hydrolases family 17
  misc_feature (1)..(399): Homolog of NCBI NO: 15232696 NR Description: glycosyl hydrolase family 17; protein id:
  misc_feature (27)..(399): Homolog of NCBI NO: 11994352 NR Description: beta-1,3-glucanase-like protein [Arabidopsis
  misc_feature (12)..(390): Homolog of NCBI NO: 18401187 NR Description: glycosyl hydrolase family 17; protein id: supported by cDNA: 95083. [Arabidopsis thaliana]
  misc_feature (12)..(390): Homolog of NCBI NO: 21618052 NR Description: putative beta-1,3-glucanase [Arabidopsis thaliana]
  misc_feature (41)..(373): Homolog of NCBI NO: 15209173 NR Description: putative elicitor inducible chitinase [Solanum
  misc_feature (37)..(370): Homolog of NCBI NO: 7447981 NR Description: probable beta-1,3-glucanase At2g26600 [imported]
  misc_feature (104)..(390): Homolog of NCBI NO: 26452328 NR Description: putative beta-1,3-glucanase [Arabidopsis
  misc_feature (104)..(390): Homolog of NCBI NO: 30683187 NR Description: glycosyl hydrolase family 17 [Arabidopsis
  misc_feature (18)..(379): Homolog of NCBI NO: 25316425 NR Description: probable beta-1,3-glucanase [imported] -
  misc_feature (18)..(365): Homolog of NCBI NO: 18401444 NR Description: glycosyl hydrolase family 17; protein id: supported by cDNA: 1126., supported by cDNA: gi_17473571,

SEQ ID NO: 95228 - protein, 385 aa, Arabidopsis thaliana; identical to SEQ ID NO: 91472
  peptide (1)..(385): Ceres Seq. ID no. 12727911
  misc_feature (29)..(349): Pfam Name: Glycosyl hydrolases family 17 Pfam Description: Glycosyl hydrolases family 17
  misc_feature (1)..(385): Homolog of NCBI NO: 15232696 NR Description: glycosyl hydrolase family 17; protein id:
  misc_feature (13)..(385): Homolog of NCBI NO: 11994352 NR Description: beta-1,3-glucanase-like protein [Arabidopsis
  misc_feature (1)..(376): Homolog of NCBI NO: 18401187 NR Description: glycosyl hydrolase family 17; protein id: supported by cDNA: 95083. [Arabidopsis thaliana]
  misc_feature (1)..(376): Homolog of NCBI NO: 21618052 NR Description: putative beta-1,3-glucanase [Arabidopsis thaliana]
  misc_feature (27)..(359): Homolog of NCBI NO: 15209173 NR Description: putative elicitor inducible chitinase [Solanum
  misc_feature (23)..(356): Homolog of NCBI NO: 7447981 NR Description: probable beta-1,3-glucanase At2g26600 [imported]
  misc_feature (90)..(376): Homolog of NCBI NO: 26452328 NR Description: putative beta-1,3-glucanase [Arabidopsis
  misc_feature (90)..(376): Homolog of NCBI NO: 30683187 NR Description: glycosyl hydrolase family 17 [Arabidopsis
  misc_feature (4)..(365): Homolog of NCBI NO: 25316425 NR Description: probable beta-1,3-glucanase [imported] -
  misc_feature (4)..(351): Homolog of NCBI NO: 18401444 NR Description: glycosyl hydrolase family 17; protein id: supported by cDNA: 1126., supported by cDNA: gi_17473571,

SEQ ID NO: 95229 - protein, 288 aa, Arabidopsis thaliana; identical to SEQ ID NO: 91473
  peptide (1)..(288): Ceres Seq. ID no. 12727912
  misc_feature (1)..(252): Pfam Name: Glycosyl hydrolases family 17 Pfam Description: Glycosyl hydrolases family 17
  misc_feature (1)..(288): Homolog of NCBI NO: 15232696 NR Description: glycosyl hydrolase family 17; protein id:
  misc_feature (1)..(288): Homolog of NCBI NO: 11994352 NR Description: beta-1,3-glucanase-like protein [Arabidopsis
  misc_feature (1)..(279): Homolog of NCBI NO: 18401187 NR Description: glycosyl hydrolase family 17; protein id: supported by cDNA: 95083. [Arabidopsis thaliana]
  misc_feature (1)..(279): Homolog of NCBI NO: 21618052 NR Description: putative beta-1,3-glucanase [Arabidopsis thaliana]
  misc_feature (1)..(262): Homolog of NCBI NO: 15209173 NR Description: putative elicitor inducible chitinase [Solanum
  misc_feature (1)..(259): Homolog of NCBI NO: 7447981 NR Description: probable beta-1,3-glucanase At2g26600 [imported]
  misc_feature (1)..(279): Homolog of NCBI NO: 26452328 NR Description: putative beta-1,3-glucanase [Arabidopsis
  misc_feature (1)..(279): Homolog of NCBI NO: 30683187 NR Description: glycosyl hydrolase family 17 [Arabidopsis
  misc_feature (1)..(268): Homolog of NCBI NO: 25316425 NR Description: probable beta-1,3-glucanase [imported] -
  misc_feature (1)..(254): Homolog of NCBI NO: 18401444 NR Description: glycosyl hydrolase family 17; protein id: supported by cDNA: 1126., supported by cDNA: gi_17473571,

SEQ ID NO: 95230 - DNA, 2256 bp, Arabidopsis thaliana; identical to SEQ ID NO: 91474
  misc_feature (1)..(2256): Ceres Seq. ID no. 12727913
  misc_feature: MA Experiment ID: 20000182 Result: Up-regulated in Transcription
  misc_feature: MA Experiment 20000182 PARAMETER Experiment Name: At_2mM_SA_P Parameter: Age (day) Value: 14
  misc_feature: MA Experiment 20000182 PARAMETER Experiment Name: At_2mM_SA_P Parameter: Organism Value: A. thaliana
  misc_feature: MA Experiment 20000182 PARAMETER Experiment Name: At_2mM_SA_P Parameter: Plant Line Value: WS
  misc_feature: MA Experiment 20000182 PARAMETER Experiment Name: At_2mM_SA_P Parameter: Timepoint (hr) Value: 6
  misc_feature: MA Experiment 20000182 PARAMETER Experiment Name: At_2mM_SA_P Parameter: Tissue Value: Aerial
  misc_feature: MA Experiment 20000182 PARAMETER Experiment Name: At_2mM_SA_P Parameter: Treatment Value: 2mM SA vs. No Treatment
  misc_feature: MA Experiment ID: 20000185 Result: Up-regulated in Transcription
  misc_feature: MA Experiment 20000185 PARAMETER Experiment Name: At_Roots__P Parameter: Age (day) Value: 7 vs. 21
  misc_feature: MA Experiment 20000185 PARAMETER Experiment Name: At_Roots__P Parameter: Organism Value: A. thaliana
  misc_feature: MA Experiment 20000185 PARAMETER Experiment Name: At_Roots__P Parameter: Tissue Value: Roots vs. Whole Plant
  misc_feature: MA Experiment ID: 20000227 Result: Down-regulated in Transcription
  misc_feature: MA Experiment 20000227 PARAMETER Experiment Name: At_Root-Tips-vs-Tops_P Parameter: Tissue Value: Root Tips vs. Root Tops
  misc_feature: MA Experiment ID: 20000234 Result: Up-regulated in Transcription
  misc_feature: MA Experiment 20000234 PARAMETER Experiment Name: At_Siliques_P Parameter: Age (day) Value: 21
  misc_feature: MA Experiment 20000234 PARAMETER Experiment Name: At_Siliques_P Parameter: Organism Value: A. thaliana
  misc_feature: MA Experiment 20000234 PARAMETER Experiment Name: At_Siliques_P Parameter: Plant Line Value: WS
  misc_feature: MA Experiment 20000234 PARAMETER Experiment Name: At_Siliques_P Parameter: Tissue Value: Less Than 5mm Siliques vs. Whole Plant
  misc_feature: MA Experiment ID: 20000437 Result: Up-regulated in Transcription
  misc_feature: MA Experiment 20000437 PARAMETER Experiment Name: At_Drought_P Parameter: Age (day) Value: 8
  misc_feature: MA Experiment 20000437 PARAMETER Experiment Name: At_Drought_P Parameter: Organism Value: A. thaliana
  misc_feature: MA Experiment 20000437 PARAMETER Experiment Name: At_Drought_P Parameter: Plant Line Value: WS
  misc_feature: MA Experiment 20000437 PARAMETER Experiment Name: At_Drought_P Parameter: Timepoint (hr) Value: 24
  misc_feature: MA Experiment 20000437 PARAMETER Experiment Name: At_Drought_P Parameter: Tissue Value: Whole Plant
  misc_feature: MA Experiment 20000437 PARAMETER Experiment Name: At_Drought_P Parameter: Treatment Value: Drought vs. No Drought
  misc_feature: MA Experiment ID: 20000439 Result: Up-regulated in Transcription
  misc_feature: MA Experiment 20000439 PARAMETER Experiment Name: At_Roots__P Parameter: Age (day) Value: 14 vs. 21
  misc_feature: MA Experiment 20000439 PARAMETER Experiment Name: At_Roots__P Parameter: Organism Value: A. thaliana
  misc_feature: MA Experiment 20000439 PARAMETER Experiment Name: At_Roots__P Parameter: Tissue Value: Roots vs. Whole Plant
  misc_feature: MA Experiment ID: 20000441 Result: Down-regulated in Transcription
  misc_feature: MA Experiment 20000441 PARAMETER Experiment Name: At_1uM_BR-BRZ__P Parameter: Tissue Value: Shoot Apices
  misc_feature: MA Experiment 20000441 PARAMETER Experiment Name: At_1uM_BR-BRZ__P Parameter: Treatment Value: 1uM BR vs. No Treatment
  misc_feature: MA Experiment ID: 20000495 Result: Up-regulated in Transcription
  misc_feature: MA Experiment 20000495 PARAMETER Experiment Name: At_Guard_Cells_P Parameter: Harvest Date Value: 8/2/2002
  misc_feature: MA Experiment 20000495 PARAMETER Experiment Name: At_Guard_Cells_P Parameter: Organism Value: A. thaliana
  misc_feature: MA Experiment 20000495 PARAMETER Experiment Name: At_Guard_Cells_P Parameter: Tissue Value: Guard Cells vs. Leaves
  misc_feature: MA Experiment ID: 20001248 Result: Down-regulated in Transcription
  misc_feature: MA Experiment 20001248 PARAMETER Experiment Name: At_Far-red-induction_P Parameter: Age (day) Value: 7
  misc_feature: MA Experiment 20001248 PARAMETER Experiment Name: At_Far-red-induction_P Parameter: Light Value: Far-red vs. White
  misc_feature: MA Experiment 20001248 PARAMETER Experiment Name: At_Far-red-induction_P Parameter: Organism Value: A. thaliana
  misc_feature: MA Experiment 20001248 PARAMETER Experiment Name: At_Far-red-induction_P Parameter: Plant Line Value: Columbia
  misc_feature: MA Experiment 20001248 PARAMETER Experiment Name: At_Far-red-induction_P Parameter: Timepoint (hr) Value: 4
  misc_feature: MA Experiment 20001248 PARAMETER Experiment Name: At_Far-red-induction_P Parameter: Tissue Value: Whole Plant
  misc_feature: MA Experiment ID: 20001555 Result: Up-regulated in Transcription
  misc_feature: MA Experiment 20001555 PARAMETER Experiment Name: At_Drought_Soil_Dry_P Parameter: Age (day) Value: 24
  misc_feature: MA Experiment 20001555 PARAMETER Experiment Name: At_Drought_Soil_Dry_P Parameter: Organism Value: A. thaliana
  misc_feature: MA Experiment 20001555 PARAMETER Experiment Name: At_Drought_Soil_Dry_P Parameter: Plant Line Value: WS
  misc_feature: MA Experiment 20001555 PARAMETER Experiment Name: At_Drought_Soil_Dry_P Parameter: Post Timepoint (hr) Value: None
  misc_feature: MA Experiment 20001555 PARAMETER Experiment Name: At_Drought_Soil_Dry_P Parameter: Post-Treatment Value: None
  misc_feature: MA Experiment 20001555 PARAMETER Experiment Name: At_Drought_Soil_Dry_P Parameter: Timepoint (day) Value: 10
  misc_feature: MA Experiment 20001555 PARAMETER Experiment Name: At_Drought_Soil_Dry_P Parameter: Treatment Value: Drought vs. No Drought
  misc_feature: MA Experiment ID: 20001906 Result: Up-regulated in Transcription
  misc_feature: MA Experiment 20001906 PARAMETER Experiment Name: At_Drought_Reproduction_P Parameter: Age (day) Value: 35
  misc_feature: MA Experiment 20001906 PARAMETER Experiment Name: At_Drought_Reproduction_P Parameter: Organism Value: A. thaliana
  misc_feature: MA Experiment 20001906 PARAMETER Experiment Name: At_Drought_Reproduction_P Parameter: Plant Line Value: WS
  misc_feature: MA Experiment 20001906 PARAMETER Experiment Name: At_Drought_Reproduction_P Parameter: Timepoint (day) Value: 5
  misc_feature: MA Experiment 20001906 PARAMETER Experiment Name: At_Drought_Reproduction_P Parameter: Tissue Value: Siliques
  misc_feature: MA Experiment 20001906 PARAMETER Experiment Name: At_Drought_Reproduction_P Parameter: Treatment Value: Drought vs. No Drought
  misc_feature: MA Experiment ID: 20001911 Result: Up-regulated in Transcription
  misc_feature: MA Experiment 20001911 PARAMETER Experiment Name: At_Drought_Reproduction_P Parameter: Age (day) Value: 40
  misc_feature: MA Experiment 20001911 PARAMETER Experiment Name: At_Drought_Reproduction_P Parameter: Organism Value: A. thaliana
  misc_feature: MA Experiment 20001911 PARAMETER Experiment Name: At_Drought_Reproduction_P Parameter: Plant Line Value: WS
  misc_feature: MA Experiment 20001911 PARAMETER Experiment Name: At_Drought_Reproduction_P Parameter: Timepoint (day) Value: 10
  misc_feature: MA Experiment 20001911 PARAMETER Experiment Name: At_Drought_Reproduction_P Parameter: Tissue Value: Flowers
  misc_feature: MA Experiment 20001911 PARAMETER Experiment Name: At_Drought_Reproduction_P Parameter: Treatment Value: Drought vs. No Drought

SEQ ID NO: 95231 - protein, 653 aa, Arabidopsis thaliana; identical to SEQ ID NO: 91475
  peptide (1)..(653): Ceres Seq. ID no. 12727914
  misc_feature (188)..(498): Pfam Name: Sulfate transporter family Pfam Description: Sulfate transporter family
  misc_feature (24)..(644): Homolog of NCBI NO: 15220016 NR Description: putative sulphate transporter protein; protein
  misc_feature (24)..(644): Homolog of NCBI NO: 4579913 NR Description: sulfate transporter [Arabidopsis thaliana]
  misc_feature (2)..(648): Homolog of NCBI NO: 1907270 NR Description: sulphate transporter protein [Sporobolus
  misc_feature (9)..(640): Homolog of NCBI NO: 11279065 NR Description: sulfate transporter ATST1 [imported] - thaliana >gi|2285885|dbj|BAA21657.1| sulfate transporter
  misc_feature (9)..(640): Homolog of NCBI NO: 11279064 NR Description: hypothetical protein [imported] - Arabidopsis
  misc_feature (9)..(640): Homolog of NCBI NO: 15231069 NR Description: sulfate transporter ATST1; protein id: supported by cDNA: gi_20466813, supported by cDNA: gi_2285884
  misc_feature (31)..(642): Homolog of NCBI NO: 34902632 NR Description: Putative sulfate transporter ATST1 [Oryza sativa
  misc_feature (9)..(640): Homolog of NCBI NO: 11279066 NR Description: sulfate transporter AST12 [imported] - thaliana >gi|2967456|dbj|BAA25175.1| sulfate transporter
  misc_feature (1)..(640): Homolog of NCBI NO: 24421083 NR Description: sulphate transporter [Triticum aestivum]
  misc_feature (1)..(640): Homolog of NCBI NO: 15238085 NR Description: sulfate transporter; protein id: At5g10180.1, by cDNA: gi_17064939, supported by cDNA: gi_20259973, supported

SEQ ID NO: 95232 - protein, 643 aa, Arabidopsis thaliana; identical to SEQ ID NO: 91476
  peptide (1)..(643): Ceres Seq. ID no. 12727915
  misc_feature (178)..(488): Pfam Name: Sulfate transporter family Pfam Description: Sulfate transporter family
  misc_feature (14)..(634): Homolog of NCBI NO: 15220016 NR Description: putative sulphate transporter protein; protein
  misc_feature (14)..(634): Homolog of NCBI NO: 4579913 NR Description: sulfate transporter [Arabidopsis thaliana]
  misc_feature (1)..(638): Homolog of NCBI NO: 1907270 NR Description: sulphate transporter protein [Sporobolus
  misc_feature (1)..(630): Homolog of NCBI NO: 11279065 NR Description: sulfate transporter ATST1 [imported] - thaliana >gi|2285885|dbj|BAA21657.1| sulfate transporter
  misc_feature (1)..(630): Homolog of NCBI NO: 11279064 NR Description: hypothetical protein [imported] - Arabidopsis
  misc_feature (1)..(630): Homolog of NCBI NO: 15231069 NR Description: sulfate transporter ATST1; protein id: supported by cDNA: gi_20466813, supported by cDNA: gi_2285884
  misc_feature (21)..(632): Homolog of NCBI NO: 34902632 NR Description: Putative sulfate transporter ATST1 [Oryza sativa
  misc_feature (1)..(630): Homolog of NCBI NO: 11279066 NR Description: sulfate transporter AST12 [imported] - thaliana >gi|2967456|dbj|BAA25175.1| sulfate transporter
  misc_feature (1)..(630): Homolog of NCBI NO: 24421083 NR Description: sulphate transporter [Triticum aestivum]
  misc_feature (1)..(630): Homolog of NCBI NO: 15238085 NR Description: sulfate transporter; protein id: At5g10180.1, by cDNA: gi_17064939, supported by cDNA: gi_20259973, supported

SEQ ID NO: 95233 - protein, 501 aa, Arabidopsis thaliana; identical to SEQ ID NO: 91477
  peptide (1)..(501): Ceres Seq. ID no. 12727916
  misc_feature (36)..(346): Pfam Name: Sulfate transporter family Pfam Description: Sulfate transporter family
  misc_feature (1)..(492): Homolog of NCBI NO: 15220016 NR Description: putative sulphate transporter protein; protein
  misc_feature (1)..(492): Homolog of NCBI NO: 4579913 NR Description: sulfate transporter [Arabidopsis thaliana]
  misc_feature (1)..(496): Homolog of NCBI NO: 1907270 NR Description: sulphate transporter protein [Sporobolus
  misc_feature (1)..(488): Homolog of NCBI NO: 11279065 NR Description: sulfate transporter ATST1 [imported] - thaliana >gi|2285885|dbj|BAA21657.1| sulfate transporter
  misc_feature (1)..(488): Homolog of NCBI NO: 11279064 NR Description: hypothetical protein [imported] - Arabidopsis
  misc_feature (1)..(488): Homolog of NCBI NO: 15231069 NR Description: sulfate transporter ATST1; protein id: supported by cDNA: gi_20466813, supported by cDNA: gi_2285884
  misc_feature (1)..(490): Homolog of NCBI NO: 34902632 NR Description: Putative sulfate transporter ATST1 [Oryza sativa
  misc_feature (1)..(488): Homolog of NCBI NO: 11279066 NR Description: sulfate transporter AST12 [imported] - thaliana >gi|2967456|dbj|BAA25175.1| sulfate transporter
  misc_feature (1)..(488): Homolog of NCBI NO: 24421083 NR Description: sulphate transporter [Triticum aestivum]
  misc_feature (1)..(488): Homolog of NCBI NO: 15238085 NR Description: sulfate transporter; protein id: At5g10180.1, by cDNA: gi_17064939, supported by cDNA: gi_20259973, supported

SEQ ID NO: 95234 - DNA, 1334 bp, Arabidopsis thaliana; identical to SEQ ID NO: 91478
  misc_feature (1)..(1334): Ceres Seq. ID no. 12727921
  misc_feature: MA Experiment ID: 20000171 Result: Up-regulated in Transcription
  misc_feature: MA Experiment 20000171 PARAMETER Experiment Name: At_42deg_Heat_P Parameter: Age (day) Value: 14
  misc_feature: MA Experiment 20000171 PARAMETER Experiment Name: At_42deg_Heat_P Parameter: Organism Value: A. thaliana
  misc_feature: MA Experiment 20000171 PARAMETER Experiment Name: At_42deg_Heat_P Parameter: Plant Line Value: WS
  misc_feature: MA Experiment 20000171 PARAMETER Experiment Name: At_42deg_Heat_P Parameter: Temperature (deg C) Value: 42 vs. 22
  misc_feature: MA Experiment 20000171 PARAMETER Experiment Name: At_42deg_Heat_P Parameter: Timepoint (hr) Value: 1
  misc_feature: MA Experiment 20000171 PARAMETER Experiment Name: At_42deg_Heat_P Parameter: Tissue Value: Aerial
  misc_feature: MA Experiment ID: 20000173 Result: Up-regulated in Transcription
  misc_feature: MA Experiment 20000173 PARAMETER Experiment Name: At_42deg_Heat_P Parameter: Age (day) Value: 14
  misc_feature: MA Experiment 20000173 PARAMETER Experiment Name: At_42deg_Heat_P Parameter: Organism Value: A. thaliana
  misc_feature: MA Experiment 20000173 PARAMETER Experiment Name: At_42deg_Heat_P Parameter: Plant Line Value: WS
  misc_feature: MA Experiment 20000173 PARAMETER Experiment Name: At_42deg_Heat_P Parameter: Temperature (deg C) Value: 42 vs. 22
  misc_feature: MA Experiment 20000173 PARAMETER Experiment Name: At_42deg_Heat_P Parameter: Timepoint (hr) Value: 6
  misc_feature: MA Experiment 20000173 PARAMETER Experiment Name: At_42deg_Heat_P Parameter: Tissue Value: Aerial
  misc_feature: MA Experiment ID: 20000234 Result: Up-regulated in Transcription
  misc_feature: MA Experiment 20000234 PARAMETER Experiment Name: At_Siliques_P Parameter: Age (day) Value: 21
  misc_feature: MA Experiment 20000234 PARAMETER Experiment Name: At_Siliques_P Parameter: Organism Value: A. thaliana
  misc_feature: MA Experiment 20000234 PARAMETER Experiment Name: At_Siliques_P Parameter: Plant Line Value: WS
  misc_feature: MA Experiment 20000234 PARAMETER Experiment Name: At_Siliques_P Parameter: Tissue Value: Less Than 5mm Siliques vs. Whole Plant
  misc_feature: MA Experiment ID: 20000437 Result: Up-regulated in Transcription
  misc_feature: MA Experiment 20000437 PARAMETER Experiment Name: At_Drought_P Parameter: Age (day) Value: 8
  misc_feature: MA Experiment 20000437 PARAMETER Experiment Name: At_Drought_P Parameter: Organism Value: A. thaliana
  misc_feature: MA Experiment 20000437 PARAMETER Experiment Name: At_Drought_P Parameter: Plant Line Value: WS
  misc_feature: MA Experiment 20000437 PARAMETER Experiment Name: At_Drought_P Parameter: Timepoint (hr) Value: 24
  misc_feature: MA Experiment 20000437 PARAMETER Experiment Name: At_Drought_P Parameter: Tissue Value: Whole Plant
  misc_feature: MA Experiment 20000437 PARAMETER Experiment Name: At_Drought_P Parameter: Treatment Value: Drought vs. No Drought
  misc_feature: MA Experiment ID: 20000443 Result: Up-regulated in Transcription
  misc_feature: MA Experiment 20000443 PARAMETER Experiment Name: At_1uM_BR-BRZ__P Parameter: Tissue Value: Shoot Apices
  misc_feature: MA Experiment 20000443 PARAMETER Experiment Name: At_1uM_BR-BRZ__P Parameter: Treatment Value: 1uM BRZ vs. No Treatment
  misc_feature: MA Experiment ID: 20000794 Result: Down-regulated in Transcription
  misc_feature: MA Experiment 20000794 PARAMETER Experiment Name: At_Petals_P Parameter: Age (day) Value: 23-25 days
  misc_feature: MA Experiment 20000794 PARAMETER Experiment Name: At_Petals_P Parameter: Plant Line Value: WS
  misc_feature: MA Experiment 20000794 PARAMETER Experiment Name: At_Petals_P Parameter: Tissue Value: Petals vs. Whole plant
  misc_feature: MA Experiment ID: 20001247 Result: Down-regulated in Transcription
  misc_feature: MA Experiment 20001247 PARAMETER Experiment Name: At_Far-red-induction_P Parameter: Age (day) Value: 7
  misc_feature: MA Experiment 20001247 PARAMETER Experiment Name: At_Far-red-induction_P Parameter: Light Value: Far-red vs. White
  misc_feature: MA Experiment 20001247 PARAMETER Experiment Name: At_Far-red-induction_P Parameter: Organism Value: A. thaliana
  misc_feature: MA Experiment 20001247 PARAMETER Experiment Name: At_Far-red-induction_P Parameter: Plant Line Value: Columbia
  misc_feature: MA Experiment 20001247 PARAMETER Experiment Name: At_Far-red-induction_P Parameter: Timepoint (hr) Value: 1
  misc_feature: MA Experiment 20001247 PARAMETER Experiment Name: At_Far-red-induction_P Parameter: Tissue Value: Whole Plant
  misc_feature: MA Experiment ID: 20001248 Result: Down-regulated in Transcription
  misc_feature: MA Experiment 20001248 PARAMETER Experiment Name: At_Far-red-induction_P Parameter: Age (day) Value: 7
  misc_feature: MA Experiment 20001248 PARAMETER Experiment Name: At_Far-red-induction_P Parameter: Light Value: Far-red vs. White
  misc_feature: MA Experiment 20001248 PARAMETER Experiment Name: At_Far-red-induction_P Parameter: Organism Value: A. thaliana
  misc_feature: MA Experiment 20001248 PARAMETER Experiment Name: At_Far-red-induction_P Parameter: Plant Line Value: Columbia
  misc_feature: MA Experiment 20001248 PARAMETER Experiment Name: At_Far-red-induction_P Parameter: Timepoint (hr) Value: 4
  misc_feature: MA Experiment 20001248 PARAMETER Experiment Name: At_Far-red-induction_P Parameter: Tissue Value: Whole Plant
  misc_feature: MA Experiment ID: 20001450 Result: Down-regulated in Transcription
  misc_feature: MA Experiment 20001450 PARAMETER Experiment Name: At_Far-red-induction_P Parameter: Age (day) Value: 7
  misc_feature: MA Experiment 20001450 PARAMETER Experiment Name: At_Far-red-induction_P Parameter: Light Value: Far-red vs. White
  misc_feature: MA Experiment 20001450 PARAMETER Experiment Name: At_Far-red-induction_P Parameter: Organism Value: A. thaliana
  misc_feature: MA Experiment 20001450 PARAMETER Experiment Name: At_Far-red-induction_P Parameter: Plant Line Value: Columbia
  misc_feature: MA Experiment 20001450 PARAMETER Experiment Name: At_Far-red-induction_P Parameter: Timepoint (hr) Value: 8
  misc_feature: MA Experiment 20001450 PARAMETER Experiment Name: At_Far-red-induction_P Parameter: Tissue Value: Whole Plant
  misc_feature: MA Experiment ID: 20001557 Result: Up-regulated in Transcription
  misc_feature: MA Experiment 20001557 PARAMETER Experiment Name: At_Drought_Soil_Dry_P Parameter: Age (day) Value: 27
  misc_feature: MA Experiment 20001557 PARAMETER Experiment Name: At_Drought_Soil_Dry_P Parameter: Organism Value: A. thaliana
  misc_feature: MA Experiment 20001557 PARAMETER Experiment Name: At_Drought_Soil_Dry_P Parameter: Plant Line Value: WS
  misc_feature: MA Experiment 20001557 PARAMETER Experiment Name: At_Drought_Soil_Dry_P Parameter: Post Timepoint (hr) Value: 3
  misc_feature: MA Experiment 20001557 PARAMETER Experiment Name: At_Drought_Soil_Dry_P Parameter: Post-Treatment Value: Re-Water vs. No Drought
  misc_feature: MA Experiment 20001557 PARAMETER Experiment Name: At_Drought_Soil_Dry_P Parameter: Timepoint (day) Value: 13
  misc_feature: MA Experiment 20001557 PARAMETER Experiment Name: At_Drought_Soil_Dry_P Parameter: Treatment Value: Drought vs. No Drought
  misc_feature: MA Experiment ID: 20001560 Result: Up-regulated in Transcription
  misc_feature: MA Experiment 20001560 PARAMETER Experiment Name: At_Drought_Soil_Dry_P Parameter: Age (day) Value: 28
  misc_feature: MA Experiment 20001560 PARAMETER Experiment Name: At_Drought_Soil_Dry_P Parameter: Organism Value: A. thaliana
  misc_feature: MA Experiment 20001560 PARAMETER Experiment Name: At_Drought_Soil_Dry_P Parameter: Plant Line Value: WS
  misc_feature: MA Experiment 20001560 PARAMETER Experiment Name: At_Drought_Soil_Dry_P Parameter: Post Timepoint (hr) Value: None
  misc_feature: MA Experiment 20001560 PARAMETER Experiment Name: At_Drought_Soil_Dry_P Parameter: Post-Treatment Value: None
  misc_feature: MA Experiment 20001560 PARAMETER Experiment Name: At_Drought_Soil_Dry_P Parameter: Timepoint (day) Value: 14
  misc_feature: MA Experiment 20001560 PARAMETER Experiment Name: At_Drought_Soil_Dry_P Parameter: Treatment Value: Drought vs. No Drought
  misc_feature: MA Experiment ID: 20001905 Result: Up-regulated in Transcription
  misc_feature: MA Experiment 20001905 PARAMETER Experiment Name: At_Drought_Reproduction_P Parameter: Age (day) Value: 40
  misc_feature: MA Experiment 20001905 PARAMETER Experiment Name: At_Drought_Reproduction_P Parameter: Organism Value: A. thaliana
  misc_feature: MA Experiment 20001905 PARAMETER Experiment Name: At_Drought_Reproduction_P Parameter: Plant Line Value: WS
  misc_feature: MA Experiment 20001905 PARAMETER Experiment Name: At_Drought_Reproduction_P Parameter: Timepoint (day) Value: 10
  misc_feature: MA Experiment 20001905 PARAMETER Experiment Name: At_Drought_Reproduction_P Parameter: Tissue Value: Rosettes
  misc_feature: MA Experiment 20001905 PARAMETER Experiment Name: At_Drought_Reproduction_P Parameter: Treatment Value: Drought vs. No Drought

SEQ ID NO: 95235 - protein, 314 aa, Arabidopsis thaliana; identical to SEQ ID NO: 91479
  peptide (1)..(314): Ceres Seq. ID no. 12727922
  misc_feature (30)..(233): Pfam Name: SOR/SNZ family Pfam Description: SOR/SNZ family
  misc_feature (1)..(314): Homolog of NCBI NO: 15233273 NR Description: putative ethylene-inducible protein; protein id: supported by cDNA: gi_4103951 [Arabidopsis thaliana] A37 [Arabidopsis thaliana] >gi|4103954|gb|AAD01898.1| A37
  misc_feature (12)..(313): Homolog of NCBI NO: 15240972 NR Description: pyridoxine biosynthesis protein - like; protein At5g01410.1, supported by cDNA: 8877., supported by cDNA: supported by cDNA: gi_17933286, supported by cDNA: gi_20453410
  misc_feature (12)..(313): Homolog of NCBI NO: 21617922 NR Description: pyridoxine biosynthesis protein-like [Arabidopsis
  misc_feature (6)..(313): Homolog of NCBI NO: 10719739 NR Description: putative pyridoxine biosynthetic enzyme
  misc_feature (12)..(313): Homolog of NCBI NO: 2501578 NR Description: ETHYLENE-INDUCIBLE PROTEIN HEVER
  misc_feature (6)..(313): Homolog of NCBI NO: 34394152 NR Description: putative ethylene-inducible protein [Oryza sativa
  misc_feature (12)..(313): Homolog of NCBI NO: 15224470 NR Description: similar to SOR1 from the fungus Cercospora protein id: At2g38230.1, supported by cDNA: 19998., supported by gi_13878066, supported by cDNA: gi_14326482, supported by cDNA:
  misc_feature (12)..(313): Homolog of NCBI NO: 13310484 NR Description: Sor-like protein [Ginkgo biloba]
  misc_feature (6)..(306): Homolog of NCBI NO: 37530308 NR Description: putative pyridoxine/pyridoxal 5-phosphate
  misc_feature (31)..(301): Homolog of NCBI NO: 22970419 NR Description: hypothetical protein [Chloroflexus aurantiacus]

SEQ ID NO: 95236 - protein, 309 aa, Arabidopsis thaliana; identical to SEQ ID NO: 91480
  peptide (1)..(309): Ceres Seq. ID no. 12727923
  misc_feature (25)..(228): Pfam Name: SOR/SNZ family Pfam Description: SOR/SNZ family
  misc_feature (1)..(309): Homolog of NCBI NO: 15233273 NR Description: putative ethylene-inducible protein; protein id: supported by cDNA: gi_4103951 [Arabidopsis thaliana] A37 [Arabidopsis thaliana] >gi|4103954|gb|AAD01898.1| A37
  misc_feature (7)..(308): Homolog of NCBI NO: 15240972 NR Description: pyridoxine biosynthesis protein - like; protein At5g01410.1, supported by cDNA: 8877., supported by cDNA: supported by cDNA: gi_17933286, supported by cDNA: gi_20453410
  misc_feature (7)..(308): Homolog of NCBI NO: 21617922 NR Description: pyridoxine biosynthesis protein-like [Arabidopsis
  misc_feature (1)..(308): Homolog of NCBI NO: 10719739 NR Description: putative pyridoxine biosynthetic enzyme
  misc_feature (7)..(308): Homolog of NCBI NO: 2501578 NR Description: ETHYLENE-INDUCIBLE PROTEIN HEVER
  misc_feature (1)..(308): Homolog of NCBI NO: 34394152 NR Description: putative ethylene-inducible protein [Oryza sativa
  misc_feature (7)..(308): Homolog of NCBI NO: 15224470 NR Description: similar to SOR1 from the fungus Cercospora protein id: At2g38230.1, supported by cDNA: 19998., supported by gi_13878066, supported by cDNA: gi_14326482, supported by cDNA:
  misc_feature (7)..(308): Homolog of NCBI NO: 13310484 NR Description: Sor-like protein [Ginkgo biloba]
  misc_feature (1)..(301): Homolog of NCBI NO: 37530308 NR Description: putative pyridoxine/pyridoxal 5-phosphate
  misc_feature (26)..(296): Homolog of NCBI NO: 22970419 NR Description: hypothetical protein [Chloroflexus aurantiacus]

SEQ ID NO: 95237 - protein, 234 aa, Arabidopsis thaliana; identical to SEQ ID NO: 91481
  peptide (1)..(234): Ceres Seq. ID no. 12727924
  misc_feature (1)..(153): Pfam Name: SOR/SNZ family Pfam Description: SOR/SNZ family
  misc_feature (1)..(234): Homolog of NCBI NO: 15233273 NR Description: putative ethylene-inducible protein; protein id: supported by cDNA: gi_4103951 [Arabidopsis thaliana] A37 [Arabidopsis thaliana] >gi|4103954|gb|AAD01898.1| A37
  misc_feature (1)..(233): Homolog of NCBI NO: 15240972 NR Description: pyridoxine biosynthesis protein - like; protein At5g01410.1, supported by cDNA: 8877., supported by cDNA: supported by cDNA: gi_17933286, supported by cDNA: gi_20453410
  misc_feature (1)..(233): Homolog of NCBI NO: 21617922 NR Description: pyridoxine biosynthesis protein-like [Arabidopsis
  misc_feature (1)..(233): Homolog of NCBI NO: 10719739 NR Description: putative pyridoxine biosynthetic enzyme
  misc_feature (1)..(233): Homolog of NCBI NO: 2501578 NR Description: ETHYLENE-INDUCIBLE PROTEIN HEVER
  misc_feature (1)..(233): Homolog of NCBI NO: 34394152 NR Description: putative ethylene-inducible protein [Oryza sativa
  misc_feature (1)..(233): Homolog of NCBI NO: 15224470 NR Description: similar to SOR1 from the fungus Cercospora protein id: At2g38230.1, supported by cDNA: 19998., supported by gi_13878066, supported by cDNA: gi_14326482, supported by cDNA:
  misc_feature (1)..(233): Homolog of NCBI NO: 13310484 NR Description: Sor-like protein [Ginkgo biloba]
  misc_feature (1)..(226): Homolog of NCBI NO: 37530308 NR Description: putative pyridoxine/pyridoxal 5-phosphate
  misc_feature (1)..(221): Homolog of NCBI NO: 22970419 NR Description: hypothetical protein [Chloroflexus aurantiacus]

SEQ ID NO: 95238 - DNA, 1412 bp, Arabidopsis thaliana; identical to SEQ ID NO: 91482
  misc_feature (1)..(1412): Ceres Seq. ID no. 12727960
  misc_feature: MA Experiment ID: 20000184 Result: Down-regulated in Transcription
  misc_feature: MA Experiment 20000184 PARAMETER Experiment Name: At_Shoots__P Parameter: Age (day) Value: 7
  misc_feature: MA Experiment 20000184 PARAMETER Experiment Name: At_Shoots__P Parameter: Tissue Value: Shoots vs. Whole Plant
  misc_feature: MA Experiment ID: 20000185 Result: Down-regulated in Transcription
  misc_feature: MA Experiment 20000185 PARAMETER Experiment Name: At_Roots__P Parameter: Age (day) Value: 7 vs. 21
  misc_feature: MA Experiment 20000185 PARAMETER Experiment Name: At_Roots__P Parameter: Organism Value: A. thaliana
  misc_feature: MA Experiment 20000185 PARAMETER Experiment Name: At_Roots__P Parameter: Tissue Value: Roots vs. Whole Plant
  misc_feature: MA Experiment ID: 20000234 Result: Down-regulated in Transcription
  misc_feature: MA Experiment 20000234 PARAMETER Experiment Name: At_Siliques_P Parameter: Age (day) Value: 21
  misc_feature: MA Experiment 20000234 PARAMETER Experiment Name: At_Siliques_P Parameter: Organism Value: A. thaliana
  misc_feature: MA Experiment 20000234 PARAMETER Experiment Name: At_Siliques_P Parameter: Plant Line Value: WS
  misc_feature: MA Experiment 20000234 PARAMETER Experiment Name: At_Siliques_P Parameter: Tissue Value: Less Than 5mm Siliques vs. Whole Plant
  misc_feature: MA Experiment ID: 20000235 Result: Down-regulated in Transcription
  misc_feature: MA Experiment 20000235 PARAMETER Experiment Name: At_Siliques_P Parameter: Age (day) Value: 21
  misc_feature: MA Experiment 20000235 PARAMETER Experiment Name: At_Siliques_P Parameter: Organism Value: A. thaliana
  misc_feature: MA Experiment 20000235 PARAMETER Experiment Name: At_Siliques_P Parameter: Plant Line Value: WS
  misc_feature: MA Experiment 20000235 PARAMETER Experiment Name: At_Siliques_P Parameter: Tissue Value: 5-10mm Siliques vs. Whole Plant
  misc_feature: MA Experiment ID: 20000264 Result: Down-regulated in Transcription
  misc_feature: MA Experiment 20000264 PARAMETER Experiment Name: At_Open_Flower_P Parameter: Age (day) Value: 21
  misc_feature: MA Experiment 20000264 PARAMETER Experiment Name: At_Open_Flower_P Parameter: Plant Line Value: WS
  misc_feature: MA Experiment 20000264 PARAMETER Experiment Name: At_Open_Flower_P Parameter: Tissue Value: Open Flower vs. Whole Plant
  misc_feature: MA Experiment ID: 20000268 Result: Down-regulated in Transcription
  misc_feature: MA Experiment 20000268 PARAMETER Experiment Name: At_100mM_NaCl__P Parameter: Age (day) Value: 14
  misc_feature: MA Experiment 20000268 PARAMETER Experiment Name: At_100mM_NaCl__P Parameter: Organism Value: A. thaliana
  misc_feature: MA Experiment 20000268 PARAMETER Experiment Name: At_100mM_NaCl__P Parameter: Plant Line Value: WS
  misc_feature: MA Experiment 20000268 PARAMETER Experiment Name: At_100mM_NaCl__P Parameter: Timepoint (hr) Value: 6
  misc_feature: MA Experiment 20000268 PARAMETER Experiment Name: At_100mM_NaCl__P Parameter: Tissue Value: Whole Plant
  misc_feature: MA Experiment 20000268 PARAMETER Experiment Name: At_100mM_NaCl__P Parameter: Treatment Value: 100mM NaCl vs. No Treatment
  misc_feature: MA Experiment ID: 20000286 Result: Down-regulated in Transcription
  misc_feature: MA Experiment 20000286 PARAMETER Experiment Name: At_Open_Flower_P Parameter: Age (day) Value: 21
  misc_feature: MA Experiment 20000286 PARAMETER Experiment Name: At_Open_Flower_P Parameter: Plant Line Value: WS
  misc_feature: MA Experiment 20000286 PARAMETER Experiment Name: At_Open_Flower_P Parameter: Tissue Value: Half Open vs. Whole Plant
  misc_feature: MA Experiment ID: 20000437 Result: Down-regulated in Transcription
  misc_feature: MA Experiment 20000437 PARAMETER Experiment Name: At_Drought_P Parameter: Age (day) Value: 8
  misc_feature: MA Experiment 20000437 PARAMETER Experiment Name: At_Drought_P Parameter: Organism Value: A. thaliana
  misc_feature: MA Experiment 20000437 PARAMETER Experiment Name: At_Drought_P Parameter: Plant Line Value: WS
  misc_feature: MA Experiment 20000437 PARAMETER Experiment Name: At_Drought_P Parameter: Timepoint (hr) Value: 24
  misc_feature: MA Experiment 20000437 PARAMETER Experiment Name: At_Drought_P Parameter: Tissue Value: Whole Plant
  misc_feature: MA Experiment 20000437 PARAMETER Experiment Name: At_Drought_P Parameter: Treatment Value: Drought vs. No Drought
  misc_feature: MA Experiment ID: 20000439 Result: Down-regulated in Transcription
  misc_feature: MA Experiment 20000439 PARAMETER Experiment Name: At_Roots__P Parameter: Age (day) Value: 14 vs. 21
  misc_feature: MA Experiment 20000439 PARAMETER Experiment Name: At_Roots__P Parameter: Organism Value: A. thaliana
  misc_feature: MA Experiment 20000439 PARAMETER Experiment Name: At_Roots__P Parameter: Tissue Value: Roots vs. Whole Plant
  misc_feature: MA Experiment ID: 20000441 Result: Up-regulated in Transcription
  misc_feature: MA Experiment 20000441 PARAMETER Experiment Name: At_1uM_BR-BRZ__P Parameter: Tissue Value: Shoot Apices
  misc_feature: MA Experiment 20000441 PARAMETER Experiment Name: At_1uM_BR-BRZ__P Parameter: Treatment Value: 1uM BR vs. No Treatment
  misc_feature: MA Experiment ID: 20000443 Result: Up-regulated in Transcription
  misc_feature: MA Experiment 20000443 PARAMETER Experiment Name: At_1uM_BR-BRZ__P Parameter: Tissue Value: Shoot Apices
  misc_feature: MA Experiment 20000443 PARAMETER Experiment Name: At_1uM_BR-BRZ__P Parameter: Treatment Value: 1uM BRZ vs. No Treatment
  misc_feature: MA Experiment ID: 20000460 Result: Up-regulated in Transcription
  misc_feature: MA Experiment 20000460 PARAMETER Experiment Name: At_10percent_PEG_P Parameter: Age (day) Value: 12
  misc_feature: MA Experiment 20000460 PARAMETER Experiment Name: At_10percent_PEG_P Parameter: Organism Value: A. thaliana
  misc_feature: MA Experiment 20000460 PARAMETER Experiment Name: At_10percent_PEG_P Parameter: Plant Line Value: WS
  misc_feature: MA Experiment 20000460 PARAMETER Experiment Name: At_10percent_PEG_P Parameter: Timepoint (day) Value: 12
  misc_feature: MA Experiment 20000460 PARAMETER Experiment Name: At_10percent_PEG_P Parameter: Tissue Value: Whole Plant
  misc_feature: MA Experiment 20000460 PARAMETER Experiment Name: At_10percent_PEG_P Parameter: Treatment Value: 10percent PEG vs. No Treatment
  misc_feature: MA Experiment ID: 20000495 Result: Down-regulated in Transcription
  misc_feature: MA Experiment 20000495 PARAMETER Experiment Name: At_Guard_Cells_P Parameter: Harvest Date Value: 8/2/2002
  misc_feature: MA Experiment 20000495 PARAMETER Experiment Name: At_Guard_Cells_P Parameter: Organism Value: A. thaliana
  misc_feature: MA Experiment 20000495 PARAMETER Experiment Name: At_Guard_Cells_P Parameter: Tissue Value: Guard Cells vs. Leaves
  misc_feature: MA Experiment ID: 20000527 Result: Up-regulated in Transcription
  misc_feature: MA Experiment 20000527 PARAMETER Experiment Name: At_10percent_PEG_P Parameter: Age (day) Value: 20
  misc_feature: MA Experiment 20000527 PARAMETER Experiment Name: At_10percent_PEG_P Parameter: Organism Value: A. thaliana
  misc_feature: MA Experiment 20000527 PARAMETER Experiment Name: At_10percent_PEG_P Parameter: Plant Line Value: WS
  misc_feature: MA Experiment 20000527 PARAMETER Experiment Name: At_10percent_PEG_P Parameter: Timepoint (day) Value: 20
  misc_feature: MA Experiment 20000527 PARAMETER Experiment Name: At_10percent_PEG_P Parameter: Tissue Value: Whole Plant
  misc_feature: MA Experiment 20000527 PARAMETER Experiment Name: At_10percent_PEG_P Parameter: Treatment Value: 10percent PEG vs. No Treatment
  misc_feature: MA Experiment ID: 20000573 Result: Down-regulated in Transcription
  misc_feature: MA Experiment 20000573 PARAMETER Experiment Name: At_100uM_ABA_Mutants__P Parameter: Organism Value: A. thaliana
  misc_feature: MA Experiment 20000573 PARAMETER Experiment Name: At_100uM_ABA_Mutants__P Parameter: Plant Line Value: CS22 vs. Ler wt
  misc_feature: MA Experiment 20000573 PARAMETER Experiment Name: At_100uM_ABA_Mutants__P Parameter: Timepoint (hr) Value: N/A
  misc_feature: MA Experiment 20000573 PARAMETER Experiment Name: At_100uM_ABA_Mutants__P Parameter: Tissue Value: Whole Plant
  misc_feature: MA Experiment 20000573 PARAMETER Experiment Name: At_100uM_ABA_Mutants__P Parameter: Treatment Value: None
  misc_feature: MA Experiment ID: 20000574 Result: Down-regulated in Transcription
  misc_feature: MA Experiment 20000574 PARAMETER Experiment Name: At_100uM_ABA_Mutants__P Parameter: Organism Value: A. thaliana
  misc_feature: MA Experiment 20000574 PARAMETER Experiment Name: At_100uM_ABA_Mutants__P Parameter: Plant Line Value: CS23 vs. Ler wt
  misc_feature: MA Experiment 20000574 PARAMETER Experiment Name: At_100uM_ABA_Mutants__P Parameter: Timepoint (hr) Value: N/A
  misc_feature: MA Experiment 20000574 PARAMETER Experiment Name: At_100uM_ABA_Mutants__P Parameter: Tissue Value: Whole Plant
  misc_feature: MA Experiment 20000574 PARAMETER Experiment Name: At_100uM_ABA_Mutants__P Parameter: Treatment Value: None
  misc_feature: MA Experiment ID: 20000794 Result: Down-regulated in Transcription
  misc_feature: MA Experiment 20000794 PARAMETER Experiment Name: At_Petals_P Parameter: Age (day) Value: 23-25 days
  misc_feature: MA Experiment 20000794 PARAMETER Experiment Name: At_Petals_P Parameter: Plant Line Value: WS
  misc_feature: MA Experiment 20000794 PARAMETER Experiment Name: At_Petals_P Parameter: Tissue Value: Petals vs. Whole plant
  misc_feature: MA Experiment ID: 20001247 Result: Up-regulated in Transcription
  misc_feature: MA Experiment 20001247 PARAMETER Experiment Name: At_Far-red-induction_P Parameter: Age (day) Value: 7
  misc_feature: MA Experiment 20001247 PARAMETER Experiment Name: At_Far-red-induction_P Parameter: Light Value: Far-red vs. White
  misc_feature: MA Experiment 20001247 PARAMETER Experiment Name: At_Far-red-induction_P Parameter: Organism Value: A. thaliana
  misc_feature: MA Experiment 20001247 PARAMETER Experiment Name: At_Far-red-induction_P Parameter: Plant Line Value: Columbia
  misc_feature: MA Experiment 20001247 PARAMETER Experiment Name: At_Far-red-induction_P Parameter: Timepoint (hr) Value: 1
  misc_feature: MA Experiment 20001247 PARAMETER Experiment Name: At_Far-red-induction_P Parameter: Tissue Value: Whole Plant
  misc_feature: MA Experiment ID: 20001450 Result: Down-regulated in Transcription
  misc_feature: MA Experiment 20001450 PARAMETER Experiment Name: At_Far-red-induction_P Parameter: Age (day) Value: 7
  misc_feature: MA Experiment 20001450 PARAMETER Experiment Name: At_Far-red-induction_P Parameter: Light Value: Far-red vs. White
  misc_feature: MA Experiment 20001450 PARAMETER Experiment Name: At_Far-red-induction_P Parameter: Organism Value: A. thaliana
  misc_feature: MA Experiment 20001450 PARAMETER Experiment Name: At_Far-red-induction_P Parameter: Plant Line Value: Columbia
  misc_feature: MA Experiment 20001450 PARAMETER Experiment Name: At_Far-red-induction_P Parameter: Timepoint (hr) Value: 8
  misc_feature: MA Experiment 20001450 PARAMETER Experiment Name: At_Far-red-induction_P Parameter: Tissue Value: Whole Plant
  misc_feature: MA Experiment ID: 20001451 Result: Down-regulated in Transcription
  misc_feature: MA Experiment 20001451 PARAMETER Experiment Name: At_Far-red-induction_P Parameter: Age (day) Value: 7
  misc_feature: MA Experiment 20001451 PARAMETER Experiment Name: At_Far-red-induction_P Parameter: Light Value: Far-red vs. White
  misc_feature: MA Experiment 20001451 PARAMETER Experiment Name: At_Far-red-induction_P Parameter: Organism Value: A. thaliana
  misc_feature: MA Experiment 20001451 PARAMETER Experiment Name: At_Far-red-induction_P Parameter: Plant Line Value: Columbia
  misc_feature: MA Experiment 20001451 PARAMETER Experiment Name: At_Far-red-induction_P Parameter: Timepoint (hr) Value: 24
  misc_feature: MA Experiment 20001451 PARAMETER Experiment Name: At_Far-red-induction_P Parameter: Tissue Value: Whole Plant
  misc_feature: MA Experiment ID: 20001555 Result: Down-regulated in Transcription
  misc_feature: MA Experiment 20001555 PARAMETER Experiment Name: At_Drought_Soil_Dry_P Parameter: Age (day) Value: 24
  misc_feature: MA Experiment 20001555 PARAMETER Experiment Name: At_Drought_Soil_Dry_P Parameter: Organism Value: A. thaliana
  misc_feature: MA Experiment 20001555 PARAMETER Experiment Name: At_Drought_Soil_Dry_P Parameter: Plant Line Value: WS
  misc_feature: MA Experiment 20001555 PARAMETER Experiment Name: At_Drought_Soil_Dry_P Parameter: Post Timepoint (hr) Value: None
  misc_feature: MA Experiment 20001555 PARAMETER Experiment Name: At_Drought_Soil_Dry_P Parameter: Post-Treatment Value: None
  misc_feature: MA Experiment 20001555 PARAMETER Experiment Name: At_Drought_Soil_Dry_P Parameter: Timepoint (day) Value: 10
  misc_feature: MA Experiment 20001555 PARAMETER Experiment Name: At_Drought_Soil_Dry_P Parameter: Treatment Value: Drought vs. No Drought
  misc_feature: MA Experiment ID: 20001755 Result: Up-regulated in Transcription
  misc_feature: MA Experiment 20001755 PARAMETER Experiment Name: At_50mM_NH4NO3_L-to-H_P Parameter: Timepoint (hr) Value: 2
  misc_feature: MA Experiment 20001755 PARAMETER Experiment Name: At_50mM_NH4NO3_L-to-H_P Parameter: Tissue Value: Leaf
  misc_feature: MA Experiment 20001755 PARAMETER Experiment Name: At_50mM_NH4NO3_L-to-H_P Parameter: Treatment Value: 50mM NH4NO3 vs 100mM Mannitol
  misc_feature: MA Experiment ID: 20001904 Result: Down-regulated in Transcription
  misc_feature: MA Experiment 20001904 PARAMETER Experiment Name: At_Drought_Reproduction_P Parameter: Age (day) Value: 37
  misc_feature: MA Experiment 20001904 PARAMETER Experiment Name: At_Drought_Reproduction_P Parameter: Organism Value: A. thaliana
  misc_feature: MA Experiment 20001904 PARAMETER Experiment Name: At_Drought_Reproduction_P Parameter: Plant Line Value: WS
  misc_feature: MA Experiment 20001904 PARAMETER Experiment Name: At_Drought_Reproduction_P Parameter: Timepoint (day) Value: 7
  misc_feature: MA Experiment 20001904 PARAMETER Experiment Name: At_Drought_Reproduction_P Parameter: Tissue Value: Rosettes
  misc_feature: MA Experiment 20001904 PARAMETER Experiment Name: At_Drought_Reproduction_P Parameter: Treatment Value: Drought vs. No Drought
  misc_feature: MA Experiment ID: 20001905 Result: Down-regulated in Transcription
  misc_feature: MA Experiment 20001905 PARAMETER Experiment Name: At_Drought_Reproduction_P Parameter: Age (day) Value: 40
  misc_feature: MA Experiment 20001905 PARAMETER Experiment Name: At_Drought_Reproduction_P Parameter: Organism Value: A. thaliana
  misc_feature: MA Experiment 20001905 PARAMETER Experiment Name: At_Drought_Reproduction_P Parameter: Plant Line Value: WS
  misc_feature: MA Experiment 20001905 PARAMETER Experiment Name: At_Drought_Reproduction_P Parameter: Timepoint (day) Value: 10
  misc_feature: MA Experiment 20001905 PARAMETER Experiment Name: At_Drought_Reproduction_P Parameter: Tissue Value: Rosettes
  misc_feature: MA Experiment 20001905 PARAMETER Experiment Name: At_Drought_Reproduction_P Parameter: Treatment Value: Drought vs. No Drought

SEQ ID NO: 95239 - protein, 371 aa, Arabidopsis thaliana; identical to SEQ ID NO: 91483
  peptide (1)..(371): Ceres Seq. ID no. 12727961
  misc_feature (11)..(143): Pfam Name: TIR domain Pfam Description: TIR domain
  misc_feature (1)..(371): Homolog of NCBI NO: 15218632 NR Description: disease resistance protein (TIR-NBS class), protein id: At1g72940.1, supported by cDNA: gi_18086371
  misc_feature (2)..(371): Homolog of NCBI NO: 15219332 NR Description: disease resistance protein (TIR-NBS class), protein id: At1g72950.1 [Arabidopsis thaliana]
  misc_feature (1)..(357): Homolog of NCBI NO: 15218623 NR Description: disease resistance protein (TIR-NBS class), protein id: At1g72900.1 [Arabidopsis thaliana]
  misc_feature (1)..(362): Homolog of NCBI NO: 15218624 NR Description: disease resistance protein (TIR-NBS class), protein id: At1g72910.1, supported by cDNA: gi_20466363 thaliana] >gi|25406230|pir||C96754 Similar to part of disease
  misc_feature (1)..(362): Homolog of NCBI NO: 20466364 NR Description: disease resistance protein, putative [Arabidopsis >gi|23198072|gb|AAN15563.1| disease resistance protein, putative
  misc_feature (1)..(233): Homolog of NCBI NO: 15218627 NR Description: disease resistance protein (TIR-NBS class), protein id: At1g72920.1 [Arabidopsis thaliana]
  misc_feature (1)..(362): Homolog of NCBI NO: 24417364 NR Description: unknown [Arabidopsis thaliana]
  misc_feature (1)..(354): Homolog of NCBI NO: 8778463 NR Description: F1L3.31 [Arabidopsis thaliana]
  misc_feature (1)..(354): Homolog of NCBI NO: 15220798 NR Description: disease resistance protein (TIR class), putative;
  misc_feature (1)..(347): Homolog of NCBI NO: 15218621 NR Description: disease resistance protein (TIR-NBS class),

SEQ ID NO: 95240 - protein, 284 aa, Arabidopsis thaliana; identical to SEQ ID NO: 91484
  peptide (1)..(284): Ceres Seq. ID no. 12727962
  misc_feature (1)..(56): Pfam Name: TIR domain Pfam Description: TIR domain
  misc_feature (1)..(284): Homolog of NCBI NO: 15218632 NR Description: disease resistance protein (TIR-NBS class), protein id: At1g72940.1, supported by cDNA: gi_18086371
  misc_feature (1)..(284): Homolog of NCBI NO: 15219332 NR Description: disease resistance protein (TIR-NBS class), protein id: At1g72950.1 [Arabidopsis thaliana]
  misc_feature (1)..(270): Homolog of NCBI NO: 15218623 NR Description: disease resistance protein (TIR-NBS class), protein id: At1g72900.1 [Arabidopsis thaliana]
  misc_feature (1)..(275): Homolog of NCBI NO: 15218624 NR Description: disease resistance protein (TIR-NBS class), protein id: At1g72910.1, supported by cDNA: gi_20466363 thaliana] >gi|25406230|pir||C96754 Similar to part of disease
  misc_feature (1)..(275): Homolog of NCBI NO: 20466364 NR Description: disease resistance protein, putative [Arabidopsis >gi|23198072|gb|AAN15563.1| disease resistance protein, putative
  misc_feature (1)..(146): Homolog of NCBI NO: 15218627 NR Description: disease resistance protein (TIR-NBS class), protein id: At1g72920.1 [Arabidopsis thaliana]
  misc_feature (1)..(275): Homolog of NCBI NO: 24417364 NR Description: unknown [Arabidopsis thaliana]
  misc_feature (1)..(267): Homolog of NCBI NO: 8778463 NR Description: F1L3.31 [Arabidopsis thaliana]
  misc_feature (1)..(267): Homolog of NCBI NO: 15220798 NR Description: disease resistance protein (TIR class), putative;
  misc_feature (1)..(260): Homolog of NCBI NO: 15218621 NR Description: disease resistance protein (TIR-NBS class),

SEQ ID NO: 95241 - protein, 273 aa, Arabidopsis thaliana; identical to SEQ ID NO: 91485
  peptide (1)..(273): Ceres Seq. ID no. 12727963
  misc_feature (70)..(143): Pfam Name: NB-ARC domain Pfam Description: NB-ARC domain
  misc_feature (1)..(273): Homolog of NCBI NO: 15218632 NR Description: disease resistance protein (TIR-NBS class), protein id: At1g72940.1, supported by cDNA: gi_18086371
  misc_feature (1)..(273): Homolog of NCBI NO: 15219332 NR Description: disease resistance protein (TIR-NBS class), protein id: At1g72950.1 [Arabidopsis thaliana]
  misc_feature (1)..(259): Homolog of NCBI NO: 15218623 NR Description: disease resistance protein (TIR-NBS class), protein id: At1g72900.1 [Arabidopsis thaliana]
  misc_feature (1)..(264): Homolog of NCBI NO: 15218624 NR Description: disease resistance protein (TIR-NBS class), protein id: At1g72910.1, supported by cDNA: gi_20466363 thaliana] >gi|25406230|pir||C96754 Similar to part of disease
  misc_feature (1)..(264): Homolog of NCBI NO: 20466364 NR Description: disease resistance protein, putative [Arabidopsis >gi|23198072|gb|AAN15563.1| disease resistance protein, putative
  misc_feature (1)..(135): Homolog of NCBI NO: 15218627 NR Description: disease resistance protein (TIR-NBS class), protein id: At1g72920.1 [Arabidopsis thaliana]
  misc_feature (1)..(264): Homolog of NCBI NO: 24417364 NR Description: unknown [Arabidopsis thaliana]
  misc_feature (1)..(256): Homolog of NCBI NO: 8778463 NR Description: F1L3.31 [Arabidopsis thaliana]
  misc_feature (1)..(256): Homolog of NCBI NO: 15220798 NR Description: disease resistance protein (TIR class), putative;
  misc_feature (1)..(249): Homolog of NCBI NO: 15218621 NR Description: disease resistance protein (TIR-NBS class),

SEQ ID NO: 95242 - DNA, 2101 bp, Arabidopsis thaliana; identical to SEQ ID NO: 91486
  misc_feature (1)..(2101): Ceres Seq. ID no. 12727964
  misc_feature: MA Experiment ID: 108434 Result: Up-regulated in Transcription
  misc_feature: MA Experiment 108434 PARAMETER Experiment Name: At_Root_Tips_cDNA_P Parameter: Tissue Value: Root Tips
  misc_feature: MA Experiment ID: 108461 Result: Up-regulated in Transcription
  misc_feature: MA Experiment 108461 PARAMETER Experiment Name: At_Germinating_Seeds_cDNA_P Parameter: Age (day) Value: 1 vs. 0
  misc_feature: MA Experiment 108461 PARAMETER Experiment Name: At_Germinating_Seeds_cDNA_P Parameter: Tissue Value: Germinating Seeds
  misc_feature: MA Experiment ID: 108462 Result: Up-regulated in Transcription
  misc_feature: MA Experiment 108462 PARAMETER Experiment Name: At_Germinating_Seeds_cDNA_P Parameter: Age (day) Value: 2 vs. 0
  misc_feature: MA Experiment 108462 PARAMETER Experiment Name: At_Germinating_Seeds_cDNA_P Parameter: Tissue Value: Germinating Seeds
  misc_feature: MA Experiment ID: 108573 Result: Down-regulated in Transcription
  misc_feature: MA Experiment 108573 PARAMETER Experiment Name: At_Drought_cDNA_P Parameter: Timepoint (hr) Value: 6
  misc_feature: MA Experiment 108573 PARAMETER Experiment Name: At_Drought_cDNA_P Parameter: Tissue Value: Aerial
  misc_feature: MA Experiment 108573 PARAMETER Experiment Name: At_Drought_cDNA_P Parameter: Treatment Value: Drought vs. No Drought
  misc_feature: MA Experiment ID: 108576 Result: Down-regulated in Transcription
  misc_feature: MA Experiment 108576 PARAMETER Experiment Name: At_42deg_Heat_cDNA_P Parameter: Temperature (deg C) Value: 42 vs. 22
  misc_feature: MA Experiment 108576 PARAMETER Experiment Name: At_42deg_Heat_cDNA_P Parameter: Timepoint (hr) Value: 1
  misc_feature: MA Experiment 108576 PARAMETER Experiment Name: At_42deg_Heat_cDNA_P Parameter: Tissue Value: Aerial
  misc_feature: MA Experiment ID: 108579 Result: Up-regulated in Transcription
  misc_feature: MA Experiment 108579 PARAMETER Experiment Name: At_4deg_Cold_cDNA_P Parameter: Temperature (deg C) Value: 4 vs. 22
  misc_feature: MA Experiment 108579 PARAMETER Experiment Name: At_4deg_Cold_cDNA_P Parameter: Timepoint (hr) Value: 6
  misc_feature: MA Experiment 108579 PARAMETER Experiment Name: At_4deg_Cold_cDNA_P Parameter: Tissue Value: Aerial
  misc_feature: MA Experiment ID: 108595 Result: Up-regulated in Transcription
  misc_feature: MA Experiment 108595 PARAMETER Experiment Name: At_Ler-pi_Ovule_cDNA_P Parameter: Plant Line Value: null
  misc_feature: MA Experiment ID: 20000069 Result: Down-regulated in Transcription
  misc_feature: MA Experiment 20000069 PARAMETER Experiment Name: At_100uM_ABA_Mutants_cDNA_P Parameter: Plant Line Value: CS23
  misc_feature: MA Experiment 20000069 PARAMETER Experiment Name: At_100uM_ABA_Mutants_cDNA_P Parameter: Timepoint (hr) Value: 6
  misc_feature: MA Experiment 20000069 PARAMETER Experiment Name: At_100uM_ABA_Mutants_cDNA_P Parameter: Tissue Value: Aerial
  misc_feature: MA Experiment 20000069 PARAMETER Experiment Name: At_100uM_ABA_Mutants_cDNA_P Parameter: Treatment Value: 100uM ABA vs. No Treatment
  misc_feature: MA Experiment ID: 20000070 Result: Down-regulated in Transcription
  misc_feature: MA Experiment 20000070 PARAMETER Experiment Name: At_100uM_ABA_Mutants_cDNA_P Parameter: Plant Line Value: CS24
  misc_feature: MA Experiment 20000070 PARAMETER Experiment Name: At_100uM_ABA_Mutants_cDNA_P Parameter: Timepoint (hr) Value: 6
  misc_feature: MA Experiment 20000070 PARAMETER Experiment Name: At_100uM_ABA_Mutants_cDNA_P Parameter: Tissue Value: Aerial
  misc_feature: MA Experiment 20000070 PARAMETER Experiment Name: At_100uM_ABA_Mutants_cDNA_P Parameter: Treatment Value: 100uM ABA vs. No Treatment
  misc_feature: MA Experiment ID: 20000071 Result: Down-regulated in Transcription
  misc_feature: MA Experiment 20000071 PARAMETER Experiment Name: At_100uM_ABA_Mutants_cDNA_P Parameter: Plant Line Value: CS8104
  misc_feature: MA Experiment 20000071 PARAMETER Experiment Name: At_100uM_ABA_Mutants_cDNA_P Parameter: Timepoint (hr) Value: 6
  misc_feature: MA Experiment 20000071 PARAMETER Experiment Name: At_100uM_ABA_Mutants_cDNA_P Parameter: Tissue Value: Aerial
  misc_feature: MA Experiment 20000071 PARAMETER Experiment Name: At_100uM_ABA_Mutants_cDNA_P Parameter: Treatment Value: 100uM ABA vs. No Treatment
  misc_feature: MA Experiment ID: 20000072 Result: Down-regulated in Transcription
  misc_feature: MA Experiment 20000072 PARAMETER Experiment Name: At_100uM_ABA_Mutants_cDNA_P Parameter: Plant Line Value: CS8105
  misc_feature: MA Experiment 20000072 PARAMETER Experiment Name: At_100uM_ABA_Mutants_cDNA_P Parameter: Timepoint (hr) Value: 6
  misc_feature: MA Experiment 20000072 PARAMETER Experiment Name: At_100uM_ABA_Mutants_cDNA_P Parameter: Tissue Value: Aerial
  misc_feature: MA Experiment 20000072 PARAMETER Experiment Name: At_100uM_ABA_Mutants_cDNA_P Parameter: Treatment Value: 100uM ABA vs. No Treatment
  misc_feature: MA Experiment ID: 20000086 Result: Down-regulated in Transcription
  misc_feature: MA Experiment 20000086 PARAMETER Experiment Name: At_100uM_ABA_Mutants_cDNA_P Parameter: Plant Line Value: CS22
  misc_feature: MA Experiment 20000086 PARAMETER Experiment Name: At_100uM_ABA_Mutants_cDNA_P Parameter: Timepoint (hr) Value: 6
  misc_feature: MA Experiment 20000086 PARAMETER Experiment Name: At_100uM_ABA_Mutants_cDNA_P Parameter: Tissue Value: Aerial
  misc_feature: MA Experiment 20000086 PARAMETER Experiment Name: At_100uM_ABA_Mutants_cDNA_P Parameter: Treatment Value: 100uM ABA vs. No Treatment
  misc_feature: MA Experiment ID: 20000087 Result: Down-regulated in Transcription
  misc_feature: MA Experiment 20000087 PARAMETER Experiment Name: At_100uM_ABA_Mutants_cDNA_P Parameter: Plant Line Value: WS
  misc_feature: MA Experiment 20000087 PARAMETER Experiment Name: At_100uM_ABA_Mutants_cDNA_P Parameter: Timepoint (hr) Value: 6
  misc_feature: MA Experiment 20000087 PARAMETER Experiment Name: At_100uM_ABA_Mutants_cDNA_P Parameter: Tissue Value: Aerial
  misc_feature: MA Experiment 20000087 PARAMETER Experiment Name: At_100uM_ABA_Mutants_cDNA_P Parameter: Treatment Value: 100uM ABA vs. No Treatment
  misc_feature: MA Experiment ID: 20000090 Result: Down-regulated in Transcription
  misc_feature: MA Experiment ID: 20000093 Result: Down-regulated in Transcription
  misc_feature: MA Experiment 20000093 PARAMETER Experiment Name: At_42deg_Heat_cDNA_P Parameter: Temperature (deg C) Value: 42 vs. 22
  misc_feature: MA Experiment 20000093 PARAMETER Experiment Name: At_42deg_Heat_cDNA_P Parameter: Timepoint (hr) Value: 0.5
  misc_feature: MA Experiment 20000093 PARAMETER Experiment Name: At_42deg_Heat_cDNA_P Parameter: Tissue Value: Aerial
  misc_feature: MA Experiment ID: 20000111 Result: Down-regulated in Transcription
  misc_feature: MA Experiment 20000111 PARAMETER Experiment Name: At_42deg_Heat_cDNA_P Parameter: Temperature (deg C) Value: 42 vs. 22
  misc_feature: MA Experiment 20000111 PARAMETER Experiment Name: At_42deg_Heat_cDNA_P Parameter: Timepoint (hr) Value: 6
  misc_feature: MA Experiment 20000111 PARAMETER Experiment Name: At_42deg_Heat_cDNA_P Parameter: Tissue Value: Aerial
  misc_feature: MA Experiment ID: 20000112 Result: Down-regulated in Transcription
  misc_feature: MA Experiment 20000112 PARAMETER Experiment Name: At_42deg_Heat_cDNA_P Parameter: Temperature (deg C) Value: 42 vs. 22
  misc_feature: MA Experiment 20000112 PARAMETER Experiment Name: At_42deg_Heat_cDNA_P Parameter: Timepoint (hr) Value: 2
  misc_feature: MA Experiment 20000112 PARAMETER Experiment Name: At_42deg_Heat_cDNA_P Parameter: Tissue Value: Aerial
  misc_feature: MA Experiment ID: 20000113 Result: Down-regulated in Transcription
  misc_feature: MA Experiment 20000113 PARAMETER Experiment Name: At_42deg_Heat_cDNA_P Parameter: Temperature (deg C) Value: 42 vs. 22
  misc_feature: MA Experiment 20000113 PARAMETER Experiment Name: At_42deg_Heat_cDNA_P Parameter: Timepoint (hr) Value: 8
  misc_feature: MA Experiment 20000113 PARAMETER Experiment Name: At_42deg_Heat_cDNA_P Parameter: Tissue Value: Aerial
  misc_feature: MA Experiment ID: 20000117 Result: Down-regulated in Transcription
  misc_feature: MA Experiment 20000117 PARAMETER Experiment Name: At_100uM_ABA_Mutants_cDNA_P Parameter: Plant Line Value: Columbia
  misc_feature: MA Experiment 20000117 PARAMETER Experiment Name: At_100uM_ABA_Mutants_cDNA_P Parameter: Timepoint (hr) Value: 6
  misc_feature: MA Experiment 20000117 PARAMETER Experiment Name: At_100uM_ABA_Mutants_cDNA_P Parameter: Tissue Value: Aerial
  misc_feature: MA Experiment 20000117 PARAMETER Experiment Name: At_100uM_ABA_Mutants_cDNA_P Parameter: Treatment Value: 100uM ABA vs. No Treatment
  misc_feature: MA Experiment ID: 20000144 Result: Down-regulated in Transcription
  misc_feature: MA Experiment 20000144 PARAMETER Experiment Name: At_42deg_Heat_cDNA_P Parameter: Temperature (deg C) Value: 42 vs. 22
  misc_feature: MA Experiment 20000144 PARAMETER Experiment Name: At_42deg_Heat_cDNA_P Parameter: Timepoint (hr) Value: 1
  misc_feature: MA Experiment 20000144 PARAMETER Experiment Name: At_42deg_Heat_cDNA_P Parameter: Tissue Value: Aerial
  misc_feature: MA Experiment ID: 20000171 Result: Down-regulated in Transcription
  misc_feature: MA Experiment 20000171 PARAMETER Experiment Name: At_42deg_Heat_P Parameter: Age (day) Value: 14
  misc_feature: MA Experiment 20000171 PARAMETER Experiment Name: At_42deg_Heat_P Parameter: Organism Value: A. thaliana
  misc_feature: MA Experiment 20000171 PARAMETER Experiment Name: At_42deg_Heat_P Parameter: Plant Line Value: WS
  misc_feature: MA Experiment 20000171 PARAMETER Experiment Name: At_42deg_Heat_P Parameter: Temperature (deg C) Value: 42 vs. 22
  misc_feature: MA Experiment 20000171 PARAMETER Experiment Name: At_42deg_Heat_P Parameter: Timepoint (hr) Value: 1
  misc_feature: MA Experiment 20000171 PARAMETER Experiment Name: At_42deg_Heat_P Parameter: Tissue Value: Aerial
  misc_feature: MA Experiment ID: 20000180 Result: Up-regulated in Transcription
  misc_feature: MA Experiment 20000180 PARAMETER Experiment Name: At_Germinating_Seeds_P Parameter: Age (hr) Value: 24 vs. 0
  misc_feature: MA Experiment 20000180 PARAMETER Experiment Name: At_Germinating_Seeds_P Parameter: Tissue Value: Germinating Seeds
  misc_feature: MA Experiment ID: 20000184 Result: Up-regulated in Transcription
  misc_feature: MA Experiment 20000184 PARAMETER Experiment Name: At_Shoots__P Parameter: Age (day) Value: 7
  misc_feature: MA Experiment 20000184 PARAMETER Experiment Name: At_Shoots__P Parameter: Tissue Value: Shoots vs. Whole Plant
  misc_feature: MA Experiment ID: 20000185 Result: Down-regulated in Transcription
  misc_feature: MA Experiment 20000185 PARAMETER Experiment Name: At_Roots__P Parameter: Age (day) Value: 7 vs. 21
  misc_feature: MA Experiment 20000185 PARAMETER Experiment Name: At_Roots__P Parameter: Organism Value: A. thaliana
  misc_feature: MA Experiment 20000185 PARAMETER Experiment Name: At_Roots__P Parameter: Tissue Value: Roots vs. Whole Plant
  misc_feature: MA Experiment ID: 20000224 Result: Up-regulated in Transcription
  misc_feature: MA Experiment ID: 20000234 Result: Up-regulated in Transcription
  misc_feature: MA Experiment 20000234 PARAMETER Experiment Name: At_Siliques_P Parameter: Age (day) Value: 21
  misc_feature: MA Experiment 20000234 PARAMETER Experiment Name: At_Siliques_P Parameter: Organism Value: A. thaliana
  misc_feature: MA Experiment 20000234 PARAMETER Experiment Name: At_Siliques_P Parameter: Plant Line Value: WS
  misc_feature: MA Experiment 20000234 PARAMETER Experiment Name: At_Siliques_P Parameter: Tissue Value: Less Than 5mm Siliques vs. Whole Plant
  misc_feature: MA Experiment ID: 20000235 Result: Up-regulated in Transcription
  misc_feature: MA Experiment 20000235 PARAMETER Experiment Name: At_Siliques_P Parameter: Age (day) Value: 21
  misc_feature: MA Experiment 20000235 PARAMETER Experiment Name: At_Siliques_P Parameter: Organism Value: A. thaliana
  misc_feature: MA Experiment 20000235 PARAMETER Experiment Name: At_Siliques_P Parameter: Plant Line Value: WS
  misc_feature: MA Experiment 20000235 PARAMETER Experiment Name: At_Siliques_P Parameter: Tissue Value: 5-10mm Siliques vs. Whole Plant
  misc_feature: MA Experiment ID: 20000264 Result: Up-regulated in Transcription
  misc_feature: MA Experiment 20000264 PARAMETER Experiment Name: At_Open_Flower_P Parameter: Age (day) Value: 21
  misc_feature: MA Experiment 20000264 PARAMETER Experiment Name: At_Open_Flower_P Parameter: Plant Line Value: WS
  misc_feature: MA Experiment 20000264 PARAMETER Experiment Name: At_Open_Flower_P Parameter: Tissue Value: Open Flower vs. Whole Plant
  misc_feature: MA Experiment ID: 20000265 Result: Up-regulated in Transcription
  misc_feature: MA Experiment 20000265 PARAMETER Experiment Name: At_Open_Flower_P Parameter: Age (day) Value: 21
  misc_feature: MA Experiment 20000265 PARAMETER Experiment Name: At_Open_Flower_P Parameter: Plant Line Value: WS
  misc_feature: MA Experiment 20000265 PARAMETER Experiment Name: At_Open_Flower_P Parameter: Tissue Value: Closed Flower vs. Whole Plant
  misc_feature: MA Experiment ID: 20000286 Result: Up-regulated in Transcription
  misc_feature: MA Experiment 20000286 PARAMETER Experiment Name: At_Open_Flower_P Parameter: Age (day) Value: 21
  misc_feature: MA Experiment 20000286 PARAMETER Experiment Name: At_Open_Flower_P Parameter: Plant Line Value: WS
  misc_feature: MA Experiment 20000286 PARAMETER Experiment Name: At_Open_Flower_P Parameter: Tissue Value: Half Open vs. Whole Plant
  misc_feature: MA Experiment ID: 20000436 Result: Down-regulated in Transcription
  misc_feature: MA Experiment 20000436 PARAMETER Experiment Name: At_Drought_P Parameter: Age (day) Value: 7
  misc_feature: MA Experiment 20000436 PARAMETER Experiment Name: At_Drought_P Parameter: Organism Value: A. thaliana
  misc_feature: MA Experiment 20000436 PARAMETER Experiment Name: At_Drought_P Parameter: Plant Line Value: WS
  misc_feature: MA Experiment 20000436 PARAMETER Experiment Name: At_Drought_P Parameter: Timepoint (hr) Value: 12
  misc_feature: MA Experiment 20000436 PARAMETER Experiment Name: At_Drought_P Parameter: Tissue Value: Whole Plant
  misc_feature: MA Experiment 20000436 PARAMETER Experiment Name: At_Drought_P Parameter: Treatment Value: Drought vs. No Drought
  misc_feature: MA Experiment ID: 20000437 Result: Down-regulated in Transcription
  misc_feature: MA Experiment 20000437 PARAMETER Experiment Name: At_Drought_P Parameter: Age (day) Value: 8
  misc_feature: MA Experiment 20000437 PARAMETER Experiment Name: At_Drought_P Parameter: Organism Value: A. thaliana
  misc_feature: MA Experiment 20000437 PARAMETER Experiment Name: At_Drought_P Parameter: Plant Line Value: WS
  misc_feature: MA Experiment 20000437 PARAMETER Experiment Name: At_Drought_P Parameter: Timepoint (hr) Value: 24
  misc_feature: MA Experiment 20000437 PARAMETER Experiment Name: At_Drought_P Parameter: Tissue Value: Whole Plant
  misc_feature: MA Experiment 20000437 PARAMETER Experiment Name: At_Drought_P Parameter: Treatment Value: Drought vs. No Drought
  misc_feature: MA Experiment ID: 20000439 Result: Down-regulated in Transcription
  misc_feature: MA Experiment 20000439 PARAMETER Experiment Name: At_Roots__P Parameter: Age (day) Value: 14 vs. 21
  misc_feature: MA Experiment 20000439 PARAMETER Experiment Name: At_Roots__P Parameter: Organism Value: A. thaliana
  misc_feature: MA Experiment 20000439 PARAMETER Experiment Name: At_Roots__P Parameter: Tissue Value: Roots vs. Whole Plant
  misc_feature: MA Experiment ID: 20000573 Result: Down-regulated in Transcription
  misc_feature: MA Experiment 20000573 PARAMETER Experiment Name: At_100uM_ABA_Mutants__P Parameter: Organism Value: A. thaliana
  misc_feature: MA Experiment 20000573 PARAMETER Experiment Name: At_100uM_ABA_Mutants__P Parameter: Plant Line Value: CS22 vs. Ler wt
  misc_feature: MA Experiment 20000573 PARAMETER Experiment Name: At_100uM_ABA_Mutants__P Parameter: Timepoint (hr) Value: N/A
  misc_feature: MA Experiment 20000573 PARAMETER Experiment Name: At_100uM_ABA_Mutants__P Parameter: Tissue Value: Whole Plant
  misc_feature: MA Experiment 20000573 PARAMETER Experiment Name: At_100uM_ABA_Mutants__P Parameter: Treatment Value: None
  misc_feature: MA Experiment ID: 20000574 Result: Down-regulated in Transcription
  misc_feature: MA Experiment 20000574 PARAMETER Experiment Name: At_100uM_ABA_Mutants__P Parameter: Organism Value: A. thaliana
  misc_feature: MA Experiment 20000574 PARAMETER Experiment Name: At_100uM_ABA_Mutants__P Parameter: Plant Line Value: CS23 vs. Ler wt
  misc_feature: MA Experiment 20000574 PARAMETER Experiment Name: At_100uM_ABA_Mutants__P Parameter: Timepoint (hr) Value: N/A
  misc_feature: MA Experiment 20000574 PARAMETER Experiment Name: At_100uM_ABA_Mutants__P Parameter: Tissue Value: Whole Plant
  misc_feature: MA Experiment 20000574 PARAMETER Experiment Name: At_100uM_ABA_Mutants__P Parameter: Treatment Value: None
  misc_feature: MA Experiment ID: 20000794 Result: Down-regulated in Transcription
  misc_feature: MA Experiment 20000794 PARAMETER Experiment Name: At_Petals_P Parameter: Age (day) Value: 23-25 days
  misc_feature: MA Experiment 20000794 PARAMETER Experiment Name: At_Petals_P Parameter: Plant Line Value: WS
  misc_feature: MA Experiment 20000794 PARAMETER Experiment Name: At_Petals_P Parameter: Tissue Value: Petals vs. Whole plant
  misc_feature: MA Experiment ID: 20001248 Result: Down-regulated in Transcription
  misc_feature: MA Experiment 20001248 PARAMETER Experiment Name: At_Far-red-induction_P Parameter: Age (day) Value: 7
  misc_feature: MA Experiment 20001248 PARAMETER Experiment Name: At_Far-red-induction_P Parameter: Light Value: Far-red vs. White
  misc_feature: MA Experiment 20001248 PARAMETER Experiment Name: At_Far-red-induction_P Parameter: Organism Value: A. thaliana
  misc_feature: MA Experiment 20001248 PARAMETER Experiment Name: At_Far-red-induction_P Parameter: Plant Line Value: Columbia
  misc_feature: MA Experiment 20001248 PARAMETER Experiment Name: At_Far-red-induction_P Parameter: Timepoint (hr) Value: 4
  misc_feature: MA Experiment 20001248 PARAMETER Experiment Name: At_Far-red-induction_P Parameter: Tissue Value: Whole Plant
  misc_feature: MA Experiment ID: 20001450 Result: Down-regulated in Transcription
  misc_feature: MA Experiment 20001450 PARAMETER Experiment Name: At_Far-red-induction_P Parameter: Age (day) Value: 7
  misc_feature: MA Experiment 20001450 PARAMETER Experiment Name: At_Far-red-induction_P Parameter: Light Value: Far-red vs. White
  misc_feature: MA Experiment 20001450 PARAMETER Experiment Name: At_Far-red-induction_P Parameter: Organism Value: A. thaliana
  misc_feature: MA Experiment 20001450 PARAMETER Experiment Name: At_Far-red-induction_P Parameter: Plant Line Value: Columbia
  misc_feature: MA Experiment 20001450 PARAMETER Experiment Name: At_Far-red-induction_P Parameter: Timepoint (hr) Value: 8
  misc_feature: MA Experiment 20001450 PARAMETER Experiment Name: At_Far-red-induction_P Parameter: Tissue Value: Whole Plant
  misc_feature: MA Experiment ID: 20001451 Result: Down-regulated in Transcription
  misc_feature: MA Experiment 20001451 PARAMETER Experiment Name: At_Far-red-induction_P Parameter: Age (day) Value: 7
  misc_feature: MA Experiment 20001451 PARAMETER Experiment Name: At_Far-red-induction_P Parameter: Light Value: Far-red vs. White
  misc_feature: MA Experiment 20001451 PARAMETER Experiment Name: At_Far-red-induction_P Parameter: Organism Value: A. thaliana
  misc_feature: MA Experiment 20001451 PARAMETER Experiment Name: At_Far-red-induction_P Parameter: Plant Line Value: Columbia
  misc_feature: MA Experiment 20001451 PARAMETER Experiment Name: At_Far-red-induction_P Parameter: Timepoint (hr) Value: 24
  misc_feature: MA Experiment 20001451 PARAMETER Experiment Name: At_Far-red-induction_P Parameter: Tissue Value: Whole Plant
  misc_feature: MA Experiment ID: 20001555 Result: Down-regulated in Transcription
  misc_feature: MA Experiment 20001555 PARAMETER Experiment Name: At_Drought_Soil_Dry_P Parameter: Age (day) Value: 24
  misc_feature: MA Experiment 20001555 PARAMETER Experiment Name: At_Drought_Soil_Dry_P Parameter: Organism Value: A. thaliana
  misc_feature: MA Experiment 20001555 PARAMETER Experiment Name: At_Drought_Soil_Dry_P Parameter: Plant Line Value: WS
  misc_feature: MA Experiment 20001555 PARAMETER Experiment Name: At_Drought_Soil_Dry_P Parameter: Post Timepoint (hr) Value: None
  misc_feature: MA Experiment 20001555 PARAMETER Experiment Name: At_Drought_Soil_Dry_P Parameter: Post-Treatment Value: None
  misc_feature: MA Experiment 20001555 PARAMETER Experiment Name: At_Drought_Soil_Dry_P Parameter: Timepoint (day) Value: 10
  misc_feature: MA Experiment 20001555 PARAMETER Experiment Name: At_Drought_Soil_Dry_P Parameter: Treatment Value: Drought vs. No Drought
  misc_feature: MA Experiment ID: 20001557 Result: Up-regulated in Transcription
  misc_feature: MA Experiment 20001557 PARAMETER Experiment Name: At_Drought_Soil_Dry_P Parameter: Age (day) Value: 27
  misc_feature: MA Experiment 20001557 PARAMETER Experiment Name: At_Drought_Soil_Dry_P Parameter: Organism Value: A. thaliana
  misc_feature: MA Experiment 20001557 PARAMETER Experiment Name: At_Drought_Soil_Dry_P Parameter: Plant Line Value: WS
  misc_feature: MA Experiment 20001557 PARAMETER Experiment Name: At_Drought_Soil_Dry_P Parameter: Post Timepoint (hr) Value: 3
  misc_feature: MA Experiment 20001557 PARAMETER Experiment Name: At_Drought_Soil_Dry_P Parameter: Post-Treatment Value: Re-Water vs. No Drought
  misc_feature: MA Experiment 20001557 PARAMETER Experiment Name: At_Drought_Soil_Dry_P Parameter: Timepoint (day) Value: 13
  misc_feature: MA Experiment 20001557 PARAMETER Experiment Name: At_Drought_Soil_Dry_P Parameter: Treatment Value: Drought vs. No Drought
  misc_feature: MA Experiment ID: 20001558 Result: Up-regulated in Transcription
  misc_feature: MA Experiment 20001558 PARAMETER Experiment Name: At_Drought_Soil_Dry_P Parameter: Age (day) Value: 27
  misc_feature: MA Experiment 20001558 PARAMETER Experiment Name: At_Drought_Soil_Dry_P Parameter: Organism Value: A. thaliana
  misc_feature: MA Experiment 20001558 PARAMETER Experiment Name: At_Drought_Soil_Dry_P Parameter: Plant Line Value: WS
  misc_feature: MA Experiment 20001558 PARAMETER Experiment Name: At_Drought_Soil_Dry_P Parameter: Post Timepoint (hr) Value: 6
  misc_feature: MA Experiment 20001558 PARAMETER Experiment Name: At_Drought_Soil_Dry_P Parameter: Post-Treatment Value: Re-Water vs. No Drought
  misc_feature: MA Experiment 20001558 PARAMETER Experiment Name: At_Drought_Soil_Dry_P Parameter: Timepoint (day) Value: 13
  misc_feature: MA Experiment 20001558 PARAMETER Experiment Name: At_Drought_Soil_Dry_P Parameter: Treatment Value: Drought vs. No Drought
  misc_feature: MA Experiment ID: 20001560 Result: Up-regulated in Transcription
  misc_feature: MA Experiment 20001560 PARAMETER Experiment Name: At_Drought_Soil_Dry_P Parameter: Age (day) Value: 28
  misc_feature: MA Experiment 20001560 PARAMETER Experiment Name: At_Drought_Soil_Dry_P Parameter: Organism Value: A. thaliana
  misc_feature: MA Experiment 20001560 PARAMETER Experiment Name: At_Drought_Soil_Dry_P Parameter: Plant Line Value: WS
  misc_feature: MA Experiment 20001560 PARAMETER Experiment Name: At_Drought_Soil_Dry_P Parameter: Post Timepoint (hr) Value: None
  misc_feature: MA Experiment 20001560 PARAMETER Experiment Name: At_Drought_Soil_Dry_P Parameter: Post-Treatment Value: None
  misc_feature: MA Experiment 20001560 PARAMETER Experiment Name: At_Drought_Soil_Dry_P Parameter: Timepoint (day) Value: 14
  misc_feature: MA Experiment 20001560 PARAMETER Experiment Name: At_Drought_Soil_Dry_P Parameter: Treatment Value: Drought vs. No Drought
  misc_feature: MA Experiment ID: 20001906 Result: Down-regulated in Transcription
  misc_feature: MA Experiment 20001906 PARAMETER Experiment Name: At_Drought_Reproduction_P Parameter: Age (day) Value: 35
  misc_feature: MA Experiment 20001906 PARAMETER Experiment Name: At_Drought_Reproduction_P Parameter: Organism Value: A. thaliana
  misc_feature: MA Experiment 20001906 PARAMETER Experiment Name: At_Drought_Reproduction_P Parameter: Plant Line Value: WS
  misc_feature: MA Experiment 20001906 PARAMETER Experiment Name: At_Drought_Reproduction_P Parameter: Timepoint (day) Value: 5
  misc_feature: MA Experiment 20001906 PARAMETER Experiment Name: At_Drought_Reproduction_P Parameter: Tissue Value: Siliques
  misc_feature: MA Experiment 20001906 PARAMETER Experiment Name: At_Drought_Reproduction_P Parameter: Treatment Value: Drought vs. No Drought
  misc_feature: MA Experiment ID: 20001908 Result: Down-regulated in Transcription
  misc_feature: MA Experiment 20001908 PARAMETER Experiment Name: At_Drought_Reproduction_P Parameter: Age (day) Value: 40
  misc_feature: MA Experiment 20001908 PARAMETER Experiment Name: At_Drought_Reproduction_P Parameter: Organism Value: A. thaliana
  misc_feature: MA Experiment 20001908 PARAMETER Experiment Name: At_Drought_Reproduction_P Parameter: Plant Line Value: WS
  misc_feature: MA Experiment 20001908 PARAMETER Experiment Name: At_Drought_Reproduction_P Parameter: Timepoint (day) Value: 10
  misc_feature: MA Experiment 20001908 PARAMETER Experiment Name: At_Drought_Reproduction_P Parameter: Tissue Value: Siliques
  misc_feature: MA Experiment 20001908 PARAMETER Experiment Name: At_Drought_Reproduction_P Parameter: Treatment Value: Drought vs. No Drought
  misc_feature: MA Experiment ID: 20001911 Result: Down-regulated in Transcription
  misc_feature: MA Experiment 20001911 PARAMETER Experiment Name: At_Drought_Reproduction_P Parameter: Age (day) Value: 40
  misc_feature: MA Experiment 20001911 PARAMETER Experiment Name: At_Drought_Reproduction_P Parameter: Organism Value: A. thaliana
  misc_feature: MA Experiment 20001911 PARAMETER Experiment Name: At_Drought_Reproduction_P Parameter: Plant Line Value: WS
  misc_feature: MA Experiment 20001911 PARAMETER Experiment Name: At_Drought_Reproduction_P Parameter: Timepoint (day) Value: 10
  misc_feature: MA Experiment 20001911 PARAMETER Experiment Name: At_Drought_Reproduction_P Parameter: Tissue Value: Flowers
  misc_feature: MA Experiment 20001911 PARAMETER Experiment Name: At_Drought_Reproduction_P Parameter: Treatment Value: Drought vs. No Drought

SEQ ID NO: 95243 - protein, 594 aa, Arabidopsis thaliana; identical to SEQ ID NO: 76779
  peptide (1)..(594): Ceres Seq. ID no. 12727965
  misc_feature (63)..(328): Pfam Name: GMC oxidoreductase Pfam Description: GMC oxidoreductase
  misc_feature (1)..(594): Homolog of NCBI NO: 11357159 NR Description: adhesion of calyx edges protein ACE [imported] -
  misc_feature (51)..(594): Homolog of NCBI NO: 37572986 NR Description: putative mandelonitrile lyase [Oryza sativa
  misc_feature (41)..(591): Homolog of NCBI NO: 22329512 NR Description: hypothetical protein; protein id: At1g12570.1,
  misc_feature (41)..(591): Homolog of NCBI NO: 17978954 NR Description: At1g12570/T12C24_9 [Arabidopsis thaliana]
  misc_feature (61)..(591): Homolog of NCBI NO: 8778640 NR Description: F5O11.31 [Arabidopsis thaliana]
  misc_feature (61)..(591): Homolog of NCBI NO: 9502391 NR Description: T12C24.11 [Arabidopsis thaliana]
  misc_feature (41)..(591): Homolog of NCBI NO: 15242236 NR Description: mandelonitrile lyase-like protein; protein id: supported by cDNA: gi_14194160 [Arabidopsis thaliana]
  misc_feature (61)..(587): Homolog of NCBI NO: 11358959 NR Description: probable mandelonitrile lyase (EC 4.1.2.10) - rice >gi|7649261|gb|AAF65820.1|AF251031_1 putative
  misc_feature (41)..(577): Homolog of NCBI NO: 10177730 NR Description: mandelonitrile lyase-like protein [Arabidopsis
  misc_feature (59)..(577): Homolog of NCBI NO: 10177728 NR Description: mandelonitrile lyase-like protein [Arabidopsis

SEQ ID NO: 95244 - DNA, 630 bp, Arabidopsis thaliana; identical to SEQ ID NO: 91488
  misc_feature (1)..(630): Ceres Seq. ID no. 12727970
  misc_feature: MA Experiment ID: 20000794 Result: Up-regulated in Transcription
  misc_feature: MA Experiment 20000794 PARAMETER Experiment Name: At_Petals_P Parameter: Age (day) Value: 23-25 days
  misc_feature: MA Experiment 20000794 PARAMETER Experiment Name: At_Petals_P Parameter: Plant Line Value: WS
  misc_feature: MA Experiment 20000794 PARAMETER Experiment Name: At_Petals_P Parameter: Tissue Value: Petals vs. Whole plant
  misc_feature: MA Experiment ID: 20001904 Result: Up-regulated in Transcription
  misc_feature: MA Experiment 20001904 PARAMETER Experiment Name: At_Drought_Reproduction_P Parameter: Age (day) Value: 37
  misc_feature: MA Experiment 20001904 PARAMETER Experiment Name: At_Drought_Reproduction_P Parameter: Organism Value: A. thaliana
  misc_feature: MA Experiment 20001904 PARAMETER Experiment Name: At_Drought_Reproduction_P Parameter: Plant Line Value: WS
  misc_feature: MA Experiment 20001904 PARAMETER Experiment Name: At_Drought_Reproduction_P Parameter: Timepoint (day) Value: 7
  misc_feature: MA Experiment 20001904 PARAMETER Experiment Name: At_Drought_Reproduction_P Parameter: Tissue Value: Rosettes
  misc_feature: MA Experiment 20001904 PARAMETER Experiment Name: At_Drought_Reproduction_P Parameter: Treatment Value: Drought vs. No Drought

SEQ ID NO: 95245 - protein, 209 aa, Arabidopsis thaliana; identical to SEQ ID NO: 91489
  peptide (1)..(209): Ceres Seq. ID no. 12727971
  misc_feature (49)..(202): Pfam Name: Pathogenesis-related protein Bet v I family Pfam Description: Pathogenesis-related protein Bet v I family
  misc_feature (1)..(209): Homolog of NCBI NO: 15219339 NR Description: hypothetical protein; protein id: At1g73000.1
  misc_feature (17)..(208): Homolog of NCBI NO: 15225245 NR Description: hypothetical protein; protein id: At2g26040.1
  misc_feature (4)..(206): Homolog of NCBI NO: 22327625 NR Description: putative protein; protein id: At5g46790.1, by cDNA: gi_17380841 [Arabidopsis thaliana] unknown protein [Arabidopsis thaliana]
  misc_feature (22)..(206): Homolog of NCBI NO: 15236689 NR Description: putative protein; protein id: At4g17870.1, by cDNA: gi_14596204, supported by cDNA: gi_20148394 [Arabidopsis
  misc_feature (22)..(206): Homolog of NCBI NO: 9758515 NR Description: gene_id:MZA15.21~pir||T05073~similar to unknown
  misc_feature (24)..(207): Homolog of NCBI NO: 37537066 NR Description: unknown protein [Oryza sativa (japonica
  misc_feature (6)..(204): Homolog of NCBI NO: 18404709 NR Description: expressed protein; protein id: At2g38310.1, by cDNA: 32244., supported by cDNA: gi_14517501, supported by gi_15809747 [Arabidopsis thaliana] >gi|7487162|pir||T02514
  misc_feature (37)..(201): Homolog of NCBI NO: 15239114 NR Description: putative protein; protein id: At5g05440.1, by cDNA: 117347., supported by cDNA: gi_15529253, supported by gi_16974394 [Arabidopsis thaliana] >gi|10176756|dbj|BAB09987.1|
  misc_feature (37)..(201): Homolog of NCBI NO: 34907924 NR Description: B1088C09.9 [Oryza sativa (japonica
  misc_feature (37)..(204): Homolog of NCBI NO: 18405351 NR Description: expressed protein; protein id: At2g40330.1, by cDNA: 6787. [Arabidopsis thaliana] >gi|20198019|gb|AAD25668.2| protein [Arabidopsis thaliana] >gi|21594278|gb|AAM65989.1|

SEQ ID NO: 95246 - DNA, 1461 bp, Arabidopsis thaliana; identical to SEQ ID NO: 91490
  misc_feature (1)..(1461): Ceres Seq. ID no. 12727996
  misc_feature: MA Experiment ID: 20000307 Result: Up-regulated in Transcription
  misc_feature: MA Experiment 20000307 PARAMETER Experiment Name: At_Germinating_Seeds_Sub_P Parameter: Age (hr) Value: 24 vs. 0
  misc_feature: MA Experiment 20000307 PARAMETER Experiment Name: At_Germinating_Seeds_Sub_P Parameter: Organism Value: A. thaliana
  misc_feature: MA Experiment 20000307 PARAMETER Experiment Name: At_Germinating_Seeds_Sub_P Parameter: Plant Line Value: WS
  misc_feature: MA Experiment 20000307 PARAMETER Experiment Name: At_Germinating_Seeds_Sub_P Parameter: Tissue Value: Germinating Seeds
  misc_feature: MA Experiment ID: 20000314 Result: Up-regulated in Transcription
  misc_feature: MA Experiment 20000314 PARAMETER Experiment Name: At_14day_Shoots-Roots_Sub_P Parameter: Age (day) Value: 14
  misc_feature: MA Experiment 20000314 PARAMETER Experiment Name: At_14day_Shoots-Roots_Sub_P Parameter: Organism Value: A. thaliana
  misc_feature: MA Experiment 20000314 PARAMETER Experiment Name: At_14day_Shoots-Roots_Sub_P Parameter: Plant Line Value: WS
  misc_feature: MA Experiment 20000314 PARAMETER Experiment Name: At_14day_Shoots-Roots_Sub_P Parameter: Tissue Value: Roots vs. Whole Plant

SEQ ID NO: 95247 - protein, 486 aa, Arabidopsis thaliana; identical to SEQ ID NO: 91491
  peptide (1)..(486): Ceres Seq. ID no. 12727997
  misc_feature (283)..(450): Pfam Name: Glycosyl transferases group 1 Pfam Description: Glycosyl transferases group 1
  misc_feature (1)..(486): Homolog of NCBI NO: 15219398 NR Description: putative glycosyl transferase; protein id: [Arabidopsis thaliana] >gi|25406256|pir||E96757 protein glycosyl
  misc_feature (1)..(476): Homolog of NCBI NO: 5903105 NR Description: Hypothetical protein [Arabidopsis thaliana]
  misc_feature (13)..(481): Homolog of NCBI NO: 18415319 NR Description: putative protein; protein id: At4g19460.1,
  misc_feature (13)..(481): Homolog of NCBI NO: 21593749 NR Description: unknown [Arabidopsis thaliana]
  misc_feature (59)..(485): Homolog of NCBI NO: 34911892 NR Description: OSJNBb0032K15.23 [Oryza sativa (japonica
  misc_feature (13)..(461): Homolog of NCBI NO: 7487719 NR Description: hypothetical protein T5K18.240 - Arabidopsis
  misc_feature (13)..(458): Homolog of NCBI NO: 7486088 NR Description: hypothetical protein F24J7.20 - Arabidopsis
  misc_feature (13)..(458): Homolog of NCBI NO: 25407571 NR Description: hypothetical protein AT4g19460 [imported] - thaliana >gi|4582486|emb|CAA16923.2| putative protein thaliana] >gi|7268741|emb|CAB78948.1| putative protein
  misc_feature (219)..(478): Homolog of NCBI NO: 15237813 NR Description: hexosyltransferase - like protein; protein id:
  misc_feature (12)..(214): Homolog of NCBI NO: 15237813 NR Description: hexosyltransferase - like protein; protein id:

SEQ ID NO: 95248 - protein, 387 aa, Arabidopsis thaliana; identical to SEQ ID NO: 91492
  peptide (1)..(387): Ceres Seq. ID no. 12727998
  misc_feature (184)..(351): Pfam Name: Glycosyl transferases group 1 Pfam Description: Glycosyl transferases group 1
  misc_feature (1)..(387): Homolog of NCBI NO: 15219398 NR Description: putative glycosyl transferase; protein id: [Arabidopsis thaliana] >gi|25406256|pir||E96757 protein glycosyl
  misc_feature (1)..(377): Homolog of NCBI NO: 5903105 NR Description: Hypothetical protein [Arabidopsis thaliana]
  misc_feature (1)..(382): Homolog of NCBI NO: 18415319 NR Description: putative protein; protein id: At4g19460.1,
  misc_feature (1)..(382): Homolog of NCBI NO: 21593749 NR Description: unknown [Arabidopsis thaliana]
  misc_feature (1)..(386): Homolog of NCBI NO: 34911892 NR Description: OSJNBb0032K15.23 [Oryza sativa (japonica
  misc_feature (1)..(362): Homolog of NCBI NO: 7487719 NR Description: hypothetical protein T5K18.240 - Arabidopsis
  misc_feature (1)..(359): Homolog of NCBI NO: 7486088 NR Description: hypothetical protein F24J7.20 - Arabidopsis
  misc_feature (1)..(359): Homolog of NCBI NO: 25407571 NR Description: hypothetical protein AT4g19460 [imported] - thaliana >gi|4582486|emb|CAA16923.2| putative protein thaliana] >gi|7268741|emb|CAB78948.1| putative protein
  misc_feature (120)..(379): Homolog of NCBI NO: 15237813 NR Description: hexosyltransferase - like protein; protein id:
  misc_feature (1)..(115): Homolog of NCBI NO: 15237813 NR Description: hexosyltransferase - like protein; protein id:

SEQ ID NO: 95249 - protein, 299 aa, Arabidopsis thaliana; identical to SEQ ID NO: 91493
  peptide (1)..(299): Ceres Seq. ID no. 12727999
  misc_feature (96)..(263): Pfam Name: Glycosyl transferases group 1 Pfam Description: Glycosyl transferases group 1
  misc_feature (1)..(299): Homolog of NCBI NO: 15219398 NR Description: putative glycosyl transferase; protein id: [Arabidopsis thaliana] >gi|25406256|pir||E96757 protein glycosyl
  misc_feature (1)..(289): Homolog of NCBI NO: 5903105 NR Description: Hypothetical protein [Arabidopsis thaliana]
  misc_feature (1)..(294): Homolog of NCBI NO: 18415319 NR Description: putative protein; protein id: At4g19460.1,
  misc_feature (1)..(294): Homolog of NCBI NO: 21593749 NR Description: unknown [Arabidopsis thaliana]
  misc_feature (1)..(298): Homolog of NCBI NO: 34911892 NR Description: OSJNBb0032K15.23 [Oryza sativa (japonica
  misc_feature (1)..(274): Homolog of NCBI NO: 7487719 NR Description: hypothetical protein T5K18.240 - Arabidopsis
  misc_feature (1)..(271): Homolog of NCBI NO: 7486088 NR Description: hypothetical protein F24J7.20 - Arabidopsis
  misc_feature (1)..(271): Homolog of NCBI NO: 25407571 NR Description: hypothetical protein AT4g19460 [imported] - thaliana >gi|4582486|emb|CAA16923.2| putative protein thaliana] >gi|7268741|emb|CAB78948.1| putative protein
  misc_feature (32)..(291): Homolog of NCBI NO: 15237813 NR Description: hexosyltransferase - like protein; protein id:
  misc_feature (1)..(27): Homolog of NCBI NO: 15237813 NR Description: hexosyltransferase - like protein; protein id:

SEQ ID NO: 95250 - DNA, 981 bp, Arabidopsis thaliana; identical to SEQ ID NO: 91494
  misc_feature (1)..(981): Ceres Seq. ID no. 12728004
  misc_feature: MA Experiment ID: 20000306 Result: Down-regulated in Transcription
  misc_feature: MA Experiment 20000306 PARAMETER Experiment Name: At_Germinating_Seeds_Sub_P Parameter: Age (hr) Value: 6 vs. 0
  misc_feature: MA Experiment 20000306 PARAMETER Experiment Name: At_Germinating_Seeds_Sub_P Parameter: Organism Value: A. thaliana
  misc_feature: MA Experiment 20000306 PARAMETER Experiment Name: At_Germinating_Seeds_Sub_P Parameter: Plant Line Value: WS
  misc_feature: MA Experiment 20000306 PARAMETER Experiment Name: At_Germinating_Seeds_Sub_P Parameter: Tissue Value: Germinating Seeds
  misc_feature: MA Experiment ID: 20000307 Result: Down-regulated in Transcription
  misc_feature: MA Experiment 20000307 PARAMETER Experiment Name: At_Germinating_Seeds_Sub_P Parameter: Age (hr) Value: 24 vs. 0
  misc_feature: MA Experiment 20000307 PARAMETER Experiment Name: At_Germinating_Seeds_Sub_P Parameter: Organism Value: A. thaliana
  misc_feature: MA Experiment 20000307 PARAMETER Experiment Name: At_Germinating_Seeds_Sub_P Parameter: Plant Line Value: WS
  misc_feature: MA Experiment 20000307 PARAMETER Experiment Name: At_Germinating_Seeds_Sub_P Parameter: Tissue Value: Germinating Seeds
  misc_feature: MA Experiment ID: 20000315 Result: Up-regulated in Transcription
  misc_feature: MA Experiment 20000315 PARAMETER Experiment Name: At_14day_Shoots-Roots_Sub_P Parameter: Age (day) Value: 14
  misc_feature: MA Experiment 20000315 PARAMETER Experiment Name: At_14day_Shoots-Roots_Sub_P Parameter: Organism Value: A. thaliana
  misc_feature: MA Experiment 20000315 PARAMETER Experiment Name: At_14day_Shoots-Roots_Sub_P Parameter: Plant Line Value: WS
  misc_feature: MA Experiment 20000315 PARAMETER Experiment Name: At_14day_Shoots-Roots_Sub_P Parameter: Tissue Value: Shoots vs. Whole Plant
  misc_feature: MA Experiment ID: 20000329 Result: Down-regulated in Transcription
  misc_feature: MA Experiment 20000329 PARAMETER Experiment Name: At_4deg_Cold_Sub_P Parameter: Age (day) Value: 14
  misc_feature: MA Experiment 20000329 PARAMETER Experiment Name: At_4deg_Cold_Sub_P Parameter: Organism Value: A. thaliana
  misc_feature: MA Experiment 20000329 PARAMETER Experiment Name: At_4deg_Cold_Sub_P Parameter: Plant Line Value: WS
  misc_feature: MA Experiment 20000329 PARAMETER Experiment Name: At_4deg_Cold_Sub_P Parameter: Temperature (deg C) Value: 4 vs. 22
  misc_feature: MA Experiment 20000329 PARAMETER Experiment Name: At_4deg_Cold_Sub_P Parameter: Timepoint (hr) Value: 6
  misc_feature: MA Experiment 20000329 PARAMETER Experiment Name: At_4deg_Cold_Sub_P Parameter: Tissue Value: Aerial
  misc_feature: MA Experiment ID: 20000355 Result: Down-regulated in Transcription
  misc_feature: MA Experiment 20000355 PARAMETER Experiment Name: At_Siliques_Sub_P Parameter: Age (day) Value: 21
  misc_feature: MA Experiment 20000355 PARAMETER Experiment Name: At_Siliques_Sub_P Parameter: Organism Value: A. thaliana
  misc_feature: MA Experiment 20000355 PARAMETER Experiment Name: At_Siliques_Sub_P Parameter: Plant Line Value: WS
  misc_feature: MA Experiment 20000355 PARAMETER Experiment Name: At_Siliques_Sub_P Parameter: Tissue Value: Less Than 5mm Siliques vs. Whole Plant
  misc_feature: MA Experiment ID: 20000440 Result: Down-regulated in Transcription
  misc_feature: MA Experiment 20000440 PARAMETER Experiment Name: At_Closed-Flower__Sub_P Parameter: Tissue Value: Closed Flower vs. Whole Plant

SEQ ID NO: 95251 - protein, 279 aa, Arabidopsis thaliana; identical to SEQ ID NO: 91495
  peptide (1)..(279): Ceres Seq. ID no. 12728005
  misc_feature (27)..(253): Pfam Name: Major intrinsic protein Pfam Description: Major intrinsic protein
  misc_feature (12)..(279): Homolog of NCBI NO: 15219403 NR Description: tonoplast intrinsic protein, alpha (alpha-TIP); id: At1g73190.1 [Arabidopsis thaliana] Tonoplast intrinsic protein, alpha (Alpha TIP)
  misc_feature (12)..(279): Homolog of NCBI NO: 15220848 NR Description: tonoplast intrinsic protein, putative; protein
  misc_feature (77)..(279): Homolog of NCBI NO: 7441287 NR Description: membrane protein MP23 precursor - cucurbit
  misc_feature (18)..(76): Homolog of NCBI NO: 7441287 NR Description: membrane protein MP23 precursor - cucurbit
  misc_feature (59)..(279): Homolog of NCBI NO: 30685536 NR Description: major intrinsic protein (MIP) family [Arabidopsis
  misc_feature (18)..(279): Homolog of NCBI NO: 7441288 NR Description: membrane protein MP28 - cucurbit
  misc_feature (16)..(279): Homolog of NCBI NO: 81886 NR Description: tonoplast intrinsic protein alpha - kidney bean
  misc_feature (16)..(279): Homolog of NCBI NO: 135859 NR Description: TONOPLAST INTRINSIC PROTEIN, ALPHA (ALPHA TIP)
  misc_feature (12)..(279): Homolog of NCBI NO: 37535634 NR Description: putative beta-tonoplast intrinsic protein [Oryza
  misc_feature (12)..(279): Homolog of NCBI NO: 13447827 NR Description: tonoplast membrane integral protein ZmTIP3-1 [Zea

SEQ ID NO: 95252 - protein, 268 aa, Arabidopsis thaliana; identical to SEQ ID NO: 91496
  peptide (1)..(268): Ceres Seq. ID no. 12728006
  misc_feature (16)..(242): Pfam Name: Major intrinsic protein Pfam Description: Major intrinsic protein
  misc_feature (1)..(268): Homolog of NCBI NO: 15219403 NR Description: tonoplast intrinsic protein, alpha (alpha-TIP); id: At1g73190.1 [Arabidopsis thaliana] Tonoplast intrinsic protein, alpha (Alpha TIP)
  misc_feature (1)..(268): Homolog of NCBI NO: 15220848 NR Description: tonoplast intrinsic protein, putative; protein
  misc_feature (66)..(268): Homolog of NCBI NO: 7441287 NR Description: membrane protein MP23 precursor - cucurbit
  misc_feature (7)..(65): Homolog of NCBI NO: 7441287 NR Description: membrane protein MP23 precursor - cucurbit
  misc_feature (48)..(268): Homolog of NCBI NO: 30685536 NR Description: major intrinsic protein (MIP) family [Arabidopsis
  misc_feature (7)..(268): Homolog of NCBI NO: 7441288 NR Description: membrane protein MP28 - cucurbit
  misc_feature (5)..(268): Homolog of NCBI NO: 81886 NR Description: tonoplast intrinsic protein alpha - kidney bean
  misc_feature (5)..(268): Homolog of NCBI NO: 135859 NR Description: TONOPLAST INTRINSIC PROTEIN, ALPHA (ALPHA TIP)
  misc_feature (1)..(268): Homolog of NCBI NO: 37535634 NR Description: putative beta-tonoplast intrinsic protein [Oryza
  misc_feature (1)..(268): Homolog of NCBI NO: 13447827 NR Description: tonoplast membrane integral protein ZmTIP3-1 [Zea

SEQ ID NO: 95253 - DNA, 2340 bp, Arabidopsis thaliana; identical to SEQ ID NO: 91497
  misc_feature (1)..(2340): Ceres Seq. ID no. 12728007
  misc_feature: MA Experiment ID: 20000179 Result: Up-regulated in Transcription
  misc_feature: MA Experiment 20000179 PARAMETER Experiment Name: At_Germinating_Seeds_P Parameter: Age (hr) Value: 6 vs. 0
  misc_feature: MA Experiment 20000179 PARAMETER Experiment Name: At_Germinating_Seeds_P Parameter: Tissue Value: Germinating Seeds
  misc_feature: MA Experiment ID: 20000184 Result: Down-regulated in Transcription
  misc_feature: MA Experiment 20000184 PARAMETER Experiment Name: At_Shoots__P Parameter: Age (day) Value: 7
  misc_feature: MA Experiment 20000184 PARAMETER Experiment Name: At_Shoots__P Parameter: Tissue Value: Shoots vs. Whole Plant
  misc_feature: MA Experiment ID: 20001247 Result: Up-regulated in Transcription
  misc_feature: MA Experiment 20001247 PARAMETER Experiment Name: At_Far-red-induction_P Parameter: Age (day) Value: 7
  misc_feature: MA Experiment 20001247 PARAMETER Experiment Name: At_Far-red-induction_P Parameter: Light Value: Far-red vs. White
  misc_feature: MA Experiment 20001247 PARAMETER Experiment Name: At_Far-red-induction_P Parameter: Organism Value: A. thaliana
  misc_feature: MA Experiment 20001247 PARAMETER Experiment Name: At_Far-red-induction_P Parameter: Plant Line Value: Columbia
  misc_feature: MA Experiment 20001247 PARAMETER Experiment Name: At_Far-red-induction_P Parameter: Timepoint (hr) Value: 1
  misc_feature: MA Experiment 20001247 PARAMETER Experiment Name: At_Far-red-induction_P Parameter: Tissue Value: Whole Plant
  misc_feature: MA Experiment ID: 20001451 Result: Up-regulated in Transcription
  misc_feature: MA Experiment 20001451 PARAMETER Experiment Name: At_Far-red-induction_P Parameter: Age (day) Value: 7
  misc_feature: MA Experiment 20001451 PARAMETER Experiment Name: At_Far-red-induction_P Parameter: Light Value: Far-red vs. White
  misc_feature: MA Experiment 20001451 PARAMETER Experiment Name: At_Far-red-induction_P Parameter: Organism Value: A. thaliana
  misc_feature: MA Experiment 20001451 PARAMETER Experiment Name: At_Far-red-induction_P Parameter: Plant Line Value: Columbia
  misc_feature: MA Experiment 20001451 PARAMETER Experiment Name: At_Far-red-induction_P Parameter: Timepoint (hr) Value: 24
  misc_feature: MA Experiment 20001451 PARAMETER Experiment Name: At_Far-red-induction_P Parameter: Tissue Value: Whole Plant

SEQ ID NO: 95254 - protein, 779 aa, Arabidopsis thaliana; identical to SEQ ID NO: 91498
  peptide (1)..(779): Ceres Seq. ID no. 12728008
  misc_feature (1)..(737): Homolog of NCBI NO: 30685543 NR Description: expressed protein [Arabidopsis thaliana]
  misc_feature (1)..(737): Homolog of NCBI NO: 25518065 NR Description: F2H15.5 protein - Arabidopsis thaliana Strong similarity to a hypothetical protein T18K17.13 gi|6598861 Arabidopsis thaliana BAC T18K17 gb|AC010556 and contains a PH
  misc_feature (646)..(779): Homolog of NCBI NO: 25518065 NR Description: F2H15.5 protein - Arabidopsis thaliana Strong similarity to a hypothetical protein T18K17.13 gi|6598861 Arabidopsis thaliana BAC T18K17 gb|AC010556 and contains a PH
  misc_feature (646)..(779): Homolog of NCBI NO: 30685543 NR Description: expressed protein [Arabidopsis thaliana]
  misc_feature (298)..(607): Homolog of NCBI NO: 34783705 NR Description: Unknown (protein for MGC:62520) [Mus musculus]
  misc_feature (167)..(607): Homolog of NCBI NO: 26251776 NR Description: Uncharacterized hypothalamus protein HT008 [Homo
  misc_feature (167)..(607): Homolog of NCBI NO: 38679909 NR Description: uncharacterized hypothalamus protein HT008 [Homo
  misc_feature (298)..(607): Homolog of NCBI NO: 38091890 NR Description: testis expressed gene 2 [Mus musculus]
  misc_feature (167)..(607): Homolog of NCBI NO: 33337924 NR Description: MSTP069 [Homo sapiens]
  misc_feature (167)..(607): Homolog of NCBI NO: 7021045 NR Description: unnamed protein product [Homo sapiens]

SEQ ID NO: 95255 - protein, 696 aa, Arabidopsis thaliana; identical to SEQ ID NO: 91499
  peptide (1)..(696): Ceres Seq. ID no. 12728009
  misc_feature (1)..(654): Homolog of NCBI NO: 30685543 NR Description: expressed protein [Arabidopsis thaliana]
  misc_feature (1)..(654): Homolog of NCBI NO: 25518065 NR Description: F2H15.5 protein - Arabidopsis thaliana Strong similarity to a hypothetical protein T18K17.13 gi|6598861 Arabidopsis thaliana BAC T18K17 gb|AC010556 and contains a PH
  misc_feature (563)..(696): Homolog of NCBI NO: 25518065 NR Description: F2H15.5 protein - Arabidopsis thaliana Strong similarity to a hypothetical protein T18K17.13 gi|6598861 Arabidopsis thaliana BAC T18K17 gb|AC010556 and contains a PH
  misc_feature (563)..(696): Homolog of NCBI NO: 30685543 NR Description: expressed protein [Arabidopsis thaliana]
  misc_feature (215)..(524): Homolog of NCBI NO: 34783705 NR Description: Unknown (protein for MGC:62520) [Mus musculus]
  misc_feature (84)..(524): Homolog of NCBI NO: 26251776 NR Description: Uncharacterized hypothalamus protein HT008 [Homo
  misc_feature (84)..(524): Homolog of NCBI NO: 38679909 NR Description: uncharacterized hypothalamus protein HT008 [Homo
  misc_feature (215)..(524): Homolog of NCBI NO: 38091890 NR Description: testis expressed gene 2 [Mus musculus]
  misc_feature (84)..(524): Homolog of NCBI NO: 33337924 NR Description: MSTP069 [Homo sapiens]
  misc_feature (84)..(524): Homolog of NCBI NO: 7021045 NR Description: unnamed protein product [Homo sapiens]

SEQ ID NO: 95256 - protein, 557 aa, Arabidopsis thaliana; identical to SEQ ID NO: 91500
  peptide (1)..(557): Ceres Seq. ID no. 12728010
  misc_feature (1)..(515): Homolog of NCBI NO: 30685543 NR Description: expressed protein [Arabidopsis thaliana]
  misc_feature (1)..(515): Homolog of NCBI NO: 25518065 NR Description: F2H15.5 protein - Arabidopsis thaliana Strong similarity to a hypothetical protein T18K17.13 gi|6598861 Arabidopsis thaliana BAC T18K17 gb|AC010556 and contains a PH
  misc_feature (424)..(557): Homolog of NCBI NO: 25518065 NR Description: F2H15.5 protein - Arabidopsis thaliana Strong similarity to a hypothetical protein T18K17.13 gi|6598861 Arabidopsis thaliana BAC T18K17 gb|AC010556 and contains a PH
  misc_feature (424)..(557): Homolog of NCBI NO: 30685543 NR Description: expressed protein [Arabidopsis thaliana]
  misc_feature (76)..(385): Homolog of NCBI NO: 34783705 NR Description: Unknown (protein for MGC:62520) [Mus musculus]
  misc_feature (1)..(385): Homolog of NCBI NO: 26251776 NR Description: Uncharacterized hypothalamus protein HT008 [Homo
  misc_feature (1)..(385): Homolog of NCBI NO: 38679909 NR Description: uncharacterized hypothalamus protein HT008 [Homo
  misc_feature (76)..(385): Homolog of NCBI NO: 38091890 NR Description: testis expressed gene 2 [Mus musculus]
  misc_feature (1)..(385): Homolog of NCBI NO: 33337924 NR Description: MSTP069 [Homo sapiens]
  misc_feature (1)..(385): Homolog of NCBI NO: 7021045 NR Description: unnamed protein product [Homo sapiens]

SEQ ID NO: 95257 - DNA, 1326 bp, Arabidopsis thaliana; identical to SEQ ID NO: 91501
  misc_feature (1)..(1326): Ceres Seq. ID no. 12728015
  misc_feature: MA Experiment ID: 20000307 Result: Up-regulated in Transcription
  misc_feature: MA Experiment 20000307 PARAMETER Experiment Name: At_Germinating_Seeds_Sub_P Parameter: Age (hr) Value: 24 vs. 0
  misc_feature: MA Experiment 20000307 PARAMETER Experiment Name: At_Germinating_Seeds_Sub_P Parameter: Organism Value: A. thaliana
  misc_feature: MA Experiment 20000307 PARAMETER Experiment Name: At_Germinating_Seeds_Sub_P Parameter: Plant Line Value: WS
  misc_feature: MA Experiment 20000307 PARAMETER Experiment Name: At_Germinating_Seeds_Sub_P Parameter: Tissue Value: Germinating Seeds
  misc_feature: MA Experiment ID: 20000440 Result: Down-regulated in Transcription
  misc_feature: MA Experiment 20000440 PARAMETER Experiment Name: At_Closed-Flower__Sub_P Parameter: Tissue Value: Closed Flower vs. Whole Plant

SEQ ID NO: 95258 - protein, 441 aa, Arabidopsis thaliana; identical to SEQ ID NO: 91502
  peptide (1)..(441): Ceres Seq. ID no. 12728016
  misc_feature (37)..(438): Pfam Name: Serine carboxypeptidase Pfam Description: Serine carboxypeptidase
  misc_feature (1)..(441): Homolog of NCBI NO: 15219427 NR Description: putative serine carboxypeptidase; protein id: [Arabidopsis thaliana] >gi|25289777|pir||H96758 protein serine
  misc_feature (1)..(441): Homolog of NCBI NO: 15219433 NR Description: putative serine carboxypeptidase; protein id: [Arabidopsis thaliana] >gi|25289779|pir||C96759 protein serine
  misc_feature (1)..(441): Homolog of NCBI NO: 22327401 NR Description: serine carboxypeptidase; protein id: At5g36180.1, by cDNA: gi_20260289 [Arabidopsis thaliana] serine carboxypeptidase [Arabidopsis thaliana]
  misc_feature (1)..(441): Homolog of NCBI NO: 15219429 NR Description: putative serine carboxypeptidase; protein id: [Arabidopsis thaliana] >gi|25289788|pir||A96759 protein serine
  misc_feature (1)..(434): Homolog of NCBI NO: 8777303 NR Description: serine carboxypeptidase [Arabidopsis thaliana]
  misc_feature (1)..(441): Homolog of NCBI NO: 15219435 NR Description: putative serine carboxypeptidase; protein id: [Arabidopsis thaliana] >gi|12324317|gb|AAG52126.1|AC010556_8
  misc_feature (1)..(441): Homolog of NCBI NO: 15219431 NR Description: putative serine carboxypeptidase; protein id: [Arabidopsis thaliana] >gi|25289778|pir||B96759 protein serine
  misc_feature (1)..(441): Homolog of NCBI NO: 15228300 NR Description: putative glucose acyltransferase; protein id: [Arabidopsis thaliana] >gi|8567775|gb|AAF76347.1| glucose putative [Arabidopsis thaliana]
  misc_feature (1)..(275): Homolog of NCBI NO: 25289774 NR Description: probable serine carboxypeptidase T9L24.47 - Arabidopsis thaliana >gi|11120810|gb|AAG30990.1|AC012396_26
  misc_feature (300)..(441): Homolog of NCBI NO: 25289774 NR Description: probable serine carboxypeptidase T9L24.47 - Arabidopsis thaliana >gi|11120810|gb|AAG30990.1|AC012396_26

SEQ ID NO: 95259 - protein, 339 aa, Arabidopsis thaliana; identical to SEQ ID NO: 91503
  peptide (1)..(339): Ceres Seq. ID no. 12728017
  misc_feature (1)..(336): Pfam Name: Serine carboxypeptidase Pfam Description: Serine carboxypeptidase
  misc_feature (1)..(339): Homolog of NCBI NO: 15219427 NR Description: putative serine carboxypeptidase; protein id: [Arabidopsis thaliana] >gi|25289777|pir||H96758 protein serine
  misc_feature (1)..(339): Homolog of NCBI NO: 15219433 NR Description: putative serine carboxypeptidase; protein id: [Arabidopsis thaliana] >gi|25289779|pir||C96759 protein serine
  misc_feature (1)..(339): Homolog of NCBI NO: 22327401 NR Description: serine carboxypeptidase; protein id: At5g36180.1, by cDNA: gi_20260289 [Arabidopsis thaliana] serine carboxypeptidase [Arabidopsis thaliana]
  misc_feature (1)..(339): Homolog of NCBI NO: 15219429 NR Description: putative serine carboxypeptidase; protein id: [Arabidopsis thaliana] >gi|25289788|pir||A96759 protein serine
  misc_feature (1)..(332): Homolog of NCBI NO: 8777303 NR Description: serine carboxypeptidase [Arabidopsis thaliana]
  misc_feature (1)..(339): Homolog of NCBI NO: 15219435 NR Description: putative serine carboxypeptidase; protein id: [Arabidopsis thaliana] >gi|12324317|gb|AAG52126.1|AC010556_8
  misc_feature (1)..(339): Homolog of NCBI NO: 15219431 NR Description: putative serine carboxypeptidase; protein id: [Arabidopsis thaliana] >gi|25289778|pir||B96759 protein serine
  misc_feature (1)..(339): Homolog of NCBI NO: 15228300 NR Description: putative glucose acyltransferase; protein id: [Arabidopsis thaliana] >gi|8567775|gb|AAF76347.1| glucose putative [Arabidopsis thaliana]
  misc_feature (1)..(173): Homolog of NCBI NO: 25289774 NR Description: probable serine carboxypeptidase T9L24.47 - Arabidopsis thaliana >gi|11120810|gb|AAG30990.1|AC012396_26
  misc_feature (198)..(339): Homolog of NCBI NO: 25289774 NR Description: probable serine carboxypeptidase T9L24.47 - Arabidopsis thaliana >gi|11120810|gb|AAG30990.1|AC012396_26

SEQ ID NO: 95260 - protein, 314 aa, Arabidopsis thaliana; identical to SEQ ID NO: 91504
  peptide (1)..(314): Ceres Seq. ID no. 12728018
  misc_feature (1)..(311): Pfam Name: Serine carboxypeptidase Pfam Description: Serine carboxypeptidase
  misc_feature (1)..(314): Homolog of NCBI NO: 15219427 NR Description: putative serine carboxypeptidase; protein id: [Arabidopsis thaliana] >gi|25289777|pir||H96758 protein serine
  misc_feature (1)..(314): Homolog of NCBI NO: 15219433 NR Description: putative serine carboxypeptidase; protein id: [Arabidopsis thaliana] >gi|25289779|pir||C96759 protein serine
  misc_feature (1)..(314): Homolog of NCBI NO: 22327401 NR Description: serine carboxypeptidase; protein id: At5g36180.1, by cDNA: gi_20260289 [Arabidopsis thaliana] serine carboxypeptidase [Arabidopsis thaliana]
  misc_feature (1)..(314): Homolog of NCBI NO: 15219429 NR Description: putative serine carboxypeptidase; protein id: [Arabidopsis thaliana] >gi|25289788|pir||A96759 protein serine
  misc_feature (1)..(307): Homolog of NCBI NO: 8777303 NR Description: serine carboxypeptidase [Arabidopsis thaliana]
  misc_feature (1)..(314): Homolog of NCBI NO: 15219435 NR Description: putative serine carboxypeptidase; protein id: [Arabidopsis thaliana] >gi|12324317|gb|AAG52126.1|AC010556_8
  misc_feature (1)..(314): Homolog of NCBI NO: 15219431 NR Description: putative serine carboxypeptidase; protein id: [Arabidopsis thaliana] >gi|25289778|pir||B96759 protein serine
  misc_feature (1)..(314): Homolog of NCBI NO: 15228300 NR Description: putative glucose acyltransferase; protein id: [Arabidopsis thaliana] >gi|8567775|gb|AAF76347.1| glucose putative [Arabidopsis thaliana]
  misc_feature (1)..(148): Homolog of NCBI NO: 25289774 NR Description: probable serine carboxypeptidase T9L24.47 - Arabidopsis thaliana >gi|11120810|gb|AAG30990.1|AC012396_26
  misc_feature (173)..(314): Homolog of NCBI NO: 25289774 NR Description: probable serine carboxypeptidase T9L24.47 - Arabidopsis thaliana >gi|11120810|gb|AAG30990.1|AC012396_26

SEQ ID NO: 95261 - DNA, 1326 bp, Arabidopsis thaliana; identical to SEQ ID NO: 91505
  misc_feature (1)..(1326): Ceres Seq. ID no. 12728019
  misc_feature: MA Experiment ID: 20000314 Result: Up-regulated in Transcription
  misc_feature: MA Experiment 20000314 PARAMETER Experiment Name: At_14day_Shoots-Roots_Sub_P Parameter: Age (day) Value: 14
  misc_feature: MA Experiment 20000314 PARAMETER Experiment Name: At_14day_Shoots-Roots_Sub_P Parameter: Organism Value: A. thaliana
  misc_feature: MA Experiment 20000314 PARAMETER Experiment Name: At_14day_Shoots-Roots_Sub_P Parameter: Plant Line Value: WS
  misc_feature: MA Experiment 20000314 PARAMETER Experiment Name: At_14day_Shoots-Roots_Sub_P Parameter: Tissue Value: Roots vs. Whole Plant

SEQ ID NO: 95262 - protein, 441 aa, Arabidopsis thaliana; identical to SEQ ID NO: 91506
  peptide (1)..(441): Ceres Seq. ID no. 12728020
  misc_feature (37)..(438): Pfam Name: Serine carboxypeptidase Pfam Description: Serine carboxypeptidase
  misc_feature (1)..(441): Homolog of NCBI NO: 15219429 NR Description: putative serine carboxypeptidase; protein id: [Arabidopsis thaliana] >gi|25289788|pir||A96759 protein serine
  misc_feature (1)..(441): Homolog of NCBI NO: 15219433 NR Description: putative serine carboxypeptidase; protein id: [Arabidopsis thaliana] >gi|25289779|pir||C96759 protein serine
  misc_feature (1)..(441): Homolog of NCBI NO: 22327401 NR Description: serine carboxypeptidase; protein id: At5g36180.1, by cDNA: gi_20260289 [Arabidopsis thaliana] serine carboxypeptidase [Arabidopsis thaliana]
  misc_feature (1)..(441): Homolog of NCBI NO: 8777303 NR Description: serine carboxypeptidase [Arabidopsis thaliana]
  misc_feature (1)..(441): Homolog of NCBI NO: 15219435 NR Description: putative serine carboxypeptidase; protein id: [Arabidopsis thaliana] >gi|12324317|gb|AAG52126.1|AC010556_8
  misc_feature (3)..(441): Homolog of NCBI NO: 15219431 NR Description: putative serine carboxypeptidase; protein id: [Arabidopsis thaliana] >gi|25289778|pir||B96759 protein serine
  misc_feature (1)..(441): Homolog of NCBI NO: 15219427 NR Description: putative serine carboxypeptidase; protein id: [Arabidopsis thaliana] >gi|25289777|pir||H96758 protein serine
  misc_feature (1)..(275): Homolog of NCBI NO: 25289774 NR Description: probable serine carboxypeptidase T9L24.47 - Arabidopsis thaliana >gi|11120810|gb|AAG30990.1|AC012396_26
  misc_feature (300)..(441): Homolog of NCBI NO: 25289774 NR Description: probable serine carboxypeptidase T9L24.47 - Arabidopsis thaliana >gi|11120810|gb|AAG30990.1|AC012396_26
  misc_feature (1)..(441): Homolog of NCBI NO: 15228300 NR Description: putative glucose acyltransferase; protein id: [Arabidopsis thaliana] >gi|8567775|gb|AAF76347.1| glucose putative [Arabidopsis thaliana]

SEQ ID NO: 95263 - protein, 339 aa, Arabidopsis thaliana; identical to SEQ ID NO: 91507
  peptide (1)..(339): Ceres Seq. ID no. 12728021
  misc_feature (1)..(336): Pfam Name: Serine carboxypeptidase Pfam Description: Serine carboxypeptidase
  misc_feature (1)..(339): Homolog of NCBI NO: 15219429 NR Description: putative serine carboxypeptidase; protein id: [Arabidopsis thaliana] >gi|25289788|pir||A96759 protein serine
  misc_feature (1)..(339): Homolog of NCBI NO: 15219433 NR Description: putative serine carboxypeptidase; protein id: [Arabidopsis thaliana] >gi|25289779|pir||C96759 protein serine
  misc_feature (1)..(339): Homolog of NCBI NO: 22327401 NR Description: serine carboxypeptidase; protein id: At5g36180.1, by cDNA: gi_20260289 [Arabidopsis thaliana] serine carboxypeptidase [Arabidopsis thaliana]
  misc_feature (1)..(339): Homolog of NCBI NO: 8777303 NR Description: serine carboxypeptidase [Arabidopsis thaliana]
  misc_feature (1)..(339): Homolog of NCBI NO: 15219435 NR Description: putative serine carboxypeptidase; protein id: [Arabidopsis thaliana] >gi|12324317|gb|AAG52126.1|AC010556_8
  misc_feature (1)..(339): Homolog of NCBI NO: 15219431 NR Description: putative serine carboxypeptidase; protein id: [Arabidopsis thaliana] >gi|25289778|pir||B96759 protein serine
  misc_feature (1)..(339): Homolog of NCBI NO: 15219427 NR Description: putative serine carboxypeptidase; protein id: [Arabidopsis thaliana] >gi|25289777|pir||H96758 protein serine
  misc_feature (1)..(173): Homolog of NCBI NO: 25289774 NR Description: probable serine carboxypeptidase T9L24.47 - Arabidopsis thaliana >gi|11120810|gb|AAG30990.1|AC012396_26
  misc_feature (198)..(339): Homolog of NCBI NO: 25289774 NR Description: probable serine carboxypeptidase T9L24.47 - Arabidopsis thaliana >gi|11120810|gb|AAG30990.1|AC012396_26
  misc_feature (1)..(339): Homolog of NCBI NO: 15228300 NR Description: putative glucose acyltransferase; protein id: [Arabidopsis thaliana] >gi|8567775|gb|AAF76347.1| glucose putative [Arabidopsis thaliana]

SEQ ID NO: 95264 - protein, 314 aa, Arabidopsis thaliana; identical to SEQ ID NO: 91508
  peptide (1)..(314): Ceres Seq. ID no. 12728022
  misc_feature (1)..(311): Pfam Name: Serine carboxypeptidase Pfam Description: Serine carboxypeptidase
  misc_feature (1)..(314): Homolog of NCBI NO: 15219429 NR Description: putative serine carboxypeptidase; protein id: [Arabidopsis thaliana] >gi|25289788|pir||A96759 protein serine
  misc_feature (1)..(314): Homolog of NCBI NO: 15219433 NR Description: putative serine carboxypeptidase; protein id: [Arabidopsis thaliana] >gi|25289779|pir||C96759 protein serine
  misc_feature (1)..(314): Homolog of NCBI NO: 22327401 NR Description: serine carboxypeptidase; protein id: At5g36180.1, by cDNA: gi_20260289 [Arabidopsis thaliana] serine carboxypeptidase [Arabidopsis thaliana]
  misc_feature (1)..(314): Homolog of NCBI NO: 8777303 NR Description: serine carboxypeptidase [Arabidopsis thaliana]
  misc_feature (1)..(314): Homolog of NCBI NO: 15219435 NR Description: putative serine carboxypeptidase; protein id: [Arabidopsis thaliana] >gi|12324317|gb|AAG52126.1|AC010556_8
  misc_feature (1)..(314): Homolog of NCBI NO: 15219431 NR Description: putative serine carboxypeptidase; protein id: [Arabidopsis thaliana] >gi|25289778|pir||B96759 protein serine
  misc_feature (1)..(314): Homolog of NCBI NO: 15219427 NR Description: putative serine carboxypeptidase; protein id: [Arabidopsis thaliana] >gi|25289777|pir||H96758 protein serine
  misc_feature (1)..(148): Homolog of NCBI NO: 25289774 NR Description: probable serine carboxypeptidase T9L24.47 - Arabidopsis thaliana >gi|11120810|gb|AAG30990.1|AC012396_26
  misc_feature (173)..(314): Homolog of NCBI NO: 25289774 NR Description: probable serine carboxypeptidase T9L24.47 - Arabidopsis thaliana >gi|11120810|gb|AAG30990.1|AC012396_26
  misc_feature (1)..(314): Homolog of NCBI NO: 15228300 NR Description: putative glucose acyltransferase; protein id: [Arabidopsis thaliana] >gi|8567775|gb|AAF76347.1| glucose putative [Arabidopsis thaliana]

SEQ ID NO: 95265 - DNA, 1317 bp, Arabidopsis thaliana; identical to SEQ ID NO: 91509
  misc_feature (1)..(1317): Ceres Seq. ID no. 12728023
  misc_feature: MA Experiment ID: 20000307 Result: Up-regulated in Transcription
  misc_feature: MA Experiment 20000307 PARAMETER Experiment Name: At_Germinating_Seeds_Sub_P Parameter: Age (hr) Value: 24 vs. 0
  misc_feature: MA Experiment 20000307 PARAMETER Experiment Name: At_Germinating_Seeds_Sub_P Parameter: Organism Value: A. thaliana
  misc_feature: MA Experiment 20000307 PARAMETER Experiment Name: At_Germinating_Seeds_Sub_P Parameter: Plant Line Value: WS
  misc_feature: MA Experiment 20000307 PARAMETER Experiment Name: At_Germinating_Seeds_Sub_P Parameter: Tissue Value: Germinating Seeds
  misc_feature: MA Experiment ID: 20000440 Result: Down-regulated in Transcription
  misc_feature: MA Experiment 20000440 PARAMETER Experiment Name: At_Closed-Flower__Sub_P Parameter: Tissue Value: Closed Flower vs. Whole Plant

SEQ ID NO: 95266 - protein, 438 aa, Arabidopsis thaliana; identical to SEQ ID NO: 91510
  peptide (1)..(438): Ceres Seq. ID no. 12728024
  misc_feature (36)..(435): Pfam Name: Serine carboxypeptidase Pfam Description: Serine carboxypeptidase
  misc_feature (1)..(438): Homolog of NCBI NO: 15219431 NR Description: putative serine carboxypeptidase; protein id: [Arabidopsis thaliana] >gi|25289778|pir||B96759 protein serine
  misc_feature (1)..(438): Homolog of NCBI NO: 15219433 NR Description: putative serine carboxypeptidase; protein id: [Arabidopsis thaliana] >gi|25289779|pir||C96759 protein serine
  misc_feature (1)..(438): Homolog of NCBI NO: 22327401 NR Description: serine carboxypeptidase; protein id: At5g36180.1, by cDNA: gi_20260289 [Arabidopsis thaliana] serine carboxypeptidase [Arabidopsis thaliana]
  misc_feature (2)..(438): Homolog of NCBI NO: 15219429 NR Description: putative serine carboxypeptidase; protein id: [Arabidopsis thaliana] >gi|25289788|pir||A96759 protein serine
  misc_feature (3)..(438): Homolog of NCBI NO: 15219435 NR Description: putative serine carboxypeptidase; protein id: [Arabidopsis thaliana] >gi|12324317|gb|AAG52126.1|AC010556_8
  misc_feature (1)..(438): Homolog of NCBI NO: 8777303 NR Description: serine carboxypeptidase [Arabidopsis thaliana]
  misc_feature (1)..(438): Homolog of NCBI NO: 15219427 NR Description: putative serine carboxypeptidase; protein id: [Arabidopsis thaliana] >gi|25289777|pir||H96758 protein serine
  misc_feature (1)..(438): Homolog of NCBI NO: 15228300 NR Description: putative glucose acyltransferase; protein id: [Arabidopsis thaliana] >gi|8567775|gb|AAF76347.1| glucose putative [Arabidopsis thaliana]
  misc_feature (3)..(272): Homolog of NCBI NO: 25289774 NR Description: probable serine carboxypeptidase T9L24.47 - Arabidopsis thaliana >gi|11120810|gb|AAG30990.1|AC012396_26
  misc_feature (297)..(438): Homolog of NCBI NO: 25289774 NR Description: probable serine carboxypeptidase T9L24.47 - Arabidopsis thaliana >gi|11120810|gb|AAG30990.1|AC012396_26

SEQ ID NO: 95267 - protein, 337 aa, Arabidopsis thaliana; identical to SEQ ID NO: 91511
  peptide (1)..(337): Ceres Seq. ID no. 12728025
  misc_feature (1)..(334): Pfam Name: Serine carboxypeptidase Pfam Description: Serine carboxypeptidase
  misc_feature (1)..(337): Homolog of NCBI NO: 15219431 NR Description: putative serine carboxypeptidase; protein id: [Arabidopsis thaliana] >gi|25289778|pir||B96759 protein serine
  misc_feature (1)..(337): Homolog of NCBI NO: 15219433 NR Description: putative serine carboxypeptidase; protein id: [Arabidopsis thaliana] >gi|25289779|pir||C96759 protein serine
  misc_feature (1)..(337): Homolog of NCBI NO: 22327401 NR Description: serine carboxypeptidase; protein id: At5g36180.1, by cDNA: gi_20260289 [Arabidopsis thaliana] serine carboxypeptidase [Arabidopsis thaliana]
  misc_feature (1)..(337): Homolog of NCBI NO: 15219429 NR Description: putative serine carboxypeptidase; protein id: [Arabidopsis thaliana] >gi|25289788|pir||A96759 protein serine
  misc_feature (1)..(337): Homolog of NCBI NO: 15219435 NR Description: putative serine carboxypeptidase; protein id: [Arabidopsis thaliana] >gi|12324317|gb|AAG52126.1|AC010556_8
  misc_feature (1)..(337): Homolog of NCBI NO: 8777303 NR Description: serine carboxypeptidase [Arabidopsis thaliana]
  misc_feature (1)..(337): Homolog of NCBI NO: 15219427 NR Description: putative serine carboxypeptidase; protein id: [Arabidopsis thaliana] >gi|25289777|pir||H96758 protein serine
  misc_feature (1)..(337): Homolog of NCBI NO: 15228300 NR Description: putative glucose acyltransferase; protein id: [Arabidopsis thaliana] >gi|8567775|gb|AAF76347.1| glucose putative [Arabidopsis thaliana]
  misc_feature (1)..(171): Homolog of NCBI NO: 25289774 NR Description: probable serine carboxypeptidase T9L24.47 - Arabidopsis thaliana >gi|11120810|gb|AAG30990.1|AC012396_26
  misc_feature (196)..(337): Homolog of NCBI NO: 25289774 NR Description: probable serine carboxypeptidase T9L24.47 - Arabidopsis thaliana >gi|11120810|gb|AAG30990.1|AC012396_26

SEQ ID NO: 95268 - protein, 312 aa, Arabidopsis thaliana; identical to SEQ ID NO: 91512
  peptide (1)..(312): Ceres Seq. ID no. 12728026
  misc_feature (1)..(309): Pfam Name: Serine carboxypeptidase Pfam Description: Serine carboxypeptidase
  misc_feature (1)..(312): Homolog of NCBI NO: 15219431 NR Description: putative serine carboxypeptidase; protein id: [Arabidopsis thaliana] >gi|25289778|pir||B96759 protein serine
  misc_feature (1)..(312): Homolog of NCBI NO: 15219433 NR Description: putative serine carboxypeptidase; protein id: [Arabidopsis thaliana] >gi|25289779|pir||C96759 protein serine
  misc_feature (1)..(312): Homolog of NCBI NO: 22327401 NR Description: serine carboxypeptidase; protein id: At5g36180.1, by cDNA: gi_20260289 [Arabidopsis thaliana] serine carboxypeptidase [Arabidopsis thaliana]
  misc_feature (1)..(312): Homolog of NCBI NO: 15219429 NR Description: putative serine carboxypeptidase; protein id: [Arabidopsis thaliana] >gi|25289788|pir||A96759 protein serine
  misc_feature (1)..(312): Homolog of NCBI NO: 15219435 NR Description: putative serine carboxypeptidase; protein id: [Arabidopsis thaliana] >gi|12324317|gb|AAG52126.1|AC010556_8
  misc_feature (1)..(312): Homolog of NCBI NO: 8777303 NR Description: serine carboxypeptidase [Arabidopsis thaliana]
  misc_feature (1)..(312): Homolog of NCBI NO: 15219427 NR Description: putative serine carboxypeptidase; protein id: [Arabidopsis thaliana] >gi|25289777|pir||H96758 protein serine
  misc_feature (1)..(312): Homolog of NCBI NO: 15228300 NR Description: putative glucose acyltransferase; protein id: [Arabidopsis thaliana] >gi|8567775|gb|AAF76347.1| glucose putative [Arabidopsis thaliana]
  misc_feature (1)..(146): Homolog of NCBI NO: 25289774 NR Description: probable serine carboxypeptidase T9L24.47 - Arabidopsis thaliana >gi|11120810|gb|AAG30990.1|AC012396_26
  misc_feature (171)..(312): Homolog of NCBI NO: 25289774 NR Description: probable serine carboxypeptidase T9L24.47 - Arabidopsis thaliana >gi|11120810|gb|AAG30990.1|AC012396_26

SEQ ID NO: 95269 - DNA, 1029 bp, Arabidopsis thaliana; identical to SEQ ID NO: 91513
  misc_feature (1)..(1029): Ceres Seq. ID no. 12728041
  misc_feature: MA Experiment ID: 20000227 Result: Down-regulated in Transcription
  misc_feature: MA Experiment 20000227 PARAMETER Experiment Name: At_Root-Tips-vs-Tops_P Parameter: Tissue Value: Root Tips vs. Root Tops

SEQ ID NO: 95270 - protein, 243 aa, Arabidopsis thaliana; identical to SEQ ID NO: 91514
  peptide (1)..(243): Ceres Seq. ID no. 12728042
  misc_feature (6)..(52): Pfam Name: Myb-like DNA-binding domain Pfam Description: Myb-like DNA-binding domain
  misc_feature (1)..(243): Homolog of NCBI NO: 15219462 NR Description: myb family transcription factor(MYB54); protein
  misc_feature (1)..(243): Homolog of NCBI NO: 11358543 NR Description: myb-related transcription factor MYB54 [imported] Arabidopsis thaliana >gi|3941472|gb|AAC83612.1| putative
  misc_feature (2)..(243): Homolog of NCBI NO: 15220910 NR Description: myb family trnscription factor; protein id: supported by cDNA: 267121., supported by cDNA: gi_3941467
  misc_feature (3)..(243): Homolog of NCBI NO: 25513679 NR Description: F2H15.17 protein - Arabidopsis thaliana
  misc_feature (2)..(243): Homolog of NCBI NO: 11358541 NR Description: myb-related transcription factor MYB52 [imported] Arabidopsis thaliana >gi|3941468|gb|AAC83610.1| putative
  misc_feature (2)..(243): Homolog of NCBI NO: 21554916 NR Description: myb-like protein, putative [Arabidopsis thaliana]
  misc_feature (3)..(109): Homolog of NCBI NO: 21321780 NR Description: putative Myb/Myb-related protein [Oryza sativa
  misc_feature (3)..(143): Homolog of NCBI NO: 34903242 NR Description: unnamed protein product [Oryza sativa (japonica group)] >gi|6539552|dbj|BAA88169.1| unnamed protein product
  misc_feature (5)..(239): Homolog of NCBI NO: 15222362 NR Description: MYB-family transcription factor, putative; id: At1g69560.1, supported by cDNA: gi_7644365 [Arabidopsis
  misc_feature (4)..(124): Homolog of NCBI NO: 6979341 NR Description: myb-like protein [Oryza sativa]

SEQ ID NO: 95271 - protein, 241 aa, Arabidopsis thaliana; identical to SEQ ID NO: 91515
  peptide (1)..(241): Ceres Seq. ID no. 12728043
  misc_feature (4)..(50): Pfam Name: Myb-like DNA-binding domain Pfam Description: Myb-like DNA-binding domain
  misc_feature (1)..(241): Homolog of NCBI NO: 15219462 NR Description: myb family transcription factor(MYB54); protein
  misc_feature (1)..(241): Homolog of NCBI NO: 11358543 NR Description: myb-related transcription factor MYB54 [imported] Arabidopsis thaliana >gi|3941472|gb|AAC83612.1| putative
  misc_feature (1)..(241): Homolog of NCBI NO: 15220910 NR Description: myb family trnscription factor; protein id: supported by cDNA: 267121., supported by cDNA: gi_3941467
  misc_feature (1)..(241): Homolog of NCBI NO: 25513679 NR Description: F2H15.17 protein - Arabidopsis thaliana
  misc_feature (1)..(241): Homolog of NCBI NO: 11358541 NR Description: myb-related transcription factor MYB52 [imported] Arabidopsis thaliana >gi|3941468|gb|AAC83610.1| putative
  misc_feature (1)..(241): Homolog of NCBI NO: 21554916 NR Description: myb-like protein, putative [Arabidopsis thaliana]
  misc_feature (1)..(107): Homolog of NCBI NO: 21321780 NR Description: putative Myb/Myb-related protein [Oryza sativa
  misc_feature (1)..(141): Homolog of NCBI NO: 34903242 NR Description: unnamed protein product [Oryza sativa (japonica group)] >gi|6539552|dbj|BAA88169.1| unnamed protein product
  misc_feature (3)..(237): Homolog of NCBI NO: 15222362 NR Description: MYB-family transcription factor, putative; id: At1g69560.1, supported by cDNA: gi_7644365 [Arabidopsis
  misc_feature (2)..(122): Homolog of NCBI NO: 6979341 NR Description: myb-like protein [Oryza sativa]

SEQ ID NO: 95272 - protein, 141 aa, Arabidopsis thaliana; identical to SEQ ID NO: 91516
  peptide (1)..(141): Ceres Seq. ID no. 12728044
  misc_feature (1)..(141): Homolog of NCBI NO: 15219462 NR Description: myb family transcription factor(MYB54); protein
  misc_feature (1)..(141): Homolog of NCBI NO: 11358543 NR Description: myb-related transcription factor MYB54 [imported] Arabidopsis thaliana >gi|3941472|gb|AAC83612.1| putative
  misc_feature (1)..(141): Homolog of NCBI NO: 15220910 NR Description: myb family trnscription factor; protein id: supported by cDNA: 267121., supported by cDNA: gi_3941467
  misc_feature (1)..(141): Homolog of NCBI NO: 25513679 NR Description: F2H15.17 protein - Arabidopsis thaliana
  misc_feature (1)..(141): Homolog of NCBI NO: 11358541 NR Description: myb-related transcription factor MYB52 [imported] Arabidopsis thaliana >gi|3941468|gb|AAC83610.1| putative
  misc_feature (1)..(141): Homolog of NCBI NO: 21554916 NR Description: myb-like protein, putative [Arabidopsis thaliana]
  misc_feature (1)..(41): Homolog of NCBI NO: 34903242 NR Description: unnamed protein product [Oryza sativa (japonica group)] >gi|6539552|dbj|BAA88169.1| unnamed protein product
  misc_feature (1)..(137): Homolog of NCBI NO: 15222362 NR Description: MYB-family transcription factor, putative; id: At1g69560.1, supported by cDNA: gi_7644365 [Arabidopsis
  misc_feature (1)..(22): Homolog of NCBI NO: 6979341 NR Description: myb-like protein [Oryza sativa]
  misc_feature (1)..(44): Homolog of NCBI NO: 9759057 NR Description: Myb-like transcription factor-like protein

SEQ ID NO: 95273 - DNA, 546 bp, Arabidopsis thaliana; identical to SEQ ID NO: 91517
  misc_feature (1)..(546): Ceres Seq. ID no. 12728055
  misc_feature: MA Experiment ID: 20000180 Result: Up-regulated in Transcription
  misc_feature: MA Experiment 20000180 PARAMETER Experiment Name: At_Germinating_Seeds_P Parameter: Age (hr) Value: 24 vs. 0
  misc_feature: MA Experiment 20000180 PARAMETER Experiment Name: At_Germinating_Seeds_P Parameter: Tissue Value: Germinating Seeds
  misc_feature: MA Experiment ID: 20000185 Result: Down-regulated in Transcription
  misc_feature: MA Experiment 20000185 PARAMETER Experiment Name: At_Roots__P Parameter: Age (day) Value: 7 vs. 21
  misc_feature: MA Experiment 20000185 PARAMETER Experiment Name: At_Roots__P Parameter: Organism Value: A. thaliana
  misc_feature: MA Experiment 20000185 PARAMETER Experiment Name: At_Roots__P Parameter: Tissue Value: Roots vs. Whole Plant
  misc_feature: MA Experiment ID: 20000437 Result: Down-regulated in Transcription
  misc_feature: MA Experiment 20000437 PARAMETER Experiment Name: At_Drought_P Parameter: Age (day) Value: 8
  misc_feature: MA Experiment 20000437 PARAMETER Experiment Name: At_Drought_P Parameter: Organism Value: A. thaliana
  misc_feature: MA Experiment 20000437 PARAMETER Experiment Name: At_Drought_P Parameter: Plant Line Value: WS
  misc_feature: MA Experiment 20000437 PARAMETER Experiment Name: At_Drought_P Parameter: Timepoint (hr) Value: 24
  misc_feature: MA Experiment 20000437 PARAMETER Experiment Name: At_Drought_P Parameter: Tissue Value: Whole Plant
  misc_feature: MA Experiment 20000437 PARAMETER Experiment Name: At_Drought_P Parameter: Treatment Value: Drought vs. No Drought
  misc_feature: MA Experiment ID: 20000439 Result: Down-regulated in Transcription
  misc_feature: MA Experiment 20000439 PARAMETER Experiment Name: At_Roots__P Parameter: Age (day) Value: 14 vs. 21
  misc_feature: MA Experiment 20000439 PARAMETER Experiment Name: At_Roots__P Parameter: Organism Value: A. thaliana
  misc_feature: MA Experiment 20000439 PARAMETER Experiment Name: At_Roots__P Parameter: Tissue Value: Roots vs. Whole Plant
  misc_feature: MA Experiment ID: 20000794 Result: Down-regulated in Transcription
  misc_feature: MA Experiment 20000794 PARAMETER Experiment Name: At_Petals_P Parameter: Age (day) Value: 23-25 days
  misc_feature: MA Experiment 20000794 PARAMETER Experiment Name: At_Petals_P Parameter: Plant Line Value: WS
  misc_feature: MA Experiment 20000794 PARAMETER Experiment Name: At_Petals_P Parameter: Tissue Value: Petals vs. Whole plant
  misc_feature: MA Experiment ID: 20001248 Result: Down-regulated in Transcription
  misc_feature: MA Experiment 20001248 PARAMETER Experiment Name: At_Far-red-induction_P Parameter: Age (day) Value: 7
  misc_feature: MA Experiment 20001248 PARAMETER Experiment Name: At_Far-red-induction_P Parameter: Light Value: Far-red vs. White
  misc_feature: MA Experiment 20001248 PARAMETER Experiment Name: At_Far-red-induction_P Parameter: Organism Value: A. thaliana
  misc_feature: MA Experiment 20001248 PARAMETER Experiment Name: At_Far-red-induction_P Parameter: Plant Line Value: Columbia
  misc_feature: MA Experiment 20001248 PARAMETER Experiment Name: At_Far-red-induction_P Parameter: Timepoint (hr) Value: 4
  misc_feature: MA Experiment 20001248 PARAMETER Experiment Name: At_Far-red-induction_P Parameter: Tissue Value: Whole Plant
  misc_feature: MA Experiment ID: 20001450 Result: Down-regulated in Transcription
  misc_feature: MA Experiment 20001450 PARAMETER Experiment Name: At_Far-red-induction_P Parameter: Age (day) Value: 7
  misc_feature: MA Experiment 20001450 PARAMETER Experiment Name: At_Far-red-induction_P Parameter: Light Value: Far-red vs. White
  misc_feature: MA Experiment 20001450 PARAMETER Experiment Name: At_Far-red-induction_P Parameter: Organism Value: A. thaliana
  misc_feature: MA Experiment 20001450 PARAMETER Experiment Name: At_Far-red-induction_P Parameter: Plant Line Value: Columbia
  misc_feature: MA Experiment 20001450 PARAMETER Experiment Name: At_Far-red-induction_P Parameter: Timepoint (hr) Value: 8
  misc_feature: MA Experiment 20001450 PARAMETER Experiment Name: At_Far-red-induction_P Parameter: Tissue Value: Whole Plant
  misc_feature: MA Experiment ID: 20001905 Result: Down-regulated in Transcription
  misc_feature: MA Experiment 20001905 PARAMETER Experiment Name: At_Drought_Reproduction_P Parameter: Age (day) Value: 40
  misc_feature: MA Experiment 20001905 PARAMETER Experiment Name: At_Drought_Reproduction_P Parameter: Organism Value: A. thaliana
  misc_feature: MA Experiment 20001905 PARAMETER Experiment Name: At_Drought_Reproduction_P Parameter: Plant Line Value: WS
  misc_feature: MA Experiment 20001905 PARAMETER Experiment Name: At_Drought_Reproduction_P Parameter: Timepoint (day) Value: 10
  misc_feature: MA Experiment 20001905 PARAMETER Experiment Name: At_Drought_Reproduction_P Parameter: Tissue Value: Rosettes
  misc_feature: MA Experiment 20001905 PARAMETER Experiment Name: At_Drought_Reproduction_P Parameter: Treatment Value: Drought vs. No Drought

SEQ ID NO: 95274 - protein, 181 aa, Arabidopsis thaliana; identical to SEQ ID NO: 91518
  peptide (1)..(181): Ceres Seq. ID no. 12728056
  misc_feature (79)..(150): Pfam Name: RNA recognition motif. (a.k.a. RRM, RBD, or RNP domain) Pfam Description: RNA recognition motif. (a.k.a. RRM, RBD, or RNP
  misc_feature (1)..(181): Homolog of NCBI NO: 15219486 NR Description: RRM-containing RNA-binding protein, putative;
  misc_feature (58)..(173): Homolog of NCBI NO: 38636774 NR Description: putative RNA recognition motif (RRM)-containing
  misc_feature (58)..(171): Homolog of NCBI NO: 15239676 NR Description: RRM-containing protein; protein id: At5g54580.1, by cDNA: 14044., supported by cDNA: gi_18175761, supported by gi_20465512 [Arabidopsis thaliana] >gi|9758950|dbj|BAB09337.1|
  misc_feature (61)..(164): Homolog of NCBI NO: 18402803 NR Description: expressed protein; protein id: At3g20930.1, by cDNA: 112006., supported by cDNA: gi_20466723 [Arabidopsis >gi|20466724|gb|AAM20679.1| unknown protein [Arabidopsis
  misc_feature (68)..(164): Homolog of NCBI NO: 34898598 NR Description: P0534A03.25 [Oryza sativa (japonica
  misc_feature (72)..(174): Homolog of NCBI NO: 38344030 NR Description: OJ991214_12.1 [Oryza sativa (japonica
  misc_feature (51)..(159): Homolog of NCBI NO: 15239958 NR Description: RRM-containing protein; protein id: At5g06210.1, by cDNA: 36764., supported by cDNA: gi_17065275, supported by gi_20260001 [Arabidopsis thaliana] >gi|9759319|dbj|BAB09686.1|
  misc_feature (61)..(146): Homolog of NCBI NO: 9293999 NR Description: gene_id:MFD22.4~unknown protein [Arabidopsis
  misc_feature (78)..(153): Homolog of NCBI NO: 28173040 NR Description: hyperosmotic glycine rich protein [Salmo salar]
  misc_feature (48)..(175): Homolog of NCBI NO: 15224298 NR Description: RRM-containing protein; protein id: At2g37510.1,

SEQ ID NO: 95275 - DNA, 936 bp, Arabidopsis thaliana; identical to SEQ ID NO: 91519
  misc_feature (1)..(936): Ceres Seq. ID no. 12728057
  misc_feature: MA Experiment ID: 20000314 Result: Down-regulated in Transcription
  misc_feature: MA Experiment 20000314 PARAMETER Experiment Name: At_14day_Shoots-Roots_Sub_P Parameter: Age (day) Value: 14
  misc_feature: MA Experiment 20000314 PARAMETER Experiment Name: At_14day_Shoots-Roots_Sub_P Parameter: Organism Value: A. thaliana
  misc_feature: MA Experiment 20000314 PARAMETER Experiment Name: At_14day_Shoots-Roots_Sub_P Parameter: Plant Line Value: WS
  misc_feature: MA Experiment 20000314 PARAMETER Experiment Name: At_14day_Shoots-Roots_Sub_P Parameter: Tissue Value: Roots vs. Whole Plant
  misc_feature: MA Experiment ID: 20000315 Result: Down-regulated in Transcription
  misc_feature: MA Experiment 20000315 PARAMETER Experiment Name: At_14day_Shoots-Roots_Sub_P Parameter: Age (day) Value: 14
  misc_feature: MA Experiment 20000315 PARAMETER Experiment Name: At_14day_Shoots-Roots_Sub_P Parameter: Organism Value: A. thaliana
  misc_feature: MA Experiment 20000315 PARAMETER Experiment Name: At_14day_Shoots-Roots_Sub_P Parameter: Plant Line Value: WS
  misc_feature: MA Experiment 20000315 PARAMETER Experiment Name: At_14day_Shoots-Roots_Sub_P Parameter: Tissue Value: Shoots vs. Whole Plant
  misc_feature: MA Experiment ID: 20000327 Result: Down-regulated in Transcription
  misc_feature: MA Experiment 20000327 PARAMETER Experiment Name: At_42deg_Heat_Sub_P Parameter: Age (day) Value: 14
  misc_feature: MA Experiment 20000327 PARAMETER Experiment Name: At_42deg_Heat_Sub_P Parameter: Organism Value: A. thaliana
  misc_feature: MA Experiment 20000327 PARAMETER Experiment Name: At_42deg_Heat_Sub_P Parameter: Plant Line Value: WS
  misc_feature: MA Experiment 20000327 PARAMETER Experiment Name: At_42deg_Heat_Sub_P Parameter: Temperature (deg C) Value: 42 vs. 22
  misc_feature: MA Experiment 20000327 PARAMETER Experiment Name: At_42deg_Heat_Sub_P Parameter: Timepoint (hr) Value: 1
  misc_feature: MA Experiment 20000327 PARAMETER Experiment Name: At_42deg_Heat_Sub_P Parameter: Tissue Value: Aerial
  misc_feature: MA Experiment ID: 20000355 Result: Down-regulated in Transcription
  misc_feature: MA Experiment 20000355 PARAMETER Experiment Name: At_Siliques_Sub_P Parameter: Age (day) Value: 21
  misc_feature: MA Experiment 20000355 PARAMETER Experiment Name: At_Siliques_Sub_P Parameter: Organism Value: A. thaliana
  misc_feature: MA Experiment 20000355 PARAMETER Experiment Name: At_Siliques_Sub_P Parameter: Plant Line Value: WS
  misc_feature: MA Experiment 20000355 PARAMETER Experiment Name: At_Siliques_Sub_P Parameter: Tissue Value: Less Than 5mm Siliques vs. Whole Plant
  misc_feature: MA Experiment ID: 20000440 Result: Down-regulated in Transcription
  misc_feature: MA Experiment 20000440 PARAMETER Experiment Name: At_Closed-Flower__Sub_P Parameter: Tissue Value: Closed Flower vs. Whole Plant
  misc_feature: MA Experiment ID: 20000634 Result: Up-regulated in Transcription
  misc_feature: MA Experiment 20000634 PARAMETER Experiment Name: At_10percent_PEG_Sub_P Parameter: Age (day) Value: 12
  misc_feature: MA Experiment 20000634 PARAMETER Experiment Name: At_10percent_PEG_Sub_P Parameter: Organism Value: A. thaliana
  misc_feature: MA Experiment 20000634 PARAMETER Experiment Name: At_10percent_PEG_Sub_P Parameter: Plant Line Value: WS
  misc_feature: MA Experiment 20000634 PARAMETER Experiment Name: At_10percent_PEG_Sub_P Parameter: Timepoint (day) Value: 12
  misc_feature: MA Experiment 20000634 PARAMETER Experiment Name: At_10percent_PEG_Sub_P Parameter: Tissue Value: Whole Plant
  misc_feature: MA Experiment 20000634 PARAMETER Experiment Name: At_10percent_PEG_Sub_P Parameter: Treatment Value: 10% PEG vs. No Treatment
  misc_feature: MA Experiment ID: 20001807 Result: Down-regulated in Transcription
  misc_feature: MA Experiment 20001807 PARAMETER Experiment Name: At_50mM_NH4NO3_L-to-H_Sub_P Parameter: Timepoint (hr) Value: 6
  misc_feature: MA Experiment 20001807 PARAMETER Experiment Name: At_50mM_NH4NO3_L-to-H_Sub_P Parameter: Tissue Value: Leaf
  misc_feature: MA Experiment 20001807 PARAMETER Experiment Name: At_50mM_NH4NO3_L-to-H_Sub_P Parameter: Treatment Value: 50mM NH4NO3 vs 100mM Mannitol

SEQ ID NO: 95276 - protein, 240 aa, Arabidopsis thaliana; identical to SEQ ID NO: 91520
  peptide (1)..(240): Ceres Seq. ID no. 12728058
  misc_feature (102)..(235): Pfam Name: NUDIX domain Pfam Description: NUDIX domain
  misc_feature (43)..(240): Homolog of NCBI NO: 22330598 NR Description: unknown protein; protein id: At1g73540.1, by cDNA: gi_18252868 [Arabidopsis thaliana] unknown protein [Arabidopsis thaliana]
  misc_feature (64)..(240): Homolog of NCBI NO: 25367539 NR Description: unknown protein [imported] - Arabidopsis thaliana
  misc_feature (44)..(237): Homolog of NCBI NO: 15221055 NR Description: unknown protein; protein id: At1g18300.1 thaliana] >gi|6714298|gb|AAF25994.1|AC013354_13 F15H18.18 thaliana] >gi|8671772|gb|AAF78378.1|AC069551_11 T10O22.27
  misc_feature (81)..(235): Homolog of NCBI NO: 18379275 NR Description: expressed protein; protein id: At2g01670.1, by cDNA: 8247., supported by cDNA: gi_13272382, supported by gi_15293192, supported by cDNA: gi_15724325 [Arabidopsis
  misc_feature (83)..(235): Homolog of NCBI NO: 21595695 NR Description: unknown [Arabidopsis thaliana]
  misc_feature (83)..(235): Homolog of NCBI NO: 15223919 NR Description: hypothetical protein; protein id: At1g14860.1
  misc_feature (105)..(235): Homolog of NCBI NO: 31747031 NR Description: MutT-like protein [Cucumis sativus]
  misc_feature (86)..(232): Homolog of NCBI NO: 18399682 NR Description: expressed protein; protein id: At3g12600.1 thaliana] >gi|9294354|dbj|BAB02251.1| to unknown protein [Arabidopsis thaliana]
  misc_feature (86)..(233): Homolog of NCBI NO: 18391450 NR Description: expressed protein; protein id: At1g12880.1, by cDNA: gi_15810278, supported by cDNA: gi_20258974 [Arabidopsis >gi|15810279|gb|AAL07027.1| unknown protein [Arabidopsis
  misc_feature (86)..(233): Homolog of NCBI NO: 25518008 NR Description: F13K23.14 protein - Arabidopsis thaliana

SEQ ID NO: 95277 - protein, 198 aa, Arabidopsis thaliana; identical to SEQ ID NO: 91521
  peptide (1)..(198): Ceres Seq. ID no. 12728059
  misc_feature (60)..(193): Pfam Name: NUDIX domain Pfam Description: NUDIX domain
  misc_feature (1)..(198): Homolog of NCBI NO: 22330598 NR Description: unknown protein; protein id: At1g73540.1, by cDNA: gi_18252868 [Arabidopsis thaliana] unknown protein [Arabidopsis thaliana]
  misc_feature (22)..(198): Homolog of NCBI NO: 25367539 NR Description: unknown protein [imported] - Arabidopsis thaliana
  misc_feature (2)..(195): Homolog of NCBI NO: 15221055 NR Description: unknown protein; protein id: At1g18300.1 thaliana] >gi|6714298|gb|AAF25994.1|AC013354_13 F15H18.18 thaliana] >gi|8671772|gb|AAF78378.1|AC069551_11 T10O22.27
  misc_feature (39)..(193): Homolog of NCBI NO: 18379275 NR Description: expressed protein; protein id: At2g01670.1, by cDNA: 8247., supported by cDNA: gi_13272382, supported by gi_15293192, supported by cDNA: gi_15724325 [Arabidopsis
  misc_feature (41)..(193): Homolog of NCBI NO: 21595695 NR Description: unknown [Arabidopsis thaliana]
  misc_feature (41)..(193): Homolog of NCBI NO: 15223919 NR Description: hypothetical protein; protein id: At1g14860.1
  misc_feature (63)..(193): Homolog of NCBI NO: 31747031 NR Description: MutT-like protein [Cucumis sativus]
  misc_feature (44)..(190): Homolog of NCBI NO: 18399682 NR Description: expressed protein; protein id: At3g12600.1 thaliana] >gi|9294354|dbj|BAB02251.1| to unknown protein [Arabidopsis thaliana]
  misc_feature (44)..(191): Homolog of NCBI NO: 18391450 NR Description: expressed protein; protein id: At1g12880.1, by cDNA: gi_15810278, supported by cDNA: gi_20258974 [Arabidopsis >gi|15810279|gb|AAL07027.1| unknown protein [Arabidopsis
  misc_feature (44)..(191): Homolog of NCBI NO: 25518008 NR Description: F13K23.14 protein - Arabidopsis thaliana

SEQ ID NO: 95278 - protein, 177 aa, Arabidopsis thaliana; identical to SEQ ID NO: 91522
  peptide (1)..(177): Ceres Seq. ID no. 12728060
  misc_feature (39)..(172): Pfam Name: NUDIX domain Pfam Description: NUDIX domain
  misc_feature (1)..(177): Homolog of NCBI NO: 22330598 NR Description: unknown protein; protein id: At1g73540.1, by cDNA: gi_18252868 [Arabidopsis thaliana] unknown protein [Arabidopsis thaliana]
  misc_feature (1)..(177): Homolog of NCBI NO: 25367539 NR Description: unknown protein [imported] - Arabidopsis thaliana
  misc_feature (1)..(174): Homolog of NCBI NO: 15221055 NR Description: unknown protein; protein id: At1g18300.1 thaliana] >gi|6714298|gb|AAF25994.1|AC013354_13 F15H18.18 thaliana] >gi|8671772|gb|AAF78378.1|AC069551_11 T10O22.27
  misc_feature (18)..(172): Homolog of NCBI NO: 18379275 NR Description: expressed protein; protein id: At2g01670.1, by cDNA: 8247., supported by cDNA: gi_13272382, supported by gi_15293192, supported by cDNA: gi_15724325 [Arabidopsis
  misc_feature (20)..(172): Homolog of NCBI NO: 21595695 NR Description: unknown [Arabidopsis thaliana]
  misc_feature (20)..(172): Homolog of NCBI NO: 15223919 NR Description: hypothetical protein; protein id: At1g14860.1
  misc_feature (42)..(172): Homolog of NCBI NO: 31747031 NR Description: MutT-like protein [Cucumis sativus]
  misc_feature (23)..(169): Homolog of NCBI NO: 18399682 NR Description: expressed protein; protein id: At3g12600.1 thaliana] >gi|9294354|dbj|BAB02251.1| to unknown protein [Arabidopsis thaliana]
  misc_feature (23)..(170): Homolog of NCBI NO: 18391450 NR Description: expressed protein; protein id: At1g12880.1, by cDNA: gi_15810278, supported by cDNA: gi_20258974 [Arabidopsis >gi|15810279|gb|AAL07027.1| unknown protein [Arabidopsis
  misc_feature (23)..(170): Homolog of NCBI NO: 25518008 NR Description: F13K23.14 protein - Arabidopsis thaliana

SEQ ID NO: 95279 - DNA, 507 bp, Arabidopsis thaliana; identical to SEQ ID NO: 91523
  misc_feature (1)..(507): Ceres Seq. ID no. 12728061
  misc_feature: MA Experiment ID: 20000349 Result: Down-regulated in Transcription
  misc_feature: MA Experiment 20000349 PARAMETER Experiment Name: At_100uM_ABA_Sub_P Parameter: Age (day) Value: 14
  misc_feature: MA Experiment 20000349 PARAMETER Experiment Name: At_100uM_ABA_Sub_P Parameter: Organism Value: A. thaliana
  misc_feature: MA Experiment 20000349 PARAMETER Experiment Name: At_100uM_ABA_Sub_P Parameter: Plant Line Value: WS
  misc_feature: MA Experiment 20000349 PARAMETER Experiment Name: At_100uM_ABA_Sub_P Parameter: Timepoint (hr) Value: 6
  misc_feature: MA Experiment 20000349 PARAMETER Experiment Name: At_100uM_ABA_Sub_P Parameter: Tissue Value: Aerial
  misc_feature: MA Experiment 20000349 PARAMETER Experiment Name: At_100uM_ABA_Sub_P Parameter: Treatment Value: 100uM ABA vs. No Treatment
  misc_feature: MA Experiment ID: 20001807 Result: Up-regulated in Transcription
  misc_feature: MA Experiment 20001807 PARAMETER Experiment Name: At_50mM_NH4NO3_L-to-H_Sub_P Parameter: Timepoint (hr) Value: 6
  misc_feature: MA Experiment 20001807 PARAMETER Experiment Name: At_50mM_NH4NO3_L-to-H_Sub_P Parameter: Tissue Value: Leaf
  misc_feature: MA Experiment 20001807 PARAMETER Experiment Name: At_50mM_NH4NO3_L-to-H_Sub_P Parameter: Treatment Value: 50mM NH4NO3 vs 100mM Mannitol

SEQ ID NO: 95280 - protein, 168 aa, Arabidopsis thaliana; identical to SEQ ID NO: 91524
  peptide (1)..(168): Ceres Seq. ID no. 12728062
  misc_feature (11)..(90): Pfam Name: C2 domain Pfam Description: C2 domain
  misc_feature (1)..(168): Homolog of NCBI NO: 15219500 NR Description: hypothetical protein; protein id: At1g73580.1
  misc_feature (2)..(168): Homolog of NCBI NO: 30684739 NR Description: C2 domain-containing protein [Arabidopsis
  misc_feature (2)..(168): Homolog of NCBI NO: 15221907 NR Description: unknown protein; protein id: At1g48590.1
  misc_feature (2)..(168): Homolog of NCBI NO: 25405940 NR Description: protein T1N15.21 [imported] - Arabidopsis >gi|8778695|gb|AAF79703.1|AC020889_11 T1N15.21 [Arabidopsis
  misc_feature (4)..(168): Homolog of NCBI NO: 15240322 NR Description: putative protein; protein id: At5g37740.1, by cDNA: gi_18377800, supported by cDNA: gi_21281220 [Arabidopsis
  misc_feature (4)..(165): Homolog of NCBI NO: 18408493 NR Description: expressed protein; protein id: At1g66360.1, by cDNA: 19307. [Arabidopsis thaliana] >gi|25404615|pir||H96688
  misc_feature (4)..(168): Homolog of NCBI NO: 18409682 NR Description: expressed protein; protein id: At1g70810.1, by cDNA: 23322., supported by cDNA: gi_13430459 [Arabidopsis
  misc_feature (4)..(168): Homolog of NCBI NO: 13430460 NR Description: unknown protein [Arabidopsis thaliana]
  misc_feature (4)..(164): Homolog of NCBI NO: 33146442 NR Description: zinc finger and C2 domain protein-like [Oryza
  misc_feature (5)..(168): Homolog of NCBI NO: 18409675 NR Description: zinc finger and C2 domain protein, putative; id: At1g70790.1, supported by cDNA: 148076. [Arabidopsis

SEQ ID NO: 95281 - protein, 165 aa, Arabidopsis thaliana; identical to SEQ ID NO: 91525
  peptide (1)..(165): Ceres Seq. ID no. 12728063
  misc_feature (8)..(87): Pfam Name: C2 domain Pfam Description: C2 domain
  misc_feature (1)..(165): Homolog of NCBI NO: 15219500 NR Description: hypothetical protein; protein id: At1g73580.1
  misc_feature (1)..(165): Homolog of NCBI NO: 30684739 NR Description: C2 domain-containing protein [Arabidopsis
  misc_feature (1)..(165): Homolog of NCBI NO: 15221907 NR Description: unknown protein; protein id: At1g48590.1
  misc_feature (1)..(165): Homolog of NCBI NO: 25405940 NR Description: protein T1N15.21 [imported] - Arabidopsis >gi|8778695|gb|AAF79703.1|AC020889_11 T1N15.21 [Arabidopsis
  misc_feature (1)..(165): Homolog of NCBI NO: 15240322 NR Description: putative protein; protein id: At5g37740.1, by cDNA: gi_18377800, supported by cDNA: gi_21281220 [Arabidopsis
  misc_feature (1)..(162): Homolog of NCBI NO: 18408493 NR Description: expressed protein; protein id: At1g66360.1, by cDNA: 19307. [Arabidopsis thaliana] >gi|25404615|pir||H96688
  misc_feature (1)..(165): Homolog of NCBI NO: 18409682 NR Description: expressed protein; protein id: At1g70810.1, by cDNA: 23322., supported by cDNA: gi_13430459 [Arabidopsis
  misc_feature (1)..(165): Homolog of NCBI NO: 13430460 NR Description: unknown protein [Arabidopsis thaliana]
  misc_feature (1)..(161): Homolog of NCBI NO: 33146442 NR Description: zinc finger and C2 domain protein-like [Oryza
  misc_feature (2)..(165): Homolog of NCBI NO: 18409675 NR Description: zinc finger and C2 domain protein, putative; id: At1g70790.1, supported by cDNA: 148076. [Arabidopsis

SEQ ID NO: 95282 - DNA, 1668 bp, Arabidopsis thaliana; identical to SEQ ID NO: 91526
  misc_feature (1)..(1668): Ceres Seq. ID no. 12728064
  misc_feature: MA Experiment ID: 20000306 Result: Up-regulated in Transcription
  misc_feature: MA Experiment 20000306 PARAMETER Experiment Name: At_Germinating_Seeds_Sub_P Parameter: Age (hr) Value: 6 vs. 0
  misc_feature: MA Experiment 20000306 PARAMETER Experiment Name: At_Germinating_Seeds_Sub_P Parameter: Organism Value: A. thaliana
  misc_feature: MA Experiment 20000306 PARAMETER Experiment Name: At_Germinating_Seeds_Sub_P Parameter: Plant Line Value: WS
  misc_feature: MA Experiment 20000306 PARAMETER Experiment Name: At_Germinating_Seeds_Sub_P Parameter: Tissue Value: Germinating Seeds
  misc_feature: MA Experiment ID: 20000307 Result: Up-regulated in Transcription
  misc_feature: MA Experiment 20000307 PARAMETER Experiment Name: At_Germinating_Seeds_Sub_P Parameter: Age (hr) Value: 24 vs. 0
  misc_feature: MA Experiment 20000307 PARAMETER Experiment Name: At_Germinating_Seeds_Sub_P Parameter: Organism Value: A. thaliana
  misc_feature: MA Experiment 20000307 PARAMETER Experiment Name: At_Germinating_Seeds_Sub_P Parameter: Plant Line Value: WS
  misc_feature: MA Experiment 20000307 PARAMETER Experiment Name: At_Germinating_Seeds_Sub_P Parameter: Tissue Value: Germinating Seeds
  misc_feature: MA Experiment ID: 20000329 Result: Up-regulated in Transcription
  misc_feature: MA Experiment 20000329 PARAMETER Experiment Name: At_4deg_Cold_Sub_P Parameter: Age (day) Value: 14
  misc_feature: MA Experiment 20000329 PARAMETER Experiment Name: At_4deg_Cold_Sub_P Parameter: Organism Value: A. thaliana
  misc_feature: MA Experiment 20000329 PARAMETER Experiment Name: At_4deg_Cold_Sub_P Parameter: Plant Line Value: WS
  misc_feature: MA Experiment 20000329 PARAMETER Experiment Name: At_4deg_Cold_Sub_P Parameter: Temperature (deg C) Value: 4 vs. 22
  misc_feature: MA Experiment 20000329 PARAMETER Experiment Name: At_4deg_Cold_Sub_P Parameter: Timepoint (hr) Value: 6
  misc_feature: MA Experiment 20000329 PARAMETER Experiment Name: At_4deg_Cold_Sub_P Parameter: Tissue Value: Aerial
  misc_feature: MA Experiment ID: 20000332 Result: Up-regulated in Transcription
  misc_feature: MA Experiment 20000332 PARAMETER Experiment Name: At_4deg_Cold_Sub_P Parameter: Age (day) Value: 14
  misc_feature: MA Experiment 20000332 PARAMETER Experiment Name: At_4deg_Cold_Sub_P Parameter: Organism Value: A. thaliana
  misc_feature: MA Experiment 20000332 PARAMETER Experiment Name: At_4deg_Cold_Sub_P Parameter: Plant Line Value: WS
  misc_feature: MA Experiment 20000332 PARAMETER Experiment Name: At_4deg_Cold_Sub_P Parameter: Temperature (deg C) Value: 4 vs. 22
  misc_feature: MA Experiment 20000332 PARAMETER Experiment Name: At_4deg_Cold_Sub_P Parameter: Timepoint (hr) Value: 2
  misc_feature: MA Experiment 20000332 PARAMETER Experiment Name: At_4deg_Cold_Sub_P Parameter: Tissue Value: Aerial
  misc_feature: MA Experiment ID: 20000349 Result: Down-regulated in Transcription
  misc_feature: MA Experiment 20000349 PARAMETER Experiment Name: At_100uM_ABA_Sub_P Parameter: Age (day) Value: 14
  misc_feature: MA Experiment 20000349 PARAMETER Experiment Name: At_100uM_ABA_Sub_P Parameter: Organism Value: A. thaliana
  misc_feature: MA Experiment 20000349 PARAMETER Experiment Name: At_100uM_ABA_Sub_P Parameter: Plant Line Value: WS
  misc_feature: MA Experiment 20000349 PARAMETER Experiment Name: At_100uM_ABA_Sub_P Parameter: Timepoint (hr) Value: 6
  misc_feature: MA Experiment 20000349 PARAMETER Experiment Name: At_100uM_ABA_Sub_P Parameter: Tissue Value: Aerial
  misc_feature: MA Experiment 20000349 PARAMETER Experiment Name: At_100uM_ABA_Sub_P Parameter: Treatment Value: 100uM ABA vs. No Treatment
  misc_feature: MA Experiment ID: 20000440 Result: Up-regulated in Transcription
  misc_feature: MA Experiment 20000440 PARAMETER Experiment Name: At_Closed-Flower__Sub_P Parameter: Tissue Value: Closed Flower vs. Whole Plant

SEQ ID NO: 95283 - protein, 555 aa, Arabidopsis thaliana; identical to SEQ ID NO: 91527
  peptide (1)..(555): Ceres Seq. ID no. 12728065
  misc_feature (1)..(555): Homolog of NCBI NO: 15219502 NR Description: phosphoethanolamine N-methyltransferase, protein id: At1g73600.1 [Arabidopsis thaliana]
  misc_feature (66)..(555): Homolog of NCBI NO: 24212080 NR Description: Putative phosphoethanolamine N-methyltransferase 3
  misc_feature (67)..(555): Homolog of NCBI NO: 30684743 NR Description: phosphoethanolamine N-methyltransferase, putative
  misc_feature (67)..(555): Homolog of NCBI NO: 20260388 NR Description: unknown protein [Arabidopsis thaliana]
  misc_feature (67)..(555): Homolog of NCBI NO: 9294501 NR Description: methyl transferase-like protein [Arabidopsis
  misc_feature (70)..(554): Homolog of NCBI NO: 28804509 NR Description: phosphoethanolamine N-methyltransferase [Aster
  misc_feature (82)..(554): Homolog of NCBI NO: 15221909 NR Description: phosphoethanolamine N-methyltransferase, protein id: At1g48600.1, supported by cDNA: gi_16226648, by cDNA: gi_17380783 [Arabidopsis thaliana]
  misc_feature (71)..(554): Homolog of NCBI NO: 24212082 NR Description: Phosphoethanolamine N-methyltransferase
  misc_feature (67)..(554): Homolog of NCBI NO: 12584943 NR Description: phosphoethanolamine N-methyltransferase
  misc_feature (71)..(554): Homolog of NCBI NO: 28436074 NR Description: phosphoethanolamine N-methyltransferase [Suaeda

SEQ ID NO: 95284 - protein, 541 aa, Arabidopsis thaliana; identical to SEQ ID NO: 91528
  peptide (1)..(541): Ceres Seq. ID no. 12728066
  misc_feature (1)..(541): Homolog of NCBI NO: 15219502 NR Description: phosphoethanolamine N-methyltransferase, protein id: At1g73600.1 [Arabidopsis thaliana]
  misc_feature (52)..(541): Homolog of NCBI NO: 24212080 NR Description: Putative phosphoethanolamine N-methyltransferase 3
  misc_feature (53)..(541): Homolog of NCBI NO: 30684743 NR Description: phosphoethanolamine N-methyltransferase, putative
  misc_feature (53)..(541): Homolog of NCBI NO: 20260388 NR Description: unknown protein [Arabidopsis thaliana]
  misc_feature (53)..(541): Homolog of NCBI NO: 9294501 NR Description: methyl transferase-like protein [Arabidopsis
  misc_feature (56)..(540): Homolog of NCBI NO: 28804509 NR Description: phosphoethanolamine N-methyltransferase [Aster
  misc_feature (68)..(540): Homolog of NCBI NO: 15221909 NR Description: phosphoethanolamine N-methyltransferase, protein id: At1g48600.1, supported by cDNA: gi_16226648, by cDNA: gi_17380783 [Arabidopsis thaliana]
  misc_feature (57)..(540): Homolog of NCBI NO: 24212082 NR Description: Phosphoethanolamine N-methyltransferase
  misc_feature (53)..(540): Homolog of NCBI NO: 12584943 NR Description: phosphoethanolamine N-methyltransferase
  misc_feature (57)..(540): Homolog of NCBI NO: 28436074 NR Description: phosphoethanolamine N-methyltransferase [Suaeda

SEQ ID NO: 95285 - protein, 526 aa, Arabidopsis thaliana; identical to SEQ ID NO: 91529
  peptide (1)..(526): Ceres Seq. ID no. 12728067
  misc_feature (1)..(526): Homolog of NCBI NO: 15219502 NR Description: phosphoethanolamine N-methyltransferase, protein id: At1g73600.1 [Arabidopsis thaliana]
  misc_feature (37)..(526): Homolog of NCBI NO: 24212080 NR Description: Putative phosphoethanolamine N-methyltransferase 3
  misc_feature (38)..(526): Homolog of NCBI NO: 30684743 NR Description: phosphoethanolamine N-methyltransferase, putative
  misc_feature (38)..(526): Homolog of NCBI NO: 20260388 NR Description: unknown protein [Arabidopsis thaliana]
  misc_feature (38)..(526): Homolog of NCBI NO: 9294501 NR Description: methyl transferase-like protein [Arabidopsis
  misc_feature (41)..(525): Homolog of NCBI NO: 28804509 NR Description: phosphoethanolamine N-methyltransferase [Aster
  misc_feature (53)..(525): Homolog of NCBI NO: 15221909 NR Description: phosphoethanolamine N-methyltransferase, protein id: At1g48600.1, supported by cDNA: gi_16226648, by cDNA: gi_17380783 [Arabidopsis thaliana]
  misc_feature (42)..(525): Homolog of NCBI NO: 24212082 NR Description: Phosphoethanolamine N-methyltransferase
  misc_feature (38)..(525): Homolog of NCBI NO: 12584943 NR Description: phosphoethanolamine N-methyltransferase
  misc_feature (42)..(525): Homolog of NCBI NO: 28436074 NR Description: phosphoethanolamine N-methyltransferase [Suaeda

SEQ ID NO: 95286 - DNA, 1842 bp, Arabidopsis thaliana; identical to SEQ ID NO: 91530
  misc_feature (1)..(1842): Ceres Seq. ID no. 12728096
  misc_feature: MA Experiment ID: 20000171 Result: Up-regulated in Transcription
  misc_feature: MA Experiment 20000171 PARAMETER Experiment Name: At_42deg_Heat_P Parameter: Age (day) Value: 14
  misc_feature: MA Experiment 20000171 PARAMETER Experiment Name: At_42deg_Heat_P Parameter: Organism Value: A. thaliana
  misc_feature: MA Experiment 20000171 PARAMETER Experiment Name: At_42deg_Heat_P Parameter: Plant Line Value: WS
  misc_feature: MA Experiment 20000171 PARAMETER Experiment Name: At_42deg_Heat_P Parameter: Temperature (deg C) Value: 42 vs. 22
  misc_feature: MA Experiment 20000171 PARAMETER Experiment Name: At_42deg_Heat_P Parameter: Timepoint (hr) Value: 1
  misc_feature: MA Experiment 20000171 PARAMETER Experiment Name: At_42deg_Heat_P Parameter: Tissue Value: Aerial
  misc_feature: MA Experiment ID: 20000180 Result: Down-regulated in Transcription
  misc_feature: MA Experiment 20000180 PARAMETER Experiment Name: At_Germinating_Seeds_P Parameter: Age (hr) Value: 24 vs. 0
  misc_feature: MA Experiment 20000180 PARAMETER Experiment Name: At_Germinating_Seeds_P Parameter: Tissue Value: Germinating Seeds

SEQ ID NO: 95287 - protein, 613 aa, Arabidopsis thaliana; identical to SEQ ID NO: 91531
  peptide (1)..(613): Ceres Seq. ID no. 12728097
  misc_feature (472)..(506): Pfam Name: PPR repeat Pfam Description: PPR repeat
  misc_feature (33)..(340): Homolog of NCBI NO: 15232006 NR Description: hypothetical protein; protein id: At3g09040.1 thaliana] >gi|5923669|gb|AAD56320.1|AC009326_7 hypothetical
  misc_feature (307)..(610): Homolog of NCBI NO: 15232006 NR Description: hypothetical protein; protein id: At3g09040.1 thaliana] >gi|5923669|gb|AAD56320.1|AC009326_7 hypothetical
  misc_feature (23)..(610): Homolog of NCBI NO: 15225445 NR Description: hypothetical protein; protein id: At2g13600.1
  misc_feature (33)..(386): Homolog of NCBI NO: 15231798 NR Description: putative protein; protein id: At3g53360.1
  misc_feature (332)..(610): Homolog of NCBI NO: 15231798 NR Description: putative protein; protein id: At3g53360.1
  misc_feature (28)..(610): Homolog of NCBI NO: 9279687 NR Description: gb|AAC35225.1~gene_id:MWI23.6~strong similarity
  misc_feature (28)..(610): Homolog of NCBI NO: 15228829 NR Description: hypothetical protein; protein id: At3g22690.1
  misc_feature (291)..(610): Homolog of NCBI NO: 15228590 NR Description: hypothetical protein; protein id: At3g03580.1 thaliana] >gi|6091764|gb|AAF03474.1|AC009327_13 hypothetical [Arabidopsis thaliana] >gi|28393735|gb|AAO42278.1| unknown
  misc_feature (28)..(346): Homolog of NCBI NO: 15228590 NR Description: hypothetical protein; protein id: At3g03580.1 thaliana] >gi|6091764|gb|AAF03474.1|AC009327_13 hypothetical [Arabidopsis thaliana] >gi|28393735|gb|AAO42278.1| unknown
  misc_feature (32)..(610): Homolog of NCBI NO: 21740490 NR Description: OSJNBa0006B20.5 [Oryza sativa (japonica

SEQ ID NO: 95288 - protein, 539 aa, Arabidopsis thaliana; identical to SEQ ID NO: 91532
  peptide (1)..(539): Ceres Seq. ID no. 12728098
  misc_feature (398)..(432): Pfam Name: PPR repeat Pfam Description: PPR repeat
  misc_feature (1)..(266): Homolog of NCBI NO: 15232006 NR Description: hypothetical protein; protein id: At3g09040.1 thaliana] >gi|5923669|gb|AAD56320.1|AC009326_7 hypothetical
  misc_feature (233)..(536): Homolog of NCBI NO: 15232006 NR Description: hypothetical protein; protein id: At3g09040.1 thaliana] >gi|5923669|gb|AAD56320.1|AC009326_7 hypothetical
  misc_feature (1)..(536): Homolog of NCBI NO: 15225445 NR Description: hypothetical protein; protein id: At2g13600.1
  misc_feature (1)..(312): Homolog of NCBI NO: 15231798 NR Description: putative protein; protein id: At3g53360.1
  misc_feature (258)..(536): Homolog of NCBI NO: 15231798 NR Description: putative protein; protein id: At3g53360.1
  misc_feature (1)..(536): Homolog of NCBI NO: 9279687 NR Description: gb|AAC35225.1~gene_id:MWI23.6~strong similarity
  misc_feature (1)..(536): Homolog of NCBI NO: 15228829 NR Description: hypothetical protein; protein id: At3g22690.1
  misc_feature (217)..(536): Homolog of NCBI NO: 15228590 NR Description: hypothetical protein; protein id: At3g03580.1 thaliana] >gi|6091764|gb|AAF03474.1|AC009327_13 hypothetical [Arabidopsis thaliana] >gi|28393735|gb|AAO42278.1| unknown
  misc_feature (1)..(272): Homolog of NCBI NO: 15228590 NR Description: hypothetical protein; protein id: At3g03580.1 thaliana] >gi|6091764|gb|AAF03474.1|AC009327_13 hypothetical [Arabidopsis thaliana] >gi|28393735|gb|AAO42278.1| unknown
  misc_feature (1)..(536): Homolog of NCBI NO: 21740490 NR Description: OSJNBa0006B20.5 [Oryza sativa (japonica

SEQ ID NO: 95289 - protein, 537 aa, Arabidopsis thaliana; identical to SEQ ID NO: 91533
  peptide (1)..(537): Ceres Seq. ID no. 12728099
  misc_feature (396)..(430): Pfam Name: PPR repeat Pfam Description: PPR repeat
  misc_feature (1)..(264): Homolog of NCBI NO: 15232006 NR Description: hypothetical protein; protein id: At3g09040.1 thaliana] >gi|5923669|gb|AAD56320.1|AC009326_7 hypothetical
  misc_feature (231)..(534): Homolog of NCBI NO: 15232006 NR Description: hypothetical protein; protein id: At3g09040.1 thaliana] >gi|5923669|gb|AAD56320.1|AC009326_7 hypothetical
  misc_feature (1)..(534): Homolog of NCBI NO: 15225445 NR Description: hypothetical protein; protein id: At2g13600.1
  misc_feature (1)..(310): Homolog of NCBI NO: 15231798 NR Description: putative protein; protein id: At3g53360.1
  misc_feature (256)..(534): Homolog of NCBI NO: 15231798 NR Description: putative protein; protein id: At3g53360.1
  misc_feature (1)..(534): Homolog of NCBI NO: 9279687 NR Description: gb|AAC35225.1~gene_id:MWI23.6~strong similarity
  misc_feature (1)..(534): Homolog of NCBI NO: 15228829 NR Description: hypothetical protein; protein id: At3g22690.1
  misc_feature (215)..(534): Homolog of NCBI NO: 15228590 NR Description: hypothetical protein; protein id: At3g03580.1 thaliana] >gi|6091764|gb|AAF03474.1|AC009327_13 hypothetical [Arabidopsis thaliana] >gi|28393735|gb|AAO42278.1| unknown
  misc_feature (1)..(270): Homolog of NCBI NO: 15228590 NR Description: hypothetical protein; protein id: At3g03580.1 thaliana] >gi|6091764|gb|AAF03474.1|AC009327_13 hypothetical [Arabidopsis thaliana] >gi|28393735|gb|AAO42278.1| unknown
  misc_feature (1)..(534): Homolog of NCBI NO: 21740490 NR Description: OSJNBa0006B20.5 [Oryza sativa (japonica

SEQ ID NO: 95290 - DNA, 1062 bp, Arabidopsis thaliana; identical to SEQ ID NO: 91534
  misc_feature (1)..(1062): Ceres Seq. ID no. 12728163
  misc_feature: MA Experiment ID: 20000185 Result: Up-regulated in Transcription
  misc_feature: MA Experiment 20000185 PARAMETER Experiment Name: At_Roots__P Parameter: Age (day) Value: 7 vs. 21
  misc_feature: MA Experiment 20000185 PARAMETER Experiment Name: At_Roots__P Parameter: Organism Value: A. thaliana
  misc_feature: MA Experiment 20000185 PARAMETER Experiment Name: At_Roots__P Parameter: Tissue Value: Roots vs. Whole Plant
  misc_feature: MA Experiment ID: 20000227 Result: Down-regulated in Transcription
  misc_feature: MA Experiment 20000227 PARAMETER Experiment Name: At_Root-Tips-vs-Tops_P Parameter: Tissue Value: Root Tips vs. Root Tops
  misc_feature: MA Experiment ID: 20000235 Result: Up-regulated in Transcription
  misc_feature: MA Experiment 20000235 PARAMETER Experiment Name: At_Siliques_P Parameter: Age (day) Value: 21
  misc_feature: MA Experiment 20000235 PARAMETER Experiment Name: At_Siliques_P Parameter: Organism Value: A. thaliana
  misc_feature: MA Experiment 20000235 PARAMETER Experiment Name: At_Siliques_P Parameter: Plant Line Value: WS
  misc_feature: MA Experiment 20000235 PARAMETER Experiment Name: At_Siliques_P Parameter: Tissue Value: 5-10mm Siliques vs. Whole Plant
  misc_feature: MA Experiment ID: 20000436 Result: Up-regulated in Transcription
  misc_feature: MA Experiment 20000436 PARAMETER Experiment Name: At_Drought_P Parameter: Age (day) Value: 7
  misc_feature: MA Experiment 20000436 PARAMETER Experiment Name: At_Drought_P Parameter: Organism Value: A. thaliana
  misc_feature: MA Experiment 20000436 PARAMETER Experiment Name: At_Drought_P Parameter: Plant Line Value: WS
  misc_feature: MA Experiment 20000436 PARAMETER Experiment Name: At_Drought_P Parameter: Timepoint (hr) Value: 12
  misc_feature: MA Experiment 20000436 PARAMETER Experiment Name: At_Drought_P Parameter: Tissue Value: Whole Plant
  misc_feature: MA Experiment 20000436 PARAMETER Experiment Name: At_Drought_P Parameter: Treatment Value: Drought vs. No Drought
  misc_feature: MA Experiment ID: 20000438 Result: Down-regulated in Transcription
  misc_feature: MA Experiment 20000438 PARAMETER Experiment Name: At_Shoots__P Parameter: Age (day) Value: 14
  misc_feature: MA Experiment 20000438 PARAMETER Experiment Name: At_Shoots__P Parameter: Tissue Value: Shoots vs. Whole Plant
  misc_feature: MA Experiment ID: 20000439 Result: Up-regulated in Transcription
  misc_feature: MA Experiment 20000439 PARAMETER Experiment Name: At_Roots__P Parameter: Age (day) Value: 14 vs. 21
  misc_feature: MA Experiment 20000439 PARAMETER Experiment Name: At_Roots__P Parameter: Organism Value: A. thaliana
  misc_feature: MA Experiment 20000439 PARAMETER Experiment Name: At_Roots__P Parameter: Tissue Value: Roots vs. Whole Plant
  misc_feature: MA Experiment ID: 20000453 Result: Up-regulated in Transcription
  misc_feature: MA Experiment 20000453 PARAMETER Experiment Name: At_100uM_ABA_P Parameter: Age (day) Value: 15
  misc_feature: MA Experiment 20000453 PARAMETER Experiment Name: At_100uM_ABA_P Parameter: Organism Value: A. thaliana
  misc_feature: MA Experiment 20000453 PARAMETER Experiment Name: At_100uM_ABA_P Parameter: Plant Line Value: WS
  misc_feature: MA Experiment 20000453 PARAMETER Experiment Name: At_100uM_ABA_P Parameter: Timepoint (hr) Value: 24
  misc_feature: MA Experiment 20000453 PARAMETER Experiment Name: At_100uM_ABA_P Parameter: Tissue Value: Aerial
  misc_feature: MA Experiment 20000453 PARAMETER Experiment Name: At_100uM_ABA_P Parameter: Treatment Value: 100uM ABA vs. No Treatment
  misc_feature: MA Experiment ID: 20000460 Result: Down-regulated in Transcription
  misc_feature: MA Experiment 20000460 PARAMETER Experiment Name: At_10percent_PEG_P Parameter: Age (day) Value: 12
  misc_feature: MA Experiment 20000460 PARAMETER Experiment Name: At_10percent_PEG_P Parameter: Organism Value: A. thaliana
  misc_feature: MA Experiment 20000460 PARAMETER Experiment Name: At_10percent_PEG_P Parameter: Plant Line Value: WS
  misc_feature: MA Experiment 20000460 PARAMETER Experiment Name: At_10percent_PEG_P Parameter: Timepoint (day) Value: 12
  misc_feature: MA Experiment 20000460 PARAMETER Experiment Name: At_10percent_PEG_P Parameter: Tissue Value: Whole Plant
  misc_feature: MA Experiment 20000460 PARAMETER Experiment Name: At_10percent_PEG_P Parameter: Treatment Value: 10percent PEG vs. No Treatment
  misc_feature: MA Experiment ID: 20000794 Result: Up-regulated in Transcription
  misc_feature: MA Experiment 20000794 PARAMETER Experiment Name: At_Petals_P Parameter: Age (day) Value: 23-25 days
  misc_feature: MA Experiment 20000794 PARAMETER Experiment Name: At_Petals_P Parameter: Plant Line Value: WS
  misc_feature: MA Experiment 20000794 PARAMETER Experiment Name: At_Petals_P Parameter: Tissue Value: Petals vs. Whole plant
  misc_feature: MA Experiment ID: 20001248 Result: Down-regulated in Transcription
  misc_feature: MA Experiment 20001248 PARAMETER Experiment Name: At_Far-red-induction_P Parameter: Age (day) Value: 7
  misc_feature: MA Experiment 20001248 PARAMETER Experiment Name: At_Far-red-induction_P Parameter: Light Value: Far-red vs. White
  misc_feature: MA Experiment 20001248 PARAMETER Experiment Name: At_Far-red-induction_P Parameter: Organism Value: A. thaliana
  misc_feature: MA Experiment 20001248 PARAMETER Experiment Name: At_Far-red-induction_P Parameter: Plant Line Value: Columbia
  misc_feature: MA Experiment 20001248 PARAMETER Experiment Name: At_Far-red-induction_P Parameter: Timepoint (hr) Value: 4
  misc_feature: MA Experiment 20001248 PARAMETER Experiment Name: At_Far-red-induction_P Parameter: Tissue Value: Whole Plant
  misc_feature: MA Experiment ID: 20001556 Result: Down-regulated in Transcription
  misc_feature: MA Experiment 20001556 PARAMETER Experiment Name: At_Drought_Soil_Dry_P Parameter: Age (day) Value: 26
  misc_feature: MA Experiment 20001556 PARAMETER Experiment Name: At_Drought_Soil_Dry_P Parameter: Organism Value: A. thaliana
  misc_feature: MA Experiment 20001556 PARAMETER Experiment Name: At_Drought_Soil_Dry_P Parameter: Plant Line Value: WS
  misc_feature: MA Experiment 20001556 PARAMETER Experiment Name: At_Drought_Soil_Dry_P Parameter: Post Timepoint (hr) Value: None
  misc_feature: MA Experiment 20001556 PARAMETER Experiment Name: At_Drought_Soil_Dry_P Parameter: Post-Treatment Value: None
  misc_feature: MA Experiment 20001556 PARAMETER Experiment Name: At_Drought_Soil_Dry_P Parameter: Timepoint (day) Value: 12
  misc_feature: MA Experiment 20001556 PARAMETER Experiment Name: At_Drought_Soil_Dry_P Parameter: Treatment Value: Drought vs. No Drought
  misc_feature: MA Experiment ID: 20001558 Result: Down-regulated in Transcription
  misc_feature: MA Experiment 20001558 PARAMETER Experiment Name: At_Drought_Soil_Dry_P Parameter: Age (day) Value: 27
  misc_feature: MA Experiment 20001558 PARAMETER Experiment Name: At_Drought_Soil_Dry_P Parameter: Organism Value: A. thaliana
  misc_feature: MA Experiment 20001558 PARAMETER Experiment Name: At_Drought_Soil_Dry_P Parameter: Plant Line Value: WS
  misc_feature: MA Experiment 20001558 PARAMETER Experiment Name: At_Drought_Soil_Dry_P Parameter: Post Timepoint (hr) Value: 6
  misc_feature: MA Experiment 20001558 PARAMETER Experiment Name: At_Drought_Soil_Dry_P Parameter: Post-Treatment Value: Re-Water vs. No Drought
  misc_feature: MA Experiment 20001558 PARAMETER Experiment Name: At_Drought_Soil_Dry_P Parameter: Timepoint (day) Value: 13
  misc_feature: MA Experiment 20001558 PARAMETER Experiment Name: At_Drought_Soil_Dry_P Parameter: Treatment Value: Drought vs. No Drought
  misc_feature: MA Experiment ID: 20001773 Result: Up-regulated in Transcription
  misc_feature: MA Experiment 20001773 PARAMETER Experiment Name: At_Far-red-enriched-adult_P Parameter: Age (day) Value: 30
  misc_feature: MA Experiment 20001773 PARAMETER Experiment Name: At_Far-red-enriched-adult_P Parameter: Light Value: Far-red enriched vs. White
  misc_feature: MA Experiment 20001773 PARAMETER Experiment Name: At_Far-red-enriched-adult_P Parameter: Organism Value: A. thaliana
  misc_feature: MA Experiment 20001773 PARAMETER Experiment Name: At_Far-red-enriched-adult_P Parameter: Plant Line Value: Columbia
  misc_feature: MA Experiment 20001773 PARAMETER Experiment Name: At_Far-red-enriched-adult_P Parameter: Timepoint (hr) Value: 48
  misc_feature: MA Experiment 20001773 PARAMETER Experiment Name: At_Far-red-enriched-adult_P Parameter: Tissue Value: Aerial
  misc_feature: MA Experiment ID: 20001904 Result: Up-regulated in Transcription
  misc_feature: MA Experiment 20001904 PARAMETER Experiment Name: At_Drought_Reproduction_P Parameter: Age (day) Value: 37
  misc_feature: MA Experiment 20001904 PARAMETER Experiment Name: At_Drought_Reproduction_P Parameter: Organism Value: A. thaliana
  misc_feature: MA Experiment 20001904 PARAMETER Experiment Name: At_Drought_Reproduction_P Parameter: Plant Line Value: WS
  misc_feature: MA Experiment 20001904 PARAMETER Experiment Name: At_Drought_Reproduction_P Parameter: Timepoint (day) Value: 7
  misc_feature: MA Experiment 20001904 PARAMETER Experiment Name: At_Drought_Reproduction_P Parameter: Tissue Value: Rosettes
  misc_feature: MA Experiment 20001904 PARAMETER Experiment Name: At_Drought_Reproduction_P Parameter: Treatment Value: Drought vs. No Drought
  misc_feature: MA Experiment ID: 20001905 Result: Up-regulated in Transcription
  misc_feature: MA Experiment 20001905 PARAMETER Experiment Name: At_Drought_Reproduction_P Parameter: Age (day) Value: 40
  misc_feature: MA Experiment 20001905 PARAMETER Experiment Name: At_Drought_Reproduction_P Parameter: Organism Value: A. thaliana
  misc_feature: MA Experiment 20001905 PARAMETER Experiment Name: At_Drought_Reproduction_P Parameter: Plant Line Value: WS
  misc_feature: MA Experiment 20001905 PARAMETER Experiment Name: At_Drought_Reproduction_P Parameter: Timepoint (day) Value: 10
  misc_feature: MA Experiment 20001905 PARAMETER Experiment Name: At_Drought_Reproduction_P Parameter: Tissue Value: Rosettes
  misc_feature: MA Experiment 20001905 PARAMETER Experiment Name: At_Drought_Reproduction_P Parameter: Treatment Value: Drought vs. No Drought
  misc_feature: MA Experiment ID: 20001906 Result: Down-regulated in Transcription
  misc_feature: MA Experiment 20001906 PARAMETER Experiment Name: At_Drought_Reproduction_P Parameter: Age (day) Value: 35
  misc_feature: MA Experiment 20001906 PARAMETER Experiment Name: At_Drought_Reproduction_P Parameter: Organism Value: A. thaliana
  misc_feature: MA Experiment 20001906 PARAMETER Experiment Name: At_Drought_Reproduction_P Parameter: Plant Line Value: WS
  misc_feature: MA Experiment 20001906 PARAMETER Experiment Name: At_Drought_Reproduction_P Parameter: Timepoint (day) Value: 5
  misc_feature: MA Experiment 20001906 PARAMETER Experiment Name: At_Drought_Reproduction_P Parameter: Tissue Value: Siliques
  misc_feature: MA Experiment 20001906 PARAMETER Experiment Name: At_Drought_Reproduction_P Parameter: Treatment Value: Drought vs. No Drought
  misc_feature: MA Experiment ID: 20001908 Result: Down-regulated in Transcription
  misc_feature: MA Experiment 20001908 PARAMETER Experiment Name: At_Drought_Reproduction_P Parameter: Age (day) Value: 40
  misc_feature: MA Experiment 20001908 PARAMETER Experiment Name: At_Drought_Reproduction_P Parameter: Organism Value: A. thaliana
  misc_feature: MA Experiment 20001908 PARAMETER Experiment Name: At_Drought_Reproduction_P Parameter: Plant Line Value: WS
  misc_feature: MA Experiment 20001908 PARAMETER Experiment Name: At_Drought_Reproduction_P Parameter: Timepoint (day) Value: 10
  misc_feature: MA Experiment 20001908 PARAMETER Experiment Name: At_Drought_Reproduction_P Parameter: Tissue Value: Siliques
  misc_feature: MA Experiment 20001908 PARAMETER Experiment Name: At_Drought_Reproduction_P Parameter: Treatment Value: Drought vs. No Drought

SEQ ID NO: 95291 - protein, 353 aa, Arabidopsis thaliana; identical to SEQ ID NO: 91535
  peptide (1)..(353): Ceres Seq. ID no. 12728164
  misc_feature (1)..(348): Pfam Name: Eukaryotic aspartyl protease Pfam Description: Eukaryotic aspartyl protease
  misc_feature (1)..(353): Homolog of NCBI NO: 20197342 NR Description: putative chloroplast nucleoid DNA binding protein
  misc_feature (1)..(353): Homolog of NCBI NO: 30678047 NR Description: chloroplast nucleoid DNA binding protein -related
  misc_feature (1)..(353): Homolog of NCBI NO: 38344829 NR Description: OSJNBa0064H22.10 [Oryza sativa (japonica
  misc_feature (1)..(353): Homolog of NCBI NO: 34898756 NR Description: OJ1131_E05.2 [Oryza sativa (japonica
  misc_feature (1)..(353): Homolog of NCBI NO: 34898762 NR Description: OJ1131_E05.5 [Oryza sativa (japonica
  misc_feature (3)..(350): Homolog of NCBI NO: 34895664 NR Description: nucleoid DNA-binding protein cnd41-like protein
  misc_feature (3)..(350): Homolog of NCBI NO: 15223368 NR Description: chloroplast nucleoid DNA binding protein, protein id: At1g01300.1, supported by cDNA: 7567. [Arabidopsis
  misc_feature (3)..(350): Homolog of NCBI NO: 21594980 NR Description: chloroplast nucleoid DNA binding protein,
  misc_feature (1)..(353): Homolog of NCBI NO: 15242803 NR Description: putative protein; protein id: At5g33340.1
  misc_feature (1)..(353): Homolog of NCBI NO: 15217764 NR Description: hypothetical protein; protein id: At1g64830.1

SEQ ID NO: 95292 - DNA, 1870 bp, Arabidopsis thaliana; identical to SEQ ID NO: 91536
  misc_feature (1)..(1870): Ceres Seq. ID no. 12728176
  misc_feature: MA Experiment ID: 20000171 Result: Down-regulated in Transcription
  misc_feature: MA Experiment 20000171 PARAMETER Experiment Name: At_42deg_Heat_P Parameter: Age (day) Value: 14
  misc_feature: MA Experiment 20000171 PARAMETER Experiment Name: At_42deg_Heat_P Parameter: Organism Value: A. thaliana
  misc_feature: MA Experiment 20000171 PARAMETER Experiment Name: At_42deg_Heat_P Parameter: Plant Line Value: WS
  misc_feature: MA Experiment 20000171 PARAMETER Experiment Name: At_42deg_Heat_P Parameter: Temperature (deg C) Value: 42 vs. 22
  misc_feature: MA Experiment 20000171 PARAMETER Experiment Name: At_42deg_Heat_P Parameter: Timepoint (hr) Value: 1
  misc_feature: MA Experiment 20000171 PARAMETER Experiment Name: At_42deg_Heat_P Parameter: Tissue Value: Aerial
  misc_feature: MA Experiment ID: 20000173 Result: Down-regulated in Transcription
  misc_feature: MA Experiment 20000173 PARAMETER Experiment Name: At_42deg_Heat_P Parameter: Age (day) Value: 14
  misc_feature: MA Experiment 20000173 PARAMETER Experiment Name: At_42deg_Heat_P Parameter: Organism Value: A. thaliana
  misc_feature: MA Experiment 20000173 PARAMETER Experiment Name: At_42deg_Heat_P Parameter: Plant Line Value: WS
  misc_feature: MA Experiment 20000173 PARAMETER Experiment Name: At_42deg_Heat_P Parameter: Temperature (deg C) Value: 42 vs. 22
  misc_feature: MA Experiment 20000173 PARAMETER Experiment Name: At_42deg_Heat_P Parameter: Timepoint (hr) Value: 6
  misc_feature: MA Experiment 20000173 PARAMETER Experiment Name: At_42deg_Heat_P Parameter: Tissue Value: Aerial
  misc_feature: MA Experiment ID: 20000184 Result: Down-regulated in Transcription
  misc_feature: MA Experiment 20000184 PARAMETER Experiment Name: At_Shoots__P Parameter: Age (day) Value: 7
  misc_feature: MA Experiment 20000184 PARAMETER Experiment Name: At_Shoots__P Parameter: Tissue Value: Shoots vs. Whole Plant
  misc_feature: MA Experiment ID: 20001560 Result: Down-regulated in Transcription
  misc_feature: MA Experiment 20001560 PARAMETER Experiment Name: At_Drought_Soil_Dry_P Parameter: Age (day) Value: 28
  misc_feature: MA Experiment 20001560 PARAMETER Experiment Name: At_Drought_Soil_Dry_P Parameter: Organism Value: A. thaliana
  misc_feature: MA Experiment 20001560 PARAMETER Experiment Name: At_Drought_Soil_Dry_P Parameter: Plant Line Value: WS
  misc_feature: MA Experiment 20001560 PARAMETER Experiment Name: At_Drought_Soil_Dry_P Parameter: Post Timepoint (hr) Value: None
  misc_feature: MA Experiment 20001560 PARAMETER Experiment Name: At_Drought_Soil_Dry_P Parameter: Post-Treatment Value: None
  misc_feature: MA Experiment 20001560 PARAMETER Experiment Name: At_Drought_Soil_Dry_P Parameter: Timepoint (day) Value: 14
  misc_feature: MA Experiment 20001560 PARAMETER Experiment Name: At_Drought_Soil_Dry_P Parameter: Treatment Value: Drought vs. No Drought

SEQ ID NO: 95293 - protein, 513 aa, Arabidopsis thaliana; identical to SEQ ID NO: 91537
  peptide (1)..(513): Ceres Seq. ID no. 12728177
  misc_feature (414)..(473): Pfam Name: WRKY DNA -binding domain Pfam Description: WRKY DNA -binding domain
  misc_feature (1)..(513): Homolog of NCBI NO: 15227612 NR Description: WRKY family transcription factor; protein id: supported by cDNA: gi_13506736 [Arabidopsis thaliana]
  misc_feature (1)..(513): Homolog of NCBI NO: 15223004 NR Description: WRKY family transcription factor; protein id: supported by cDNA: gi_15010749, supported by cDNA: gi_15991741 thaliana] >gi|20978796|sp|Q9XI90|WRK4_ARATH Probable
  misc_feature (130)..(513): Homolog of NCBI NO: 8778394 NR Description: F16A14.18 [Arabidopsis thaliana]
  misc_feature (1)..(152): Homolog of NCBI NO: 8778394 NR Description: F16A14.18 [Arabidopsis thaliana]
  misc_feature (151)..(513): Homolog of NCBI NO: 30683544 NR Description: WRKY family transcription factor [Arabidopsis
  misc_feature (1)..(119): Homolog of NCBI NO: 30683544 NR Description: WRKY family transcription factor [Arabidopsis
  misc_feature (10)..(513): Homolog of NCBI NO: 25348323 NR Description: DNA-binding protein WRKY2 [imported] - common
  misc_feature (18)..(513): Homolog of NCBI NO: 7484759 NR Description: SP8 binding protein homolog - cucumber
  misc_feature (118)..(482): Homolog of NCBI NO: 14530683 NR Description: WRKY DNA-binding protein [Nicotiana tabacum]
  misc_feature (137)..(435): Homolog of NCBI NO: 30681996 NR Description: disease resistance protein -related [Arabidopsis

SEQ ID NO: 95294 - protein, 481 aa, Arabidopsis thaliana; identical to SEQ ID NO: 91538
  peptide (1)..(481): Ceres Seq. ID no. 12728178
  misc_feature (382)..(441): Pfam Name: WRKY DNA -binding domain Pfam Description: WRKY DNA -binding domain
  misc_feature (1)..(481): Homolog of NCBI NO: 15227612 NR Description: WRKY family transcription factor; protein id: supported by cDNA: gi_13506736 [Arabidopsis thaliana]
  misc_feature (1)..(481): Homolog of NCBI NO: 15223004 NR Description: WRKY family transcription factor; protein id: supported by cDNA: gi_15010749, supported by cDNA: gi_15991741 thaliana] >gi|20978796|sp|Q9XI90|WRK4_ARATH Probable
  misc_feature (98)..(481): Homolog of NCBI NO: 8778394 NR Description: F16A14.18 [Arabidopsis thaliana]
  misc_feature (1)..(120): Homolog of NCBI NO: 8778394 NR Description: F16A14.18 [Arabidopsis thaliana]
  misc_feature (119)..(481): Homolog of NCBI NO: 30683544 NR Description: WRKY family transcription factor [Arabidopsis
  misc_feature (1)..(87): Homolog of NCBI NO: 30683544 NR Description: WRKY family transcription factor [Arabidopsis
  misc_feature (1)..(481): Homolog of NCBI NO: 25348323 NR Description: DNA-binding protein WRKY2 [imported] - common
  misc_feature (1)..(481): Homolog of NCBI NO: 7484759 NR Description: SP8 binding protein homolog - cucumber
  misc_feature (86)..(450): Homolog of NCBI NO: 14530683 NR Description: WRKY DNA-binding protein [Nicotiana tabacum]
  misc_feature (105)..(403): Homolog of NCBI NO: 30681996 NR Description: disease resistance protein -related [Arabidopsis

SEQ ID NO: 95295 - protein, 468 aa, Arabidopsis thaliana; identical to SEQ ID NO: 91539
  peptide (1)..(468): Ceres Seq. ID no. 12728179
  misc_feature (369)..(428): Pfam Name: WRKY DNA -binding domain Pfam Description: WRKY DNA -binding domain
  misc_feature (1)..(468): Homolog of NCBI NO: 15227612 NR Description: WRKY family transcription factor; protein id: supported by cDNA: gi_13506736 [Arabidopsis thaliana]
  misc_feature (1)..(468): Homolog of NCBI NO: 15223004 NR Description: WRKY family transcription factor; protein id: supported by cDNA: gi_15010749, supported by cDNA: gi_15991741 thaliana] >gi|20978796|sp|Q9XI90|WRK4_ARATH Probable
  misc_feature (85)..(468): Homolog of NCBI NO: 8778394 NR Description: F16A14.18 [Arabidopsis thaliana]
  misc_feature (1)..(107): Homolog of NCBI NO: 8778394 NR Description: F16A14.18 [Arabidopsis thaliana]
  misc_feature (106)..(468): Homolog of NCBI NO: 30683544 NR Description: WRKY family transcription factor [Arabidopsis
  misc_feature (1)..(74): Homolog of NCBI NO: 30683544 NR Description: WRKY family transcription factor [Arabidopsis
  misc_feature (1)..(468): Homolog of NCBI NO: 25348323 NR Description: DNA-binding protein WRKY2 [imported] - common
  misc_feature (1)..(468): Homolog of NCBI NO: 7484759 NR Description: SP8 binding protein homolog - cucumber
  misc_feature (73)..(437): Homolog of NCBI NO: 14530683 NR Description: WRKY DNA-binding protein [Nicotiana tabacum]
  misc_feature (92)..(390): Homolog of NCBI NO: 30681996 NR Description: disease resistance protein -related [Arabidopsis

SEQ ID NO: 95296 - DNA, 2070 bp, Arabidopsis thaliana; identical to SEQ ID NO: 91540
  misc_feature (1)..(2070): Ceres Seq. ID no. 12728188
  misc_feature: MA Experiment ID: 20000180 Result: Down-regulated in Transcription
  misc_feature: MA Experiment 20000180 PARAMETER Experiment Name: At_Germinating_Seeds_P Parameter: Age (hr) Value: 24 vs. 0
  misc_feature: MA Experiment 20000180 PARAMETER Experiment Name: At_Germinating_Seeds_P Parameter: Tissue Value: Germinating Seeds

SEQ ID NO: 95297 - protein, 689 aa, Arabidopsis thaliana; identical to SEQ ID NO: 91541
  peptide (1)..(689): Ceres Seq. ID no. 12728189
  misc_feature (108)..(142): Pfam Name: PPR repeat Pfam Description: PPR repeat
  misc_feature (46)..(689): Homolog of NCBI NO: 15220337 NR Description: hypothetical protein; protein id: At1g11290.1
  misc_feature (64)..(689): Homolog of NCBI NO: 18409250 NR Description: PPR-repeat protein, putative; protein id: [Arabidopsis thaliana] >gi|12325094|gb|AAG52503.1|AC018364_21
  misc_feature (302)..(689): Homolog of NCBI NO: 21741755 NR Description: OSJNBa0060B20.9 [Oryza sativa (japonica
  misc_feature (77)..(352): Homolog of NCBI NO: 21741755 NR Description: OSJNBa0060B20.9 [Oryza sativa (japonica
  misc_feature (78)..(689): Homolog of NCBI NO: 15233590 NR Description: putative protein; protein id: At4g21300.1
  misc_feature (50)..(689): Homolog of NCBI NO: 15234006 NR Description: putative protein; protein id: At4g18750.1
  misc_feature (61)..(689): Homolog of NCBI NO: 15226737 NR Description: unknown protein; protein id: At2g40720.1
  misc_feature (50)..(689): Homolog of NCBI NO: 18418348 NR Description: putative protein; protein id: At4g33990.1
  misc_feature (62)..(686): Homolog of NCBI NO: 15235115 NR Description: putative protein; protein id: At4g39530.1
  misc_feature (76)..(689): Homolog of NCBI NO: 15218216 NR Description: hypothetical protein; protein id: At1g15510.1

SEQ ID NO: 95298 - protein, 617 aa, Arabidopsis thaliana; identical to SEQ ID NO: 91542
  peptide (1)..(617): Ceres Seq. ID no. 12728190
  misc_feature (36)..(70): Pfam Name: PPR repeat Pfam Description: PPR repeat
  misc_feature (1)..(617): Homolog of NCBI NO: 15220337 NR Description: hypothetical protein; protein id: At1g11290.1
  misc_feature (1)..(617): Homolog of NCBI NO: 18409250 NR Description: PPR-repeat protein, putative; protein id: [Arabidopsis thaliana] >gi|12325094|gb|AAG52503.1|AC018364_21
  misc_feature (230)..(617): Homolog of NCBI NO: 21741755 NR Description: OSJNBa0060B20.9 [Oryza sativa (japonica
  misc_feature (5)..(280): Homolog of NCBI NO: 21741755 NR Description: OSJNBa0060B20.9 [Oryza sativa (japonica
  misc_feature (6)..(617): Homolog of NCBI NO: 15233590 NR Description: putative protein; protein id: At4g21300.1
  misc_feature (1)..(617): Homolog of NCBI NO: 15234006 NR Description: putative protein; protein id: At4g18750.1
  misc_feature (1)..(617): Homolog of NCBI NO: 15226737 NR Description: unknown protein; protein id: At2g40720.1
  misc_feature (1)..(617): Homolog of NCBI NO: 18418348 NR Description: putative protein; protein id: At4g33990.1
  misc_feature (1)..(614): Homolog of NCBI NO: 15235115 NR Description: putative protein; protein id: At4g39530.1
  misc_feature (4)..(617): Homolog of NCBI NO: 15218216 NR Description: hypothetical protein; protein id: At1g15510.1

SEQ ID NO: 95299 - protein, 577 aa, Arabidopsis thaliana; identical to SEQ ID NO: 91543
  peptide (1)..(577): Ceres Seq. ID no. 12728191
  misc_feature (1)..(30): Pfam Name: PPR repeat Pfam Description: PPR repeat
  misc_feature (1)..(577): Homolog of NCBI NO: 15220337 NR Description: hypothetical protein; protein id: At1g11290.1
  misc_feature (1)..(577): Homolog of NCBI NO: 18409250 NR Description: PPR-repeat protein, putative; protein id: [Arabidopsis thaliana] >gi|12325094|gb|AAG52503.1|AC018364_21
  misc_feature (190)..(577): Homolog of NCBI NO: 21741755 NR Description: OSJNBa0060B20.9 [Oryza sativa (japonica
  misc_feature (1)..(240): Homolog of NCBI NO: 21741755 NR Description: OSJNBa0060B20.9 [Oryza sativa (japonica
  misc_feature (1)..(577): Homolog of NCBI NO: 15233590 NR Description: putative protein; protein id: At4g21300.1
  misc_feature (1)..(577): Homolog of NCBI NO: 15234006 NR Description: putative protein; protein id: At4g18750.1
  misc_feature (1)..(577): Homolog of NCBI NO: 15226737 NR Description: unknown protein; protein id: At2g40720.1
  misc_feature (1)..(577): Homolog of NCBI NO: 18418348 NR Description: putative protein; protein id: At4g33990.1
  misc_feature (1)..(574): Homolog of NCBI NO: 15235115 NR Description: putative protein; protein id: At4g39530.1
  misc_feature (1)..(577): Homolog of NCBI NO: 15218216 NR Description: hypothetical protein; protein id: At1g15510.1

SEQ ID NO: 95300 - DNA, 507 bp, Arabidopsis thaliana; identical to SEQ ID NO: 91544
  misc_feature (1)..(507): Ceres Seq. ID no. 12728204
  misc_feature: MA Experiment ID: 20000234 Result: Up-regulated in Transcription
  misc_feature: MA Experiment 20000234 PARAMETER Experiment Name: At_Siliques_P Parameter: Age (day) Value: 21
  misc_feature: MA Experiment 20000234 PARAMETER Experiment Name: At_Siliques_P Parameter: Organism Value: A. thaliana
  misc_feature: MA Experiment 20000234 PARAMETER Experiment Name: At_Siliques_P Parameter: Plant Line Value: WS
  misc_feature: MA Experiment 20000234 PARAMETER Experiment Name: At_Siliques_P Parameter: Tissue Value: Less Than 5mm Siliques vs. Whole Plant
  misc_feature: MA Experiment ID: 20000235 Result: Up-regulated in Transcription
  misc_feature: MA Experiment 20000235 PARAMETER Experiment Name: At_Siliques_P Parameter: Age (day) Value: 21
  misc_feature: MA Experiment 20000235 PARAMETER Experiment Name: At_Siliques_P Parameter: Organism Value: A. thaliana
  misc_feature: MA Experiment 20000235 PARAMETER Experiment Name: At_Siliques_P Parameter: Plant Line Value: WS
  misc_feature: MA Experiment 20000235 PARAMETER Experiment Name: At_Siliques_P Parameter: Tissue Value: 5-10mm Siliques vs. Whole Plant

SEQ ID NO: 95301 - protein, 168 aa, Arabidopsis thaliana; identical to SEQ ID NO: 91545
  peptide (1)..(168): Ceres Seq. ID no. 12728205
  misc_feature (1)..(168): Homolog of NCBI NO: 22325443 NR Description: similar to glycosyl hydrolase family 17; protein
  misc_feature (1)..(164): Homolog of NCBI NO: 30683485 NR Description: expressed protein [Arabidopsis thaliana] unknown protein [Arabidopsis thaliana]
  misc_feature (12)..(164): Homolog of NCBI NO: 8778409 NR Description: F16A14.5 [Arabidopsis thaliana]
  misc_feature (1)..(146): Homolog of NCBI NO: 18394637 NR Description: glycosyl hydrolase family 17; protein id: supported by cDNA: 32195. [Arabidopsis thaliana]
  misc_feature (3)..(147): Homolog of NCBI NO: 30697478 NR Description: glycosyl hydrolase family 17 [Arabidopsis >gi|9759459|dbj|BAB10375.1| to unknown protein [Arabidopsis thaliana]
  misc_feature (1)..(150): Homolog of NCBI NO: 18409239 NR Description: unknown protein; protein id: At1g69295.1, by cDNA: 16467., supported by cDNA: gi_13877780, supported by gi_15724275, supported by cDNA: gi_15912196, supported by cDNA:
  misc_feature (1)..(150): Homolog of NCBI NO: 21553768 NR Description: unknown [Arabidopsis thaliana]
  misc_feature (3)..(150): Homolog of NCBI NO: 21592859 NR Description: unknown [Arabidopsis thaliana]
  misc_feature (3)..(150): Homolog of NCBI NO: 15241485 NR Description: glycosyl hydrolase family 17; protein id: supported by cDNA: 33347. [Arabidopsis thaliana]
  misc_feature (1)..(150): Homolog of NCBI NO: 25404810 NR Description: unknown protein, 45065-49536 [imported] -

SEQ ID NO: 95302 - protein, 118 aa, Arabidopsis thaliana; identical to SEQ ID NO: 91546
  peptide (1)..(118): Ceres Seq. ID no. 12728206

SEQ ID NO: 95303 - DNA, 1336 bp, Arabidopsis thaliana; identical to SEQ ID NO: 91547
  misc_feature (1)..(1336): Ceres Seq. ID no. 12728215
  misc_feature: MA Experiment ID: 20000184 Result: Down-regulated in Transcription
  misc_feature: MA Experiment 20000184 PARAMETER Experiment Name: At_Shoots__P Parameter: Age (day) Value: 7
  misc_feature: MA Experiment 20000184 PARAMETER Experiment Name: At_Shoots__P Parameter: Tissue Value: Shoots vs. Whole Plant
  misc_feature: MA Experiment ID: 20000185 Result: Down-regulated in Transcription
  misc_feature: MA Experiment 20000185 PARAMETER Experiment Name: At_Roots__P Parameter: Age (day) Value: 7 vs. 21
  misc_feature: MA Experiment 20000185 PARAMETER Experiment Name: At_Roots__P Parameter: Organism Value: A. thaliana
  misc_feature: MA Experiment 20000185 PARAMETER Experiment Name: At_Roots__P Parameter: Tissue Value: Roots vs. Whole Plant
  misc_feature: MA Experiment ID: 20000286 Result: Down-regulated in Transcription
  misc_feature: MA Experiment 20000286 PARAMETER Experiment Name: At_Open_Flower_P Parameter: Age (day) Value: 21
  misc_feature: MA Experiment 20000286 PARAMETER Experiment Name: At_Open_Flower_P Parameter: Plant Line Value: WS
  misc_feature: MA Experiment 20000286 PARAMETER Experiment Name: At_Open_Flower_P Parameter: Tissue Value: Half Open vs. Whole Plant
  misc_feature: MA Experiment ID: 20000439 Result: Down-regulated in Transcription
  misc_feature: MA Experiment 20000439 PARAMETER Experiment Name: At_Roots__P Parameter: Age (day) Value: 14 vs. 21
  misc_feature: MA Experiment 20000439 PARAMETER Experiment Name: At_Roots__P Parameter: Organism Value: A. thaliana
  misc_feature: MA Experiment 20000439 PARAMETER Experiment Name: At_Roots__P Parameter: Tissue Value: Roots vs. Whole Plant
  misc_feature: MA Experiment ID: 20000573 Result: Down-regulated in Transcription
  misc_feature: MA Experiment 20000573 PARAMETER Experiment Name: At_100uM_ABA_Mutants__P Parameter: Organism Value: A. thaliana
  misc_feature: MA Experiment 20000573 PARAMETER Experiment Name: At_100uM_ABA_Mutants__P Parameter: Plant Line Value: CS22 vs. Ler wt
  misc_feature: MA Experiment 20000573 PARAMETER Experiment Name: At_100uM_ABA_Mutants__P Parameter: Timepoint (hr) Value: N/A
  misc_feature: MA Experiment 20000573 PARAMETER Experiment Name: At_100uM_ABA_Mutants__P Parameter: Tissue Value: Whole Plant
  misc_feature: MA Experiment 20000573 PARAMETER Experiment Name: At_100uM_ABA_Mutants__P Parameter: Treatment Value: None
  misc_feature: MA Experiment ID: 20000574 Result: Down-regulated in Transcription
  misc_feature: MA Experiment 20000574 PARAMETER Experiment Name: At_100uM_ABA_Mutants__P Parameter: Organism Value: A. thaliana
  misc_feature: MA Experiment 20000574 PARAMETER Experiment Name: At_100uM_ABA_Mutants__P Parameter: Plant Line Value: CS23 vs. Ler wt
  misc_feature: MA Experiment 20000574 PARAMETER Experiment Name: At_100uM_ABA_Mutants__P Parameter: Timepoint (hr) Value: N/A
  misc_feature: MA Experiment 20000574 PARAMETER Experiment Name: At_100uM_ABA_Mutants__P Parameter: Tissue Value: Whole Plant
  misc_feature: MA Experiment 20000574 PARAMETER Experiment Name: At_100uM_ABA_Mutants__P Parameter: Treatment Value: None
  misc_feature: MA Experiment ID: 20000794 Result: Down-regulated in Transcription
  misc_feature: MA Experiment 20000794 PARAMETER Experiment Name: At_Petals_P Parameter: Age (day) Value: 23-25 days
  misc_feature: MA Experiment 20000794 PARAMETER Experiment Name: At_Petals_P Parameter: Plant Line Value: WS
  misc_feature: MA Experiment 20000794 PARAMETER Experiment Name: At_Petals_P Parameter: Tissue Value: Petals vs. Whole plant
  misc_feature: MA Experiment ID: 20001554 Result: Up-regulated in Transcription
  misc_feature: MA Experiment 20001554 PARAMETER Experiment Name: At_Drought_Soil_Dry_P Parameter: Age (day) Value: 21
  misc_feature: MA Experiment 20001554 PARAMETER Experiment Name: At_Drought_Soil_Dry_P Parameter: Organism Value: A. thaliana
  misc_feature: MA Experiment 20001554 PARAMETER Experiment Name: At_Drought_Soil_Dry_P Parameter: Plant Line Value: WS
  misc_feature: MA Experiment 20001554 PARAMETER Experiment Name: At_Drought_Soil_Dry_P Parameter: Post Timepoint (hr) Value: None
  misc_feature: MA Experiment 20001554 PARAMETER Experiment Name: At_Drought_Soil_Dry_P Parameter: Post-Treatment Value: None
  misc_feature: MA Experiment 20001554 PARAMETER Experiment Name: At_Drought_Soil_Dry_P Parameter: Timepoint (day) Value: 7
  misc_feature: MA Experiment 20001554 PARAMETER Experiment Name: At_Drought_Soil_Dry_P Parameter: Treatment Value: Drought vs. No Drought
  misc_feature: MA Experiment ID: 20001555 Result: Up-regulated in Transcription
  misc_feature: MA Experiment 20001555 PARAMETER Experiment Name: At_Drought_Soil_Dry_P Parameter: Age (day) Value: 24
  misc_feature: MA Experiment 20001555 PARAMETER Experiment Name: At_Drought_Soil_Dry_P Parameter: Organism Value: A. thaliana
  misc_feature: MA Experiment 20001555 PARAMETER Experiment Name: At_Drought_Soil_Dry_P Parameter: Plant Line Value: WS
  misc_feature: MA Experiment 20001555 PARAMETER Experiment Name: At_Drought_Soil_Dry_P Parameter: Post Timepoint (hr) Value: None
  misc_feature: MA Experiment 20001555 PARAMETER Experiment Name: At_Drought_Soil_Dry_P Parameter: Post-Treatment Value: None
  misc_feature: MA Experiment 20001555 PARAMETER Experiment Name: At_Drought_Soil_Dry_P Parameter: Timepoint (day) Value: 10
  misc_feature: MA Experiment 20001555 PARAMETER Experiment Name: At_Drought_Soil_Dry_P Parameter: Treatment Value: Drought vs. No Drought

SEQ ID NO: 95304 - protein, 258 aa, Arabidopsis thaliana; identical to SEQ ID NO: 91548
  peptide (1)..(258): Ceres Seq. ID no. 12728216
  misc_feature (76)..(174): Pfam Name: K-box region Pfam Description: K-box region
  misc_feature (1)..(258): Homolog of NCBI NO: 15227694 NR Description: MADS-box protein (AGL3); protein id: At2g03710.1, by cDNA: gi_1737494 [Arabidopsis thaliana]
  misc_feature (1)..(258): Homolog of NCBI NO: 30678072 NR Description: MADS-box protein (AGL3) [Arabidopsis thaliana]
  misc_feature (1)..(258): Homolog of NCBI NO: 23304686 NR Description: MADS-box protein AGL3-a [Brassica oleracea var.
  misc_feature (1)..(172): Homolog of NCBI NO: 32402422 NR Description: MADS-box protein AGL3-II [Arabidopsis thaliana]
  misc_feature (1)..(258): Homolog of NCBI NO: 13384050 NR Description: MADS-box transcription factor FBP9 [Petunia x
  misc_feature (1)..(258): Homolog of NCBI NO: 8567991 NR Description: MADS-box protein MADS4 [Nicotiana tabacum]
  misc_feature (1)..(258): Homolog of NCBI NO: 6651033 NR Description: MADS box transcription factor MADS1 [Capsicum
  misc_feature (1)..(258): Homolog of NCBI NO: 13384060 NR Description: MADS-box transcription factor FBP23 [Petunia x
  misc_feature (1)..(258): Homolog of NCBI NO: 7446512 NR Description: MADS box protein DEFH49 - garden snapdragon
  misc_feature (1)..(258): Homolog of NCBI NO: 7488622 NR Description: MADS box protein 1 - apple tree

SEQ ID NO: 95305 - protein, 195 aa, Arabidopsis thaliana; identical to SEQ ID NO: 91549
  peptide (1)..(195): Ceres Seq. ID no. 12728217
  misc_feature (13)..(111): Pfam Name: K-box region Pfam Description: K-box region
  misc_feature (1)..(195): Homolog of NCBI NO: 15227694 NR Description: MADS-box protein (AGL3); protein id: At2g03710.1, by cDNA: gi_1737494 [Arabidopsis thaliana]
  misc_feature (1)..(195): Homolog of NCBI NO: 30678072 NR Description: MADS-box protein (AGL3) [Arabidopsis thaliana]
  misc_feature (1)..(195): Homolog of NCBI NO: 23304686 NR Description: MADS-box protein AGL3-a [Brassica oleracea var.
  misc_feature (1)..(109): Homolog of NCBI NO: 32402422 NR Description: MADS-box protein AGL3-II [Arabidopsis thaliana]
  misc_feature (1)..(195): Homolog of NCBI NO: 13384050 NR Description: MADS-box transcription factor FBP9 [Petunia x
  misc_feature (1)..(195): Homolog of NCBI NO: 8567991 NR Description: MADS-box protein MADS4 [Nicotiana tabacum]
  misc_feature (1)..(195): Homolog of NCBI NO: 6651033 NR Description: MADS box transcription factor MADS1 [Capsicum
  misc_feature (1)..(195): Homolog of NCBI NO: 13384060 NR Description: MADS-box transcription factor FBP23 [Petunia x
  misc_feature (1)..(195): Homolog of NCBI NO: 7446512 NR Description: MADS box protein DEFH49 - garden snapdragon
  misc_feature (1)..(195): Homolog of NCBI NO: 7488622 NR Description: MADS box protein 1 - apple tree

SEQ ID NO: 95306 - protein, 180 aa, Arabidopsis thaliana; identical to SEQ ID NO: 91550
  peptide (1)..(180): Ceres Seq. ID no. 12728218
  misc_feature (1)..(96): Pfam Name: K-box region Pfam Description: K-box region
  misc_feature (1)..(180): Homolog of NCBI NO: 15227694 NR Description: MADS-box protein (AGL3); protein id: At2g03710.1, by cDNA: gi_1737494 [Arabidopsis thaliana]
  misc_feature (1)..(180): Homolog of NCBI NO: 30678072 NR Description: MADS-box protein (AGL3) [Arabidopsis thaliana]
  misc_feature (1)..(180): Homolog of NCBI NO: 23304686 NR Description: MADS-box protein AGL3-a [Brassica oleracea var.
  misc_feature (1)..(94): Homolog of NCBI NO: 32402422 NR Description: MADS-box protein AGL3-II [Arabidopsis thaliana]
  misc_feature (1)..(180): Homolog of NCBI NO: 13384050 NR Description: MADS-box transcription factor FBP9 [Petunia x
  misc_feature (1)..(180): Homolog of NCBI NO: 8567991 NR Description: MADS-box protein MADS4 [Nicotiana tabacum]
  misc_feature (1)..(180): Homolog of NCBI NO: 6651033 NR Description: MADS box transcription factor MADS1 [Capsicum
  misc_feature (1)..(180): Homolog of NCBI NO: 13384060 NR Description: MADS-box transcription factor FBP23 [Petunia x
  misc_feature (1)..(180): Homolog of NCBI NO: 7446512 NR Description: MADS box protein DEFH49 - garden snapdragon
  misc_feature (1)..(180): Homolog of NCBI NO: 7488622 NR Description: MADS box protein 1 - apple tree

SEQ ID NO: 95307 - DNA, 975 bp, Arabidopsis thaliana; identical to SEQ ID NO: 91551
  misc_feature (1)..(975): Ceres Seq. ID no. 12728219
  misc_feature: MA Experiment ID: 20000347 Result: Up-regulated in Transcription
  misc_feature: MA Experiment 20000347 PARAMETER Experiment Name: At_2mM_SA_Sub_P Parameter: Age (day) Value: 14
  misc_feature: MA Experiment 20000347 PARAMETER Experiment Name: At_2mM_SA_Sub_P Parameter: Organism Value: A. thaliana
  misc_feature: MA Experiment 20000347 PARAMETER Experiment Name: At_2mM_SA_Sub_P Parameter: Plant Line Value: WS
  misc_feature: MA Experiment 20000347 PARAMETER Experiment Name: At_2mM_SA_Sub_P Parameter: Timepoint (hr) Value: 6
  misc_feature: MA Experiment 20000347 PARAMETER Experiment Name: At_2mM_SA_Sub_P Parameter: Tissue Value: Aerial
  misc_feature: MA Experiment 20000347 PARAMETER Experiment Name: At_2mM_SA_Sub_P Parameter: Treatment Value: 2mM SA vs. No Treatment
  misc_feature: MA Experiment ID: 20000355 Result: Up-regulated in Transcription
  misc_feature: MA Experiment 20000355 PARAMETER Experiment Name: At_Siliques_Sub_P Parameter: Age (day) Value: 21
  misc_feature: MA Experiment 20000355 PARAMETER Experiment Name: At_Siliques_Sub_P Parameter: Organism Value: A. thaliana
  misc_feature: MA Experiment 20000355 PARAMETER Experiment Name: At_Siliques_Sub_P Parameter: Plant Line Value: WS
  misc_feature: MA Experiment 20000355 PARAMETER Experiment Name: At_Siliques_Sub_P Parameter: Tissue Value: Less Than 5mm Siliques vs. Whole Plant

SEQ ID NO: 95308 - protein, 324 aa, Arabidopsis thaliana; identical to SEQ ID NO: 91552
  peptide (1)..(324): Ceres Seq. ID no. 12728220
  misc_feature (66)..(319): Pfam Name: Sulfotransferase domain Pfam Description: Sulfotransferase domain
  misc_feature (1)..(324): Homolog of NCBI NO: 15227704 NR Description: putative steroid sulfotransferase; protein id:
  misc_feature (9)..(324): Homolog of NCBI NO: 38230552 NR Description: steroid sulfotransferase 4 [Brassica napus]
  misc_feature (4)..(324): Homolog of NCBI NO: 7434974 NR Description: probable steroid sulfotransferase (EC 2.8.2.15) 3 rape >gi|3420008|gb|AAC63113.1| steroid sulfotransferase 3
  misc_feature (4)..(322): Homolog of NCBI NO: 15227699 NR Description: putative steroid sulfotransferase; protein id: supported by cDNA: gi_14030734, supported by cDNA: gi_599639 thaliana] >gi|27735199|sp|P52839|FSTL_ARATH Flavonol
  misc_feature (12)..(322): Homolog of NCBI NO: 7434981 NR Description: probable steroid sulfotransferase (EC 2.8.2.15) 1 rape >gi|3420004|gb|AAC63111.1| steroid sulfotransferase 1
  misc_feature (4)..(324): Homolog of NCBI NO: 7434973 NR Description: probable steroid sulfotransferase (EC 2.8.2.15) 2 rape >gi|3420006|gb|AAC63112.1| steroid sulfotransferase 2
  misc_feature (4)..(298): Homolog of NCBI NO: 2129586 NR Description: probable flavonol sulfotransferase (EC 2.8.2.-) - thaliana >gi|833767|emb|CAA86850.1| Flavonol sulfotransferase
  misc_feature (11)..(322): Homolog of NCBI NO: 15230602 NR Description: sulfotransferase-like protein; protein id:
  misc_feature (16)..(322): Homolog of NCBI NO: 15230603 NR Description: sulfotransferase-like protein; protein id:
  misc_feature (14)..(322): Homolog of NCBI NO: 15239947 NR Description: steroid sulfotransferase-like; protein id:

SEQ ID NO: 95309 - DNA, 1098 bp, Arabidopsis thaliana; identical to SEQ ID NO: 91553
  misc_feature (1)..(1098): Ceres Seq. ID no. 12728241
  misc_feature: MA Experiment ID: 20000328 Result: Down-regulated in Transcription
  misc_feature: MA Experiment 20000328 PARAMETER Experiment Name: At_42deg_Heat_Sub_P Parameter: Age (day) Value: 14
  misc_feature: MA Experiment 20000328 PARAMETER Experiment Name: At_42deg_Heat_Sub_P Parameter: Organism Value: A. thaliana
  misc_feature: MA Experiment 20000328 PARAMETER Experiment Name: At_42deg_Heat_Sub_P Parameter: Plant Line Value: WS
  misc_feature: MA Experiment 20000328 PARAMETER Experiment Name: At_42deg_Heat_Sub_P Parameter: Temperature (deg C) Value: 42 vs. 22
  misc_feature: MA Experiment 20000328 PARAMETER Experiment Name: At_42deg_Heat_Sub_P Parameter: Timepoint (hr) Value: 6
  misc_feature: MA Experiment 20000328 PARAMETER Experiment Name: At_42deg_Heat_Sub_P Parameter: Tissue Value: Aerial
  misc_feature: MA Experiment ID: 20000355 Result: Up-regulated in Transcription
  misc_feature: MA Experiment 20000355 PARAMETER Experiment Name: At_Siliques_Sub_P Parameter: Age (day) Value: 21
  misc_feature: MA Experiment 20000355 PARAMETER Experiment Name: At_Siliques_Sub_P Parameter: Organism Value: A. thaliana
  misc_feature: MA Experiment 20000355 PARAMETER Experiment Name: At_Siliques_Sub_P Parameter: Plant Line Value: WS
  misc_feature: MA Experiment 20000355 PARAMETER Experiment Name: At_Siliques_Sub_P Parameter: Tissue Value: Less Than 5mm Siliques vs. Whole Plant

SEQ ID NO: 95310 - protein, 365 aa, Arabidopsis thaliana; identical to SEQ ID NO: 91554
  peptide (1)..(365): Ceres Seq. ID no. 12728242
  misc_feature (53)..(362): Pfam Name: ZIP Zinc transporter Pfam Description: ZIP Zinc transporter
  misc_feature (1)..(365): Homolog of NCBI NO: 15228062 NR Description: putative root iron transporter protein; protein At2g04032.1 [Arabidopsis thaliana] putative metal transporter ZIP7 [Arabidopsis thaliana] iron
  misc_feature (8)..(365): Homolog of NCBI NO: 4836773 NR Description: iron-regulated transporter 2 [Lycopersicon
  misc_feature (1)..(365): Homolog of NCBI NO: 27549575 NR Description: root iron transporter protein IRT1 [Malus
  misc_feature (8)..(365): Homolog of NCBI NO: 4836771 NR Description: iron-regulated transporter 1 [Lycopersicon
  misc_feature (13)..(365): Homolog of NCBI NO: 18700309 NR Description: iron regulated metal transporter [Oryza sativa]
  misc_feature (46)..(365): Homolog of NCBI NO: 40888850 NR Description: TPA: iron regulated transporter-like protein
  misc_feature (10)..(365): Homolog of NCBI NO: 32966055 NR Description: iron transporter Fe3 [Oryza sativa (japonica
  misc_feature (34)..(365): Homolog of NCBI NO: 7488829 NR Description: probable Fe(II) transport protein, root - garden >gi|3153889|gb|AAC17441.1| root iron transporter protein [Pisum
  misc_feature (13)..(365): Homolog of NCBI NO: 40538928 NR Description: putative metal transporter (with alternative
  misc_feature (14)..(365): Homolog of NCBI NO: 16304676 NR Description: putative Fe(II) transporter [Thlaspi caerulescens]

SEQ ID NO: 95311 - protein, 298 aa, Arabidopsis thaliana; identical to SEQ ID NO: 91555
  peptide (1)..(298): Ceres Seq. ID no. 12728243
  misc_feature (1)..(295): Pfam Name: ZIP Zinc transporter Pfam Description: ZIP Zinc transporter
  misc_feature (1)..(298): Homolog of NCBI NO: 15228062 NR Description: putative root iron transporter protein; protein At2g04032.1 [Arabidopsis thaliana] putative metal transporter ZIP7 [Arabidopsis thaliana] iron
  misc_feature (1)..(298): Homolog of NCBI NO: 4836773 NR Description: iron-regulated transporter 2 [Lycopersicon
  misc_feature (1)..(298): Homolog of NCBI NO: 27549575 NR Description: root iron transporter protein IRT1 [Malus
  misc_feature (1)..(298): Homolog of NCBI NO: 4836771 NR Description: iron-regulated transporter 1 [Lycopersicon
  misc_feature (1)..(298): Homolog of NCBI NO: 18700309 NR Description: iron regulated metal transporter [Oryza sativa]
  misc_feature (1)..(298): Homolog of NCBI NO: 40888850 NR Description: TPA: iron regulated transporter-like protein
  misc_feature (1)..(298): Homolog of NCBI NO: 32966055 NR Description: iron transporter Fe3 [Oryza sativa (japonica
  misc_feature (1)..(298): Homolog of NCBI NO: 7488829 NR Description: probable Fe(II) transport protein, root - garden >gi|3153889|gb|AAC17441.1| root iron transporter protein [Pisum
  misc_feature (1)..(298): Homolog of NCBI NO: 40538928 NR Description: putative metal transporter (with alternative
  misc_feature (1)..(298): Homolog of NCBI NO: 16304676 NR Description: putative Fe(II) transporter [Thlaspi caerulescens]

SEQ ID NO: 95312 - protein, 277 aa, Arabidopsis thaliana; identical to SEQ ID NO: 91556
  peptide (1)..(277): Ceres Seq. ID no. 12728244
  misc_feature (1)..(274): Pfam Name: ZIP Zinc transporter Pfam Description: ZIP Zinc transporter
  misc_feature (1)..(277): Homolog of NCBI NO: 15228062 NR Description: putative root iron transporter protein; protein At2g04032.1 [Arabidopsis thaliana] putative metal transporter ZIP7 [Arabidopsis thaliana] iron
  misc_feature (1)..(277): Homolog of NCBI NO: 4836773 NR Description: iron-regulated transporter 2 [Lycopersicon
  misc_feature (1)..(277): Homolog of NCBI NO: 27549575 NR Description: root iron transporter protein IRT1 [Malus
  misc_feature (1)..(277): Homolog of NCBI NO: 4836771 NR Description: iron-regulated transporter 1 [Lycopersicon
  misc_feature (1)..(277): Homolog of NCBI NO: 18700309 NR Description: iron regulated metal transporter [Oryza sativa]
  misc_feature (1)..(277): Homolog of NCBI NO: 40888850 NR Description: TPA: iron regulated transporter-like protein
  misc_feature (1)..(277): Homolog of NCBI NO: 32966055 NR Description: iron transporter Fe3 [Oryza sativa (japonica
  misc_feature (1)..(277): Homolog of NCBI NO: 7488829 NR Description: probable Fe(II) transport protein, root - garden >gi|3153889|gb|AAC17441.1| root iron transporter protein [Pisum
  misc_feature (1)..(277): Homolog of NCBI NO: 40538928 NR Description: putative metal transporter (with alternative
  misc_feature (1)..(277): Homolog of NCBI NO: 16304676 NR Description: putative Fe(II) transporter [Thlaspi caerulescens]

SEQ ID NO: 95313 - DNA, 1431 bp, Arabidopsis thaliana; identical to SEQ ID NO: 91557
  misc_feature (1)..(1431): Ceres Seq. ID no. 12728249
  misc_feature: MA Experiment ID: 20000327 Result: Up-regulated in Transcription
  misc_feature: MA Experiment 20000327 PARAMETER Experiment Name: At_42deg_Heat_Sub_P Parameter: Age (day) Value: 14
  misc_feature: MA Experiment 20000327 PARAMETER Experiment Name: At_42deg_Heat_Sub_P Parameter: Organism Value: A. thaliana
  misc_feature: MA Experiment 20000327 PARAMETER Experiment Name: At_42deg_Heat_Sub_P Parameter: Plant Line Value: WS
  misc_feature: MA Experiment 20000327 PARAMETER Experiment Name: At_42deg_Heat_Sub_P Parameter: Temperature (deg C) Value: 42 vs. 22
  misc_feature: MA Experiment 20000327 PARAMETER Experiment Name: At_42deg_Heat_Sub_P Parameter: Timepoint (hr) Value: 1
  misc_feature: MA Experiment 20000327 PARAMETER Experiment Name: At_42deg_Heat_Sub_P Parameter: Tissue Value: Aerial

SEQ ID NO: 95314 - protein, 476 aa, Arabidopsis thaliana; identical to SEQ ID NO: 91558
  peptide (1)..(476): Ceres Seq. ID no. 12728250
  misc_feature (1)..(476): Homolog of NCBI NO: 15228071 NR Description: hypothetical protein; protein id: At2g04040.1
  misc_feature (1)..(476): Homolog of NCBI NO: 15228073 NR Description: hypothetical protein; protein id: At2g04050.1
  misc_feature (1)..(475): Homolog of NCBI NO: 30678096 NR Description: MATE efflux protein - related [Arabidopsis >gi|26451343|dbj|BAC42772.1| unknown protein [Arabidopsis >gi|28973213|gb|AAO63931.1| unknown protein [Arabidopsis
  misc_feature (1)..(460): Homolog of NCBI NO: 25411053 NR Description: hypothetical protein At2g04080 [imported] - thaliana >gi|4734007|gb|AAD28684.1| hypothetical protein
  misc_feature (1)..(460): Homolog of NCBI NO: 15228081 NR Description: hypothetical protein; protein id: At2g04070.1
  misc_feature (1)..(469): Homolog of NCBI NO: 22325453 NR Description: hypothetical protein; protein id: At2g04100.1, by cDNA: gi_20260453 [Arabidopsis thaliana]
  misc_feature (1)..(468): Homolog of NCBI NO: 15228085 NR Description: hypothetical protein; protein id: At2g04090.1
  misc_feature (1)..(460): Homolog of NCBI NO: 25411056 NR Description: hypothetical protein At2g04100 [imported] - thaliana >gi|4734005|gb|AAD28682.1| hypothetical protein
  misc_feature (27)..(472): Homolog of NCBI NO: 15223961 NR Description: hypothetical protein; protein id: At1g71140.1
  misc_feature (27)..(468): Homolog of NCBI NO: 13430684 NR Description: putative MATE efflux family protein [Arabidopsis

SEQ ID NO: 95315 - protein, 439 aa, Arabidopsis thaliana; identical to SEQ ID NO: 91559
  peptide (1)..(439): Ceres Seq. ID no. 12728251
  misc_feature (1)..(439): Homolog of NCBI NO: 15228071 NR Description: hypothetical protein; protein id: At2g04040.1
  misc_feature (1)..(439): Homolog of NCBI NO: 15228073 NR Description: hypothetical protein; protein id: At2g04050.1
  misc_feature (1)..(438): Homolog of NCBI NO: 30678096 NR Description: MATE efflux protein - related [Arabidopsis >gi|26451343|dbj|BAC42772.1| unknown protein [Arabidopsis >gi|28973213|gb|AAO63931.1| unknown protein [Arabidopsis
  misc_feature (1)..(423): Homolog of NCBI NO: 25411053 NR Description: hypothetical protein At2g04080 [imported] - thaliana >gi|4734007|gb|AAD28684.1| hypothetical protein
  misc_feature (1)..(423): Homolog of NCBI NO: 15228081 NR Description: hypothetical protein; protein id: At2g04070.1
  misc_feature (1)..(432): Homolog of NCBI NO: 22325453 NR Description: hypothetical protein; protein id: At2g04100.1, by cDNA: gi_20260453 [Arabidopsis thaliana]
  misc_feature (1)..(431): Homolog of NCBI NO: 15228085 NR Description: hypothetical protein; protein id: At2g04090.1
  misc_feature (1)..(423): Homolog of NCBI NO: 25411056 NR Description: hypothetical protein At2g04100 [imported] - thaliana >gi|4734005|gb|AAD28682.1| hypothetical protein
  misc_feature (1)..(435): Homolog of NCBI NO: 15223961 NR Description: hypothetical protein; protein id: At1g71140.1
  misc_feature (1)..(431): Homolog of NCBI NO: 13430684 NR Description: putative MATE efflux family protein [Arabidopsis

SEQ ID NO: 95316 - protein, 423 aa, Arabidopsis thaliana; identical to SEQ ID NO: 91560
  peptide (1)..(423): Ceres Seq. ID no. 12728252
  misc_feature (1)..(423): Homolog of NCBI NO: 15228071 NR Description: hypothetical protein; protein id: At2g04040.1
  misc_feature (1)..(423): Homolog of NCBI NO: 15228073 NR Description: hypothetical protein; protein id: At2g04050.1
  misc_feature (1)..(422): Homolog of NCBI NO: 30678096 NR Description: MATE efflux protein - related [Arabidopsis >gi|26451343|dbj|BAC42772.1| unknown protein [Arabidopsis >gi|28973213|gb|AAO63931.1| unknown protein [Arabidopsis
  misc_feature (1)..(407): Homolog of NCBI NO: 25411053 NR Description: hypothetical protein At2g04080 [imported] - thaliana >gi|4734007|gb|AAD28684.1| hypothetical protein
  misc_feature (1)..(407): Homolog of NCBI NO: 15228081 NR Description: hypothetical protein; protein id: At2g04070.1
  misc_feature (1)..(416): Homolog of NCBI NO: 22325453 NR Description: hypothetical protein; protein id: At2g04100.1, by cDNA: gi_20260453 [Arabidopsis thaliana]
  misc_feature (1)..(415): Homolog of NCBI NO: 15228085 NR Description: hypothetical protein; protein id: At2g04090.1
  misc_feature (1)..(407): Homolog of NCBI NO: 25411056 NR Description: hypothetical protein At2g04100 [imported] - thaliana >gi|4734005|gb|AAD28682.1| hypothetical protein
  misc_feature (1)..(419): Homolog of NCBI NO: 15223961 NR Description: hypothetical protein; protein id: At1g71140.1
  misc_feature (1)..(415): Homolog of NCBI NO: 13430684 NR Description: putative MATE efflux family protein [Arabidopsis

SEQ ID NO: 95317 - DNA, 1431 bp, Arabidopsis thaliana; identical to SEQ ID NO: 91561
  misc_feature (1)..(1431): Ceres Seq. ID no. 12728253
  misc_feature: MA Experiment ID: 20000306 Result: Down-regulated in Transcription
  misc_feature: MA Experiment 20000306 PARAMETER Experiment Name: At_Germinating_Seeds_Sub_P Parameter: Age (hr) Value: 6 vs. 0
  misc_feature: MA Experiment 20000306 PARAMETER Experiment Name: At_Germinating_Seeds_Sub_P Parameter: Organism Value: A. thaliana
  misc_feature: MA Experiment 20000306 PARAMETER Experiment Name: At_Germinating_Seeds_Sub_P Parameter: Plant Line Value: WS
  misc_feature: MA Experiment 20000306 PARAMETER Experiment Name: At_Germinating_Seeds_Sub_P Parameter: Tissue Value: Germinating Seeds
  misc_feature: MA Experiment ID: 20000307 Result: Down-regulated in Transcription
  misc_feature: MA Experiment 20000307 PARAMETER Experiment Name: At_Germinating_Seeds_Sub_P Parameter: Age (hr) Value: 24 vs. 0
  misc_feature: MA Experiment 20000307 PARAMETER Experiment Name: At_Germinating_Seeds_Sub_P Parameter: Organism Value: A. thaliana
  misc_feature: MA Experiment 20000307 PARAMETER Experiment Name: At_Germinating_Seeds_Sub_P Parameter: Plant Line Value: WS
  misc_feature: MA Experiment 20000307 PARAMETER Experiment Name: At_Germinating_Seeds_Sub_P Parameter: Tissue Value: Germinating Seeds

SEQ ID NO: 95318 - protein, 476 aa, Arabidopsis thaliana; identical to SEQ ID NO: 91562
  peptide (1)..(476): Ceres Seq. ID no. 12728254
  misc_feature (1)..(476): Homolog of NCBI NO: 15228073 NR Description: hypothetical protein; protein id: At2g04050.1
  misc_feature (1)..(475): Homolog of NCBI NO: 30678096 NR Description: MATE efflux protein - related [Arabidopsis >gi|26451343|dbj|BAC42772.1| unknown protein [Arabidopsis >gi|28973213|gb|AAO63931.1| unknown protein [Arabidopsis
  misc_feature (1)..(476): Homolog of NCBI NO: 15228071 NR Description: hypothetical protein; protein id: At2g04040.1
  misc_feature (1)..(460): Homolog of NCBI NO: 15228081 NR Description: hypothetical protein; protein id: At2g04070.1
  misc_feature (1)..(460): Homolog of NCBI NO: 25411053 NR Description: hypothetical protein At2g04080 [imported] - thaliana >gi|4734007|gb|AAD28684.1| hypothetical protein
  misc_feature (1)..(469): Homolog of NCBI NO: 22325453 NR Description: hypothetical protein; protein id: At2g04100.1, by cDNA: gi_20260453 [Arabidopsis thaliana]
  misc_feature (1)..(466): Homolog of NCBI NO: 15228085 NR Description: hypothetical protein; protein id: At2g04090.1
  misc_feature (1)..(460): Homolog of NCBI NO: 25411056 NR Description: hypothetical protein At2g04100 [imported] - thaliana >gi|4734005|gb|AAD28682.1| hypothetical protein
  misc_feature (27)..(472): Homolog of NCBI NO: 15223961 NR Description: hypothetical protein; protein id: At1g71140.1
  misc_feature (1)..(468): Homolog of NCBI NO: 13430684 NR Description: putative MATE efflux family protein [Arabidopsis

SEQ ID NO: 95319 - protein, 439 aa, Arabidopsis thaliana; identical to SEQ ID NO: 91563
  peptide (1)..(439): Ceres Seq. ID no. 12728255
  misc_feature (1)..(439): Homolog of NCBI NO: 15228073 NR Description: hypothetical protein; protein id: At2g04050.1
  misc_feature (1)..(438): Homolog of NCBI NO: 30678096 NR Description: MATE efflux protein - related [Arabidopsis >gi|26451343|dbj|BAC42772.1| unknown protein [Arabidopsis >gi|28973213|gb|AAO63931.1| unknown protein [Arabidopsis
  misc_feature (1)..(439): Homolog of NCBI NO: 15228071 NR Description: hypothetical protein; protein id: At2g04040.1
  misc_feature (1)..(423): Homolog of NCBI NO: 15228081 NR Description: hypothetical protein; protein id: At2g04070.1
  misc_feature (1)..(423): Homolog of NCBI NO: 25411053 NR Description: hypothetical protein At2g04080 [imported] - thaliana >gi|4734007|gb|AAD28684.1| hypothetical protein
  misc_feature (1)..(432): Homolog of NCBI NO: 22325453 NR Description: hypothetical protein; protein id: At2g04100.1, by cDNA: gi_20260453 [Arabidopsis thaliana]
  misc_feature (1)..(429): Homolog of NCBI NO: 15228085 NR Description: hypothetical protein; protein id: At2g04090.1
  misc_feature (1)..(423): Homolog of NCBI NO: 25411056 NR Description: hypothetical protein At2g04100 [imported] - thaliana >gi|4734005|gb|AAD28682.1| hypothetical protein
  misc_feature (1)..(435): Homolog of NCBI NO: 15223961 NR Description: hypothetical protein; protein id: At1g71140.1
  misc_feature (1)..(431): Homolog of NCBI NO: 13430684 NR Description: putative MATE efflux family protein [Arabidopsis

SEQ ID NO: 95320 - protein, 423 aa, Arabidopsis thaliana; identical to SEQ ID NO: 91564
  peptide (1)..(423): Ceres Seq. ID no. 12728256
  misc_feature (1)..(423): Homolog of NCBI NO: 15228073 NR Description: hypothetical protein; protein id: At2g04050.1
  misc_feature (1)..(422): Homolog of NCBI NO: 30678096 NR Description: MATE efflux protein - related [Arabidopsis >gi|26451343|dbj|BAC42772.1| unknown protein [Arabidopsis >gi|28973213|gb|AAO63931.1| unknown protein [Arabidopsis
  misc_feature (1)..(423): Homolog of NCBI NO: 15228071 NR Description: hypothetical protein; protein id: At2g04040.1
  misc_feature (1)..(407): Homolog of NCBI NO: 15228081 NR Description: hypothetical protein; protein id: At2g04070.1
  misc_feature (1)..(407): Homolog of NCBI NO: 25411053 NR Description: hypothetical protein At2g04080 [imported] - thaliana >gi|4734007|gb|AAD28684.1| hypothetical protein
  misc_feature (1)..(416): Homolog of NCBI NO: 22325453 NR Description: hypothetical protein; protein id: At2g04100.1, by cDNA: gi_20260453 [Arabidopsis thaliana]
  misc_feature (1)..(413): Homolog of NCBI NO: 15228085 NR Description: hypothetical protein; protein id: At2g04090.1
  misc_feature (1)..(407): Homolog of NCBI NO: 25411056 NR Description: hypothetical protein At2g04100 [imported] - thaliana >gi|4734005|gb|AAD28682.1| hypothetical protein
  misc_feature (1)..(419): Homolog of NCBI NO: 15223961 NR Description: hypothetical protein; protein id: At1g71140.1
  misc_feature (1)..(415): Homolog of NCBI NO: 13430684 NR Description: putative MATE efflux family protein [Arabidopsis

SEQ ID NO: 95321 - DNA, 2397 bp, Arabidopsis thaliana; identical to SEQ ID NO: 91565
  misc_feature (1)..(2397): Ceres Seq. ID no. 12728299
  misc_feature: MA Experiment ID: 20000315 Result: Down-regulated in Transcription
  misc_feature: MA Experiment 20000315 PARAMETER Experiment Name: At_14day_Shoots-Roots_Sub_P Parameter: Age (day) Value: 14
  misc_feature: MA Experiment 20000315 PARAMETER Experiment Name: At_14day_Shoots-Roots_Sub_P Parameter: Organism Value: A. thaliana
  misc_feature: MA Experiment 20000315 PARAMETER Experiment Name: At_14day_Shoots-Roots_Sub_P Parameter: Plant Line Value: WS
  misc_feature: MA Experiment 20000315 PARAMETER Experiment Name: At_14day_Shoots-Roots_Sub_P Parameter: Tissue Value: Shoots vs. Whole Plant

SEQ ID NO: 95322 - protein, 798 aa, Arabidopsis thaliana; identical to SEQ ID NO: 91566
  peptide (1)..(798): Ceres Seq. ID no. 12728300
  misc_feature (420)..(553): Pfam Name: Cation efflux family Pfam Description: Cation efflux family
  misc_feature (394)..(553): Homolog of NCBI NO: 25303192 NR Description: probable cation transport protein [imported] - thaliana >gi|4895164|gb|AAD32753.1| putative cation transport
  misc_feature (647)..(798): Homolog of NCBI NO: 25303192 NR Description: probable cation transport protein [imported] - thaliana >gi|4895164|gb|AAD32753.1| putative cation transport
  misc_feature (143)..(653): Homolog of NCBI NO: 34904948 NR Description: putative disease resistance protein homolog
  misc_feature (11)..(120): Homolog of NCBI NO: 34904948 NR Description: putative disease resistance protein homolog
  misc_feature (600)..(794): Homolog of NCBI NO: 37537241 NR Description: Slc30a5 protein [Mus musculus]
  misc_feature (396)..(573): Homolog of NCBI NO: 37537241 NR Description: Slc30a5 protein [Mus musculus]
  misc_feature (542)..(796): Homolog of NCBI NO: 34904948 NR Description: putative disease resistance protein homolog
  misc_feature (600)..(794): Homolog of NCBI NO: 26352918 NR Description: unnamed protein product [Mus musculus]
  misc_feature (396)..(573): Homolog of NCBI NO: 26352918 NR Description: unnamed protein product [Mus musculus]
  misc_feature (600)..(794): Homolog of NCBI NO: 26341774 NR Description: unnamed protein product [Mus musculus]

SEQ ID NO: 95323 - protein, 630 aa, Arabidopsis thaliana; identical to SEQ ID NO: 91567
  peptide (1)..(630): Ceres Seq. ID no. 12728301
  misc_feature (252)..(385): Pfam Name: Cation efflux family Pfam Description: Cation efflux family
  misc_feature (226)..(385): Homolog of NCBI NO: 25303192 NR Description: probable cation transport protein [imported] - thaliana >gi|4895164|gb|AAD32753.1| putative cation transport
  misc_feature (479)..(630): Homolog of NCBI NO: 25303192 NR Description: probable cation transport protein [imported] - thaliana >gi|4895164|gb|AAD32753.1| putative cation transport
  misc_feature (1)..(485): Homolog of NCBI NO: 34904948 NR Description: putative disease resistance protein homolog
  misc_feature (432)..(626): Homolog of NCBI NO: 37537241 NR Description: Slc30a5 protein [Mus musculus]
  misc_feature (228)..(405): Homolog of NCBI NO: 37537241 NR Description: Slc30a5 protein [Mus musculus]
  misc_feature (374)..(628): Homolog of NCBI NO: 34904948 NR Description: putative disease resistance protein homolog
  misc_feature (432)..(626): Homolog of NCBI NO: 26352918 NR Description: unnamed protein product [Mus musculus]
  misc_feature (228)..(405): Homolog of NCBI NO: 26352918 NR Description: unnamed protein product [Mus musculus]
  misc_feature (432)..(626): Homolog of NCBI NO: 26341774 NR Description: unnamed protein product [Mus musculus]
  misc_feature (228)..(405): Homolog of NCBI NO: 26341774 NR Description: unnamed protein product [Mus musculus]

SEQ ID NO: 95324 - protein, 405 aa, Arabidopsis thaliana; identical to SEQ ID NO: 91568
  peptide (1)..(405): Ceres Seq. ID no. 12728302
  misc_feature (27)..(160): Pfam Name: Cation efflux family Pfam Description: Cation efflux family
  misc_feature (1)..(160): Homolog of NCBI NO: 25303192 NR Description: probable cation transport protein [imported] - thaliana >gi|4895164|gb|AAD32753.1| putative cation transport
  misc_feature (254)..(405): Homolog of NCBI NO: 25303192 NR Description: probable cation transport protein [imported] - thaliana >gi|4895164|gb|AAD32753.1| putative cation transport
  misc_feature (1)..(260): Homolog of NCBI NO: 34904948 NR Description: putative disease resistance protein homolog
  misc_feature (207)..(401): Homolog of NCBI NO: 37537241 NR Description: Slc30a5 protein [Mus musculus]
  misc_feature (3)..(180): Homolog of NCBI NO: 37537241 NR Description: Slc30a5 protein [Mus musculus]
  misc_feature (149)..(403): Homolog of NCBI NO: 34904948 NR Description: putative disease resistance protein homolog
  misc_feature (207)..(401): Homolog of NCBI NO: 26352918 NR Description: unnamed protein product [Mus musculus]
  misc_feature (3)..(180): Homolog of NCBI NO: 26352918 NR Description: unnamed protein product [Mus musculus]
  misc_feature (207)..(401): Homolog of NCBI NO: 26341774 NR Description: unnamed protein product [Mus musculus]
  misc_feature (3)..(180): Homolog of NCBI NO: 26341774 NR Description: unnamed protein product [Mus musculus]

SEQ ID NO: 95325 - DNA, 2322 bp, Arabidopsis thaliana; identical to SEQ ID NO: 91569
  misc_feature (1)..(2322): Ceres Seq. ID no. 12728312
  misc_feature: MA Experiment ID: 20000171 Result: Up-regulated in Transcription
  misc_feature: MA Experiment 20000171 PARAMETER Experiment Name: At_42deg_Heat_P Parameter: Age (day) Value: 14
  misc_feature: MA Experiment 20000171 PARAMETER Experiment Name: At_42deg_Heat_P Parameter: Organism Value: A. thaliana
  misc_feature: MA Experiment 20000171 PARAMETER Experiment Name: At_42deg_Heat_P Parameter: Plant Line Value: WS
  misc_feature: MA Experiment 20000171 PARAMETER Experiment Name: At_42deg_Heat_P Parameter: Temperature (deg C) Value: 42 vs. 22
  misc_feature: MA Experiment 20000171 PARAMETER Experiment Name: At_42deg_Heat_P Parameter: Timepoint (hr) Value: 1
  misc_feature: MA Experiment 20000171 PARAMETER Experiment Name: At_42deg_Heat_P Parameter: Tissue Value: Aerial
  misc_feature: MA Experiment ID: 20000173 Result: Up-regulated in Transcription
  misc_feature: MA Experiment 20000173 PARAMETER Experiment Name: At_42deg_Heat_P Parameter: Age (day) Value: 14
  misc_feature: MA Experiment 20000173 PARAMETER Experiment Name: At_42deg_Heat_P Parameter: Organism Value: A. thaliana
  misc_feature: MA Experiment 20000173 PARAMETER Experiment Name: At_42deg_Heat_P Parameter: Plant Line Value: WS
  misc_feature: MA Experiment 20000173 PARAMETER Experiment Name: At_42deg_Heat_P Parameter: Temperature (deg C) Value: 42 vs. 22
  misc_feature: MA Experiment 20000173 PARAMETER Experiment Name: At_42deg_Heat_P Parameter: Timepoint (hr) Value: 6
  misc_feature: MA Experiment 20000173 PARAMETER Experiment Name: At_42deg_Heat_P Parameter: Tissue Value: Aerial
  misc_feature: MA Experiment ID: 20000184 Result: Down-regulated in Transcription
  misc_feature: MA Experiment 20000184 PARAMETER Experiment Name: At_Shoots__P Parameter: Age (day) Value: 7
  misc_feature: MA Experiment 20000184 PARAMETER Experiment Name: At_Shoots__P Parameter: Tissue Value: Shoots vs. Whole Plant

SEQ ID NO: 95326 - protein, 773 aa, Arabidopsis thaliana; identical to SEQ ID NO: 91570
  peptide (1)..(773): Ceres Seq. ID no. 12728313
  misc_feature (3)..(389): Pfam Name: Hsp70 protein Pfam Description: Hsp70 protein
  misc_feature (1)..(682): Homolog of NCBI NO: 7450157 NR Description: heat shock protein 91 - Arabidopsis thaliana
  misc_feature (1)..(682): Homolog of NCBI NO: 15220026 NR Description: putative heat-shock protein; protein id: supported by cDNA: gi_19310472 [Arabidopsis thaliana]
  misc_feature (1)..(682): Homolog of NCBI NO: 17473863 NR Description: putative heat-shock protein [Arabidopsis thaliana]
  misc_feature (1)..(631): Homolog of NCBI NO: 30699465 NR Description: heat shock protein hsp70, putative [Arabidopsis
  misc_feature (1)..(671): Homolog of NCBI NO: 34906196 NR Description: putative heat-shock protein [Oryza sativa
  misc_feature (1)..(631): Homolog of NCBI NO: 30699467 NR Description: heat shock protein hsp70, putative [Arabidopsis
  misc_feature (1)..(771): Homolog of NCBI NO: 5729879 NR Description: heat shock 105kD; heat shock 105kD alpha; heat
  misc_feature (1)..(768): Homolog of NCBI NO: 1001011 NR Description: heat shock protein 105 kDa beta (42 degrees
  misc_feature (1)..(737): Homolog of NCBI NO: 40747009 NR Description: hypothetical protein AN1047.2 [Aspergillus
  misc_feature (1)..(679): Homolog of NCBI NO: 2495362 NR Description: 97 KDA HEAT SHOCK PROTEIN (HEAT SHOCK PROTEIN >gi|1568627|gb|AAB09038.1| heat shock protein 110

SEQ ID NO: 95327 - protein, 736 aa, Arabidopsis thaliana; identical to SEQ ID NO: 91571
  peptide (1)..(736): Ceres Seq. ID no. 12728314
  misc_feature (1)..(352): Pfam Name: Hsp70 protein Pfam Description: Hsp70 protein
  misc_feature (1)..(645): Homolog of NCBI NO: 7450157 NR Description: heat shock protein 91 - Arabidopsis thaliana
  misc_feature (1)..(645): Homolog of NCBI NO: 15220026 NR Description: putative heat-shock protein; protein id: supported by cDNA: gi_19310472 [Arabidopsis thaliana]
  misc_feature (1)..(645): Homolog of NCBI NO: 17473863 NR Description: putative heat-shock protein [Arabidopsis thaliana]
  misc_feature (1)..(594): Homolog of NCBI NO: 30699465 NR Description: heat shock protein hsp70, putative [Arabidopsis
  misc_feature (1)..(634): Homolog of NCBI NO: 34906196 NR Description: putative heat-shock protein [Oryza sativa
  misc_feature (1)..(594): Homolog of NCBI NO: 30699467 NR Description: heat shock protein hsp70, putative [Arabidopsis
  misc_feature (1)..(734): Homolog of NCBI NO: 5729879 NR Description: heat shock 105kD; heat shock 105kD alpha; heat
  misc_feature (1)..(731): Homolog of NCBI NO: 1001011 NR Description: heat shock protein 105 kDa beta (42 degrees
  misc_feature (1)..(700): Homolog of NCBI NO: 40747009 NR Description: hypothetical protein AN1047.2 [Aspergillus
  misc_feature (1)..(642): Homolog of NCBI NO: 2495362 NR Description: 97 KDA HEAT SHOCK PROTEIN (HEAT SHOCK PROTEIN >gi|1568627|gb|AAB09038.1| heat shock protein 110

SEQ ID NO: 95328 - protein, 726 aa, Arabidopsis thaliana; identical to SEQ ID NO: 91572
  peptide (1)..(726): Ceres Seq. ID no. 12728315
  misc_feature (1)..(342): Pfam Name: Hsp70 protein Pfam Description: Hsp70 protein
  misc_feature (1)..(635): Homolog of NCBI NO: 7450157 NR Description: heat shock protein 91 - Arabidopsis thaliana
  misc_feature (1)..(635): Homolog of NCBI NO: 15220026 NR Description: putative heat-shock protein; protein id: supported by cDNA: gi_19310472 [Arabidopsis thaliana]
  misc_feature (1)..(635): Homolog of NCBI NO: 17473863 NR Description: putative heat-shock protein [Arabidopsis thaliana]
  misc_feature (1)..(584): Homolog of NCBI NO: 30699465 NR Description: heat shock protein hsp70, putative [Arabidopsis
  misc_feature (1)..(624): Homolog of NCBI NO: 34906196 NR Description: putative heat-shock protein [Oryza sativa
  misc_feature (1)..(584): Homolog of NCBI NO: 30699467 NR Description: heat shock protein hsp70, putative [Arabidopsis
  misc_feature (1)..(724): Homolog of NCBI NO: 5729879 NR Description: heat shock 105kD; heat shock 105kD alpha; heat
  misc_feature (1)..(721): Homolog of NCBI NO: 1001011 NR Description: heat shock protein 105 kDa beta (42 degrees
  misc_feature (1)..(690): Homolog of NCBI NO: 40747009 NR Description: hypothetical protein AN1047.2 [Aspergillus
  misc_feature (1)..(632): Homolog of NCBI NO: 2495362 NR Description: 97 KDA HEAT SHOCK PROTEIN (HEAT SHOCK PROTEIN >gi|1568627|gb|AAB09038.1| heat shock protein 110

SEQ ID NO: 95329 - DNA, 1943 bp, Arabidopsis thaliana; identical to SEQ ID NO: 91573
  misc_feature (1)..(1943): Ceres Seq. ID no. 12728316
  misc_feature: MA Experiment ID: 20000314 Result: Up-regulated in Transcription
  misc_feature: MA Experiment 20000314 PARAMETER Experiment Name: At_14day_Shoots-Roots_Sub_P Parameter: Age (day) Value: 14
  misc_feature: MA Experiment 20000314 PARAMETER Experiment Name: At_14day_Shoots-Roots_Sub_P Parameter: Organism Value: A. thaliana
  misc_feature: MA Experiment 20000314 PARAMETER Experiment Name: At_14day_Shoots-Roots_Sub_P Parameter: Plant Line Value: WS
  misc_feature: MA Experiment 20000314 PARAMETER Experiment Name: At_14day_Shoots-Roots_Sub_P Parameter: Tissue Value: Roots vs. Whole Plant
  misc_feature: MA Experiment ID: 20000327 Result: Down-regulated in Transcription
  misc_feature: MA Experiment 20000327 PARAMETER Experiment Name: At_42deg_Heat_Sub_P Parameter: Age (day) Value: 14
  misc_feature: MA Experiment 20000327 PARAMETER Experiment Name: At_42deg_Heat_Sub_P Parameter: Organism Value: A. thaliana
  misc_feature: MA Experiment 20000327 PARAMETER Experiment Name: At_42deg_Heat_Sub_P Parameter: Plant Line Value: WS
  misc_feature: MA Experiment 20000327 PARAMETER Experiment Name: At_42deg_Heat_Sub_P Parameter: Temperature (deg C) Value: 42 vs. 22
  misc_feature: MA Experiment 20000327 PARAMETER Experiment Name: At_42deg_Heat_Sub_P Parameter: Timepoint (hr) Value: 1
  misc_feature: MA Experiment 20000327 PARAMETER Experiment Name: At_42deg_Heat_Sub_P Parameter: Tissue Value: Aerial
  misc_feature: MA Experiment ID: 20000328 Result: Down-regulated in Transcription
  misc_feature: MA Experiment 20000328 PARAMETER Experiment Name: At_42deg_Heat_Sub_P Parameter: Age (day) Value: 14
  misc_feature: MA Experiment 20000328 PARAMETER Experiment Name: At_42deg_Heat_Sub_P Parameter: Organism Value: A. thaliana
  misc_feature: MA Experiment 20000328 PARAMETER Experiment Name: At_42deg_Heat_Sub_P Parameter: Plant Line Value: WS
  misc_feature: MA Experiment 20000328 PARAMETER Experiment Name: At_42deg_Heat_Sub_P Parameter: Temperature (deg C) Value: 42 vs. 22
  misc_feature: MA Experiment 20000328 PARAMETER Experiment Name: At_42deg_Heat_Sub_P Parameter: Timepoint (hr) Value: 6
  misc_feature: MA Experiment 20000328 PARAMETER Experiment Name: At_42deg_Heat_Sub_P Parameter: Tissue Value: Aerial
  misc_feature: MA Experiment ID: 20000349 Result: Down-regulated in Transcription
  misc_feature: MA Experiment 20000349 PARAMETER Experiment Name: At_100uM_ABA_Sub_P Parameter: Age (day) Value: 14
  misc_feature: MA Experiment 20000349 PARAMETER Experiment Name: At_100uM_ABA_Sub_P Parameter: Organism Value: A. thaliana
  misc_feature: MA Experiment 20000349 PARAMETER Experiment Name: At_100uM_ABA_Sub_P Parameter: Plant Line Value: WS
  misc_feature: MA Experiment 20000349 PARAMETER Experiment Name: At_100uM_ABA_Sub_P Parameter: Timepoint (hr) Value: 6
  misc_feature: MA Experiment 20000349 PARAMETER Experiment Name: At_100uM_ABA_Sub_P Parameter: Tissue Value: Aerial
  misc_feature: MA Experiment 20000349 PARAMETER Experiment Name: At_100uM_ABA_Sub_P Parameter: Treatment Value: 100uM ABA vs. No Treatment
  misc_feature: MA Experiment ID: 20000355 Result: Up-regulated in Transcription
  misc_feature: MA Experiment 20000355 PARAMETER Experiment Name: At_Siliques_Sub_P Parameter: Age (day) Value: 21
  misc_feature: MA Experiment 20000355 PARAMETER Experiment Name: At_Siliques_Sub_P Parameter: Organism Value: A. thaliana
  misc_feature: MA Experiment 20000355 PARAMETER Experiment Name: At_Siliques_Sub_P Parameter: Plant Line Value: WS
  misc_feature: MA Experiment 20000355 PARAMETER Experiment Name: At_Siliques_Sub_P Parameter: Tissue Value: Less Than 5mm Siliques vs. Whole Plant
  misc_feature: MA Experiment ID: 20000440 Result: Up-regulated in Transcription
  misc_feature: MA Experiment 20000440 PARAMETER Experiment Name: At_Closed-Flower__Sub_P Parameter: Tissue Value: Closed Flower vs. Whole Plant

SEQ ID NO: 95330 - protein, 534 aa, Arabidopsis thaliana; identical to SEQ ID NO: 91574
  peptide (1)..(534): Ceres Seq. ID no. 12728317
  misc_feature (32)..(534): Homolog of NCBI NO: 15221073 NR Description: unknown protein; protein id: At1g11670.1
  misc_feature (32)..(534): Homolog of NCBI NO: 22655139 NR Description: unknown protein [Arabidopsis thaliana]
  misc_feature (32)..(534): Homolog of NCBI NO: 18407368 NR Description: expressed protein; protein id: At1g61890.1, by cDNA: gi_13272458, supported by cDNA: gi_15028186, supported cDNA: gi_15081772, supported by cDNA: gi_16209723 [Arabidopsis
  misc_feature (32)..(534): Homolog of NCBI NO: 15081773 NR Description: At1g61890/F8K4_9 [Arabidopsis thaliana]
  misc_feature (34)..(531): Homolog of NCBI NO: 18415793 NR Description: putative protein; protein id: At4g21910.1 thaliana] >gi|15809935|gb|AAL06895.1| AT4g21910/T8O5_120 thaliana] >gi|22137012|gb|AAM91351.1| At4g21910/T8O5_120
  misc_feature (34)..(531): Homolog of NCBI NO: 21553843 NR Description: unknown [Arabidopsis thaliana]
  misc_feature (41)..(527): Homolog of NCBI NO: 15233127 NR Description: integral membrane protein, putative; protein id: supported by cDNA: gi_20466555 [Arabidopsis thaliana] gb|AAC28507.1~gene_id:MIL23.25~strong similarity to unknown
  misc_feature (41)..(527): Homolog of NCBI NO: 20466556 NR Description: integral membrane protein, putative [Arabidopsis
  misc_feature (37)..(494): Homolog of NCBI NO: 7487826 NR Description: hypothetical protein T8O5.120 - Arabidopsis >gi|2894569|emb|CAA17158.1| putative protein [Arabidopsis >gi|7269036|emb|CAB79146.1| putative protein [Arabidopsis
  misc_feature (102)..(524): Homolog of NCBI NO: 15234633 NR Description: putative protein; protein id: At4g21900.1

SEQ ID NO: 95331 - protein, 503 aa, Arabidopsis thaliana; identical to SEQ ID NO: 91575
  peptide (1)..(503): Ceres Seq. ID no. 12728318
  misc_feature (1)..(503): Homolog of NCBI NO: 15221073 NR Description: unknown protein; protein id: At1g11670.1
  misc_feature (1)..(503): Homolog of NCBI NO: 22655139 NR Description: unknown protein [Arabidopsis thaliana]
  misc_feature (1)..(503): Homolog of NCBI NO: 18407368 NR Description: expressed protein; protein id: At1g61890.1, by cDNA: gi_13272458, supported by cDNA: gi_15028186, supported cDNA: gi_15081772, supported by cDNA: gi_16209723 [Arabidopsis
  misc_feature (1)..(503): Homolog of NCBI NO: 15081773 NR Description: At1g61890/F8K4_9 [Arabidopsis thaliana]
  misc_feature (3)..(500): Homolog of NCBI NO: 18415793 NR Description: putative protein; protein id: At4g21910.1 thaliana] >gi|15809935|gb|AAL06895.1| AT4g21910/T8O5_120 thaliana] >gi|22137012|gb|AAM91351.1| At4g21910/T8O5_120
  misc_feature (3)..(500): Homolog of NCBI NO: 21553843 NR Description: unknown [Arabidopsis thaliana]
  misc_feature (10)..(496): Homolog of NCBI NO: 15233127 NR Description: integral membrane protein, putative; protein id: supported by cDNA: gi_20466555 [Arabidopsis thaliana] gb|AAC28507.1~gene_id:MIL23.25~strong similarity to unknown
  misc_feature (10)..(496): Homolog of NCBI NO: 20466556 NR Description: integral membrane protein, putative [Arabidopsis
  misc_feature (6)..(463): Homolog of NCBI NO: 7487826 NR Description: hypothetical protein T8O5.120 - Arabidopsis >gi|2894569|emb|CAA17158.1| putative protein [Arabidopsis >gi|7269036|emb|CAB79146.1| putative protein [Arabidopsis
  misc_feature (71)..(493): Homolog of NCBI NO: 15234633 NR Description: putative protein; protein id: At4g21900.1

SEQ ID NO: 95332 - protein, 476 aa, Arabidopsis thaliana; identical to SEQ ID NO: 91576
  peptide (1)..(476): Ceres Seq. ID no. 12728319
  misc_feature (1)..(476): Homolog of NCBI NO: 15221073 NR Description: unknown protein; protein id: At1g11670.1
  misc_feature (1)..(476): Homolog of NCBI NO: 22655139 NR Description: unknown protein [Arabidopsis thaliana]
  misc_feature (1)..(476): Homolog of NCBI NO: 18407368 NR Description: expressed protein; protein id: At1g61890.1, by cDNA: gi_13272458, supported by cDNA: gi_15028186, supported cDNA: gi_15081772, supported by cDNA: gi_16209723 [Arabidopsis
  misc_feature (1)..(476): Homolog of NCBI NO: 15081773 NR Description: At1g61890/F8K4_9 [Arabidopsis thaliana]
  misc_feature (1)..(473): Homolog of NCBI NO: 18415793 NR Description: putative protein; protein id: At4g21910.1 thaliana] >gi|15809935|gb|AAL06895.1| AT4g21910/T8O5_120 thaliana] >gi|22137012|gb|AAM91351.1| At4g21910/T8O5_120
  misc_feature (1)..(473): Homolog of NCBI NO: 21553843 NR Description: unknown [Arabidopsis thaliana]
  misc_feature (1)..(469): Homolog of NCBI NO: 15233127 NR Description: integral membrane protein, putative; protein id: supported by cDNA: gi_20466555 [Arabidopsis thaliana] gb|AAC28507.1~gene_id:MIL23.25~strong similarity to unknown
  misc_feature (1)..(469): Homolog of NCBI NO: 20466556 NR Description: integral membrane protein, putative [Arabidopsis
  misc_feature (1)..(436): Homolog of NCBI NO: 7487826 NR Description: hypothetical protein T8O5.120 - Arabidopsis >gi|2894569|emb|CAA17158.1| putative protein [Arabidopsis >gi|7269036|emb|CAB79146.1| putative protein [Arabidopsis
  misc_feature (44)..(466): Homolog of NCBI NO: 15234633 NR Description: putative protein; protein id: At4g21900.1

SEQ ID NO: 95333 - DNA, 1155 bp, Arabidopsis thaliana; identical to SEQ ID NO: 91577
  misc_feature (1)..(1155): Ceres Seq. ID no. 12728327
  misc_feature: MA Experiment ID: 20000227 Result: Down-regulated in Transcription
  misc_feature: MA Experiment 20000227 PARAMETER Experiment Name: At_Root-Tips-vs-Tops_P Parameter: Tissue Value: Root Tips vs. Root Tops
  misc_feature: MA Experiment ID: 20000234 Result: Up-regulated in Transcription
  misc_feature: MA Experiment 20000234 PARAMETER Experiment Name: At_Siliques_P Parameter: Age (day) Value: 21
  misc_feature: MA Experiment 20000234 PARAMETER Experiment Name: At_Siliques_P Parameter: Organism Value: A. thaliana
  misc_feature: MA Experiment 20000234 PARAMETER Experiment Name: At_Siliques_P Parameter: Plant Line Value: WS
  misc_feature: MA Experiment 20000234 PARAMETER Experiment Name: At_Siliques_P Parameter: Tissue Value: Less Than 5mm Siliques vs. Whole Plant
  misc_feature: MA Experiment ID: 20000235 Result: Up-regulated in Transcription
  misc_feature: MA Experiment 20000235 PARAMETER Experiment Name: At_Siliques_P Parameter: Age (day) Value: 21
  misc_feature: MA Experiment 20000235 PARAMETER Experiment Name: At_Siliques_P Parameter: Organism Value: A. thaliana
  misc_feature: MA Experiment 20000235 PARAMETER Experiment Name: At_Siliques_P Parameter: Plant Line Value: WS
  misc_feature: MA Experiment 20000235 PARAMETER Experiment Name: At_Siliques_P Parameter: Tissue Value: 5-10mm Siliques vs. Whole Plant
  misc_feature: MA Experiment ID: 20000264 Result: Up-regulated in Transcription
  misc_feature: MA Experiment 20000264 PARAMETER Experiment Name: At_Open_Flower_P Parameter: Age (day) Value: 21
  misc_feature: MA Experiment 20000264 PARAMETER Experiment Name: At_Open_Flower_P Parameter: Plant Line Value: WS
  misc_feature: MA Experiment 20000264 PARAMETER Experiment Name: At_Open_Flower_P Parameter: Tissue Value: Open Flower vs. Whole Plant
  misc_feature: MA Experiment ID: 20000265 Result: Up-regulated in Transcription
  misc_feature: MA Experiment 20000265 PARAMETER Experiment Name: At_Open_Flower_P Parameter: Age (day) Value: 21
  misc_feature: MA Experiment 20000265 PARAMETER Experiment Name: At_Open_Flower_P Parameter: Plant Line Value: WS
  misc_feature: MA Experiment 20000265 PARAMETER Experiment Name: At_Open_Flower_P Parameter: Tissue Value: Closed Flower vs. Whole Plant
  misc_feature: MA Experiment ID: 20000286 Result: Up-regulated in Transcription
  misc_feature: MA Experiment 20000286 PARAMETER Experiment Name: At_Open_Flower_P Parameter: Age (day) Value: 21
  misc_feature: MA Experiment 20000286 PARAMETER Experiment Name: At_Open_Flower_P Parameter: Plant Line Value: WS
  misc_feature: MA Experiment 20000286 PARAMETER Experiment Name: At_Open_Flower_P Parameter: Tissue Value: Half Open vs. Whole Plant
  misc_feature: MA Experiment ID: 20000495 Result: Up-regulated in Transcription
  misc_feature: MA Experiment 20000495 PARAMETER Experiment Name: At_Guard_Cells_P Parameter: Harvest Date Value: 8/2/2002
  misc_feature: MA Experiment 20000495 PARAMETER Experiment Name: At_Guard_Cells_P Parameter: Organism Value: A. thaliana
  misc_feature: MA Experiment 20000495 PARAMETER Experiment Name: At_Guard_Cells_P Parameter: Tissue Value: Guard Cells vs. Leaves
  misc_feature: MA Experiment ID: 20001557 Result: Down-regulated in Transcription
  misc_feature: MA Experiment 20001557 PARAMETER Experiment Name: At_Drought_Soil_Dry_P Parameter: Age (day) Value: 27
  misc_feature: MA Experiment 20001557 PARAMETER Experiment Name: At_Drought_Soil_Dry_P Parameter: Organism Value: A. thaliana
  misc_feature: MA Experiment 20001557 PARAMETER Experiment Name: At_Drought_Soil_Dry_P Parameter: Plant Line Value: WS
  misc_feature: MA Experiment 20001557 PARAMETER Experiment Name: At_Drought_Soil_Dry_P Parameter: Post Timepoint (hr) Value: 3
  misc_feature: MA Experiment 20001557 PARAMETER Experiment Name: At_Drought_Soil_Dry_P Parameter: Post-Treatment Value: Re-Water vs. No Drought
  misc_feature: MA Experiment 20001557 PARAMETER Experiment Name: At_Drought_Soil_Dry_P Parameter: Timepoint (day) Value: 13
  misc_feature: MA Experiment 20001557 PARAMETER Experiment Name: At_Drought_Soil_Dry_P Parameter: Treatment Value: Drought vs. No Drought
  misc_feature: MA Experiment ID: 20001558 Result: Down-regulated in Transcription
  misc_feature: MA Experiment 20001558 PARAMETER Experiment Name: At_Drought_Soil_Dry_P Parameter: Age (day) Value: 27
  misc_feature: MA Experiment 20001558 PARAMETER Experiment Name: At_Drought_Soil_Dry_P Parameter: Organism Value: A. thaliana
  misc_feature: MA Experiment 20001558 PARAMETER Experiment Name: At_Drought_Soil_Dry_P Parameter: Plant Line Value: WS
  misc_feature: MA Experiment 20001558 PARAMETER Experiment Name: At_Drought_Soil_Dry_P Parameter: Post Timepoint (hr) Value: 6
  misc_feature: MA Experiment 20001558 PARAMETER Experiment Name: At_Drought_Soil_Dry_P Parameter: Post-Treatment Value: Re-Water vs. No Drought
  misc_feature: MA Experiment 20001558 PARAMETER Experiment Name: At_Drought_Soil_Dry_P Parameter: Timepoint (day) Value: 13
  misc_feature: MA Experiment 20001558 PARAMETER Experiment Name: At_Drought_Soil_Dry_P Parameter: Treatment Value: Drought vs. No Drought

SEQ ID NO: 95334 - protein, 384 aa, Arabidopsis thaliana; identical to SEQ ID NO: 91578
  peptide (1)..(384): Ceres Seq. ID no. 12728328
  misc_feature (129)..(327): Pfam Name: Galactosyltransferase Pfam Description: Galactosyltransferase
  misc_feature (1)..(384): Homolog of NCBI NO: 15221085 NR Description: Avr9 elicitor response-like protein; protein id:
  misc_feature (1)..(339): Homolog of NCBI NO: 25370620 NR Description: hypothetical protein [imported] - Arabidopsis >gi|4835784|gb|AAD30250.1|AC007296_11 Strong similarity to Avr9 elicitor response protein from Nicotiana tabacum. EST
  misc_feature (79)..(382): Homolog of NCBI NO: 15220440 NR Description: putative AVR9 elicitor response protein; protein At1g05170.1, supported by cDNA: gi_14488077 [Arabidopsis
  misc_feature (1)..(114): Homolog of NCBI NO: 15220440 NR Description: putative AVR9 elicitor response protein; protein At1g05170.1, supported by cDNA: gi_14488077 [Arabidopsis
  misc_feature (73)..(380): Homolog of NCBI NO: 15225684 NR Description: unknown protein; protein id: At2g32430.1
  misc_feature (1)..(68): Homolog of NCBI NO: 15225684 NR Description: unknown protein; protein id: At2g32430.1
  misc_feature (74)..(379): Homolog of NCBI NO: 7485336 NR Description: hypothetical protein F10M23.280 - Arabidopsis >gi|4455217|emb|CAB36540.1| Avr9 elicitor response like protein thaliana] >gi|7269547|emb|CAB79549.1| Avr9 elicitor response like
  misc_feature (1)..(111): Homolog of NCBI NO: 7485336 NR Description: hypothetical protein F10M23.280 - Arabidopsis >gi|4455217|emb|CAB36540.1| Avr9 elicitor response like protein thaliana] >gi|7269547|emb|CAB79549.1| Avr9 elicitor response like
  misc_feature (74)..(379): Homolog of NCBI NO: 18416895 NR Description: Avr9 elicitor response like protein; protein id:
  misc_feature (1)..(111): Homolog of NCBI NO: 18416895 NR Description: Avr9 elicitor response like protein; protein id:

SEQ ID NO: 95335 - protein, 360 aa, Arabidopsis thaliana; identical to SEQ ID NO: 91579
  peptide (1)..(360): Ceres Seq. ID no. 12728329
  misc_feature (105)..(303): Pfam Name: Galactosyltransferase Pfam Description: Galactosyltransferase
  misc_feature (1)..(360): Homolog of NCBI NO: 15221085 NR Description: Avr9 elicitor response-like protein; protein id:
  misc_feature (1)..(315): Homolog of NCBI NO: 25370620 NR Description: hypothetical protein [imported] - Arabidopsis >gi|4835784|gb|AAD30250.1|AC007296_11 Strong similarity to Avr9 elicitor response protein from Nicotiana tabacum. EST
  misc_feature (55)..(358): Homolog of NCBI NO: 15220440 NR Description: putative AVR9 elicitor response protein; protein At1g05170.1, supported by cDNA: gi_14488077 [Arabidopsis
  misc_feature (1)..(90): Homolog of NCBI NO: 15220440 NR Description: putative AVR9 elicitor response protein; protein At1g05170.1, supported by cDNA: gi_14488077 [Arabidopsis
  misc_feature (49)..(356): Homolog of NCBI NO: 15225684 NR Description: unknown protein; protein id: At2g32430.1
  misc_feature (1)..(44): Homolog of NCBI NO: 15225684 NR Description: unknown protein; protein id: At2g32430.1
  misc_feature (50)..(355): Homolog of NCBI NO: 7485336 NR Description: hypothetical protein F10M23.280 - Arabidopsis >gi|4455217|emb|CAB36540.1| Avr9 elicitor response like protein thaliana] >gi|7269547|emb|CAB79549.1| Avr9 elicitor response like
  misc_feature (1)..(87): Homolog of NCBI NO: 7485336 NR Description: hypothetical protein F10M23.280 - Arabidopsis >gi|4455217|emb|CAB36540.1| Avr9 elicitor response like protein thaliana] >gi|7269547|emb|CAB79549.1| Avr9 elicitor response like
  misc_feature (50)..(355): Homolog of NCBI NO: 18416895 NR Description: Avr9 elicitor response like protein; protein id:
  misc_feature (1)..(87): Homolog of NCBI NO: 18416895 NR Description: Avr9 elicitor response like protein; protein id:

SEQ ID NO: 95336 - protein, 351 aa, Arabidopsis thaliana; identical to SEQ ID NO: 91580
  peptide (1)..(351): Ceres Seq. ID no. 12728330
  misc_feature (96)..(294): Pfam Name: Galactosyltransferase Pfam Description: Galactosyltransferase
  misc_feature (1)..(351): Homolog of NCBI NO: 15221085 NR Description: Avr9 elicitor response-like protein; protein id:
  misc_feature (1)..(306): Homolog of NCBI NO: 25370620 NR Description: hypothetical protein [imported] - Arabidopsis >gi|4835784|gb|AAD30250.1|AC007296_11 Strong similarity to Avr9 elicitor response protein from Nicotiana tabacum. EST
  misc_feature (46)..(349): Homolog of NCBI NO: 15220440 NR Description: putative AVR9 elicitor response protein; protein At1g05170.1, supported by cDNA: gi_14488077 [Arabidopsis
  misc_feature (1)..(81): Homolog of NCBI NO: 15220440 NR Description: putative AVR9 elicitor response protein; protein At1g05170.1, supported by cDNA: gi_14488077 [Arabidopsis
  misc_feature (40)..(347): Homolog of NCBI NO: 15225684 NR Description: unknown protein; protein id: At2g32430.1
  misc_feature (1)..(35): Homolog of NCBI NO: 15225684 NR Description: unknown protein; protein id: At2g32430.1
  misc_feature (41)..(346): Homolog of NCBI NO: 7485336 NR Description: hypothetical protein F10M23.280 - Arabidopsis >gi|4455217|emb|CAB36540.1| Avr9 elicitor response like protein thaliana] >gi|7269547|emb|CAB79549.1| Avr9 elicitor response like
  misc_feature (1)..(78): Homolog of NCBI NO: 7485336 NR Description: hypothetical protein F10M23.280 - Arabidopsis >gi|4455217|emb|CAB36540.1| Avr9 elicitor response like protein thaliana] >gi|7269547|emb|CAB79549.1| Avr9 elicitor response like
  misc_feature (41)..(346): Homolog of NCBI NO: 18416895 NR Description: Avr9 elicitor response like protein; protein id:
  misc_feature (1)..(78): Homolog of NCBI NO: 18416895 NR Description: Avr9 elicitor response like protein; protein id:

SEQ ID NO: 95337 - DNA, 2568 bp, Arabidopsis thaliana; identical to SEQ ID NO: 91581
  misc_feature (1)..(2568): Ceres Seq. ID no. 12728364
  misc_feature: MA Experiment ID: 20000171 Result: Up-regulated in Transcription
  misc_feature: MA Experiment 20000171 PARAMETER Experiment Name: At_42deg_Heat_P Parameter: Age (day) Value: 14
  misc_feature: MA Experiment 20000171 PARAMETER Experiment Name: At_42deg_Heat_P Parameter: Organism Value: A. thaliana
  misc_feature: MA Experiment 20000171 PARAMETER Experiment Name: At_42deg_Heat_P Parameter: Plant Line Value: WS
  misc_feature: MA Experiment 20000171 PARAMETER Experiment Name: At_42deg_Heat_P Parameter: Temperature (deg C) Value: 42 vs. 22
  misc_feature: MA Experiment 20000171 PARAMETER Experiment Name: At_42deg_Heat_P Parameter: Timepoint (hr) Value: 1
  misc_feature: MA Experiment 20000171 PARAMETER Experiment Name: At_42deg_Heat_P Parameter: Tissue Value: Aerial
  misc_feature: MA Experiment ID: 20000173 Result: Up-regulated in Transcription
  misc_feature: MA Experiment 20000173 PARAMETER Experiment Name: At_42deg_Heat_P Parameter: Age (day) Value: 14
  misc_feature: MA Experiment 20000173 PARAMETER Experiment Name: At_42deg_Heat_P Parameter: Organism Value: A. thaliana
  misc_feature: MA Experiment 20000173 PARAMETER Experiment Name: At_42deg_Heat_P Parameter: Plant Line Value: WS
  misc_feature: MA Experiment 20000173 PARAMETER Experiment Name: At_42deg_Heat_P Parameter: Temperature (deg C) Value: 42 vs. 22
  misc_feature: MA Experiment 20000173 PARAMETER Experiment Name: At_42deg_Heat_P Parameter: Timepoint (hr) Value: 6
  misc_feature: MA Experiment 20000173 PARAMETER Experiment Name: At_42deg_Heat_P Parameter: Tissue Value: Aerial
  misc_feature: MA Experiment ID: 20000179 Result: Up-regulated in Transcription
  misc_feature: MA Experiment 20000179 PARAMETER Experiment Name: At_Germinating_Seeds_P Parameter: Age (hr) Value: 6 vs. 0
  misc_feature: MA Experiment 20000179 PARAMETER Experiment Name: At_Germinating_Seeds_P Parameter: Tissue Value: Germinating Seeds
  misc_feature: MA Experiment ID: 20000184 Result: Down-regulated in Transcription
  misc_feature: MA Experiment 20000184 PARAMETER Experiment Name: At_Shoots__P Parameter: Age (day) Value: 7
  misc_feature: MA Experiment 20000184 PARAMETER Experiment Name: At_Shoots__P Parameter: Tissue Value: Shoots vs. Whole Plant
  misc_feature: MA Experiment ID: 20000227 Result: Down-regulated in Transcription
  misc_feature: MA Experiment 20000227 PARAMETER Experiment Name: At_Root-Tips-vs-Tops_P Parameter: Tissue Value: Root Tips vs. Root Tops
  misc_feature: MA Experiment ID: 20000264 Result: Down-regulated in Transcription
  misc_feature: MA Experiment 20000264 PARAMETER Experiment Name: At_Open_Flower_P Parameter: Age (day) Value: 21
  misc_feature: MA Experiment 20000264 PARAMETER Experiment Name: At_Open_Flower_P Parameter: Plant Line Value: WS
  misc_feature: MA Experiment 20000264 PARAMETER Experiment Name: At_Open_Flower_P Parameter: Tissue Value: Open Flower vs. Whole Plant
  misc_feature: MA Experiment ID: 20000438 Result: Down-regulated in Transcription
  misc_feature: MA Experiment 20000438 PARAMETER Experiment Name: At_Shoots__P Parameter: Age (day) Value: 14
  misc_feature: MA Experiment 20000438 PARAMETER Experiment Name: At_Shoots__P Parameter: Tissue Value: Shoots vs. Whole Plant
  misc_feature: MA Experiment ID: 20000495 Result: Down-regulated in Transcription
  misc_feature: MA Experiment 20000495 PARAMETER Experiment Name: At_Guard_Cells_P Parameter: Harvest Date Value: 8/2/2002
  misc_feature: MA Experiment 20000495 PARAMETER Experiment Name: At_Guard_Cells_P Parameter: Organism Value: A. thaliana
  misc_feature: MA Experiment 20000495 PARAMETER Experiment Name: At_Guard_Cells_P Parameter: Tissue Value: Guard Cells vs. Leaves
  misc_feature: MA Experiment ID: 20001248 Result: Up-regulated in Transcription
  misc_feature: MA Experiment 20001248 PARAMETER Experiment Name: At_Far-red-induction_P Parameter: Age (day) Value: 7
  misc_feature: MA Experiment 20001248 PARAMETER Experiment Name: At_Far-red-induction_P Parameter: Light Value: Far-red vs. White
  misc_feature: MA Experiment 20001248 PARAMETER Experiment Name: At_Far-red-induction_P Parameter: Organism Value: A. thaliana
  misc_feature: MA Experiment 20001248 PARAMETER Experiment Name: At_Far-red-induction_P Parameter: Plant Line Value: Columbia
  misc_feature: MA Experiment 20001248 PARAMETER Experiment Name: At_Far-red-induction_P Parameter: Timepoint (hr) Value: 4
  misc_feature: MA Experiment 20001248 PARAMETER Experiment Name: At_Far-red-induction_P Parameter: Tissue Value: Whole Plant

SEQ ID NO: 95338 - protein, 375 aa, Arabidopsis thaliana; identical to SEQ ID NO: 91582
  peptide (1)..(375): Ceres Seq. ID no. 12728365
  misc_feature (306)..(374): Pfam Name: Domain of unknown function DUF221 Pfam Description: Domain of unknown function DUF221
  misc_feature (1)..(159): Homolog of NCBI NO: 7486105 NR Description: hypothetical protein F24O1.3 - Arabidopsis
  misc_feature (236)..(374): Homolog of NCBI NO: 7486105 NR Description: hypothetical protein F24O1.3 - Arabidopsis
  misc_feature (1)..(374): Homolog of NCBI NO: 15233476 NR Description: unknown protein; protein id: At4g04340.1, by cDNA: gi_15810532, supported by cDNA: gi_20260619 [Arabidopsis >gi|25407261|pir||H85054 hypothetical protein AT4g04340
  misc_feature (1)..(374): Homolog of NCBI NO: 15810533 NR Description: unknown protein [Arabidopsis thaliana]
  misc_feature (1)..(374): Homolog of NCBI NO: 15233100 NR Description: unknown protein; protein id: At3g21620.1 thaliana] >gi|11994398|dbj|BAB02357.1|
  misc_feature (1)..(374): Homolog of NCBI NO: 17381104 NR Description: unknown protein [Arabidopsis thaliana]
  misc_feature (1)..(374): Homolog of NCBI NO: 15236212 NR Description: hypothetical protein; protein id: At4g02900.1
  misc_feature (1)..(374): Homolog of NCBI NO: 15222569 NR Description: hypothetical protein; protein id: At1g32090.1
  misc_feature (1)..(374): Homolog of NCBI NO: 37537172 NR Description: unknown protein [Oryza sativa (japonica
  misc_feature (1)..(236): Homolog of NCBI NO: 34913548 NR Description: OJ1029_F04.25 [Oryza sativa (japonica

SEQ ID NO: 95339 - protein, 327 aa, Arabidopsis thaliana; identical to SEQ ID NO: 91583
  peptide (1)..(327): Ceres Seq. ID no. 12728366
  misc_feature (1)..(284): Pfam Name: Domain of unknown function DUF221 Pfam Description: Domain of unknown function DUF221
  misc_feature (1)..(325): Homolog of NCBI NO: 7486105 NR Description: hypothetical protein F24O1.3 - Arabidopsis
  misc_feature (1)..(323): Homolog of NCBI NO: 15233476 NR Description: unknown protein; protein id: At4g04340.1, by cDNA: gi_15810532, supported by cDNA: gi_20260619 [Arabidopsis >gi|25407261|pir||H85054 hypothetical protein AT4g04340
  misc_feature (1)..(323): Homolog of NCBI NO: 15810533 NR Description: unknown protein [Arabidopsis thaliana]
  misc_feature (1)..(276): Homolog of NCBI NO: 15233100 NR Description: unknown protein; protein id: At3g21620.1 thaliana] >gi|11994398|dbj|BAB02357.1|
  misc_feature (1)..(317): Homolog of NCBI NO: 17381104 NR Description: unknown protein [Arabidopsis thaliana]
  misc_feature (1)..(327): Homolog of NCBI NO: 15236212 NR Description: hypothetical protein; protein id: At4g02900.1
  misc_feature (1)..(278): Homolog of NCBI NO: 15222569 NR Description: hypothetical protein; protein id: At1g32090.1
  misc_feature (1)..(272): Homolog of NCBI NO: 37537172 NR Description: unknown protein [Oryza sativa (japonica
  misc_feature (9)..(323): Homolog of NCBI NO: 34913548 NR Description: OJ1029_F04.25 [Oryza sativa (japonica
  misc_feature (1)..(281): Homolog of NCBI NO: 30678282 NR Description: ERD4 protein-related [Arabidopsis thaliana] Unknown protein [Arabidopsis thaliana]

SEQ ID NO: 95340 - protein, 325 aa, Arabidopsis thaliana; identical to SEQ ID NO: 91584
  peptide (1)..(325): Ceres Seq. ID no. 12728367
  misc_feature (1)..(282): Pfam Name: Domain of unknown function DUF221 Pfam Description: Domain of unknown function DUF221
  misc_feature (1)..(323): Homolog of NCBI NO: 7486105 NR Description: hypothetical protein F24O1.3 - Arabidopsis
  misc_feature (1)..(321): Homolog of NCBI NO: 15233476 NR Description: unknown protein; protein id: At4g04340.1, by cDNA: gi_15810532, supported by cDNA: gi_20260619 [Arabidopsis >gi|25407261|pir||H85054 hypothetical protein AT4g04340
  misc_feature (1)..(321): Homolog of NCBI NO: 15810533 NR Description: unknown protein [Arabidopsis thaliana]
  misc_feature (1)..(274): Homolog of NCBI NO: 15233100 NR Description: unknown protein; protein id: At3g21620.1 thaliana] >gi|11994398|dbj|BAB02357.1|
  misc_feature (1)..(315): Homolog of NCBI NO: 17381104 NR Description: unknown protein [Arabidopsis thaliana]
  misc_feature (1)..(325): Homolog of NCBI NO: 15236212 NR Description: hypothetical protein; protein id: At4g02900.1
  misc_feature (1)..(276): Homolog of NCBI NO: 15222569 NR Description: hypothetical protein; protein id: At1g32090.1
  misc_feature (1)..(270): Homolog of NCBI NO: 37537172 NR Description: unknown protein [Oryza sativa (japonica
  misc_feature (7)..(321): Homolog of NCBI NO: 34913548 NR Description: OJ1029_F04.25 [Oryza sativa (japonica
  misc_feature (1)..(279): Homolog of NCBI NO: 30678282 NR Description: ERD4 protein-related [Arabidopsis thaliana] Unknown protein [Arabidopsis thaliana]

SEQ ID NO: 95341 - DNA, 888 bp, Arabidopsis thaliana; identical to SEQ ID NO: 91585
  misc_feature (1)..(888): Ceres Seq. ID no. 12728373
  misc_feature: MA Experiment ID: 20000327 Result: Up-regulated in Transcription
  misc_feature: MA Experiment 20000327 PARAMETER Experiment Name: At_42deg_Heat_Sub_P Parameter: Age (day) Value: 14
  misc_feature: MA Experiment 20000327 PARAMETER Experiment Name: At_42deg_Heat_Sub_P Parameter: Organism Value: A. thaliana
  misc_feature: MA Experiment 20000327 PARAMETER Experiment Name: At_42deg_Heat_Sub_P Parameter: Plant Line Value: WS
  misc_feature: MA Experiment 20000327 PARAMETER Experiment Name: At_42deg_Heat_Sub_P Parameter: Temperature (deg C) Value: 42 vs. 22
  misc_feature: MA Experiment 20000327 PARAMETER Experiment Name: At_42deg_Heat_Sub_P Parameter: Timepoint (hr) Value: 1
  misc_feature: MA Experiment 20000327 PARAMETER Experiment Name: At_42deg_Heat_Sub_P Parameter: Tissue Value: Aerial
  misc_feature: MA Experiment ID: 20000634 Result: Up-regulated in Transcription
  misc_feature: MA Experiment 20000634 PARAMETER Experiment Name: At_10percent_PEG_Sub_P Parameter: Age (day) Value: 12
  misc_feature: MA Experiment 20000634 PARAMETER Experiment Name: At_10percent_PEG_Sub_P Parameter: Organism Value: A. thaliana
  misc_feature: MA Experiment 20000634 PARAMETER Experiment Name: At_10percent_PEG_Sub_P Parameter: Plant Line Value: WS
  misc_feature: MA Experiment 20000634 PARAMETER Experiment Name: At_10percent_PEG_Sub_P Parameter: Timepoint (day) Value: 12
  misc_feature: MA Experiment 20000634 PARAMETER Experiment Name: At_10percent_PEG_Sub_P Parameter: Tissue Value: Whole Plant
  misc_feature: MA Experiment 20000634 PARAMETER Experiment Name: At_10percent_PEG_Sub_P Parameter: Treatment Value: 10% PEG vs. No Treatment

SEQ ID NO: 95342 - protein, 295 aa, Arabidopsis thaliana; identical to SEQ ID NO: 91586
  peptide (1)..(295): Ceres Seq. ID no. 12728374
  misc_feature (42)..(234): Pfam Name: Protein of unknown function (DUF506) Pfam Description: Protein of unknown function (DUF506)
  misc_feature (1)..(295): Homolog of NCBI NO: 15221175 NR Description: hypothetical protein; protein id: At1g12030.1
  misc_feature (1)..(290): Homolog of NCBI NO: 7486102 NR Description: hypothetical protein F24O1.16 - Arabidopsis >gi|7940287|gb|AAF70846.1|AC003113_13 F2401.16 [Arabidopsis >gi|26450592|dbj|BAC42408.1| unknown protein [Arabidopsis
  misc_feature (1)..(286): Homolog of NCBI NO: 15220778 NR Description: unknown protein; protein id: At1g62420.1
  misc_feature (26)..(258): Homolog of NCBI NO: 18397919 NR Description: expressed protein; protein id: At3g07350.1, by cDNA: 251012., supported by cDNA: gi_15028230, supported by gi_21280936 [Arabidopsis thaliana]
  misc_feature (26)..(258): Homolog of NCBI NO: 21554332 NR Description: unknown [Arabidopsis thaliana]
  misc_feature (76)..(245): Homolog of NCBI NO: 34897230 NR Description: unknown protein [Oryza sativa (japonica
  misc_feature (29)..(261): Homolog of NCBI NO: 15230824 NR Description: hypothetical protein; protein id: At3g25240.1 thaliana] >gi|9294181|dbj|BAB02083.1|
  misc_feature (64)..(236): Homolog of NCBI NO: 34906942 NR Description: similar to Arabidopsis thaliana chromosome 3,
  misc_feature (67)..(245): Homolog of NCBI NO: 30682929 NR Description: expressed protein [Arabidopsis thaliana]
  misc_feature (91)..(278): Homolog of NCBI NO: 34907382 NR Description: P0471B04.25 [Oryza sativa (japonica

SEQ ID NO: 95343 - protein, 199 aa, Arabidopsis thaliana; identical to SEQ ID NO: 91587
  peptide (1)..(199): Ceres Seq. ID no. 12728375
  misc_feature (1)..(138): Pfam Name: Protein of unknown function (DUF506) Pfam Description: Protein of unknown function (DUF506)
  misc_feature (1)..(199): Homolog of NCBI NO: 15221175 NR Description: hypothetical protein; protein id: At1g12030.1
  misc_feature (1)..(194): Homolog of NCBI NO: 7486102 NR Description: hypothetical protein F24O1.16 - Arabidopsis >gi|7940287|gb|AAF70846.1|AC003113_13 F2401.16 [Arabidopsis >gi|26450592|dbj|BAC42408.1| unknown protein [Arabidopsis
  misc_feature (1)..(190): Homolog of NCBI NO: 15220778 NR Description: unknown protein; protein id: At1g62420.1
  misc_feature (1)..(162): Homolog of NCBI NO: 18397919 NR Description: expressed protein; protein id: At3g07350.1, by cDNA: 251012., supported by cDNA: gi_15028230, supported by gi_21280936 [Arabidopsis thaliana]
  misc_feature (1)..(162): Homolog of NCBI NO: 21554332 NR Description: unknown [Arabidopsis thaliana]
  misc_feature (1)..(149): Homolog of NCBI NO: 34897230 NR Description: unknown protein [Oryza sativa (japonica
  misc_feature (1)..(165): Homolog of NCBI NO: 15230824 NR Description: hypothetical protein; protein id: At3g25240.1 thaliana] >gi|9294181|dbj|BAB02083.1|
  misc_feature (1)..(140): Homolog of NCBI NO: 34906942 NR Description: similar to Arabidopsis thaliana chromosome 3,
  misc_feature (1)..(149): Homolog of NCBI NO: 30682929 NR Description: expressed protein [Arabidopsis thaliana]
  misc_feature (1)..(182): Homolog of NCBI NO: 34907382 NR Description: P0471B04.25 [Oryza sativa (japonica

SEQ ID NO: 95344 - protein, 181 aa, Arabidopsis thaliana; identical to SEQ ID NO: 91588
  peptide (1)..(181): Ceres Seq. ID no. 12728376
  misc_feature (1)..(120): Pfam Name: Protein of unknown function (DUF506) Pfam Description: Protein of unknown function (DUF506)
  misc_feature (1)..(181): Homolog of NCBI NO: 15221175 NR Description: hypothetical protein; protein id: At1g12030.1
  misc_feature (1)..(176): Homolog of NCBI NO: 7486102 NR Description: hypothetical protein F24O1.16 - Arabidopsis >gi|7940287|gb|AAF70846.1|AC003113_13 F2401.16 [Arabidopsis >gi|26450592|dbj|BAC42408.1| unknown protein [Arabidopsis
  misc_feature (1)..(172): Homolog of NCBI NO: 15220778 NR Description: unknown protein; protein id: At1g62420.1
  misc_feature (1)..(144): Homolog of NCBI NO: 18397919 NR Description: expressed protein; protein id: At3g07350.1, by cDNA: 251012., supported by cDNA: gi_15028230, supported by gi_21280936 [Arabidopsis thaliana]
  misc_feature (1)..(144): Homolog of NCBI NO: 21554332 NR Description: unknown [Arabidopsis thaliana]
  misc_feature (1)..(131): Homolog of NCBI NO: 34897230 NR Description: unknown protein [Oryza sativa (japonica
  misc_feature (1)..(147): Homolog of NCBI NO: 15230824 NR Description: hypothetical protein; protein id: At3g25240.1 thaliana] >gi|9294181|dbj|BAB02083.1|
  misc_feature (1)..(122): Homolog of NCBI NO: 34906942 NR Description: similar to Arabidopsis thaliana chromosome 3,
  misc_feature (1)..(131): Homolog of NCBI NO: 30682929 NR Description: expressed protein [Arabidopsis thaliana]
  misc_feature (1)..(164): Homolog of NCBI NO: 34907382 NR Description: P0471B04.25 [Oryza sativa (japonica

SEQ ID NO: 95345 - DNA, 2444 bp, Arabidopsis thaliana; identical to SEQ ID NO: 91589
  misc_feature (1)..(2444): Ceres Seq. ID no. 12728377
  misc_feature: MA Experiment ID: 20000171 Result: Up-regulated in Transcription
  misc_feature: MA Experiment 20000171 PARAMETER Experiment Name: At_42deg_Heat_P Parameter: Age (day) Value: 14
  misc_feature: MA Experiment 20000171 PARAMETER Experiment Name: At_42deg_Heat_P Parameter: Organism Value: A. thaliana
  misc_feature: MA Experiment 20000171 PARAMETER Experiment Name: At_42deg_Heat_P Parameter: Plant Line Value: WS
  misc_feature: MA Experiment 20000171 PARAMETER Experiment Name: At_42deg_Heat_P Parameter: Temperature (deg C) Value: 42 vs. 22
  misc_feature: MA Experiment 20000171 PARAMETER Experiment Name: At_42deg_Heat_P Parameter: Timepoint (hr) Value: 1
  misc_feature: MA Experiment 20000171 PARAMETER Experiment Name: At_42deg_Heat_P Parameter: Tissue Value: Aerial
  misc_feature: MA Experiment ID: 20000173 Result: Up-regulated in Transcription
  misc_feature: MA Experiment 20000173 PARAMETER Experiment Name: At_42deg_Heat_P Parameter: Age (day) Value: 14
  misc_feature: MA Experiment 20000173 PARAMETER Experiment Name: At_42deg_Heat_P Parameter: Organism Value: A. thaliana
  misc_feature: MA Experiment 20000173 PARAMETER Experiment Name: At_42deg_Heat_P Parameter: Plant Line Value: WS
  misc_feature: MA Experiment 20000173 PARAMETER Experiment Name: At_42deg_Heat_P Parameter: Temperature (deg C) Value: 42 vs. 22
  misc_feature: MA Experiment 20000173 PARAMETER Experiment Name: At_42deg_Heat_P Parameter: Timepoint (hr) Value: 6
  misc_feature: MA Experiment 20000173 PARAMETER Experiment Name: At_42deg_Heat_P Parameter: Tissue Value: Aerial
  misc_feature: MA Experiment ID: 20000180 Result: Up-regulated in Transcription
  misc_feature: MA Experiment 20000180 PARAMETER Experiment Name: At_Germinating_Seeds_P Parameter: Age (hr) Value: 24 vs. 0
  misc_feature: MA Experiment 20000180 PARAMETER Experiment Name: At_Germinating_Seeds_P Parameter: Tissue Value: Germinating Seeds
  misc_feature: MA Experiment ID: 20000185 Result: Up-regulated in Transcription
  misc_feature: MA Experiment 20000185 PARAMETER Experiment Name: At_Roots__P Parameter: Age (day) Value: 7 vs. 21
  misc_feature: MA Experiment 20000185 PARAMETER Experiment Name: At_Roots__P Parameter: Organism Value: A. thaliana
  misc_feature: MA Experiment 20000185 PARAMETER Experiment Name: At_Roots__P Parameter: Tissue Value: Roots vs. Whole Plant
  misc_feature: MA Experiment ID: 20000437 Result: Up-regulated in Transcription
  misc_feature: MA Experiment 20000437 PARAMETER Experiment Name: At_Drought_P Parameter: Age (day) Value: 8
  misc_feature: MA Experiment 20000437 PARAMETER Experiment Name: At_Drought_P Parameter: Organism Value: A. thaliana
  misc_feature: MA Experiment 20000437 PARAMETER Experiment Name: At_Drought_P Parameter: Plant Line Value: WS
  misc_feature: MA Experiment 20000437 PARAMETER Experiment Name: At_Drought_P Parameter: Timepoint (hr) Value: 24
  misc_feature: MA Experiment 20000437 PARAMETER Experiment Name: At_Drought_P Parameter: Tissue Value: Whole Plant
  misc_feature: MA Experiment 20000437 PARAMETER Experiment Name: At_Drought_P Parameter: Treatment Value: Drought vs. No Drought
  misc_feature: MA Experiment ID: 20000439 Result: Up-regulated in Transcription
  misc_feature: MA Experiment 20000439 PARAMETER Experiment Name: At_Roots__P Parameter: Age (day) Value: 14 vs. 21
  misc_feature: MA Experiment 20000439 PARAMETER Experiment Name: At_Roots__P Parameter: Organism Value: A. thaliana
  misc_feature: MA Experiment 20000439 PARAMETER Experiment Name: At_Roots__P Parameter: Tissue Value: Roots vs. Whole Plant
  misc_feature: MA Experiment ID: 20000527 Result: Down-regulated in Transcription
  misc_feature: MA Experiment 20000527 PARAMETER Experiment Name: At_10percent_PEG_P Parameter: Age (day) Value: 20
  misc_feature: MA Experiment 20000527 PARAMETER Experiment Name: At_10percent_PEG_P Parameter: Organism Value: A. thaliana
  misc_feature: MA Experiment 20000527 PARAMETER Experiment Name: At_10percent_PEG_P Parameter: Plant Line Value: WS
  misc_feature: MA Experiment 20000527 PARAMETER Experiment Name: At_10percent_PEG_P Parameter: Timepoint (day) Value: 20
  misc_feature: MA Experiment 20000527 PARAMETER Experiment Name: At_10percent_PEG_P Parameter: Tissue Value: Whole Plant
  misc_feature: MA Experiment 20000527 PARAMETER Experiment Name: At_10percent_PEG_P Parameter: Treatment Value: 10percent PEG vs. No Treatment

SEQ ID NO: 95346 - protein, 744 aa, Arabidopsis thaliana; identical to SEQ ID NO: 91590
  peptide (1)..(744): Ceres Seq. ID no. 12728378
  misc_feature (397)..(703): Pfam Name: Formin Homology 2 Domain Pfam Description: Formin Homology 2 Domain
  misc_feature (1)..(744): Homolog of NCBI NO: 7484956 NR Description: extensin homolog F24O1.18 - Arabidopsis thaliana T3P18.1 [Arabidopsis thaliana]
  misc_feature (22)..(744): Homolog of NCBI NO: 15220780 NR Description: hypothetical protein; protein id: At1g62440.1
  misc_feature (38)..(743): Homolog of NCBI NO: 15235668 NR Description: extensin-like protein; protein id: At4g13340.1
  misc_feature (29)..(627): Homolog of NCBI NO: 15233976 NR Description: extensin-like protein; protein id: At4g18670.1
  misc_feature (581)..(743): Homolog of NCBI NO: 15233976 NR Description: extensin-like protein; protein id: At4g18670.1
  misc_feature (626)..(744): Homolog of NCBI NO: 15233976 NR Description: extensin-like protein; protein id: At4g18670.1
  misc_feature (641)..(744): Homolog of NCBI NO: 15233976 NR Description: extensin-like protein; protein id: At4g18670.1
  misc_feature (30)..(724): Homolog of NCBI NO: 15226640 NR Description: unknown protein; protein id: At2g15880.1
  misc_feature (44)..(708): Homolog of NCBI NO: 5917664 NR Description: extensin-like protein [Lycopersicon esculentum]
  misc_feature (25)..(739): Homolog of NCBI NO: 1076802 NR Description: extensin-like protein - maize

SEQ ID NO: 95347 - protein, 634 aa, Arabidopsis thaliana; identical to SEQ ID NO: 91591
  peptide (1)..(634): Ceres Seq. ID no. 12728379
  misc_feature (287)..(593): Pfam Name: Formin Homology 2 Domain Pfam Description: Formin Homology 2 Domain
  misc_feature (1)..(634): Homolog of NCBI NO: 7484956 NR Description: extensin homolog F24O1.18 - Arabidopsis thaliana T3P18.1 [Arabidopsis thaliana]
  misc_feature (1)..(634): Homolog of NCBI NO: 15220780 NR Description: hypothetical protein; protein id: At1g62440.1
  misc_feature (1)..(633): Homolog of NCBI NO: 15235668 NR Description: extensin-like protein; protein id: At4g13340.1
  misc_feature (1)..(517): Homolog of NCBI NO: 15233976 NR Description: extensin-like protein; protein id: At4g18670.1
  misc_feature (471)..(633): Homolog of NCBI NO: 15233976 NR Description: extensin-like protein; protein id: At4g18670.1
  misc_feature (516)..(634): Homolog of NCBI NO: 15233976 NR Description: extensin-like protein; protein id: At4g18670.1
  misc_feature (531)..(634): Homolog of NCBI NO: 15233976 NR Description: extensin-like protein; protein id: At4g18670.1
  misc_feature (1)..(614): Homolog of NCBI NO: 15226640 NR Description: unknown protein; protein id: At2g15880.1
  misc_feature (1)..(598): Homolog of NCBI NO: 5917664 NR Description: extensin-like protein [Lycopersicon esculentum]
  misc_feature (1)..(629): Homolog of NCBI NO: 1076802 NR Description: extensin-like protein - maize

SEQ ID NO: 95348 - protein, 599 aa, Arabidopsis thaliana; identical to SEQ ID NO: 91592
  peptide (1)..(599): Ceres Seq. ID no. 12728380
  misc_feature (252)..(558): Pfam Name: Formin Homology 2 Domain Pfam Description: Formin Homology 2 Domain
  misc_feature (1)..(599): Homolog of NCBI NO: 7484956 NR Description: extensin homolog F24O1.18 - Arabidopsis thaliana T3P18.1 [Arabidopsis thaliana]
  misc_feature (1)..(599): Homolog of NCBI NO: 15220780 NR Description: hypothetical protein; protein id: At1g62440.1
  misc_feature (1)..(598): Homolog of NCBI NO: 15235668 NR Description: extensin-like protein; protein id: At4g13340.1
  misc_feature (1)..(482): Homolog of NCBI NO: 15233976 NR Description: extensin-like protein; protein id: At4g18670.1
  misc_feature (436)..(598): Homolog of NCBI NO: 15233976 NR Description: extensin-like protein; protein id: At4g18670.1
  misc_feature (481)..(599): Homolog of NCBI NO: 15233976 NR Description: extensin-like protein; protein id: At4g18670.1
  misc_feature (496)..(599): Homolog of NCBI NO: 15233976 NR Description: extensin-like protein; protein id: At4g18670.1
  misc_feature (1)..(579): Homolog of NCBI NO: 15226640 NR Description: unknown protein; protein id: At2g15880.1
  misc_feature (1)..(563): Homolog of NCBI NO: 5917664 NR Description: extensin-like protein [Lycopersicon esculentum]
  misc_feature (1)..(594): Homolog of NCBI NO: 1076802 NR Description: extensin-like protein - maize

SEQ ID NO: 95349 - DNA, 1188 bp, Arabidopsis thaliana; identical to SEQ ID NO: 91593
  misc_feature (1)..(1188): Ceres Seq. ID no. 12728424
  misc_feature: MA Experiment ID: 20000185 Result: Up-regulated in Transcription
  misc_feature: MA Experiment 20000185 PARAMETER Experiment Name: At_Roots__P Parameter: Age (day) Value: 7 vs. 21
  misc_feature: MA Experiment 20000185 PARAMETER Experiment Name: At_Roots__P Parameter: Organism Value: A. thaliana
  misc_feature: MA Experiment 20000185 PARAMETER Experiment Name: At_Roots__P Parameter: Tissue Value: Roots vs. Whole Plant
  misc_feature: MA Experiment ID: 20000439 Result: Up-regulated in Transcription
  misc_feature: MA Experiment 20000439 PARAMETER Experiment Name: At_Roots__P Parameter: Age (day) Value: 14 vs. 21
  misc_feature: MA Experiment 20000439 PARAMETER Experiment Name: At_Roots__P Parameter: Organism Value: A. thaliana
  misc_feature: MA Experiment 20000439 PARAMETER Experiment Name: At_Roots__P Parameter: Tissue Value: Roots vs. Whole Plant

SEQ ID NO: 95350 - protein, 395 aa, Arabidopsis thaliana; identical to SEQ ID NO: 91594
  peptide (1)..(395): Ceres Seq. ID no. 12728425
  misc_feature (7)..(136): Pfam Name: No apical meristem (NAM) protein Pfam Description: No apical meristem (NAM) protein
  misc_feature (1)..(395): Homolog of NCBI NO: 15221256 NR Description: unknown protein; protein id: At1g12260.1
  misc_feature (1)..(395): Homolog of NCBI NO: 25402716 NR Description: hypothetical protein [imported] - Arabidopsis >gi|10086508|gb|AAG12568.1|AC022522_1 Hypothetical protein
  misc_feature (1)..(393): Homolog of NCBI NO: 15221554 NR Description: unknown protein; protein id: At1g62700.1
  misc_feature (45)..(393): Homolog of NCBI NO: 6630463 NR Description: F23N19.6 [Arabidopsis thaliana]
  misc_feature (1)..(55): Homolog of NCBI NO: 6630463 NR Description: F23N19.6 [Arabidopsis thaliana]
  misc_feature (7)..(187): Homolog of NCBI NO: 15234325 NR Description: NAM like protein; protein id: At4g36160.1
  misc_feature (210)..(372): Homolog of NCBI NO: 15234325 NR Description: NAM like protein; protein id: At4g36160.1
  misc_feature (1)..(212): Homolog of NCBI NO: 38605889 NR Description: OSJNBb0020O11.1 [Oryza sativa (japonica
  misc_feature (5)..(159): Homolog of NCBI NO: 34902254 NR Description: Putative NAM-like protein [Oryza sativa (japonica
  misc_feature (326)..(394): Homolog of NCBI NO: 34902254 NR Description: Putative NAM-like protein [Oryza sativa (japonica

SEQ ID NO: 95351 - protein, 287 aa, Arabidopsis thaliana; identical to SEQ ID NO: 91595
  peptide (1)..(287): Ceres Seq. ID no. 12728426
  misc_feature (1)..(287): Homolog of NCBI NO: 15221256 NR Description: unknown protein; protein id: At1g12260.1
  misc_feature (1)..(287): Homolog of NCBI NO: 25402716 NR Description: hypothetical protein [imported] - Arabidopsis >gi|10086508|gb|AAG12568.1|AC022522_1 Hypothetical protein
  misc_feature (1)..(285): Homolog of NCBI NO: 15221554 NR Description: unknown protein; protein id: At1g62700.1
  misc_feature (1)..(285): Homolog of NCBI NO: 6630463 NR Description: F23N19.6 [Arabidopsis thaliana]
  misc_feature (1)..(79): Homolog of NCBI NO: 15234325 NR Description: NAM like protein; protein id: At4g36160.1
  misc_feature (102)..(264): Homolog of NCBI NO: 15234325 NR Description: NAM like protein; protein id: At4g36160.1
  misc_feature (1)..(104): Homolog of NCBI NO: 38605889 NR Description: OSJNBb0020O11.1 [Oryza sativa (japonica
  misc_feature (1)..(51): Homolog of NCBI NO: 34902254 NR Description: Putative NAM-like protein [Oryza sativa (japonica
  misc_feature (218)..(286): Homolog of NCBI NO: 34902254 NR Description: Putative NAM-like protein [Oryza sativa (japonica
  misc_feature (1)..(116): Homolog of NCBI NO: 24413978 NR Description: NAM-like protein [Oryza sativa (japonica

SEQ ID NO: 95352 - protein, 266 aa, Arabidopsis thaliana; identical to SEQ ID NO: 91596
  peptide (1)..(266): Ceres Seq. ID no. 12728427
  misc_feature (1)..(266): Homolog of NCBI NO: 15221256 NR Description: unknown protein; protein id: At1g12260.1
  misc_feature (1)..(266): Homolog of NCBI NO: 25402716 NR Description: hypothetical protein [imported] - Arabidopsis >gi|10086508|gb|AAG12568.1|AC022522_1 Hypothetical protein
  misc_feature (1)..(264): Homolog of NCBI NO: 15221554 NR Description: unknown protein; protein id: At1g62700.1
  misc_feature (1)..(264): Homolog of NCBI NO: 6630463 NR Description: F23N19.6 [Arabidopsis thaliana]
  misc_feature (1)..(58): Homolog of NCBI NO: 15234325 NR Description: NAM like protein; protein id: At4g36160.1
  misc_feature (81)..(243): Homolog of NCBI NO: 15234325 NR Description: NAM like protein; protein id: At4g36160.1
  misc_feature (1)..(83): Homolog of NCBI NO: 38605889 NR Description: OSJNBb0020O11.1 [Oryza sativa (japonica
  misc_feature (1)..(30): Homolog of NCBI NO: 34902254 NR Description: Putative NAM-like protein [Oryza sativa (japonica
  misc_feature (197)..(265): Homolog of NCBI NO: 34902254 NR Description: Putative NAM-like protein [Oryza sativa (japonica
  misc_feature (1)..(95): Homolog of NCBI NO: 24413978 NR Description: NAM-like protein [Oryza sativa (japonica

SEQ ID NO: 95353 - DNA, 1518 bp, Arabidopsis thaliana; identical to SEQ ID NO: 91597
  misc_feature (1)..(1518): Ceres Seq. ID no. 12728436
  misc_feature: MA Experiment ID: 20000185 Result: Down-regulated in Transcription
  misc_feature: MA Experiment 20000185 PARAMETER Experiment Name: At_Roots__P Parameter: Age (day) Value: 7 vs. 21
  misc_feature: MA Experiment 20000185 PARAMETER Experiment Name: At_Roots__P Parameter: Organism Value: A. thaliana
  misc_feature: MA Experiment 20000185 PARAMETER Experiment Name: At_Roots__P Parameter: Tissue Value: Roots vs. Whole Plant
  misc_feature: MA Experiment ID: 20000234 Result: Up-regulated in Transcription
  misc_feature: MA Experiment 20000234 PARAMETER Experiment Name: At_Siliques_P Parameter: Age (day) Value: 21
  misc_feature: MA Experiment 20000234 PARAMETER Experiment Name: At_Siliques_P Parameter: Organism Value: A. thaliana
  misc_feature: MA Experiment 20000234 PARAMETER Experiment Name: At_Siliques_P Parameter: Plant Line Value: WS
  misc_feature: MA Experiment 20000234 PARAMETER Experiment Name: At_Siliques_P Parameter: Tissue Value: Less Than 5mm Siliques vs. Whole Plant
  misc_feature: MA Experiment ID: 20000235 Result: Up-regulated in Transcription
  misc_feature: MA Experiment 20000235 PARAMETER Experiment Name: At_Siliques_P Parameter: Age (day) Value: 21
  misc_feature: MA Experiment 20000235 PARAMETER Experiment Name: At_Siliques_P Parameter: Organism Value: A. thaliana
  misc_feature: MA Experiment 20000235 PARAMETER Experiment Name: At_Siliques_P Parameter: Plant Line Value: WS
  misc_feature: MA Experiment 20000235 PARAMETER Experiment Name: At_Siliques_P Parameter: Tissue Value: 5-10mm Siliques vs. Whole Plant
  misc_feature: MA Experiment ID: 20000264 Result: Up-regulated in Transcription
  misc_feature: MA Experiment 20000264 PARAMETER Experiment Name: At_Open_Flower_P Parameter: Age (day) Value: 21
  misc_feature: MA Experiment 20000264 PARAMETER Experiment Name: At_Open_Flower_P Parameter: Plant Line Value: WS
  misc_feature: MA Experiment 20000264 PARAMETER Experiment Name: At_Open_Flower_P Parameter: Tissue Value: Open Flower vs. Whole Plant
  misc_feature: MA Experiment ID: 20000265 Result: Up-regulated in Transcription
  misc_feature: MA Experiment 20000265 PARAMETER Experiment Name: At_Open_Flower_P Parameter: Age (day) Value: 21
  misc_feature: MA Experiment 20000265 PARAMETER Experiment Name: At_Open_Flower_P Parameter: Plant Line Value: WS
  misc_feature: MA Experiment 20000265 PARAMETER Experiment Name: At_Open_Flower_P Parameter: Tissue Value: Closed Flower vs. Whole Plant
  misc_feature: MA Experiment ID: 20000286 Result: Up-regulated in Transcription
  misc_feature: MA Experiment 20000286 PARAMETER Experiment Name: At_Open_Flower_P Parameter: Age (day) Value: 21
  misc_feature: MA Experiment 20000286 PARAMETER Experiment Name: At_Open_Flower_P Parameter: Plant Line Value: WS
  misc_feature: MA Experiment 20000286 PARAMETER Experiment Name: At_Open_Flower_P Parameter: Tissue Value: Half Open vs. Whole Plant
  misc_feature: MA Experiment ID: 20000439 Result: Down-regulated in Transcription
  misc_feature: MA Experiment 20000439 PARAMETER Experiment Name: At_Roots__P Parameter: Age (day) Value: 14 vs. 21
  misc_feature: MA Experiment 20000439 PARAMETER Experiment Name: At_Roots__P Parameter: Organism Value: A. thaliana
  misc_feature: MA Experiment 20000439 PARAMETER Experiment Name: At_Roots__P Parameter: Tissue Value: Roots vs. Whole Plant
  misc_feature: MA Experiment ID: 20000794 Result: Up-regulated in Transcription
  misc_feature: MA Experiment 20000794 PARAMETER Experiment Name: At_Petals_P Parameter: Age (day) Value: 23-25 days
  misc_feature: MA Experiment 20000794 PARAMETER Experiment Name: At_Petals_P Parameter: Plant Line Value: WS
  misc_feature: MA Experiment 20000794 PARAMETER Experiment Name: At_Petals_P Parameter: Tissue Value: Petals vs. Whole plant
  misc_feature: MA Experiment ID: 20001558 Result: Up-regulated in Transcription
  misc_feature: MA Experiment 20001558 PARAMETER Experiment Name: At_Drought_Soil_Dry_P Parameter: Age (day) Value: 27
  misc_feature: MA Experiment 20001558 PARAMETER Experiment Name: At_Drought_Soil_Dry_P Parameter: Organism Value: A. thaliana
  misc_feature: MA Experiment 20001558 PARAMETER Experiment Name: At_Drought_Soil_Dry_P Parameter: Plant Line Value: WS
  misc_feature: MA Experiment 20001558 PARAMETER Experiment Name: At_Drought_Soil_Dry_P Parameter: Post Timepoint (hr) Value: 6
  misc_feature: MA Experiment 20001558 PARAMETER Experiment Name: At_Drought_Soil_Dry_P Parameter: Post-Treatment Value: Re-Water vs. No Drought
  misc_feature: MA Experiment 20001558 PARAMETER Experiment Name: At_Drought_Soil_Dry_P Parameter: Timepoint (day) Value: 13
  misc_feature: MA Experiment 20001558 PARAMETER Experiment Name: At_Drought_Soil_Dry_P Parameter: Treatment Value: Drought vs. No Drought

SEQ ID NO: 95354 - protein, 505 aa, Arabidopsis thaliana; identical to SEQ ID NO: 91598
  peptide (1)..(505): Ceres Seq. ID no. 12728437
  misc_feature (1)..(505): Homolog of NCBI NO: 22329507 NR Description: hypothetical protein; protein id: At1g12330.1
  misc_feature (3)..(472): Homolog of NCBI NO: 15239939 NR Description: putative protein; protein id: At5g12900.1
  misc_feature (113)..(469): Homolog of NCBI NO: 15225441 NR Description: hypothetical protein; protein id: At2g45260.1, by cDNA: gi_20268755, supported by cDNA: gi_21281073 [Arabidopsis >gi|25367434|pir||D84888 hypothetical protein At2g45260

SEQ ID NO: 95355 - protein, 300 aa, Arabidopsis thaliana; identical to SEQ ID NO: 91599
  peptide (1)..(300): Ceres Seq. ID no. 12728438
  misc_feature (1)..(300): Homolog of NCBI NO: 22329507 NR Description: hypothetical protein; protein id: At1g12330.1
  misc_feature (1)..(267): Homolog of NCBI NO: 15239939 NR Description: putative protein; protein id: At5g12900.1
  misc_feature (1)..(264): Homolog of NCBI NO: 15225441 NR Description: hypothetical protein; protein id: At2g45260.1, by cDNA: gi_20268755, supported by cDNA: gi_21281073 [Arabidopsis >gi|25367434|pir||D84888 hypothetical protein At2g45260

SEQ ID NO: 95356 - DNA, 789 bp, Arabidopsis thaliana; identical to SEQ ID NO: 91600
  misc_feature (1)..(789): Ceres Seq. ID no. 12728462
  misc_feature: MA Experiment ID: 20000180 Result: Up-regulated in Transcription
  misc_feature: MA Experiment 20000180 PARAMETER Experiment Name: At_Germinating_Seeds_P Parameter: Age (hr) Value: 24 vs. 0
  misc_feature: MA Experiment 20000180 PARAMETER Experiment Name: At_Germinating_Seeds_P Parameter: Tissue Value: Germinating Seeds
  misc_feature: MA Experiment ID: 20000184 Result: Up-regulated in Transcription
  misc_feature: MA Experiment 20000184 PARAMETER Experiment Name: At_Shoots__P Parameter: Age (day) Value: 7
  misc_feature: MA Experiment 20000184 PARAMETER Experiment Name: At_Shoots__P Parameter: Tissue Value: Shoots vs. Whole Plant
  misc_feature: MA Experiment ID: 20000185 Result: Up-regulated in Transcription
  misc_feature: MA Experiment 20000185 PARAMETER Experiment Name: At_Roots__P Parameter: Age (day) Value: 7 vs. 21
  misc_feature: MA Experiment 20000185 PARAMETER Experiment Name: At_Roots__P Parameter: Organism Value: A. thaliana
  misc_feature: MA Experiment 20000185 PARAMETER Experiment Name: At_Roots__P Parameter: Tissue Value: Roots vs. Whole Plant
  misc_feature: MA Experiment ID: 20000439 Result: Up-regulated in Transcription
  misc_feature: MA Experiment 20000439 PARAMETER Experiment Name: At_Roots__P Parameter: Age (day) Value: 14 vs. 21
  misc_feature: MA Experiment 20000439 PARAMETER Experiment Name: At_Roots__P Parameter: Organism Value: A. thaliana
  misc_feature: MA Experiment 20000439 PARAMETER Experiment Name: At_Roots__P Parameter: Tissue Value: Roots vs. Whole Plant
  misc_feature: MA Experiment ID: 20000527 Result: Down-regulated in Transcription
  misc_feature: MA Experiment 20000527 PARAMETER Experiment Name: At_10percent_PEG_P Parameter: Age (day) Value: 20
  misc_feature: MA Experiment 20000527 PARAMETER Experiment Name: At_10percent_PEG_P Parameter: Organism Value: A. thaliana
  misc_feature: MA Experiment 20000527 PARAMETER Experiment Name: At_10percent_PEG_P Parameter: Plant Line Value: WS
  misc_feature: MA Experiment 20000527 PARAMETER Experiment Name: At_10percent_PEG_P Parameter: Timepoint (day) Value: 20
  misc_feature: MA Experiment 20000527 PARAMETER Experiment Name: At_10percent_PEG_P Parameter: Tissue Value: Whole Plant
  misc_feature: MA Experiment 20000527 PARAMETER Experiment Name: At_10percent_PEG_P Parameter: Treatment Value: 10percent PEG vs. No Treatment
  misc_feature: MA Experiment ID: 20001450 Result: Down-regulated in Transcription
  misc_feature: MA Experiment 20001450 PARAMETER Experiment Name: At_Far-red-induction_P Parameter: Age (day) Value: 7
  misc_feature: MA Experiment 20001450 PARAMETER Experiment Name: At_Far-red-induction_P Parameter: Light Value: Far-red vs. White
  misc_feature: MA Experiment 20001450 PARAMETER Experiment Name: At_Far-red-induction_P Parameter: Organism Value: A. thaliana
  misc_feature: MA Experiment 20001450 PARAMETER Experiment Name: At_Far-red-induction_P Parameter: Plant Line Value: Columbia
  misc_feature: MA Experiment 20001450 PARAMETER Experiment Name: At_Far-red-induction_P Parameter: Timepoint (hr) Value: 8
  misc_feature: MA Experiment 20001450 PARAMETER Experiment Name: At_Far-red-induction_P Parameter: Tissue Value: Whole Plant

SEQ ID NO: 95357 - protein, 262 aa, Arabidopsis thaliana; identical to SEQ ID NO: 91601
  peptide (1)..(262): Ceres Seq. ID no. 12728463
  misc_feature (168)..(246): Pfam Name: Pollen allergen Pfam Description: Pollen allergen
  misc_feature (1)..(262): Homolog of NCBI NO: 15222017 NR Description: expansin, putative; protein id: At1g12560.1
  misc_feature (1)..(262): Homolog of NCBI NO: 25344424 NR Description: protein T12C24.10 [imported] - Arabidopsis >gi|9502371|gb|AAF88078.1|AC025417_6 T12C24.10 [Arabidopsis
  misc_feature (16)..(261): Homolog of NCBI NO: 15221643 NR Description: expansin, putative; protein id: At1g62980.1, by cDNA: gi_12083295 [Arabidopsis thaliana]
  misc_feature (1)..(261): Homolog of NCBI NO: 37536438 NR Description: putative alpha-expansin protein [Oryza sativa
  misc_feature (12)..(262): Homolog of NCBI NO: 11281297 NR Description: expansin 9 [imported] - tomato
  misc_feature (15)..(262): Homolog of NCBI NO: 15227005 NR Description: expansin, putative; protein id: At2g28950.1, by cDNA: 17914., supported by cDNA: gi_16648831, supported by gi_17865811, supported by cDNA: gi_18252948 [Arabidopsis
  misc_feature (15)..(262): Homolog of NCBI NO: 20138197 NR Description: Alpha-expansin 6 precursor (At-EXP6) (AtEx6)
  misc_feature (18)..(262): Homolog of NCBI NO: 15225530 NR Description: expansin, putative; protein id: At2g39700.1, by cDNA: 17353., supported by cDNA: gi_15294171, supported by gi_17065213, supported by cDNA: gi_20259979 [Arabidopsis
  misc_feature (18)..(262): Homolog of NCBI NO: 15224330 NR Description: expansin, putative; protein id: At2g37640.1, by cDNA: gi_19699321 [Arabidopsis thaliana]
  misc_feature (15)..(262): Homolog of NCBI NO: 29466643 NR Description: expansin [Prunus persica]

SEQ ID NO: 95358 - protein, 209 aa, Arabidopsis thaliana; identical to SEQ ID NO: 91602
  peptide (1)..(209): Ceres Seq. ID no. 12728464
  misc_feature (115)..(193): Pfam Name: Pollen allergen Pfam Description: Pollen allergen
  misc_feature (1)..(209): Homolog of NCBI NO: 15222017 NR Description: expansin, putative; protein id: At1g12560.1
  misc_feature (1)..(209): Homolog of NCBI NO: 25344424 NR Description: protein T12C24.10 [imported] - Arabidopsis >gi|9502371|gb|AAF88078.1|AC025417_6 T12C24.10 [Arabidopsis
  misc_feature (1)..(208): Homolog of NCBI NO: 15221643 NR Description: expansin, putative; protein id: At1g62980.1, by cDNA: gi_12083295 [Arabidopsis thaliana]
  misc_feature (1)..(208): Homolog of NCBI NO: 37536438 NR Description: putative alpha-expansin protein [Oryza sativa
  misc_feature (1)..(209): Homolog of NCBI NO: 11281297 NR Description: expansin 9 [imported] - tomato
  misc_feature (1)..(209): Homolog of NCBI NO: 15227005 NR Description: expansin, putative; protein id: At2g28950.1, by cDNA: 17914., supported by cDNA: gi_16648831, supported by gi_17865811, supported by cDNA: gi_18252948 [Arabidopsis
  misc_feature (1)..(209): Homolog of NCBI NO: 20138197 NR Description: Alpha-expansin 6 precursor (At-EXP6) (AtEx6)
  misc_feature (1)..(209): Homolog of NCBI NO: 15225530 NR Description: expansin, putative; protein id: At2g39700.1, by cDNA: 17353., supported by cDNA: gi_15294171, supported by gi_17065213, supported by cDNA: gi_20259979 [Arabidopsis
  misc_feature (1)..(209): Homolog of NCBI NO: 15224330 NR Description: expansin, putative; protein id: At2g37640.1, by cDNA: gi_19699321 [Arabidopsis thaliana]
  misc_feature (1)..(209): Homolog of NCBI NO: 29466643 NR Description: expansin [Prunus persica]

SEQ ID NO: 95359 - DNA, 1970 bp, Arabidopsis thaliana; identical to SEQ ID NO: 91603
  misc_feature (1)..(1970): Ceres Seq. ID no. 12728465
  misc_feature: MA Experiment ID: 20000184 Result: Down-regulated in Transcription
  misc_feature: MA Experiment 20000184 PARAMETER Experiment Name: At_Shoots__P Parameter: Age (day) Value: 7
  misc_feature: MA Experiment 20000184 PARAMETER Experiment Name: At_Shoots__P Parameter: Tissue Value: Shoots vs. Whole Plant
  misc_feature: MA Experiment ID: 20000234 Result: Down-regulated in Transcription
  misc_feature: MA Experiment 20000234 PARAMETER Experiment Name: At_Siliques_P Parameter: Age (day) Value: 21
  misc_feature: MA Experiment 20000234 PARAMETER Experiment Name: At_Siliques_P Parameter: Organism Value: A. thaliana
  misc_feature: MA Experiment 20000234 PARAMETER Experiment Name: At_Siliques_P Parameter: Plant Line Value: WS
  misc_feature: MA Experiment 20000234 PARAMETER Experiment Name: At_Siliques_P Parameter: Tissue Value: Less Than 5mm Siliques vs. Whole Plant
  misc_feature: MA Experiment ID: 20000235 Result: Down-regulated in Transcription
  misc_feature: MA Experiment 20000235 PARAMETER Experiment Name: At_Siliques_P Parameter: Age (day) Value: 21
  misc_feature: MA Experiment 20000235 PARAMETER Experiment Name: At_Siliques_P Parameter: Organism Value: A. thaliana
  misc_feature: MA Experiment 20000235 PARAMETER Experiment Name: At_Siliques_P Parameter: Plant Line Value: WS
  misc_feature: MA Experiment 20000235 PARAMETER Experiment Name: At_Siliques_P Parameter: Tissue Value: 5-10mm Siliques vs. Whole Plant
  misc_feature: MA Experiment ID: 20000264 Result: Down-regulated in Transcription
  misc_feature: MA Experiment 20000264 PARAMETER Experiment Name: At_Open_Flower_P Parameter: Age (day) Value: 21
  misc_feature: MA Experiment 20000264 PARAMETER Experiment Name: At_Open_Flower_P Parameter: Plant Line Value: WS
  misc_feature: MA Experiment 20000264 PARAMETER Experiment Name: At_Open_Flower_P Parameter: Tissue Value: Open Flower vs. Whole Plant
  misc_feature: MA Experiment ID: 20000265 Result: Down-regulated in Transcription
  misc_feature: MA Experiment 20000265 PARAMETER Experiment Name: At_Open_Flower_P Parameter: Age (day) Value: 21
  misc_feature: MA Experiment 20000265 PARAMETER Experiment Name: At_Open_Flower_P Parameter: Plant Line Value: WS
  misc_feature: MA Experiment 20000265 PARAMETER Experiment Name: At_Open_Flower_P Parameter: Tissue Value: Closed Flower vs. Whole Plant
  misc_feature: MA Experiment ID: 20001247 Result: Up-regulated in Transcription
  misc_feature: MA Experiment 20001247 PARAMETER Experiment Name: At_Far-red-induction_P Parameter: Age (day) Value: 7
  misc_feature: MA Experiment 20001247 PARAMETER Experiment Name: At_Far-red-induction_P Parameter: Light Value: Far-red vs. White
  misc_feature: MA Experiment 20001247 PARAMETER Experiment Name: At_Far-red-induction_P Parameter: Organism Value: A. thaliana
  misc_feature: MA Experiment 20001247 PARAMETER Experiment Name: At_Far-red-induction_P Parameter: Plant Line Value: Columbia
  misc_feature: MA Experiment 20001247 PARAMETER Experiment Name: At_Far-red-induction_P Parameter: Timepoint (hr) Value: 1
  misc_feature: MA Experiment 20001247 PARAMETER Experiment Name: At_Far-red-induction_P Parameter: Tissue Value: Whole Plant
  misc_feature: MA Experiment ID: 20001450 Result: Up-regulated in Transcription
  misc_feature: MA Experiment 20001450 PARAMETER Experiment Name: At_Far-red-induction_P Parameter: Age (day) Value: 7
  misc_feature: MA Experiment 20001450 PARAMETER Experiment Name: At_Far-red-induction_P Parameter: Light Value: Far-red vs. White
  misc_feature: MA Experiment 20001450 PARAMETER Experiment Name: At_Far-red-induction_P Parameter: Organism Value: A. thaliana
  misc_feature: MA Experiment 20001450 PARAMETER Experiment Name: At_Far-red-induction_P Parameter: Plant Line Value: Columbia
  misc_feature: MA Experiment 20001450 PARAMETER Experiment Name: At_Far-red-induction_P Parameter: Timepoint (hr) Value: 8
  misc_feature: MA Experiment 20001450 PARAMETER Experiment Name: At_Far-red-induction_P Parameter: Tissue Value: Whole Plant
  misc_feature: MA Experiment ID: 20001451 Result: Up-regulated in Transcription
  misc_feature: MA Experiment 20001451 PARAMETER Experiment Name: At_Far-red-induction_P Parameter: Age (day) Value: 7
  misc_feature: MA Experiment 20001451 PARAMETER Experiment Name: At_Far-red-induction_P Parameter: Light Value: Far-red vs. White
  misc_feature: MA Experiment 20001451 PARAMETER Experiment Name: At_Far-red-induction_P Parameter: Organism Value: A. thaliana
  misc_feature: MA Experiment 20001451 PARAMETER Experiment Name: At_Far-red-induction_P Parameter: Plant Line Value: Columbia
  misc_feature: MA Experiment 20001451 PARAMETER Experiment Name: At_Far-red-induction_P Parameter: Timepoint (hr) Value: 24
  misc_feature: MA Experiment 20001451 PARAMETER Experiment Name: At_Far-red-induction_P Parameter: Tissue Value: Whole Plant

SEQ ID NO: 95360 - protein, 522 aa, Arabidopsis thaliana; identical to SEQ ID NO: 91604
  peptide (1)..(522): Ceres Seq. ID no. 12728466
  misc_feature (44)..(302): Pfam Name: Protein kinase domain Pfam Description: Protein kinase domain
  misc_feature (1)..(522): Homolog of NCBI NO: 15222023 NR Description: calcium-dependent protein kinase, putative; id: At1g12580.1, supported by cDNA: gi_16323175 [Arabidopsis
  misc_feature (3)..(522): Homolog of NCBI NO: 21064945 NR Description: CDPK-like protein [Solanum tuberosum]
  misc_feature (20)..(522): Homolog of NCBI NO: 25553562 NR Description: OSJNBa0038F22.11 [Oryza sativa (japonica
  misc_feature (20)..(522): Homolog of NCBI NO: 34898032 NR Description: ESTs AU030197(E50746),AU030196(E50746) correspond
  misc_feature (26)..(302): Homolog of NCBI NO: 2315983 NR Description: calmodulin-like domain protein kinase [Tortula
  misc_feature (27)..(302): Homolog of NCBI NO: 27819504 NR Description: putative calcium-dependent protein kinase [Oryza
  misc_feature (26)..(314): Homolog of NCBI NO: 5162877 NR Description: calcium-dependent protein kinase [Marchantia
  misc_feature (26)..(314): Homolog of NCBI NO: 5162878 NR Description: calcium-dependent protein kinase [Marchantia
  misc_feature (27)..(302): Homolog of NCBI NO: 33146743 NR Description: putative calcium-dependent protein kinase 2
  misc_feature (37)..(308): Homolog of NCBI NO: 15239716 NR Description: calcium-dependent protein kinase - like; protein

SEQ ID NO: 95361 - protein, 520 aa, Arabidopsis thaliana; identical to SEQ ID NO: 91605
  peptide (1)..(520): Ceres Seq. ID no. 12728467
  misc_feature (42)..(300): Pfam Name: Protein kinase domain Pfam Description: Protein kinase domain
  misc_feature (1)..(520): Homolog of NCBI NO: 15222023 NR Description: calcium-dependent protein kinase, putative; id: At1g12580.1, supported by cDNA: gi_16323175 [Arabidopsis
  misc_feature (1)..(520): Homolog of NCBI NO: 21064945 NR Description: CDPK-like protein [Solanum tuberosum]
  misc_feature (18)..(520): Homolog of NCBI NO: 25553562 NR Description: OSJNBa0038F22.11 [Oryza sativa (japonica
  misc_feature (18)..(520): Homolog of NCBI NO: 34898032 NR Description: ESTs AU030197(E50746),AU030196(E50746) correspond
  misc_feature (24)..(300): Homolog of NCBI NO: 2315983 NR Description: calmodulin-like domain protein kinase [Tortula
  misc_feature (25)..(300): Homolog of NCBI NO: 27819504 NR Description: putative calcium-dependent protein kinase [Oryza
  misc_feature (24)..(312): Homolog of NCBI NO: 5162877 NR Description: calcium-dependent protein kinase [Marchantia
  misc_feature (24)..(312): Homolog of NCBI NO: 5162878 NR Description: calcium-dependent protein kinase [Marchantia
  misc_feature (25)..(300): Homolog of NCBI NO: 33146743 NR Description: putative calcium-dependent protein kinase 2
  misc_feature (35)..(306): Homolog of NCBI NO: 15239716 NR Description: calcium-dependent protein kinase - like; protein

SEQ ID NO: 95362 - protein, 437 aa, Arabidopsis thaliana; identical to SEQ ID NO: 91606
  peptide (1)..(437): Ceres Seq. ID no. 12728468
  misc_feature (1)..(217): Pfam Name: Protein kinase domain Pfam Description: Protein kinase domain
  misc_feature (1)..(437): Homolog of NCBI NO: 15222023 NR Description: calcium-dependent protein kinase, putative; id: At1g12580.1, supported by cDNA: gi_16323175 [Arabidopsis
  misc_feature (1)..(437): Homolog of NCBI NO: 21064945 NR Description: CDPK-like protein [Solanum tuberosum]
  misc_feature (1)..(437): Homolog of NCBI NO: 25553562 NR Description: OSJNBa0038F22.11 [Oryza sativa (japonica
  misc_feature (1)..(437): Homolog of NCBI NO: 34898032 NR Description: ESTs AU030197(E50746),AU030196(E50746) correspond
  misc_feature (1)..(217): Homolog of NCBI NO: 2315983 NR Description: calmodulin-like domain protein kinase [Tortula
  misc_feature (1)..(217): Homolog of NCBI NO: 27819504 NR Description: putative calcium-dependent protein kinase [Oryza
  misc_feature (1)..(229): Homolog of NCBI NO: 5162877 NR Description: calcium-dependent protein kinase [Marchantia
  misc_feature (1)..(229): Homolog of NCBI NO: 5162878 NR Description: calcium-dependent protein kinase [Marchantia
  misc_feature (1)..(217): Homolog of NCBI NO: 33146743 NR Description: putative calcium-dependent protein kinase 2
  misc_feature (1)..(223): Homolog of NCBI NO: 15239716 NR Description: calcium-dependent protein kinase - like; protein

SEQ ID NO: 95363 - DNA, 630 bp, Arabidopsis thaliana; identical to SEQ ID NO: 91607
  misc_feature (1)..(630): Ceres Seq. ID no. 12728473
  misc_feature: MA Experiment ID: 20000184 Result: Down-regulated in Transcription
  misc_feature: MA Experiment 20000184 PARAMETER Experiment Name: At_Shoots__P Parameter: Age (day) Value: 7
  misc_feature: MA Experiment 20000184 PARAMETER Experiment Name: At_Shoots__P Parameter: Tissue Value: Shoots vs. Whole Plant
  misc_feature: MA Experiment ID: 20000185 Result: Down-regulated in Transcription
  misc_feature: MA Experiment 20000185 PARAMETER Experiment Name: At_Roots__P Parameter: Age (day) Value: 7 vs. 21
  misc_feature: MA Experiment 20000185 PARAMETER Experiment Name: At_Roots__P Parameter: Organism Value: A. thaliana
  misc_feature: MA Experiment 20000185 PARAMETER Experiment Name: At_Roots__P Parameter: Tissue Value: Roots vs. Whole Plant
  misc_feature: MA Experiment ID: 20000211 Result: Up-regulated in Transcription
  misc_feature: MA Experiment 20000211 PARAMETER Experiment Name: At_0.001percent_MeJA__P Parameter: Age (day) Value: 14
  misc_feature: MA Experiment 20000211 PARAMETER Experiment Name: At_0.001percent_MeJA__P Parameter: Organism Value: A. thaliana
  misc_feature: MA Experiment 20000211 PARAMETER Experiment Name: At_0.001percent_MeJA__P Parameter: Plant Line Value: WS
  misc_feature: MA Experiment 20000211 PARAMETER Experiment Name: At_0.001percent_MeJA__P Parameter: Timepoint (hr) Value: 1
  misc_feature: MA Experiment 20000211 PARAMETER Experiment Name: At_0.001percent_MeJA__P Parameter: Tissue Value: Aerial
  misc_feature: MA Experiment 20000211 PARAMETER Experiment Name: At_0.001percent_MeJA__P Parameter: Treatment Value: 0.001percent MeJA vs. No Treatment
  misc_feature: MA Experiment ID: 20000234 Result: Down-regulated in Transcription
  misc_feature: MA Experiment 20000234 PARAMETER Experiment Name: At_Siliques_P Parameter: Age (day) Value: 21
  misc_feature: MA Experiment 20000234 PARAMETER Experiment Name: At_Siliques_P Parameter: Organism Value: A. thaliana
  misc_feature: MA Experiment 20000234 PARAMETER Experiment Name: At_Siliques_P Parameter: Plant Line Value: WS
  misc_feature: MA Experiment 20000234 PARAMETER Experiment Name: At_Siliques_P Parameter: Tissue Value: Less Than 5mm Siliques vs. Whole Plant
  misc_feature: MA Experiment ID: 20000235 Result: Down-regulated in Transcription
  misc_feature: MA Experiment 20000235 PARAMETER Experiment Name: At_Siliques_P Parameter: Age (day) Value: 21
  misc_feature: MA Experiment 20000235 PARAMETER Experiment Name: At_Siliques_P Parameter: Organism Value: A. thaliana
  misc_feature: MA Experiment 20000235 PARAMETER Experiment Name: At_Siliques_P Parameter: Plant Line Value: WS
  misc_feature: MA Experiment 20000235 PARAMETER Experiment Name: At_Siliques_P Parameter: Tissue Value: 5-10mm Siliques vs. Whole Plant
  misc_feature: MA Experiment ID: 20000264 Result: Down-regulated in Transcription
  misc_feature: MA Experiment 20000264 PARAMETER Experiment Name: At_Open_Flower_P Parameter: Age (day) Value: 21
  misc_feature: MA Experiment 20000264 PARAMETER Experiment Name: At_Open_Flower_P Parameter: Plant Line Value: WS
  misc_feature: MA Experiment 20000264 PARAMETER Experiment Name: At_Open_Flower_P Parameter: Tissue Value: Open Flower vs. Whole Plant
  misc_feature: MA Experiment ID: 20000265 Result: Down-regulated in Transcription
  misc_feature: MA Experiment 20000265 PARAMETER Experiment Name: At_Open_Flower_P Parameter: Age (day) Value: 21
  misc_feature: MA Experiment 20000265 PARAMETER Experiment Name: At_Open_Flower_P Parameter: Plant Line Value: WS
  misc_feature: MA Experiment 20000265 PARAMETER Experiment Name: At_Open_Flower_P Parameter: Tissue Value: Closed Flower vs. Whole Plant
  misc_feature: MA Experiment ID: 20000267 Result: Up-regulated in Transcription
  misc_feature: MA Experiment 20000267 PARAMETER Experiment Name: At_Drought_P Parameter: Age (day) Value: 7
  misc_feature: MA Experiment 20000267 PARAMETER Experiment Name: At_Drought_P Parameter: Organism Value: A. thaliana
  misc_feature: MA Experiment 20000267 PARAMETER Experiment Name: At_Drought_P Parameter: Plant Line Value: WS
  misc_feature: MA Experiment 20000267 PARAMETER Experiment Name: At_Drought_P Parameter: Timepoint (hr) Value: 6
  misc_feature: MA Experiment 20000267 PARAMETER Experiment Name: At_Drought_P Parameter: Tissue Value: Whole Plant
  misc_feature: MA Experiment 20000267 PARAMETER Experiment Name: At_Drought_P Parameter: Treatment Value: Drought vs. No Drought
  misc_feature: MA Experiment ID: 20000286 Result: Down-regulated in Transcription
  misc_feature: MA Experiment 20000286 PARAMETER Experiment Name: At_Open_Flower_P Parameter: Age (day) Value: 21
  misc_feature: MA Experiment 20000286 PARAMETER Experiment Name: At_Open_Flower_P Parameter: Plant Line Value: WS
  misc_feature: MA Experiment 20000286 PARAMETER Experiment Name: At_Open_Flower_P Parameter: Tissue Value: Half Open vs. Whole Plant
  misc_feature: MA Experiment ID: 20000438 Result: Down-regulated in Transcription
  misc_feature: MA Experiment 20000438 PARAMETER Experiment Name: At_Shoots__P Parameter: Age (day) Value: 14
  misc_feature: MA Experiment 20000438 PARAMETER Experiment Name: At_Shoots__P Parameter: Tissue Value: Shoots vs. Whole Plant
  misc_feature: MA Experiment ID: 20000439 Result: Down-regulated in Transcription
  misc_feature: MA Experiment 20000439 PARAMETER Experiment Name: At_Roots__P Parameter: Age (day) Value: 14 vs. 21
  misc_feature: MA Experiment 20000439 PARAMETER Experiment Name: At_Roots__P Parameter: Organism Value: A. thaliana
  misc_feature: MA Experiment 20000439 PARAMETER Experiment Name: At_Roots__P Parameter: Tissue Value: Roots vs. Whole Plant
  misc_feature: MA Experiment ID: 20000495 Result: Down-regulated in Transcription
  misc_feature: MA Experiment 20000495 PARAMETER Experiment Name: At_Guard_Cells_P Parameter: Harvest Date Value: 8/2/2002
  misc_feature: MA Experiment 20000495 PARAMETER Experiment Name: At_Guard_Cells_P Parameter: Organism Value: A. thaliana
  misc_feature: MA Experiment 20000495 PARAMETER Experiment Name: At_Guard_Cells_P Parameter: Tissue Value: Guard Cells vs. Leaves
  misc_feature: MA Experiment ID: 20000496 Result: Down-regulated in Transcription
  misc_feature: MA Experiment 20000496 PARAMETER Experiment Name: At_Guard_Cells_P Parameter: Harvest Date Value: 7/19/2002
  misc_feature: MA Experiment 20000496 PARAMETER Experiment Name: At_Guard_Cells_P Parameter: Organism Value: Canola
  misc_feature: MA Experiment 20000496 PARAMETER Experiment Name: At_Guard_Cells_P Parameter: Tissue Value: Guard Cells vs. Leaves
  misc_feature: MA Experiment ID: 20000527 Result: Up-regulated in Transcription
  misc_feature: MA Experiment 20000527 PARAMETER Experiment Name: At_10percent_PEG_P Parameter: Age (day) Value: 20
  misc_feature: MA Experiment 20000527 PARAMETER Experiment Name: At_10percent_PEG_P Parameter: Organism Value: A. thaliana
  misc_feature: MA Experiment 20000527 PARAMETER Experiment Name: At_10percent_PEG_P Parameter: Plant Line Value: WS
  misc_feature: MA Experiment 20000527 PARAMETER Experiment Name: At_10percent_PEG_P Parameter: Timepoint (day) Value: 20
  misc_feature: MA Experiment 20000527 PARAMETER Experiment Name: At_10percent_PEG_P Parameter: Tissue Value: Whole Plant
  misc_feature: MA Experiment 20000527 PARAMETER Experiment Name: At_10percent_PEG_P Parameter: Treatment Value: 10percent PEG vs. No Treatment
  misc_feature: MA Experiment ID: 20000794 Result: Down-regulated in Transcription
  misc_feature: MA Experiment 20000794 PARAMETER Experiment Name: At_Petals_P Parameter: Age (day) Value: 23-25 days
  misc_feature: MA Experiment 20000794 PARAMETER Experiment Name: At_Petals_P Parameter: Plant Line Value: WS
  misc_feature: MA Experiment 20000794 PARAMETER Experiment Name: At_Petals_P Parameter: Tissue Value: Petals vs. Whole plant
  misc_feature: MA Experiment ID: 20001451 Result: Up-regulated in Transcription
  misc_feature: MA Experiment 20001451 PARAMETER Experiment Name: At_Far-red-induction_P Parameter: Age (day) Value: 7
  misc_feature: MA Experiment 20001451 PARAMETER Experiment Name: At_Far-red-induction_P Parameter: Light Value: Far-red vs. White
  misc_feature: MA Experiment 20001451 PARAMETER Experiment Name: At_Far-red-induction_P Parameter: Organism Value: A. thaliana
  misc_feature: MA Experiment 20001451 PARAMETER Experiment Name: At_Far-red-induction_P Parameter: Plant Line Value: Columbia
  misc_feature: MA Experiment 20001451 PARAMETER Experiment Name: At_Far-red-induction_P Parameter: Timepoint (hr) Value: 24
  misc_feature: MA Experiment 20001451 PARAMETER Experiment Name: At_Far-red-induction_P Parameter: Tissue Value: Whole Plant
  misc_feature: MA Experiment ID: 20001557 Result: Up-regulated in Transcription
  misc_feature: MA Experiment 20001557 PARAMETER Experiment Name: At_Drought_Soil_Dry_P Parameter: Age (day) Value: 27
  misc_feature: MA Experiment 20001557 PARAMETER Experiment Name: At_Drought_Soil_Dry_P Parameter: Organism Value: A. thaliana
  misc_feature: MA Experiment 20001557 PARAMETER Experiment Name: At_Drought_Soil_Dry_P Parameter: Plant Line Value: WS
  misc_feature: MA Experiment 20001557 PARAMETER Experiment Name: At_Drought_Soil_Dry_P Parameter: Post Timepoint (hr) Value: 3
  misc_feature: MA Experiment 20001557 PARAMETER Experiment Name: At_Drought_Soil_Dry_P Parameter: Post-Treatment Value: Re-Water vs. No Drought
  misc_feature: MA Experiment 20001557 PARAMETER Experiment Name: At_Drought_Soil_Dry_P Parameter: Timepoint (day) Value: 13
  misc_feature: MA Experiment 20001557 PARAMETER Experiment Name: At_Drought_Soil_Dry_P Parameter: Treatment Value: Drought vs. No Drought
  misc_feature: MA Experiment ID: 20001759 Result: Down-regulated in Transcription
  misc_feature: MA Experiment 20001759 PARAMETER Experiment Name: At_50mM_NH4NO3_L-to-H_P Parameter: Timepoint (hr) Value: 1
  misc_feature: MA Experiment 20001759 PARAMETER Experiment Name: At_50mM_NH4NO3_L-to-H_P Parameter: Tissue Value: Siliques
  misc_feature: MA Experiment 20001759 PARAMETER Experiment Name: At_50mM_NH4NO3_L-to-H_P Parameter: Treatment Value: 50mM NH4NO3 vs 100mM Mannitol
  misc_feature: MA Experiment ID: 20001760 Result: Down-regulated in Transcription
  misc_feature: MA Experiment 20001760 PARAMETER Experiment Name: At_50mM_NH4NO3_L-to-H_P Parameter: Timepoint (hr) Value: 2
  misc_feature: MA Experiment 20001760 PARAMETER Experiment Name: At_50mM_NH4NO3_L-to-H_P Parameter: Tissue Value: Siliques
  misc_feature: MA Experiment 20001760 PARAMETER Experiment Name: At_50mM_NH4NO3_L-to-H_P Parameter: Treatment Value: 50mM NH4NO3 vs 100mM Mannitol
  misc_feature: MA Experiment ID: 20001761 Result: Down-regulated in Transcription
  misc_feature: MA Experiment 20001761 PARAMETER Experiment Name: At_50mM_NH4NO3_L-to-H_P Parameter: Timepoint (hr) Value: 4
  misc_feature: MA Experiment 20001761 PARAMETER Experiment Name: At_50mM_NH4NO3_L-to-H_P Parameter: Tissue Value: Siliques
  misc_feature: MA Experiment 20001761 PARAMETER Experiment Name: At_50mM_NH4NO3_L-to-H_P Parameter: Treatment Value: 50mM NH4NO3 vs 100mM Mannitol
  misc_feature: MA Experiment ID: 20001904 Result: Down-regulated in Transcription
  misc_feature: MA Experiment 20001904 PARAMETER Experiment Name: At_Drought_Reproduction_P Parameter: Age (day) Value: 37
  misc_feature: MA Experiment 20001904 PARAMETER Experiment Name: At_Drought_Reproduction_P Parameter: Organism Value: A. thaliana
  misc_feature: MA Experiment 20001904 PARAMETER Experiment Name: At_Drought_Reproduction_P Parameter: Plant Line Value: WS
  misc_feature: MA Experiment 20001904 PARAMETER Experiment Name: At_Drought_Reproduction_P Parameter: Timepoint (day) Value: 7
  misc_feature: MA Experiment 20001904 PARAMETER Experiment Name: At_Drought_Reproduction_P Parameter: Tissue Value: Rosettes
  misc_feature: MA Experiment 20001904 PARAMETER Experiment Name: At_Drought_Reproduction_P Parameter: Treatment Value: Drought vs. No Drought
  misc_feature: MA Experiment ID: 20001910 Result: Down-regulated in Transcription
  misc_feature: MA Experiment 20001910 PARAMETER Experiment Name: At_Drought_Reproduction_P Parameter: Age (day) Value: 37
  misc_feature: MA Experiment 20001910 PARAMETER Experiment Name: At_Drought_Reproduction_P Parameter: Organism Value: A. thaliana
  misc_feature: MA Experiment 20001910 PARAMETER Experiment Name: At_Drought_Reproduction_P Parameter: Plant Line Value: WS
  misc_feature: MA Experiment 20001910 PARAMETER Experiment Name: At_Drought_Reproduction_P Parameter: Timepoint (day) Value: 7
  misc_feature: MA Experiment 20001910 PARAMETER Experiment Name: At_Drought_Reproduction_P Parameter: Tissue Value: Flowers
  misc_feature: MA Experiment 20001910 PARAMETER Experiment Name: At_Drought_Reproduction_P Parameter: Treatment Value: Drought vs. No Drought

SEQ ID NO: 95364 - protein, 209 aa, Arabidopsis thaliana; identical to SEQ ID NO: 91608
  peptide (1)..(209): Ceres Seq. ID no. 12728474
  misc_feature (27)..(91): Pfam Name: AP2 domain Pfam Description: AP2 domain
  misc_feature (1)..(209): Homolog of NCBI NO: 15222028 NR Description: transcriptional activator CBF1, putative; protein At1g12610.1 [Arabidopsis thaliana] >gi|25350646|pir||H86259
  misc_feature (1)..(131): Homolog of NCBI NO: 15221664 NR Description: transcription factor DREB1A, putative; protein At1g63030.1 [Arabidopsis thaliana] >gi|25404392|pir||E96655
  misc_feature (151)..(207): Homolog of NCBI NO: 15221664 NR Description: transcription factor DREB1A, putative; protein At1g63030.1 [Arabidopsis thaliana] >gi|25404392|pir||E96655
  misc_feature (2)..(207): Homolog of NCBI NO: 23495460 NR Description: dehydration responsive element binding protein 1
  misc_feature (1)..(207): Homolog of NCBI NO: 23495458 NR Description: dehydratiion responsive element binding protein 1
  misc_feature (2)..(124): Homolog of NCBI NO: 37147896 NR Description: CaCBF1B [Capsicum annuum]
  misc_feature (2)..(124): Homolog of NCBI NO: 40647095 NR Description: DREB-like protein 1 [Capsicum annuum]
  misc_feature (2)..(121): Homolog of NCBI NO: 12003384 NR Description: Avr9/Cf-9 rapidly elicited protein 111B
  misc_feature (2)..(122): Homolog of NCBI NO: 18535580 NR Description: putative transcriptional activator CBF1
  misc_feature (8)..(207): Homolog of NCBI NO: 38683266 NR Description: Cbcbf [Capsella bursa-pastoris]

SEQ ID NO: 95365 - protein, 199 aa, Arabidopsis thaliana; identical to SEQ ID NO: 91609
  peptide (1)..(199): Ceres Seq. ID no. 12728475
  misc_feature (17)..(81): Pfam Name: AP2 domain Pfam Description: AP2 domain
  misc_feature (1)..(199): Homolog of NCBI NO: 15222028 NR Description: transcriptional activator CBF1, putative; protein At1g12610.1 [Arabidopsis thaliana] >gi|25350646|pir||H86259
  misc_feature (1)..(121): Homolog of NCBI NO: 15221664 NR Description: transcription factor DREB1A, putative; protein At1g63030.1 [Arabidopsis thaliana] >gi|25404392|pir||E96655
  misc_feature (141)..(197): Homolog of NCBI NO: 15221664 NR Description: transcription factor DREB1A, putative; protein At1g63030.1 [Arabidopsis thaliana] >gi|25404392|pir||E96655
  misc_feature (1)..(197): Homolog of NCBI NO: 23495460 NR Description: dehydration responsive element binding protein 1
  misc_feature (1)..(197): Homolog of NCBI NO: 23495458 NR Description: dehydratiion responsive element binding protein 1
  misc_feature (1)..(114): Homolog of NCBI NO: 37147896 NR Description: CaCBF1B [Capsicum annuum]
  misc_feature (1)..(114): Homolog of NCBI NO: 40647095 NR Description: DREB-like protein 1 [Capsicum annuum]
  misc_feature (1)..(111): Homolog of NCBI NO: 12003384 NR Description: Avr9/Cf-9 rapidly elicited protein 111B
  misc_feature (1)..(112): Homolog of NCBI NO: 18535580 NR Description: putative transcriptional activator CBF1
  misc_feature (1)..(197): Homolog of NCBI NO: 38683266 NR Description: Cbcbf [Capsella bursa-pastoris]

SEQ ID NO: 95366 - protein, 146 aa, Arabidopsis thaliana; identical to SEQ ID NO: 91610
  peptide (1)..(146): Ceres Seq. ID no. 12728476
  misc_feature (1)..(146): Homolog of NCBI NO: 15222028 NR Description: transcriptional activator CBF1, putative; protein At1g12610.1 [Arabidopsis thaliana] >gi|25350646|pir||H86259
  misc_feature (1)..(68): Homolog of NCBI NO: 15221664 NR Description: transcription factor DREB1A, putative; protein At1g63030.1 [Arabidopsis thaliana] >gi|25404392|pir||E96655
  misc_feature (88)..(144): Homolog of NCBI NO: 15221664 NR Description: transcription factor DREB1A, putative; protein At1g63030.1 [Arabidopsis thaliana] >gi|25404392|pir||E96655
  misc_feature (1)..(144): Homolog of NCBI NO: 23495460 NR Description: dehydration responsive element binding protein 1
  misc_feature (1)..(144): Homolog of NCBI NO: 23495458 NR Description: dehydratiion responsive element binding protein 1
  misc_feature (1)..(61): Homolog of NCBI NO: 37147896 NR Description: CaCBF1B [Capsicum annuum]
  misc_feature (1)..(61): Homolog of NCBI NO: 40647095 NR Description: DREB-like protein 1 [Capsicum annuum]
  misc_feature (1)..(58): Homolog of NCBI NO: 12003384 NR Description: Avr9/Cf-9 rapidly elicited protein 111B
  misc_feature (1)..(59): Homolog of NCBI NO: 18535580 NR Description: putative transcriptional activator CBF1
  misc_feature (1)..(144): Homolog of NCBI NO: 38683266 NR Description: Cbcbf [Capsella bursa-pastoris]

SEQ ID NO: 95367 - DNA, 567 bp, Arabidopsis thaliana; identical to SEQ ID NO: 91611
  misc_feature (1)..(567): Ceres Seq. ID no. 12728481
  misc_feature: MA Experiment ID: 20000184 Result: Up-regulated in Transcription
  misc_feature: MA Experiment 20000184 PARAMETER Experiment Name: At_Shoots__P Parameter: Age (day) Value: 7
  misc_feature: MA Experiment 20000184 PARAMETER Experiment Name: At_Shoots__P Parameter: Tissue Value: Shoots vs. Whole Plant
  misc_feature: MA Experiment ID: 20001451 Result: Up-regulated in Transcription
  misc_feature: MA Experiment 20001451 PARAMETER Experiment Name: At_Far-red-induction_P Parameter: Age (day) Value: 7
  misc_feature: MA Experiment 20001451 PARAMETER Experiment Name: At_Far-red-induction_P Parameter: Light Value: Far-red vs. White
  misc_feature: MA Experiment 20001451 PARAMETER Experiment Name: At_Far-red-induction_P Parameter: Organism Value: A. thaliana
  misc_feature: MA Experiment 20001451 PARAMETER Experiment Name: At_Far-red-induction_P Parameter: Plant Line Value: Columbia
  misc_feature: MA Experiment 20001451 PARAMETER Experiment Name: At_Far-red-induction_P Parameter: Timepoint (hr) Value: 24
  misc_feature: MA Experiment 20001451 PARAMETER Experiment Name: At_Far-red-induction_P Parameter: Tissue Value: Whole Plant

SEQ ID NO: 95368 - protein, 188 aa, Arabidopsis thaliana; identical to SEQ ID NO: 91612
  peptide (1)..(188): Ceres Seq. ID no. 12728482
  misc_feature (12)..(75): Pfam Name: AP2 domain Pfam Description: AP2 domain
  misc_feature (1)..(188): Homolog of NCBI NO: 15222031 NR Description: DRE binding protein; protein id: At1g12630.1
  misc_feature (6)..(188): Homolog of NCBI NO: 25404394 NR Description: hypothetical protein F16M19.1 [imported] - thaliana >gi|12323257|gb|AAG51609.1|AC010795_13 transcription
  misc_feature (6)..(178): Homolog of NCBI NO: 8493594 NR Description: Contains similarity to transcriptional activator from Arabidopsis thaliana gb|U77378 and contains an AP2 PF|00847
  misc_feature (7)..(188): Homolog of NCBI NO: 15242262 NR Description: DRE binding protein; protein id: At5g52020.1, by cDNA: 251466. [Arabidopsis thaliana] contains similarity to AP2 domain transcription
  misc_feature (11)..(188): Homolog of NCBI NO: 15227980 NR Description: DRE binding protein; protein id: At2g36450.1 thaliana] >gi|25408476|pir||H84780 probable AP2 domain
  misc_feature (2)..(182): Homolog of NCBI NO: 14140155 NR Description: putative AP2 domain transcription factor [Oryza
  misc_feature (11)..(104): Homolog of NCBI NO: 17352283 NR Description: CBF-like protein [Brassica napus]
  misc_feature (121)..(188): Homolog of NCBI NO: 17352283 NR Description: CBF-like protein [Brassica napus]
  misc_feature (11)..(188): Homolog of NCBI NO: 18416562 NR Description: C-repeat/DRE binding factor 1 (CBF1) (DREB1B); id: At4g25490.1, supported by cDNA: gi_1899057, supported by gi_3738225 [Arabidopsis thaliana] >gi|7488377|pir||JE0298
  misc_feature (11)..(188): Homolog of NCBI NO: 1899058 NR Description: transcriptional activator CBF1 [Arabidopsis >gi|4091982|gb|AAC99369.1| CRT/CRE binding factor 1 [Arabidopsis

SEQ ID NO: 95369 - protein, 144 aa, Arabidopsis thaliana; identical to SEQ ID NO: 91613
  peptide (1)..(144): Ceres Seq. ID no. 12728483
  misc_feature (1)..(144): Homolog of NCBI NO: 15222031 NR Description: DRE binding protein; protein id: At1g12630.1
  misc_feature (1)..(144): Homolog of NCBI NO: 25404394 NR Description: hypothetical protein F16M19.1 [imported] - thaliana >gi|12323257|gb|AAG51609.1|AC010795_13 transcription
  misc_feature (1)..(134): Homolog of NCBI NO: 8493594 NR Description: Contains similarity to transcriptional activator from Arabidopsis thaliana gb|U77378 and contains an AP2 PF|00847
  misc_feature (1)..(144): Homolog of NCBI NO: 15242262 NR Description: DRE binding protein; protein id: At5g52020.1, by cDNA: 251466. [Arabidopsis thaliana] contains similarity to AP2 domain transcription
  misc_feature (1)..(144): Homolog of NCBI NO: 15227980 NR Description: DRE binding protein; protein id: At2g36450.1 thaliana] >gi|25408476|pir||H84780 probable AP2 domain
  misc_feature (1)..(138): Homolog of NCBI NO: 14140155 NR Description: putative AP2 domain transcription factor [Oryza
  misc_feature (1)..(60): Homolog of NCBI NO: 17352283 NR Description: CBF-like protein [Brassica napus]
  misc_feature (77)..(144): Homolog of NCBI NO: 17352283 NR Description: CBF-like protein [Brassica napus]
  misc_feature (1)..(144): Homolog of NCBI NO: 18416562 NR Description: C-repeat/DRE binding factor 1 (CBF1) (DREB1B); id: At4g25490.1, supported by cDNA: gi_1899057, supported by gi_3738225 [Arabidopsis thaliana] >gi|7488377|pir||JE0298
  misc_feature (1)..(144): Homolog of NCBI NO: 1899058 NR Description: transcriptional activator CBF1 [Arabidopsis >gi|4091982|gb|AAC99369.1| CRT/CRE binding factor 1 [Arabidopsis

SEQ ID NO: 95370 - protein, 141 aa, Arabidopsis thaliana; identical to SEQ ID NO: 91614
  peptide (1)..(141): Ceres Seq. ID no. 12728484
  misc_feature (1)..(141): Homolog of NCBI NO: 15222031 NR Description: DRE binding protein; protein id: At1g12630.1
  misc_feature (1)..(141): Homolog of NCBI NO: 25404394 NR Description: hypothetical protein F16M19.1 [imported] - thaliana >gi|12323257|gb|AAG51609.1|AC010795_13 transcription
  misc_feature (1)..(131): Homolog of NCBI NO: 8493594 NR Description: Contains similarity to transcriptional activator from Arabidopsis thaliana gb|U77378 and contains an AP2 PF|00847
  misc_feature (1)..(141): Homolog of NCBI NO: 15242262 NR Description: DRE binding protein; protein id: At5g52020.1, by cDNA: 251466. [Arabidopsis thaliana] contains similarity to AP2 domain transcription
  misc_feature (1)..(141): Homolog of NCBI NO: 15227980 NR Description: DRE binding protein; protein id: At2g36450.1 thaliana] >gi|25408476|pir||H84780 probable AP2 domain
  misc_feature (1)..(135): Homolog of NCBI NO: 14140155 NR Description: putative AP2 domain transcription factor [Oryza
  misc_feature (1)..(57): Homolog of NCBI NO: 17352283 NR Description: CBF-like protein [Brassica napus]
  misc_feature (74)..(141): Homolog of NCBI NO: 17352283 NR Description: CBF-like protein [Brassica napus]
  misc_feature (1)..(141): Homolog of NCBI NO: 18416562 NR Description: C-repeat/DRE binding factor 1 (CBF1) (DREB1B); id: At4g25490.1, supported by cDNA: gi_1899057, supported by gi_3738225 [Arabidopsis thaliana] >gi|7488377|pir||JE0298
  misc_feature (1)..(141): Homolog of NCBI NO: 1899058 NR Description: transcriptional activator CBF1 [Arabidopsis >gi|4091982|gb|AAC99369.1| CRT/CRE binding factor 1 [Arabidopsis

SEQ ID NO: 95371 - DNA, 1437 bp, Arabidopsis thaliana; identical to SEQ ID NO: 91615
  misc_feature (1)..(1437): Ceres Seq. ID no. 12728504
  misc_feature: MA Experiment ID: 20000180 Result: Up-regulated in Transcription
  misc_feature: MA Experiment 20000180 PARAMETER Experiment Name: At_Germinating_Seeds_P Parameter: Age (hr) Value: 24 vs. 0
  misc_feature: MA Experiment 20000180 PARAMETER Experiment Name: At_Germinating_Seeds_P Parameter: Tissue Value: Germinating Seeds
  misc_feature: MA Experiment ID: 20000436 Result: Down-regulated in Transcription
  misc_feature: MA Experiment 20000436 PARAMETER Experiment Name: At_Drought_P Parameter: Age (day) Value: 7
  misc_feature: MA Experiment 20000436 PARAMETER Experiment Name: At_Drought_P Parameter: Organism Value: A. thaliana
  misc_feature: MA Experiment 20000436 PARAMETER Experiment Name: At_Drought_P Parameter: Plant Line Value: WS
  misc_feature: MA Experiment 20000436 PARAMETER Experiment Name: At_Drought_P Parameter: Timepoint (hr) Value: 12
  misc_feature: MA Experiment 20000436 PARAMETER Experiment Name: At_Drought_P Parameter: Tissue Value: Whole Plant
  misc_feature: MA Experiment 20000436 PARAMETER Experiment Name: At_Drought_P Parameter: Treatment Value: Drought vs. No Drought
  misc_feature: MA Experiment ID: 20000437 Result: Down-regulated in Transcription
  misc_feature: MA Experiment 20000437 PARAMETER Experiment Name: At_Drought_P Parameter: Age (day) Value: 8
  misc_feature: MA Experiment 20000437 PARAMETER Experiment Name: At_Drought_P Parameter: Organism Value: A. thaliana
  misc_feature: MA Experiment 20000437 PARAMETER Experiment Name: At_Drought_P Parameter: Plant Line Value: WS
  misc_feature: MA Experiment 20000437 PARAMETER Experiment Name: At_Drought_P Parameter: Timepoint (hr) Value: 24
  misc_feature: MA Experiment 20000437 PARAMETER Experiment Name: At_Drought_P Parameter: Tissue Value: Whole Plant
  misc_feature: MA Experiment 20000437 PARAMETER Experiment Name: At_Drought_P Parameter: Treatment Value: Drought vs. No Drought
  misc_feature: MA Experiment ID: 20000439 Result: Up-regulated in Transcription
  misc_feature: MA Experiment 20000439 PARAMETER Experiment Name: At_Roots__P Parameter: Age (day) Value: 14 vs. 21
  misc_feature: MA Experiment 20000439 PARAMETER Experiment Name: At_Roots__P Parameter: Organism Value: A. thaliana
  misc_feature: MA Experiment 20000439 PARAMETER Experiment Name: At_Roots__P Parameter: Tissue Value: Roots vs. Whole Plant
  misc_feature: MA Experiment ID: 20000527 Result: Up-regulated in Transcription
  misc_feature: MA Experiment 20000527 PARAMETER Experiment Name: At_10percent_PEG_P Parameter: Age (day) Value: 20
  misc_feature: MA Experiment 20000527 PARAMETER Experiment Name: At_10percent_PEG_P Parameter: Organism Value: A. thaliana
  misc_feature: MA Experiment 20000527 PARAMETER Experiment Name: At_10percent_PEG_P Parameter: Plant Line Value: WS
  misc_feature: MA Experiment 20000527 PARAMETER Experiment Name: At_10percent_PEG_P Parameter: Timepoint (day) Value: 20
  misc_feature: MA Experiment 20000527 PARAMETER Experiment Name: At_10percent_PEG_P Parameter: Tissue Value: Whole Plant
  misc_feature: MA Experiment 20000527 PARAMETER Experiment Name: At_10percent_PEG_P Parameter: Treatment Value: 10percent PEG vs. No Treatment
  misc_feature: MA Experiment ID: 20001450 Result: Down-regulated in Transcription
  misc_feature: MA Experiment 20001450 PARAMETER Experiment Name: At_Far-red-induction_P Parameter: Age (day) Value: 7
  misc_feature: MA Experiment 20001450 PARAMETER Experiment Name: At_Far-red-induction_P Parameter: Light Value: Far-red vs. White
  misc_feature: MA Experiment 20001450 PARAMETER Experiment Name: At_Far-red-induction_P Parameter: Organism Value: A. thaliana
  misc_feature: MA Experiment 20001450 PARAMETER Experiment Name: At_Far-red-induction_P Parameter: Plant Line Value: Columbia
  misc_feature: MA Experiment 20001450 PARAMETER Experiment Name: At_Far-red-induction_P Parameter: Timepoint (hr) Value: 8
  misc_feature: MA Experiment 20001450 PARAMETER Experiment Name: At_Far-red-induction_P Parameter: Tissue Value: Whole Plant

SEQ ID NO: 95372 - protein, 478 aa, Arabidopsis thaliana; identical to SEQ ID NO: 91616
  peptide (1)..(478): Ceres Seq. ID no. 12728505
  misc_feature (1)..(478): Homolog of NCBI NO: 9502380 NR Description: T12C24.27 [Arabidopsis thaliana]
  misc_feature (1)..(478): Homolog of NCBI NO: 30682922 NR Description: cytochrome P450, putative [Arabidopsis thaliana]
  misc_feature (3)..(476): Homolog of NCBI NO: 20520627 NR Description: putative cytochrome P450 [Oryza sativa (japonica
  misc_feature (3)..(476): Homolog of NCBI NO: 38567920 NR Description: OSJNBa0088I22.16 [Oryza sativa (japonica
  misc_feature (10)..(473): Homolog of NCBI NO: 38567916 NR Description: OSJNBa0088I22.12 [Oryza sativa (japonica
  misc_feature (8)..(476): Homolog of NCBI NO: 18483228 NR Description: putative cytochrome P450-like protein [Sorghum
  misc_feature (75)..(476): Homolog of NCBI NO: 27764671 NR Description: putative hydroxylase [Oryza sativa (japonica
  misc_feature (2)..(404): Homolog of NCBI NO: 38567917 NR Description: OSJNBa0088I22.13 [Oryza sativa (japonica
  misc_feature (1)..(465): Homolog of NCBI NO: 15222806 NR Description: cytochrome P450, putative; protein id:
  misc_feature (139)..(449): Homolog of NCBI NO: 28564842 NR Description: putative cytochrome P450 [Oryza sativa (japonica

SEQ ID NO: 95373 - protein, 443 aa, Arabidopsis thaliana; identical to SEQ ID NO: 91617
  peptide (1)..(443): Ceres Seq. ID no. 12728506
  misc_feature (1)..(443): Homolog of NCBI NO: 9502380 NR Description: T12C24.27 [Arabidopsis thaliana]
  misc_feature (1)..(443): Homolog of NCBI NO: 30682922 NR Description: cytochrome P450, putative [Arabidopsis thaliana]
  misc_feature (1)..(441): Homolog of NCBI NO: 20520627 NR Description: putative cytochrome P450 [Oryza sativa (japonica
  misc_feature (1)..(441): Homolog of NCBI NO: 38567920 NR Description: OSJNBa0088I22.16 [Oryza sativa (japonica
  misc_feature (1)..(438): Homolog of NCBI NO: 38567916 NR Description: OSJNBa0088I22.12 [Oryza sativa (japonica
  misc_feature (1)..(441): Homolog of NCBI NO: 18483228 NR Description: putative cytochrome P450-like protein [Sorghum
  misc_feature (40)..(441): Homolog of NCBI NO: 27764671 NR Description: putative hydroxylase [Oryza sativa (japonica
  misc_feature (1)..(369): Homolog of NCBI NO: 38567917 NR Description: OSJNBa0088I22.13 [Oryza sativa (japonica
  misc_feature (1)..(430): Homolog of NCBI NO: 15222806 NR Description: cytochrome P450, putative; protein id:
  misc_feature (104)..(414): Homolog of NCBI NO: 28564842 NR Description: putative cytochrome P450 [Oryza sativa (japonica

SEQ ID NO: 95374 - protein, 355 aa, Arabidopsis thaliana; identical to SEQ ID NO: 91618
  peptide (1)..(355): Ceres Seq. ID no. 12728507
  misc_feature (1)..(355): Homolog of NCBI NO: 9502380 NR Description: T12C24.27 [Arabidopsis thaliana]
  misc_feature (1)..(355): Homolog of NCBI NO: 30682922 NR Description: cytochrome P450, putative [Arabidopsis thaliana]
  misc_feature (1)..(353): Homolog of NCBI NO: 20520627 NR Description: putative cytochrome P450 [Oryza sativa (japonica
  misc_feature (1)..(353): Homolog of NCBI NO: 38567920 NR Description: OSJNBa0088I22.16 [Oryza sativa (japonica
  misc_feature (1)..(350): Homolog of NCBI NO: 38567916 NR Description: OSJNBa0088I22.12 [Oryza sativa (japonica
  misc_feature (1)..(353): Homolog of NCBI NO: 18483228 NR Description: putative cytochrome P450-like protein [Sorghum
  misc_feature (1)..(353): Homolog of NCBI NO: 27764671 NR Description: putative hydroxylase [Oryza sativa (japonica
  misc_feature (1)..(281): Homolog of NCBI NO: 38567917 NR Description: OSJNBa0088I22.13 [Oryza sativa (japonica
  misc_feature (1)..(342): Homolog of NCBI NO: 15222806 NR Description: cytochrome P450, putative; protein id:
  misc_feature (16)..(326): Homolog of NCBI NO: 28564842 NR Description: putative cytochrome P450 [Oryza sativa (japonica

SEQ ID NO: 95375 - DNA, 1107 bp, Arabidopsis thaliana; identical to SEQ ID NO: 91619
  misc_feature (1)..(1107): Ceres Seq. ID no. 12728512
  misc_feature: MA Experiment ID: 20000355 Result: Down-regulated in Transcription
  misc_feature: MA Experiment 20000355 PARAMETER Experiment Name: At_Siliques_Sub_P Parameter: Age (day) Value: 21
  misc_feature: MA Experiment 20000355 PARAMETER Experiment Name: At_Siliques_Sub_P Parameter: Organism Value: A. thaliana
  misc_feature: MA Experiment 20000355 PARAMETER Experiment Name: At_Siliques_Sub_P Parameter: Plant Line Value: WS
  misc_feature: MA Experiment 20000355 PARAMETER Experiment Name: At_Siliques_Sub_P Parameter: Tissue Value: Less Than 5mm Siliques vs. Whole Plant

SEQ ID NO: 95376 - protein, 368 aa, Arabidopsis thaliana; identical to SEQ ID NO: 91620
  peptide (1)..(368): Ceres Seq. ID no. 12728513
  misc_feature (313)..(353): Pfam Name: Zinc finger, C3HC4 type (RING finger) Pfam Description: Zinc finger, C3HC4 type (RING finger)
  misc_feature (1)..(368): Homolog of NCBI NO: 15222059 NR Description: unknown protein; protein id: At1g12760.1
  misc_feature (1)..(213): Homolog of NCBI NO: 9502381 NR Description: T12C24.29 [Arabidopsis thaliana] unknown protein [Arabidopsis thaliana]
  misc_feature (205)..(368): Homolog of NCBI NO: 9502381 NR Description: T12C24.29 [Arabidopsis thaliana] unknown protein [Arabidopsis thaliana]
  misc_feature (194)..(368): Homolog of NCBI NO: 18407748 NR Description: expressed protein; protein id: At1g63170.1, by cDNA: 21249., supported by cDNA: gi_16604387 [Arabidopsis
  misc_feature (194)..(368): Homolog of NCBI NO: 21554228 NR Description: unknown [Arabidopsis thaliana]
  misc_feature (44)..(210): Homolog of NCBI NO: 18407748 NR Description: expressed protein; protein id: At1g63170.1, by cDNA: 21249., supported by cDNA: gi_16604387 [Arabidopsis
  misc_feature (44)..(210): Homolog of NCBI NO: 21554228 NR Description: unknown [Arabidopsis thaliana]
  misc_feature (194)..(361): Homolog of NCBI NO: 16604388 NR Description: At1g63170/F16M19_7 [Arabidopsis thaliana]
  misc_feature (44)..(210): Homolog of NCBI NO: 16604388 NR Description: At1g63170/F16M19_7 [Arabidopsis thaliana]
  misc_feature (49)..(362): Homolog of NCBI NO: 18413629 NR Description: putative protein; protein id: At4g11680.1, by cDNA: gi_16323217 [Arabidopsis thaliana]

SEQ ID NO: 95377 - protein, 297 aa, Arabidopsis thaliana; identical to SEQ ID NO: 91621
  peptide (1)..(297): Ceres Seq. ID no. 12728514
  misc_feature (242)..(282): Pfam Name: Zinc finger, C3HC4 type (RING finger) Pfam Description: Zinc finger, C3HC4 type (RING finger)
  misc_feature (1)..(297): Homolog of NCBI NO: 15222059 NR Description: unknown protein; protein id: At1g12760.1
  misc_feature (1)..(142): Homolog of NCBI NO: 9502381 NR Description: T12C24.29 [Arabidopsis thaliana] unknown protein [Arabidopsis thaliana]
  misc_feature (134)..(297): Homolog of NCBI NO: 9502381 NR Description: T12C24.29 [Arabidopsis thaliana] unknown protein [Arabidopsis thaliana]
  misc_feature (123)..(297): Homolog of NCBI NO: 18407748 NR Description: expressed protein; protein id: At1g63170.1, by cDNA: 21249., supported by cDNA: gi_16604387 [Arabidopsis
  misc_feature (123)..(297): Homolog of NCBI NO: 21554228 NR Description: unknown [Arabidopsis thaliana]
  misc_feature (1)..(139): Homolog of NCBI NO: 18407748 NR Description: expressed protein; protein id: At1g63170.1, by cDNA: 21249., supported by cDNA: gi_16604387 [Arabidopsis
  misc_feature (1)..(139): Homolog of NCBI NO: 21554228 NR Description: unknown [Arabidopsis thaliana]
  misc_feature (123)..(290): Homolog of NCBI NO: 16604388 NR Description: At1g63170/F16M19_7 [Arabidopsis thaliana]
  misc_feature (1)..(139): Homolog of NCBI NO: 16604388 NR Description: At1g63170/F16M19_7 [Arabidopsis thaliana]
  misc_feature (1)..(291): Homolog of NCBI NO: 18413629 NR Description: putative protein; protein id: At4g11680.1, by cDNA: gi_16323217 [Arabidopsis thaliana]

SEQ ID NO: 95378 - protein, 292 aa, Arabidopsis thaliana; identical to SEQ ID NO: 91622
  peptide (1)..(292): Ceres Seq. ID no. 12728515
  misc_feature (237)..(277): Pfam Name: Zinc finger, C3HC4 type (RING finger) Pfam Description: Zinc finger, C3HC4 type (RING finger)
  misc_feature (1)..(292): Homolog of NCBI NO: 15222059 NR Description: unknown protein; protein id: At1g12760.1
  misc_feature (1)..(137): Homolog of NCBI NO: 9502381 NR Description: T12C24.29 [Arabidopsis thaliana] unknown protein [Arabidopsis thaliana]
  misc_feature (129)..(292): Homolog of NCBI NO: 9502381 NR Description: T12C24.29 [Arabidopsis thaliana] unknown protein [Arabidopsis thaliana]
  misc_feature (118)..(292): Homolog of NCBI NO: 18407748 NR Description: expressed protein; protein id: At1g63170.1, by cDNA: 21249., supported by cDNA: gi_16604387 [Arabidopsis
  misc_feature (118)..(292): Homolog of NCBI NO: 21554228 NR Description: unknown [Arabidopsis thaliana]
  misc_feature (1)..(134): Homolog of NCBI NO: 18407748 NR Description: expressed protein; protein id: At1g63170.1, by cDNA: 21249., supported by cDNA: gi_16604387 [Arabidopsis
  misc_feature (1)..(134): Homolog of NCBI NO: 21554228 NR Description: unknown [Arabidopsis thaliana]
  misc_feature (118)..(285): Homolog of NCBI NO: 16604388 NR Description: At1g63170/F16M19_7 [Arabidopsis thaliana]
  misc_feature (1)..(134): Homolog of NCBI NO: 16604388 NR Description: At1g63170/F16M19_7 [Arabidopsis thaliana]
  misc_feature (1)..(286): Homolog of NCBI NO: 18413629 NR Description: putative protein; protein id: At4g11680.1, by cDNA: gi_16323217 [Arabidopsis thaliana]

SEQ ID NO: 95379 - DNA, 1002 bp, Arabidopsis thaliana; identical to SEQ ID NO: 91623
  misc_feature (1)..(1002): Ceres Seq. ID no. 12728522
  misc_feature: MA Experiment ID: 20000173 Result: Down-regulated in Transcription
  misc_feature: MA Experiment 20000173 PARAMETER Experiment Name: At_42deg_Heat_P Parameter: Age (day) Value: 14
  misc_feature: MA Experiment 20000173 PARAMETER Experiment Name: At_42deg_Heat_P Parameter: Organism Value: A. thaliana
  misc_feature: MA Experiment 20000173 PARAMETER Experiment Name: At_42deg_Heat_P Parameter: Plant Line Value: WS
  misc_feature: MA Experiment 20000173 PARAMETER Experiment Name: At_42deg_Heat_P Parameter: Temperature (deg C) Value: 42 vs. 22
  misc_feature: MA Experiment 20000173 PARAMETER Experiment Name: At_42deg_Heat_P Parameter: Timepoint (hr) Value: 6
  misc_feature: MA Experiment 20000173 PARAMETER Experiment Name: At_42deg_Heat_P Parameter: Tissue Value: Aerial
  misc_feature: MA Experiment ID: 20000179 Result: Up-regulated in Transcription
  misc_feature: MA Experiment 20000179 PARAMETER Experiment Name: At_Germinating_Seeds_P Parameter: Age (hr) Value: 6 vs. 0
  misc_feature: MA Experiment 20000179 PARAMETER Experiment Name: At_Germinating_Seeds_P Parameter: Tissue Value: Germinating Seeds
  misc_feature: MA Experiment ID: 20000264 Result: Up-regulated in Transcription
  misc_feature: MA Experiment 20000264 PARAMETER Experiment Name: At_Open_Flower_P Parameter: Age (day) Value: 21
  misc_feature: MA Experiment 20000264 PARAMETER Experiment Name: At_Open_Flower_P Parameter: Plant Line Value: WS
  misc_feature: MA Experiment 20000264 PARAMETER Experiment Name: At_Open_Flower_P Parameter: Tissue Value: Open Flower vs. Whole Plant
  misc_feature: MA Experiment ID: 20000286 Result: Up-regulated in Transcription
  misc_feature: MA Experiment 20000286 PARAMETER Experiment Name: At_Open_Flower_P Parameter: Age (day) Value: 21
  misc_feature: MA Experiment 20000286 PARAMETER Experiment Name: At_Open_Flower_P Parameter: Plant Line Value: WS
  misc_feature: MA Experiment 20000286 PARAMETER Experiment Name: At_Open_Flower_P Parameter: Tissue Value: Half Open vs. Whole Plant
  misc_feature: MA Experiment ID: 20000437 Result: Up-regulated in Transcription
  misc_feature: MA Experiment 20000437 PARAMETER Experiment Name: At_Drought_P Parameter: Age (day) Value: 8
  misc_feature: MA Experiment 20000437 PARAMETER Experiment Name: At_Drought_P Parameter: Organism Value: A. thaliana
  misc_feature: MA Experiment 20000437 PARAMETER Experiment Name: At_Drought_P Parameter: Plant Line Value: WS
  misc_feature: MA Experiment 20000437 PARAMETER Experiment Name: At_Drought_P Parameter: Timepoint (hr) Value: 24
  misc_feature: MA Experiment 20000437 PARAMETER Experiment Name: At_Drought_P Parameter: Tissue Value: Whole Plant
  misc_feature: MA Experiment 20000437 PARAMETER Experiment Name: At_Drought_P Parameter: Treatment Value: Drought vs. No Drought
  misc_feature: MA Experiment ID: 20000438 Result: Down-regulated in Transcription
  misc_feature: MA Experiment 20000438 PARAMETER Experiment Name: At_Shoots__P Parameter: Age (day) Value: 14
  misc_feature: MA Experiment 20000438 PARAMETER Experiment Name: At_Shoots__P Parameter: Tissue Value: Shoots vs. Whole Plant
  misc_feature: MA Experiment ID: 20000495 Result: Up-regulated in Transcription
  misc_feature: MA Experiment 20000495 PARAMETER Experiment Name: At_Guard_Cells_P Parameter: Harvest Date Value: 8/2/2002
  misc_feature: MA Experiment 20000495 PARAMETER Experiment Name: At_Guard_Cells_P Parameter: Organism Value: A. thaliana
  misc_feature: MA Experiment 20000495 PARAMETER Experiment Name: At_Guard_Cells_P Parameter: Tissue Value: Guard Cells vs. Leaves
  misc_feature: MA Experiment ID: 20000794 Result: Up-regulated in Transcription
  misc_feature: MA Experiment 20000794 PARAMETER Experiment Name: At_Petals_P Parameter: Age (day) Value: 23-25 days
  misc_feature: MA Experiment 20000794 PARAMETER Experiment Name: At_Petals_P Parameter: Plant Line Value: WS
  misc_feature: MA Experiment 20000794 PARAMETER Experiment Name: At_Petals_P Parameter: Tissue Value: Petals vs. Whole plant
  misc_feature: MA Experiment ID: 20001757 Result: Down-regulated in Transcription
  misc_feature: MA Experiment 20001757 PARAMETER Experiment Name: At_50mM_NH4NO3_L-to-H_P Parameter: Timepoint (hr) Value: 6
  misc_feature: MA Experiment 20001757 PARAMETER Experiment Name: At_50mM_NH4NO3_L-to-H_P Parameter: Tissue Value: Leaf
  misc_feature: MA Experiment 20001757 PARAMETER Experiment Name: At_50mM_NH4NO3_L-to-H_P Parameter: Treatment Value: 50mM NH4NO3 vs 100mM Mannitol

SEQ ID NO: 95380 - protein, 203 aa, Arabidopsis thaliana; identical to SEQ ID NO: 91624
  peptide (1)..(203): Ceres Seq. ID no. 12728523
  misc_feature (19)..(168): Pfam Name: NUDIX domain Pfam Description: NUDIX domain
  misc_feature (1)..(203): Homolog of NCBI NO: 18391450 NR Description: expressed protein; protein id: At1g12880.1, by cDNA: gi_15810278, supported by cDNA: gi_20258974 [Arabidopsis >gi|15810279|gb|AAL07027.1| unknown protein [Arabidopsis
  misc_feature (1)..(196): Homolog of NCBI NO: 25518008 NR Description: F13K23.14 protein - Arabidopsis thaliana
  misc_feature (1)..(202): Homolog of NCBI NO: 15231598 NR Description: MutT-like protein; protein id: At3g26690.1
  misc_feature (1)..(181): Homolog of NCBI NO: 18399682 NR Description: expressed protein; protein id: At3g12600.1 thaliana] >gi|9294354|dbj|BAB02251.1| to unknown protein [Arabidopsis thaliana]
  misc_feature (1)..(162): Homolog of NCBI NO: 38175436 NR Description: MutT-like protein [Oryza sativa (japonica
  misc_feature (1)..(168): Homolog of NCBI NO: 15221055 NR Description: unknown protein; protein id: At1g18300.1 thaliana] >gi|6714298|gb|AAF25994.1|AC013354_13 F15H18.18 thaliana] >gi|8671772|gb|AAF78378.1|AC069551_11 T10O22.27
  misc_feature (1)..(162): Homolog of NCBI NO: 34900054 NR Description: MutT-like protein~contains ESTs
  misc_feature (1)..(182): Homolog of NCBI NO: 18379275 NR Description: expressed protein; protein id: At2g01670.1, by cDNA: 8247., supported by cDNA: gi_13272382, supported by gi_15293192, supported by cDNA: gi_15724325 [Arabidopsis
  misc_feature (1)..(182): Homolog of NCBI NO: 21595695 NR Description: unknown [Arabidopsis thaliana]
  misc_feature (1)..(163): Homolog of NCBI NO: 15223919 NR Description: hypothetical protein; protein id: At1g14860.1

SEQ ID NO: 95381 - protein, 173 aa, Arabidopsis thaliana; identical to SEQ ID NO: 91625
  peptide (1)..(173): Ceres Seq. ID no. 12728524
  misc_feature (1)..(138): Pfam Name: NUDIX domain Pfam Description: NUDIX domain
  misc_feature (1)..(173): Homolog of NCBI NO: 18391450 NR Description: expressed protein; protein id: At1g12880.1, by cDNA: gi_15810278, supported by cDNA: gi_20258974 [Arabidopsis >gi|15810279|gb|AAL07027.1| unknown protein [Arabidopsis
  misc_feature (1)..(166): Homolog of NCBI NO: 25518008 NR Description: F13K23.14 protein - Arabidopsis thaliana
  misc_feature (1)..(172): Homolog of NCBI NO: 15231598 NR Description: MutT-like protein; protein id: At3g26690.1
  misc_feature (1)..(151): Homolog of NCBI NO: 18399682 NR Description: expressed protein; protein id: At3g12600.1 thaliana] >gi|9294354|dbj|BAB02251.1| to unknown protein [Arabidopsis thaliana]
  misc_feature (1)..(132): Homolog of NCBI NO: 38175436 NR Description: MutT-like protein [Oryza sativa (japonica
  misc_feature (1)..(138): Homolog of NCBI NO: 15221055 NR Description: unknown protein; protein id: At1g18300.1 thaliana] >gi|6714298|gb|AAF25994.1|AC013354_13 F15H18.18 thaliana] >gi|8671772|gb|AAF78378.1|AC069551_11 T10O22.27
  misc_feature (1)..(132): Homolog of NCBI NO: 34900054 NR Description: MutT-like protein~contains ESTs
  misc_feature (1)..(152): Homolog of NCBI NO: 18379275 NR Description: expressed protein; protein id: At2g01670.1, by cDNA: 8247., supported by cDNA: gi_13272382, supported by gi_15293192, supported by cDNA: gi_15724325 [Arabidopsis
  misc_feature (1)..(152): Homolog of NCBI NO: 21595695 NR Description: unknown [Arabidopsis thaliana]
  misc_feature (1)..(133): Homolog of NCBI NO: 15223919 NR Description: hypothetical protein; protein id: At1g14860.1

SEQ ID NO: 95382 - protein, 152 aa, Arabidopsis thaliana; identical to SEQ ID NO: 91626
  peptide (1)..(152): Ceres Seq. ID no. 12728525
  misc_feature (1)..(117): Pfam Name: NUDIX domain Pfam Description: NUDIX domain
  misc_feature (1)..(152): Homolog of NCBI NO: 18391450 NR Description: expressed protein; protein id: At1g12880.1, by cDNA: gi_15810278, supported by cDNA: gi_20258974 [Arabidopsis >gi|15810279|gb|AAL07027.1| unknown protein [Arabidopsis
  misc_feature (1)..(145): Homolog of NCBI NO: 25518008 NR Description: F13K23.14 protein - Arabidopsis thaliana
  misc_feature (1)..(151): Homolog of NCBI NO: 15231598 NR Description: MutT-like protein; protein id: At3g26690.1
  misc_feature (1)..(130): Homolog of NCBI NO: 18399682 NR Description: expressed protein; protein id: At3g12600.1 thaliana] >gi|9294354|dbj|BAB02251.1| to unknown protein [Arabidopsis thaliana]
  misc_feature (1)..(111): Homolog of NCBI NO: 38175436 NR Description: MutT-like protein [Oryza sativa (japonica
  misc_feature (1)..(117): Homolog of NCBI NO: 15221055 NR Description: unknown protein; protein id: At1g18300.1 thaliana] >gi|6714298|gb|AAF25994.1|AC013354_13 F15H18.18 thaliana] >gi|8671772|gb|AAF78378.1|AC069551_11 T10O22.27
  misc_feature (1)..(111): Homolog of NCBI NO: 34900054 NR Description: MutT-like protein~contains ESTs
  misc_feature (1)..(131): Homolog of NCBI NO: 18379275 NR Description: expressed protein; protein id: At2g01670.1, by cDNA: 8247., supported by cDNA: gi_13272382, supported by gi_15293192, supported by cDNA: gi_15724325 [Arabidopsis
  misc_feature (1)..(131): Homolog of NCBI NO: 21595695 NR Description: unknown [Arabidopsis thaliana]
  misc_feature (1)..(112): Homolog of NCBI NO: 15223919 NR Description: hypothetical protein; protein id: At1g14860.1

SEQ ID NO: 95383 - DNA, 1569 bp, Arabidopsis thaliana; identical to SEQ ID NO: 91627
  misc_feature (1)..(1569): Ceres Seq. ID no. 12728530
  misc_feature: MA Experiment ID: 20000180 Result: Up-regulated in Transcription
  misc_feature: MA Experiment 20000180 PARAMETER Experiment Name: At_Germinating_Seeds_P Parameter: Age (hr) Value: 24 vs. 0
  misc_feature: MA Experiment 20000180 PARAMETER Experiment Name: At_Germinating_Seeds_P Parameter: Tissue Value: Germinating Seeds
  misc_feature: MA Experiment ID: 20000185 Result: Up-regulated in Transcription
  misc_feature: MA Experiment 20000185 PARAMETER Experiment Name: At_Roots__P Parameter: Age (day) Value: 7 vs. 21
  misc_feature: MA Experiment 20000185 PARAMETER Experiment Name: At_Roots__P Parameter: Organism Value: A. thaliana
  misc_feature: MA Experiment 20000185 PARAMETER Experiment Name: At_Roots__P Parameter: Tissue Value: Roots vs. Whole Plant
  misc_feature: MA Experiment ID: 20000269 Result: Up-regulated in Transcription
  misc_feature: MA Experiment 20000269 PARAMETER Experiment Name: At_1mM_KNO3_L-vs-H_Roots_P Parameter: Age (day) Value: 7,10,12
  misc_feature: MA Experiment 20000269 PARAMETER Experiment Name: At_1mM_KNO3_L-vs-H_Roots_P Parameter: Organism Value: A. thaliana
  misc_feature: MA Experiment 20000269 PARAMETER Experiment Name: At_1mM_KNO3_L-vs-H_Roots_P Parameter: Plant Line Value: WS
  misc_feature: MA Experiment 20000269 PARAMETER Experiment Name: At_1mM_KNO3_L-vs-H_Roots_P Parameter: Timepoint (day) Value: 7,10,12
  misc_feature: MA Experiment 20000269 PARAMETER Experiment Name: At_1mM_KNO3_L-vs-H_Roots_P Parameter: Tissue Value: Roots
  misc_feature: MA Experiment 20000269 PARAMETER Experiment Name: At_1mM_KNO3_L-vs-H_Roots_P Parameter: Treatment Value: 1mM KNO3 vs. 50mM KNO3
  misc_feature: MA Experiment ID: 20000439 Result: Up-regulated in Transcription
  misc_feature: MA Experiment 20000439 PARAMETER Experiment Name: At_Roots__P Parameter: Age (day) Value: 14 vs. 21
  misc_feature: MA Experiment 20000439 PARAMETER Experiment Name: At_Roots__P Parameter: Organism Value: A. thaliana
  misc_feature: MA Experiment 20000439 PARAMETER Experiment Name: At_Roots__P Parameter: Tissue Value: Roots vs. Whole Plant
  misc_feature: MA Experiment ID: 20000527 Result: Down-regulated in Transcription
  misc_feature: MA Experiment 20000527 PARAMETER Experiment Name: At_10percent_PEG_P Parameter: Age (day) Value: 20
  misc_feature: MA Experiment 20000527 PARAMETER Experiment Name: At_10percent_PEG_P Parameter: Organism Value: A. thaliana
  misc_feature: MA Experiment 20000527 PARAMETER Experiment Name: At_10percent_PEG_P Parameter: Plant Line Value: WS
  misc_feature: MA Experiment 20000527 PARAMETER Experiment Name: At_10percent_PEG_P Parameter: Timepoint (day) Value: 20
  misc_feature: MA Experiment 20000527 PARAMETER Experiment Name: At_10percent_PEG_P Parameter: Tissue Value: Whole Plant
  misc_feature: MA Experiment 20000527 PARAMETER Experiment Name: At_10percent_PEG_P Parameter: Treatment Value: 10percent PEG vs. No Treatment
  misc_feature: MA Experiment ID: 20001557 Result: Up-regulated in Transcription
  misc_feature: MA Experiment 20001557 PARAMETER Experiment Name: At_Drought_Soil_Dry_P Parameter: Age (day) Value: 27
  misc_feature: MA Experiment 20001557 PARAMETER Experiment Name: At_Drought_Soil_Dry_P Parameter: Organism Value: A. thaliana
  misc_feature: MA Experiment 20001557 PARAMETER Experiment Name: At_Drought_Soil_Dry_P Parameter: Plant Line Value: WS
  misc_feature: MA Experiment 20001557 PARAMETER Experiment Name: At_Drought_Soil_Dry_P Parameter: Post Timepoint (hr) Value: 3
  misc_feature: MA Experiment 20001557 PARAMETER Experiment Name: At_Drought_Soil_Dry_P Parameter: Post-Treatment Value: Re-Water vs. No Drought
  misc_feature: MA Experiment 20001557 PARAMETER Experiment Name: At_Drought_Soil_Dry_P Parameter: Timepoint (day) Value: 13
  misc_feature: MA Experiment 20001557 PARAMETER Experiment Name: At_Drought_Soil_Dry_P Parameter: Treatment Value: Drought vs. No Drought
  misc_feature: MA Experiment ID: 20001910 Result: Down-regulated in Transcription
  misc_feature: MA Experiment 20001910 PARAMETER Experiment Name: At_Drought_Reproduction_P Parameter: Age (day) Value: 37
  misc_feature: MA Experiment 20001910 PARAMETER Experiment Name: At_Drought_Reproduction_P Parameter: Organism Value: A. thaliana
  misc_feature: MA Experiment 20001910 PARAMETER Experiment Name: At_Drought_Reproduction_P Parameter: Plant Line Value: WS
  misc_feature: MA Experiment 20001910 PARAMETER Experiment Name: At_Drought_Reproduction_P Parameter: Timepoint (day) Value: 7
  misc_feature: MA Experiment 20001910 PARAMETER Experiment Name: At_Drought_Reproduction_P Parameter: Tissue Value: Flowers
  misc_feature: MA Experiment 20001910 PARAMETER Experiment Name: At_Drought_Reproduction_P Parameter: Treatment Value: Drought vs. No Drought

SEQ ID NO: 95384 - protein, 522 aa, Arabidopsis thaliana; identical to SEQ ID NO: 91628
  peptide (1)..(522): Ceres Seq. ID no. 12728531
  misc_feature (1)..(522): Homolog of NCBI NO: 15222119 NR Description: unknown protein; protein id: At1g12950.1
  misc_feature (23)..(522): Homolog of NCBI NO: 15231577 NR Description: integral membrane protein, putative; protein id: supported by cDNA: gi_16323120 [Arabidopsis thaliana] unknown [Arabidopsis thaliana] >gi|9293938|dbj|BAB01841.1|
  misc_feature (26)..(522): Homolog of NCBI NO: 15240824 NR Description: putative transmembrane protein; protein id: supported by cDNA: gi_13937233 [Arabidopsis thaliana] emb|CAA66809.1~gene_id:F16F17.3~strong similarity to unknown
  misc_feature (23)..(430): Homolog of NCBI NO: 1495259 NR Description: orf04 [Arabidopsis thaliana]
  misc_feature (50)..(520): Homolog of NCBI NO: 15220701 NR Description: conserved hypothetical protein; protein id:
  misc_feature (50)..(499): Homolog of NCBI NO: 25402978 NR Description: protein F26F24.14 [imported] - Arabidopsis >gi|9295710|gb|AAF87016.1|AC005292_25 F26F24.14 [Arabidopsis
  misc_feature (60)..(516): Homolog of NCBI NO: 15220246 NR Description: unknown protein; protein id: At1g47530.1, by cDNA: gi_16604504 [Arabidopsis thaliana]
  misc_feature (60)..(516): Homolog of NCBI NO: 16604505 NR Description: At1g47530/F16N3_20 [Arabidopsis thaliana]
  misc_feature (31)..(518): Homolog of NCBI NO: 33867697 NR Description: putative anthocyanin permease [Lycopersicon
  misc_feature (50)..(521): Homolog of NCBI NO: 30686958 NR Description: MATE efflux protein family [Arabidopsis thaliana]

SEQ ID NO: 95385 - protein, 494 aa, Arabidopsis thaliana; identical to SEQ ID NO: 91629
  peptide (1)..(494): Ceres Seq. ID no. 12728532
  misc_feature (1)..(494): Homolog of NCBI NO: 15222119 NR Description: unknown protein; protein id: At1g12950.1
  misc_feature (1)..(494): Homolog of NCBI NO: 15231577 NR Description: integral membrane protein, putative; protein id: supported by cDNA: gi_16323120 [Arabidopsis thaliana] unknown [Arabidopsis thaliana] >gi|9293938|dbj|BAB01841.1|
  misc_feature (1)..(494): Homolog of NCBI NO: 15240824 NR Description: putative transmembrane protein; protein id: supported by cDNA: gi_13937233 [Arabidopsis thaliana] emb|CAA66809.1~gene_id:F16F17.3~strong similarity to unknown
  misc_feature (1)..(402): Homolog of NCBI NO: 1495259 NR Description: orf04 [Arabidopsis thaliana]
  misc_feature (22)..(492): Homolog of NCBI NO: 15220701 NR Description: conserved hypothetical protein; protein id:
  misc_feature (22)..(471): Homolog of NCBI NO: 25402978 NR Description: protein F26F24.14 [imported] - Arabidopsis >gi|9295710|gb|AAF87016.1|AC005292_25 F26F24.14 [Arabidopsis
  misc_feature (32)..(488): Homolog of NCBI NO: 15220246 NR Description: unknown protein; protein id: At1g47530.1, by cDNA: gi_16604504 [Arabidopsis thaliana]
  misc_feature (32)..(488): Homolog of NCBI NO: 16604505 NR Description: At1g47530/F16N3_20 [Arabidopsis thaliana]
  misc_feature (3)..(490): Homolog of NCBI NO: 33867697 NR Description: putative anthocyanin permease [Lycopersicon
  misc_feature (22)..(493): Homolog of NCBI NO: 30686958 NR Description: MATE efflux protein family [Arabidopsis thaliana]

SEQ ID NO: 95386 - protein, 440 aa, Arabidopsis thaliana; identical to SEQ ID NO: 91630
  peptide (1)..(440): Ceres Seq. ID no. 12728533
  misc_feature (1)..(440): Homolog of NCBI NO: 15222119 NR Description: unknown protein; protein id: At1g12950.1
  misc_feature (1)..(440): Homolog of NCBI NO: 15231577 NR Description: integral membrane protein, putative; protein id: supported by cDNA: gi_16323120 [Arabidopsis thaliana] unknown [Arabidopsis thaliana] >gi|9293938|dbj|BAB01841.1|
  misc_feature (1)..(440): Homolog of NCBI NO: 15240824 NR Description: putative transmembrane protein; protein id: supported by cDNA: gi_13937233 [Arabidopsis thaliana] emb|CAA66809.1~gene_id:F16F17.3~strong similarity to unknown
  misc_feature (1)..(348): Homolog of NCBI NO: 1495259 NR Description: orf04 [Arabidopsis thaliana]
  misc_feature (1)..(438): Homolog of NCBI NO: 15220701 NR Description: conserved hypothetical protein; protein id:
  misc_feature (1)..(417): Homolog of NCBI NO: 25402978 NR Description: protein F26F24.14 [imported] - Arabidopsis >gi|9295710|gb|AAF87016.1|AC005292_25 F26F24.14 [Arabidopsis
  misc_feature (1)..(434): Homolog of NCBI NO: 15220246 NR Description: unknown protein; protein id: At1g47530.1, by cDNA: gi_16604504 [Arabidopsis thaliana]
  misc_feature (1)..(434): Homolog of NCBI NO: 16604505 NR Description: At1g47530/F16N3_20 [Arabidopsis thaliana]
  misc_feature (1)..(436): Homolog of NCBI NO: 33867697 NR Description: putative anthocyanin permease [Lycopersicon
  misc_feature (1)..(439): Homolog of NCBI NO: 30686958 NR Description: MATE efflux protein family [Arabidopsis thaliana]

SEQ ID NO: 95387 - DNA, 1637 bp, Arabidopsis thaliana; identical to SEQ ID NO: 91631
  misc_feature (1)..(1637): Ceres Seq. ID no. 12728534
  misc_feature: MA Experiment ID: 20000227 Result: Down-regulated in Transcription
  misc_feature: MA Experiment 20000227 PARAMETER Experiment Name: At_Root-Tips-vs-Tops_P Parameter: Tissue Value: Root Tips vs. Root Tops
  misc_feature: MA Experiment ID: 20001451 Result: Up-regulated in Transcription
  misc_feature: MA Experiment 20001451 PARAMETER Experiment Name: At_Far-red-induction_P Parameter: Age (day) Value: 7
  misc_feature: MA Experiment 20001451 PARAMETER Experiment Name: At_Far-red-induction_P Parameter: Light Value: Far-red vs. White
  misc_feature: MA Experiment 20001451 PARAMETER Experiment Name: At_Far-red-induction_P Parameter: Organism Value: A. thaliana
  misc_feature: MA Experiment 20001451 PARAMETER Experiment Name: At_Far-red-induction_P Parameter: Plant Line Value: Columbia
  misc_feature: MA Experiment 20001451 PARAMETER Experiment Name: At_Far-red-induction_P Parameter: Timepoint (hr) Value: 24
  misc_feature: MA Experiment 20001451 PARAMETER Experiment Name: At_Far-red-induction_P Parameter: Tissue Value: Whole Plant

SEQ ID NO: 95388 - protein, 493 aa, Arabidopsis thaliana; identical to SEQ ID NO: 91632
  peptide (1)..(493): Ceres Seq. ID no. 12728535
  misc_feature (30)..(493): Homolog of NCBI NO: 18391461 NR Description: expressed protein; protein id: At1g12970.1, by cDNA: gi_17063164 [Arabidopsis thaliana] At1g12970/F13K23_18 [Arabidopsis thaliana]
  misc_feature (30)..(493): Homolog of NCBI NO: 30688342 NR Description: leucine rich repeat protein family [Arabidopsis
  misc_feature (30)..(416): Homolog of NCBI NO: 25518616 NR Description: hypothetical protein F13K23.23 - Arabidopsis >gi|8698744|gb|AAF78502.1|AC012187_22 Contains similarity to CYR1 Candida albicans gb|AB034965 and contains multiple Leucine Rich
  misc_feature (106)..(493): Homolog of NCBI NO: 25518616 NR Description: hypothetical protein F13K23.23 - Arabidopsis >gi|8698744|gb|AAF78502.1|AC012187_22 Contains similarity to CYR1 Candida albicans gb|AB034965 and contains multiple Leucine Rich
  misc_feature (97)..(492): Homolog of NCBI NO: 38605760 NR Description: OSJNBa0044K18.1 [Oryza sativa (japonica
  misc_feature (24)..(493): Homolog of NCBI NO: 15239256 NR Description: putative protein; protein id: At5g05850.1 thaliana] >gi|9759110|dbj|BAB09679.1|
  misc_feature (120)..(493): Homolog of NCBI NO: 22330985 NR Description: hypothetical protein; protein id: At3g11330.1, by cDNA: gi_18175637 [Arabidopsis thaliana] unknown protein [Arabidopsis thaliana]
  misc_feature (129)..(484): Homolog of NCBI NO: 7489337 NR Description: leucine-rich protein - common sunflower
  misc_feature (228)..(493): Homolog of NCBI NO: 12321872 NR Description: hypothetical protein; 91861-89496 [Arabidopsis
  misc_feature (49)..(453): Homolog of NCBI NO: 20148766 NR Description: PSR9 [Brassica nigra]

SEQ ID NO: 95389 - protein, 464 aa, Arabidopsis thaliana; identical to SEQ ID NO: 91633
  peptide (1)..(464): Ceres Seq. ID no. 12728536
  misc_feature (1)..(464): Homolog of NCBI NO: 18391461 NR Description: expressed protein; protein id: At1g12970.1, by cDNA: gi_17063164 [Arabidopsis thaliana] At1g12970/F13K23_18 [Arabidopsis thaliana]
  misc_feature (1)..(464): Homolog of NCBI NO: 30688342 NR Description: leucine rich repeat protein family [Arabidopsis
  misc_feature (1)..(387): Homolog of NCBI NO: 25518616 NR Description: hypothetical protein F13K23.23 - Arabidopsis >gi|8698744|gb|AAF78502.1|AC012187_22 Contains similarity to CYR1 Candida albicans gb|AB034965 and contains multiple Leucine Rich
  misc_feature (77)..(464): Homolog of NCBI NO: 25518616 NR Description: hypothetical protein F13K23.23 - Arabidopsis >gi|8698744|gb|AAF78502.1|AC012187_22 Contains similarity to CYR1 Candida albicans gb|AB034965 and contains multiple Leucine Rich
  misc_feature (68)..(463): Homolog of NCBI NO: 38605760 NR Description: OSJNBa0044K18.1 [Oryza sativa (japonica
  misc_feature (1)..(464): Homolog of NCBI NO: 15239256 NR Description: putative protein; protein id: At5g05850.1 thaliana] >gi|9759110|dbj|BAB09679.1|
  misc_feature (91)..(464): Homolog of NCBI NO: 22330985 NR Description: hypothetical protein; protein id: At3g11330.1, by cDNA: gi_18175637 [Arabidopsis thaliana] unknown protein [Arabidopsis thaliana]
  misc_feature (100)..(455): Homolog of NCBI NO: 7489337 NR Description: leucine-rich protein - common sunflower
  misc_feature (199)..(464): Homolog of NCBI NO: 12321872 NR Description: hypothetical protein; 91861-89496 [Arabidopsis
  misc_feature (20)..(424): Homolog of NCBI NO: 20148766 NR Description: PSR9 [Brassica nigra]

SEQ ID NO: 95390 - DNA, 1785 bp, Arabidopsis thaliana; identical to SEQ ID NO: 91634
  misc_feature (1)..(1785): Ceres Seq. ID no. 12728541
  misc_feature: MA Experiment ID: 20000171 Result: Down-regulated in Transcription
  misc_feature: MA Experiment 20000171 PARAMETER Experiment Name: At_42deg_Heat_P Parameter: Age (day) Value: 14
  misc_feature: MA Experiment 20000171 PARAMETER Experiment Name: At_42deg_Heat_P Parameter: Organism Value: A. thaliana
  misc_feature: MA Experiment 20000171 PARAMETER Experiment Name: At_42deg_Heat_P Parameter: Plant Line Value: WS
  misc_feature: MA Experiment 20000171 PARAMETER Experiment Name: At_42deg_Heat_P Parameter: Temperature (deg C) Value: 42 vs. 22
  misc_feature: MA Experiment 20000171 PARAMETER Experiment Name: At_42deg_Heat_P Parameter: Timepoint (hr) Value: 1
  misc_feature: MA Experiment 20000171 PARAMETER Experiment Name: At_42deg_Heat_P Parameter: Tissue Value: Aerial
  misc_feature: MA Experiment ID: 20000173 Result: Down-regulated in Transcription
  misc_feature: MA Experiment 20000173 PARAMETER Experiment Name: At_42deg_Heat_P Parameter: Age (day) Value: 14
  misc_feature: MA Experiment 20000173 PARAMETER Experiment Name: At_42deg_Heat_P Parameter: Organism Value: A. thaliana
  misc_feature: MA Experiment 20000173 PARAMETER Experiment Name: At_42deg_Heat_P Parameter: Plant Line Value: WS
  misc_feature: MA Experiment 20000173 PARAMETER Experiment Name: At_42deg_Heat_P Parameter: Temperature (deg C) Value: 42 vs. 22
  misc_feature: MA Experiment 20000173 PARAMETER Experiment Name: At_42deg_Heat_P Parameter: Timepoint (hr) Value: 6
  misc_feature: MA Experiment 20000173 PARAMETER Experiment Name: At_42deg_Heat_P Parameter: Tissue Value: Aerial
  misc_feature: MA Experiment ID: 20000182 Result: Up-regulated in Transcription
  misc_feature: MA Experiment 20000182 PARAMETER Experiment Name: At_2mM_SA_P Parameter: Age (day) Value: 14
  misc_feature: MA Experiment 20000182 PARAMETER Experiment Name: At_2mM_SA_P Parameter: Organism Value: A. thaliana
  misc_feature: MA Experiment 20000182 PARAMETER Experiment Name: At_2mM_SA_P Parameter: Plant Line Value: WS
  misc_feature: MA Experiment 20000182 PARAMETER Experiment Name: At_2mM_SA_P Parameter: Timepoint (hr) Value: 6
  misc_feature: MA Experiment 20000182 PARAMETER Experiment Name: At_2mM_SA_P Parameter: Tissue Value: Aerial
  misc_feature: MA Experiment 20000182 PARAMETER Experiment Name: At_2mM_SA_P Parameter: Treatment Value: 2mM SA vs. No Treatment
  misc_feature: MA Experiment ID: 20000184 Result: Down-regulated in Transcription
  misc_feature: MA Experiment 20000184 PARAMETER Experiment Name: At_Shoots__P Parameter: Age (day) Value: 7
  misc_feature: MA Experiment 20000184 PARAMETER Experiment Name: At_Shoots__P Parameter: Tissue Value: Shoots vs. Whole Plant
  misc_feature: MA Experiment ID: 20001905 Result: Down-regulated in Transcription
  misc_feature: MA Experiment 20001905 PARAMETER Experiment Name: At_Drought_Reproduction_P Parameter: Age (day) Value: 40
  misc_feature: MA Experiment 20001905 PARAMETER Experiment Name: At_Drought_Reproduction_P Parameter: Organism Value: A. thaliana
  misc_feature: MA Experiment 20001905 PARAMETER Experiment Name: At_Drought_Reproduction_P Parameter: Plant Line Value: WS
  misc_feature: MA Experiment 20001905 PARAMETER Experiment Name: At_Drought_Reproduction_P Parameter: Timepoint (day) Value: 10
  misc_feature: MA Experiment 20001905 PARAMETER Experiment Name: At_Drought_Reproduction_P Parameter: Tissue Value: Rosettes
  misc_feature: MA Experiment 20001905 PARAMETER Experiment Name: At_Drought_Reproduction_P Parameter: Treatment Value: Drought vs. No Drought

SEQ ID NO: 95391 - protein, 401 aa, Arabidopsis thaliana; identical to SEQ ID NO: 91635
  peptide (1)..(401): Ceres Seq. ID no. 12728542
  misc_feature (98)..(293): Pfam Name: Protein of unknown function (DUF707) Pfam Description: Protein of unknown function (DUF707)
  misc_feature (1)..(401): Homolog of NCBI NO: 22329525 NR Description: unknown protein; protein id: At1g13000.1, by cDNA: gi_18175818, supported by cDNA: gi_20465546 [Arabidopsis >gi|18175819|gb|AAL59933.1| unknown protein [Arabidopsis
  misc_feature (98)..(293): Homolog of NCBI NO: 25402748 NR Description: protein F3F19.3 [imported] - Arabidopsis thaliana
  misc_feature (292)..(401): Homolog of NCBI NO: 25402748 NR Description: protein F3F19.3 [imported] - Arabidopsis thaliana
  misc_feature (1)..(53): Homolog of NCBI NO: 25402748 NR Description: protein F3F19.3 [imported] - Arabidopsis thaliana
  misc_feature (1)..(399): Homolog of NCBI NO: 18404941 NR Description: expressed protein; protein id: At3g26440.1,
  misc_feature (1)..(399): Homolog of NCBI NO: 16612300 NR Description: AT3g26440/F20C19_16 [Arabidopsis thaliana]
  misc_feature (9)..(395): Homolog of NCBI NO: 18408876 NR Description: F12A21.2; protein id: At1g67850.1, supported by gi_14326581 [Arabidopsis thaliana] At1g67850/F12A21_2 [Arabidopsis thaliana]
  misc_feature (98)..(272): Homolog of NCBI NO: 9294303 NR Description: gb|AAD31054.1~gene_id:F20C19.17~strong similarity
  misc_feature (292)..(399): Homolog of NCBI NO: 9294303 NR Description: gb|AAD31054.1~gene_id:F20C19.17~strong similarity
  misc_feature (1)..(53): Homolog of NCBI NO: 9294303 NR Description: gb|AAD31054.1~gene_id:F20C19.17~strong similarity

SEQ ID NO: 95392 - protein, 381 aa, Arabidopsis thaliana; identical to SEQ ID NO: 91636
  peptide (1)..(381): Ceres Seq. ID no. 12728543
  misc_feature (78)..(273): Pfam Name: Protein of unknown function (DUF707) Pfam Description: Protein of unknown function (DUF707)
  misc_feature (1)..(381): Homolog of NCBI NO: 22329525 NR Description: unknown protein; protein id: At1g13000.1, by cDNA: gi_18175818, supported by cDNA: gi_20465546 [Arabidopsis >gi|18175819|gb|AAL59933.1| unknown protein [Arabidopsis
  misc_feature (78)..(273): Homolog of NCBI NO: 25402748 NR Description: protein F3F19.3 [imported] - Arabidopsis thaliana
  misc_feature (272)..(381): Homolog of NCBI NO: 25402748 NR Description: protein F3F19.3 [imported] - Arabidopsis thaliana
  misc_feature (1)..(33): Homolog of NCBI NO: 25402748 NR Description: protein F3F19.3 [imported] - Arabidopsis thaliana
  misc_feature (1)..(379): Homolog of NCBI NO: 18404941 NR Description: expressed protein; protein id: At3g26440.1,
  misc_feature (1)..(379): Homolog of NCBI NO: 16612300 NR Description: AT3g26440/F20C19_16 [Arabidopsis thaliana]
  misc_feature (1)..(375): Homolog of NCBI NO: 18408876 NR Description: F12A21.2; protein id: At1g67850.1, supported by gi_14326581 [Arabidopsis thaliana] At1g67850/F12A21_2 [Arabidopsis thaliana]
  misc_feature (78)..(252): Homolog of NCBI NO: 9294303 NR Description: gb|AAD31054.1~gene_id:F20C19.17~strong similarity
  misc_feature (272)..(379): Homolog of NCBI NO: 9294303 NR Description: gb|AAD31054.1~gene_id:F20C19.17~strong similarity
  misc_feature (1)..(33): Homolog of NCBI NO: 9294303 NR Description: gb|AAD31054.1~gene_id:F20C19.17~strong similarity

SEQ ID NO: 95393 - protein, 292 aa, Arabidopsis thaliana; identical to SEQ ID NO: 91637
  peptide (1)..(292): Ceres Seq. ID no. 12728544
  misc_feature (1)..(184): Pfam Name: Protein of unknown function (DUF707) Pfam Description: Protein of unknown function (DUF707)
  misc_feature (1)..(292): Homolog of NCBI NO: 22329525 NR Description: unknown protein; protein id: At1g13000.1, by cDNA: gi_18175818, supported by cDNA: gi_20465546 [Arabidopsis >gi|18175819|gb|AAL59933.1| unknown protein [Arabidopsis
  misc_feature (1)..(184): Homolog of NCBI NO: 25402748 NR Description: protein F3F19.3 [imported] - Arabidopsis thaliana
  misc_feature (183)..(292): Homolog of NCBI NO: 25402748 NR Description: protein F3F19.3 [imported] - Arabidopsis thaliana
  misc_feature (1)..(290): Homolog of NCBI NO: 18404941 NR Description: expressed protein; protein id: At3g26440.1,
  misc_feature (1)..(290): Homolog of NCBI NO: 16612300 NR Description: AT3g26440/F20C19_16 [Arabidopsis thaliana]
  misc_feature (1)..(286): Homolog of NCBI NO: 18408876 NR Description: F12A21.2; protein id: At1g67850.1, supported by gi_14326581 [Arabidopsis thaliana] At1g67850/F12A21_2 [Arabidopsis thaliana]
  misc_feature (1)..(163): Homolog of NCBI NO: 9294303 NR Description: gb|AAD31054.1~gene_id:F20C19.17~strong similarity
  misc_feature (183)..(290): Homolog of NCBI NO: 9294303 NR Description: gb|AAD31054.1~gene_id:F20C19.17~strong similarity
  misc_feature (1)..(288): Homolog of NCBI NO: 22331371 NR Description: unknown protein; protein id: At3g27470.1, by cDNA: gi_19698930 [Arabidopsis thaliana] unknown protein [Arabidopsis thaliana]
  misc_feature (1)..(282): Homolog of NCBI NO: 34906848 NR Description: P0470A12.1 [Oryza sativa (japonica

SEQ ID NO: 95394 - DNA, 2165 bp, Arabidopsis thaliana; identical to SEQ ID NO: 91638
  misc_feature (1)..(2165): Ceres Seq. ID no. 12728545
  misc_feature: MA Experiment ID: 20000180 Result: Down-regulated in Transcription
  misc_feature: MA Experiment 20000180 PARAMETER Experiment Name: At_Germinating_Seeds_P Parameter: Age (hr) Value: 24 vs. 0
  misc_feature: MA Experiment 20000180 PARAMETER Experiment Name: At_Germinating_Seeds_P Parameter: Tissue Value: Germinating Seeds
  misc_feature: MA Experiment ID: 20000286 Result: Up-regulated in Transcription
  misc_feature: MA Experiment 20000286 PARAMETER Experiment Name: At_Open_Flower_P Parameter: Age (day) Value: 21
  misc_feature: MA Experiment 20000286 PARAMETER Experiment Name: At_Open_Flower_P Parameter: Plant Line Value: WS
  misc_feature: MA Experiment 20000286 PARAMETER Experiment Name: At_Open_Flower_P Parameter: Tissue Value: Half Open vs. Whole Plant
  misc_feature: MA Experiment ID: 20001558 Result: Up-regulated in Transcription
  misc_feature: MA Experiment 20001558 PARAMETER Experiment Name: At_Drought_Soil_Dry_P Parameter: Age (day) Value: 27
  misc_feature: MA Experiment 20001558 PARAMETER Experiment Name: At_Drought_Soil_Dry_P Parameter: Organism Value: A. thaliana
  misc_feature: MA Experiment 20001558 PARAMETER Experiment Name: At_Drought_Soil_Dry_P Parameter: Plant Line Value: WS
  misc_feature: MA Experiment 20001558 PARAMETER Experiment Name: At_Drought_Soil_Dry_P Parameter: Post Timepoint (hr) Value: 6
  misc_feature: MA Experiment 20001558 PARAMETER Experiment Name: At_Drought_Soil_Dry_P Parameter: Post-Treatment Value: Re-Water vs. No Drought
  misc_feature: MA Experiment 20001558 PARAMETER Experiment Name: At_Drought_Soil_Dry_P Parameter: Timepoint (day) Value: 13
  misc_feature: MA Experiment 20001558 PARAMETER Experiment Name: At_Drought_Soil_Dry_P Parameter: Treatment Value: Drought vs. No Drought
  misc_feature: MA Experiment ID: 20001757 Result: Up-regulated in Transcription
  misc_feature: MA Experiment 20001757 PARAMETER Experiment Name: At_50mM_NH4NO3_L-to-H_P Parameter: Timepoint (hr) Value: 6
  misc_feature: MA Experiment 20001757 PARAMETER Experiment Name: At_50mM_NH4NO3_L-to-H_P Parameter: Tissue Value: Leaf
  misc_feature: MA Experiment 20001757 PARAMETER Experiment Name: At_50mM_NH4NO3_L-to-H_P Parameter: Treatment Value: 50mM NH4NO3 vs 100mM Mannitol

SEQ ID NO: 95395 - protein, 608 aa, Arabidopsis thaliana [sequence omitted]

SEQ ID NO: 95396 - protein, 542 aa, Arabidopsis thaliana; identical to SEQ ID NO: 91640
  peptide (1)..(542): Ceres Seq. ID no. 12728547
  misc_feature (37)..(483): Pfam Name: Protein of unknown function, DUF612 Pfam Description: Protein of unknown function, DUF612
  misc_feature (1)..(542): Homolog of NCBI NO: 25402750 NR Description: protein F3F19.5 [imported] - Arabidopsis thaliana
  misc_feature (24)..(314): Homolog of NCBI NO: 17367114 NR Description: Transcriptional regulator ATRX homolog (X-linked
  misc_feature (24)..(314): Homolog of NCBI NO: 17509687 NR Description: Human XNP gene related XNP-1 (156.2 kD) (xnp-1)
  misc_feature (27)..(254): Homolog of NCBI NO: 30721677 NR Description: phoshoprotein 300 [Plasmodium falciparum]
  misc_feature (63)..(262): Homolog of NCBI NO: 28850293 NR Description: similar to Required for the transfer of to cell wall mannans.; Mnn4p [Saccharomyces cerevisiae]
  misc_feature (26)..(259): Homolog of NCBI NO: 17556242 NR Description: Chromo domain of heterochromatin protein like kD) [Caenorhabditis elegans]
  misc_feature (24)..(215): Homolog of NCBI NO: 17556242 NR Description: Chromo domain of heterochromatin protein like kD) [Caenorhabditis elegans]
  misc_feature (24)..(250): Homolog of NCBI NO: 34899982 NR Description: P0039H02.8 [Oryza sativa (japonica
  misc_feature (16)..(268): Homolog of NCBI NO: 8096269 NR Description: KED [Nicotiana tabacum]
  misc_feature (24)..(256): Homolog of NCBI NO: 8096269 NR Description: KED [Nicotiana tabacum]

SEQ ID NO: 95397 - protein, 484 aa, Arabidopsis thaliana; identical to SEQ ID NO: 91641
  peptide (1)..(484): Ceres Seq. ID no. 12728548
  misc_feature (1)..(425): Pfam Name: Protein of unknown function, DUF612 Pfam Description: Protein of unknown function, DUF612
  misc_feature (1)..(484): Homolog of NCBI NO: 25402750 NR Description: protein F3F19.5 [imported] - Arabidopsis thaliana
  misc_feature (1)..(256): Homolog of NCBI NO: 17367114 NR Description: Transcriptional regulator ATRX homolog (X-linked
  misc_feature (1)..(256): Homolog of NCBI NO: 17509687 NR Description: Human XNP gene related XNP-1 (156.2 kD) (xnp-1)
  misc_feature (1)..(196): Homolog of NCBI NO: 30721677 NR Description: phoshoprotein 300 [Plasmodium falciparum]
  misc_feature (5)..(204): Homolog of NCBI NO: 28850293 NR Description: similar to Required for the transfer of to cell wall mannans.; Mnn4p [Saccharomyces cerevisiae]
  misc_feature (1)..(201): Homolog of NCBI NO: 17556242 NR Description: Chromo domain of heterochromatin protein like kD) [Caenorhabditis elegans]
  misc_feature (1)..(157): Homolog of NCBI NO: 17556242 NR Description: Chromo domain of heterochromatin protein like kD) [Caenorhabditis elegans]
  misc_feature (1)..(192): Homolog of NCBI NO: 34899982 NR Description: P0039H02.8 [Oryza sativa (japonica
  misc_feature (1)..(210): Homolog of NCBI NO: 8096269 NR Description: KED [Nicotiana tabacum]
  misc_feature (1)..(198): Homolog of NCBI NO: 8096269 NR Description: KED [Nicotiana tabacum]

SEQ ID NO: 95398 - DNA, 1620 bp, Arabidopsis thaliana; identical to SEQ ID NO: 91642
  misc_feature (1)..(1620): Ceres Seq. ID no. 12728556
  misc_feature: MA Experiment ID: 20000173 Result: Up-regulated in Transcription
  misc_feature: MA Experiment 20000173 PARAMETER Experiment Name: At_42deg_Heat_P Parameter: Age (day) Value: 14
  misc_feature: MA Experiment 20000173 PARAMETER Experiment Name: At_42deg_Heat_P Parameter: Organism Value: A. thaliana
  misc_feature: MA Experiment 20000173 PARAMETER Experiment Name: At_42deg_Heat_P Parameter: Plant Line Value: WS
  misc_feature: MA Experiment 20000173 PARAMETER Experiment Name: At_42deg_Heat_P Parameter: Temperature (deg C) Value: 42 vs. 22
  misc_feature: MA Experiment 20000173 PARAMETER Experiment Name: At_42deg_Heat_P Parameter: Timepoint (hr) Value: 6
  misc_feature: MA Experiment 20000173 PARAMETER Experiment Name: At_42deg_Heat_P Parameter: Tissue Value: Aerial
  misc_feature: MA Experiment ID: 20000182 Result: Up-regulated in Transcription
  misc_feature: MA Experiment 20000182 PARAMETER Experiment Name: At_2mM_SA_P Parameter: Age (day) Value: 14
  misc_feature: MA Experiment 20000182 PARAMETER Experiment Name: At_2mM_SA_P Parameter: Organism Value: A. thaliana
  misc_feature: MA Experiment 20000182 PARAMETER Experiment Name: At_2mM_SA_P Parameter: Plant Line Value: WS
  misc_feature: MA Experiment 20000182 PARAMETER Experiment Name: At_2mM_SA_P Parameter: Timepoint (hr) Value: 6
  misc_feature: MA Experiment 20000182 PARAMETER Experiment Name: At_2mM_SA_P Parameter: Tissue Value: Aerial
  misc_feature: MA Experiment 20000182 PARAMETER Experiment Name: At_2mM_SA_P Parameter: Treatment Value: 2mM SA vs. No Treatment
  misc_feature: MA Experiment ID: 20000184 Result: Up-regulated in Transcription
  misc_feature: MA Experiment 20000184 PARAMETER Experiment Name: At_Shoots__P Parameter: Age (day) Value: 7
  misc_feature: MA Experiment 20000184 PARAMETER Experiment Name: At_Shoots__P Parameter: Tissue Value: Shoots vs. Whole Plant
  misc_feature: MA Experiment ID: 20000185 Result: Up-regulated in Transcription
  misc_feature: MA Experiment 20000185 PARAMETER Experiment Name: At_Roots__P Parameter: Age (day) Value: 7 vs. 21
  misc_feature: MA Experiment 20000185 PARAMETER Experiment Name: At_Roots__P Parameter: Organism Value: A. thaliana
  misc_feature: MA Experiment 20000185 PARAMETER Experiment Name: At_Roots__P Parameter: Tissue Value: Roots vs. Whole Plant
  misc_feature: MA Experiment ID: 20000227 Result: Down-regulated in Transcription
  misc_feature: MA Experiment 20000227 PARAMETER Experiment Name: At_Root-Tips-vs-Tops_P Parameter: Tissue Value: Root Tips vs. Root Tops
  misc_feature: MA Experiment ID: 20000269 Result: Down-regulated in Transcription
  misc_feature: MA Experiment 20000269 PARAMETER Experiment Name: At_1mM_KNO3_L-vs-H_Roots_P Parameter: Age (day) Value: 7,10,12
  misc_feature: MA Experiment 20000269 PARAMETER Experiment Name: At_1mM_KNO3_L-vs-H_Roots_P Parameter: Organism Value: A. thaliana
  misc_feature: MA Experiment 20000269 PARAMETER Experiment Name: At_1mM_KNO3_L-vs-H_Roots_P Parameter: Plant Line Value: WS
  misc_feature: MA Experiment 20000269 PARAMETER Experiment Name: At_1mM_KNO3_L-vs-H_Roots_P Parameter: Timepoint (day) Value: 7,10,12
  misc_feature: MA Experiment 20000269 PARAMETER Experiment Name: At_1mM_KNO3_L-vs-H_Roots_P Parameter: Tissue Value: Roots
  misc_feature: MA Experiment 20000269 PARAMETER Experiment Name: At_1mM_KNO3_L-vs-H_Roots_P Parameter: Treatment Value: 1mM KNO3 vs. 50mM KNO3
  misc_feature: MA Experiment ID: 20000437 Result: Down-regulated in Transcription
  misc_feature: MA Experiment 20000437 PARAMETER Experiment Name: At_Drought_P Parameter: Age (day) Value: 8
  misc_feature: MA Experiment 20000437 PARAMETER Experiment Name: At_Drought_P Parameter: Organism Value: A. thaliana
  misc_feature: MA Experiment 20000437 PARAMETER Experiment Name: At_Drought_P Parameter: Plant Line Value: WS
  misc_feature: MA Experiment 20000437 PARAMETER Experiment Name: At_Drought_P Parameter: Timepoint (hr) Value: 24
  misc_feature: MA Experiment 20000437 PARAMETER Experiment Name: At_Drought_P Parameter: Tissue Value: Whole Plant
  misc_feature: MA Experiment 20000437 PARAMETER Experiment Name: At_Drought_P Parameter: Treatment Value: Drought vs. No Drought
  misc_feature: MA Experiment ID: 20000438 Result: Up-regulated in Transcription
  misc_feature: MA Experiment 20000438 PARAMETER Experiment Name: At_Shoots__P Parameter: Age (day) Value: 14
  misc_feature: MA Experiment 20000438 PARAMETER Experiment Name: At_Shoots__P Parameter: Tissue Value: Shoots vs. Whole Plant
  misc_feature: MA Experiment ID: 20000439 Result: Up-regulated in Transcription
  misc_feature: MA Experiment 20000439 PARAMETER Experiment Name: At_Roots__P Parameter: Age (day) Value: 14 vs. 21
  misc_feature: MA Experiment 20000439 PARAMETER Experiment Name: At_Roots__P Parameter: Organism Value: A. thaliana
  misc_feature: MA Experiment 20000439 PARAMETER Experiment Name: At_Roots__P Parameter: Tissue Value: Roots vs. Whole Plant
  misc_feature: MA Experiment ID: 20000441 Result: Up-regulated in Transcription
  misc_feature: MA Experiment 20000441 PARAMETER Experiment Name: At_1uM_BR-BRZ__P Parameter: Tissue Value: Shoot Apices
  misc_feature: MA Experiment 20000441 PARAMETER Experiment Name: At_1uM_BR-BRZ__P Parameter: Treatment Value: 1uM BR vs. No Treatment
  misc_feature: MA Experiment ID: 20000443 Result: Up-regulated in Transcription
  misc_feature: MA Experiment 20000443 PARAMETER Experiment Name: At_1uM_BR-BRZ__P Parameter: Tissue Value: Shoot Apices
  misc_feature: MA Experiment 20000443 PARAMETER Experiment Name: At_1uM_BR-BRZ__P Parameter: Treatment Value: 1uM BRZ vs. No Treatment
  misc_feature: MA Experiment ID: 20000573 Result: Down-regulated in Transcription
  misc_feature: MA Experiment 20000573 PARAMETER Experiment Name: At_100uM_ABA_Mutants__P Parameter: Organism Value: A. thaliana
  misc_feature: MA Experiment 20000573 PARAMETER Experiment Name: At_100uM_ABA_Mutants__P Parameter: Plant Line Value: CS22 vs. Ler wt
  misc_feature: MA Experiment 20000573 PARAMETER Experiment Name: At_100uM_ABA_Mutants__P Parameter: Timepoint (hr) Value: N/A
  misc_feature: MA Experiment 20000573 PARAMETER Experiment Name: At_100uM_ABA_Mutants__P Parameter: Tissue Value: Whole Plant
  misc_feature: MA Experiment 20000573 PARAMETER Experiment Name: At_100uM_ABA_Mutants__P Parameter: Treatment Value: None
  misc_feature: MA Experiment ID: 20000794 Result: Up-regulated in Transcription
  misc_feature: MA Experiment 20000794 PARAMETER Experiment Name: At_Petals_P Parameter: Age (day) Value: 23-25 days
  misc_feature: MA Experiment 20000794 PARAMETER Experiment Name: At_Petals_P Parameter: Plant Line Value: WS
  misc_feature: MA Experiment 20000794 PARAMETER Experiment Name: At_Petals_P Parameter: Tissue Value: Petals vs. Whole plant
  misc_feature: MA Experiment ID: 20001248 Result: Down-regulated in Transcription
  misc_feature: MA Experiment 20001248 PARAMETER Experiment Name: At_Far-red-induction_P Parameter: Age (day) Value: 7
  misc_feature: MA Experiment 20001248 PARAMETER Experiment Name: At_Far-red-induction_P Parameter: Light Value: Far-red vs. White
  misc_feature: MA Experiment 20001248 PARAMETER Experiment Name: At_Far-red-induction_P Parameter: Organism Value: A. thaliana
  misc_feature: MA Experiment 20001248 PARAMETER Experiment Name: At_Far-red-induction_P Parameter: Plant Line Value: Columbia
  misc_feature: MA Experiment 20001248 PARAMETER Experiment Name: At_Far-red-induction_P Parameter: Timepoint (hr) Value: 4
  misc_feature: MA Experiment 20001248 PARAMETER Experiment Name: At_Far-red-induction_P Parameter: Tissue Value: Whole Plant
  misc_feature: MA Experiment ID: 20001557 Result: Down-regulated in Transcription
  misc_feature: MA Experiment 20001557 PARAMETER Experiment Name: At_Drought_Soil_Dry_P Parameter: Age (day) Value: 27
  misc_feature: MA Experiment 20001557 PARAMETER Experiment Name: At_Drought_Soil_Dry_P Parameter: Organism Value: A. thaliana
  misc_feature: MA Experiment 20001557 PARAMETER Experiment Name: At_Drought_Soil_Dry_P Parameter: Plant Line Value: WS
  misc_feature: MA Experiment 20001557 PARAMETER Experiment Name: At_Drought_Soil_Dry_P Parameter: Post Timepoint (hr) Value: 3
  misc_feature: MA Experiment 20001557 PARAMETER Experiment Name: At_Drought_Soil_Dry_P Parameter: Post-Treatment Value: Re-Water vs. No Drought
  misc_feature: MA Experiment 20001557 PARAMETER Experiment Name: At_Drought_Soil_Dry_P Parameter: Timepoint (day) Value: 13
  misc_feature: MA Experiment 20001557 PARAMETER Experiment Name: At_Drought_Soil_Dry_P Parameter: Treatment Value: Drought vs. No Drought
  misc_feature: MA Experiment ID: 20001559 Result: Down-regulated in Transcription
  misc_feature: MA Experiment 20001559 PARAMETER Experiment Name: At_Drought_Soil_Dry_P Parameter: Age (day) Value: 28
  misc_feature: MA Experiment 20001559 PARAMETER Experiment Name: At_Drought_Soil_Dry_P Parameter: Organism Value: A. thaliana
  misc_feature: MA Experiment 20001559 PARAMETER Experiment Name: At_Drought_Soil_Dry_P Parameter: Plant Line Value: WS
  misc_feature: MA Experiment 20001559 PARAMETER Experiment Name: At_Drought_Soil_Dry_P Parameter: Post Timepoint (hr) Value: 29
  misc_feature: MA Experiment 20001559 PARAMETER Experiment Name: At_Drought_Soil_Dry_P Parameter: Post-Treatment Value: Re-Water vs. No Drought
  misc_feature: MA Experiment 20001559 PARAMETER Experiment Name: At_Drought_Soil_Dry_P Parameter: Timepoint (day) Value: 14
  misc_feature: MA Experiment 20001559 PARAMETER Experiment Name: At_Drought_Soil_Dry_P Parameter: Treatment Value: Drought vs. No Drought

SEQ ID NO: 95399 - protein, 505 aa, Arabidopsis thaliana; identical to SEQ ID NO: 91643
  peptide (1)..(505): Ceres Seq. ID no. 12728557
  misc_feature (4)..(505): Homolog of NCBI NO: 15222174 NR Description: cytochrome p450 family; protein id: At1g13080.1, by cDNA: gi_3164139 [Arabidopsis thaliana]
  misc_feature (4)..(505): Homolog of NCBI NO: 25282603 NR Description: cytochrome P450 monooxygenase [imported] - thaliana >gi|3164140|dbj|BAA28537.1| cytochrome P450
  misc_feature (4)..(505): Homolog of NCBI NO: 13878395 NR Description: CYTOCHROME P450 71B27
  misc_feature (138)..(505): Homolog of NCBI NO: 30683097 NR Description: cytochrome P450 family [Arabidopsis thaliana]
  misc_feature (192)..(505): Homolog of NCBI NO: 25282611 NR Description: F3F19 hypothetical protein - Arabidopsis thaliana Strong similarity to gb|D78605 cytochrome P450 monooxygenase from
  misc_feature (4)..(184): Homolog of NCBI NO: 25282611 NR Description: F3F19 hypothetical protein - Arabidopsis thaliana Strong similarity to gb|D78605 cytochrome P450 monooxygenase from
  misc_feature (8)..(503): Homolog of NCBI NO: 15231520 NR Description: cytochrome p450 family; protein id: At3g26170.1, by cDNA: 262802. [Arabidopsis thaliana] Cytochrome P450 71B19 >gi|11994436|dbj|BAB02438.1| cytochrome
  misc_feature (8)..(503): Homolog of NCBI NO: 15231522 NR Description: cytochrome p450 family; protein id: At3g26180.1, by cDNA: gi_15810462, supported by cDNA: gi_16226473 [Arabidopsis >gi|13878386|sp|Q9LTM3|C72K_ARATH Cytochrome P450 71B20
  misc_feature (8)..(503): Homolog of NCBI NO: 21554748 NR Description: cytochrome P450, putative [Arabidopsis thaliana]
  misc_feature (8)..(503): Homolog of NCBI NO: 16226474 NR Description: AT3g26180/MTC11_8 [Arabidopsis thaliana]

SEQ ID NO: 95400 - protein, 502 aa, Arabidopsis thaliana; identical to SEQ ID NO: 91644
  peptide (1)..(502): Ceres Seq. ID no. 12728558
  misc_feature (1)..(502): Homolog of NCBI NO: 15222174 NR Description: cytochrome p450 family; protein id: At1g13080.1, by cDNA: gi_3164139 [Arabidopsis thaliana]
  misc_feature (1)..(502): Homolog of NCBI NO: 25282603 NR Description: cytochrome P450 monooxygenase [imported] - thaliana >gi|3164140|dbj|BAA28537.1| cytochrome P450
  misc_feature (1)..(502): Homolog of NCBI NO: 13878395 NR Description: CYTOCHROME P450 71B27
  misc_feature (135)..(502): Homolog of NCBI NO: 30683097 NR Description: cytochrome P450 family [Arabidopsis thaliana]
  misc_feature (189)..(502): Homolog of NCBI NO: 25282611 NR Description: F3F19 hypothetical protein - Arabidopsis thaliana Strong similarity to gb|D78605 cytochrome P450 monooxygenase from
  misc_feature (1)..(181): Homolog of NCBI NO: 25282611 NR Description: F3F19 hypothetical protein - Arabidopsis thaliana Strong similarity to gb|D78605 cytochrome P450 monooxygenase from
  misc_feature (5)..(500): Homolog of NCBI NO: 15231520 NR Description: cytochrome p450 family; protein id: At3g26170.1, by cDNA: 262802. [Arabidopsis thaliana] Cytochrome P450 71B19 >gi|11994436|dbj|BAB02438.1| cytochrome
  misc_feature (5)..(500): Homolog of NCBI NO: 15231522 NR Description: cytochrome p450 family; protein id: At3g26180.1, by cDNA: gi_15810462, supported by cDNA: gi_16226473 [Arabidopsis >gi|13878386|sp|Q9LTM3|C72K_ARATH Cytochrome P450 71B20
  misc_feature (5)..(500): Homolog of NCBI NO: 21554748 NR Description: cytochrome P450, putative [Arabidopsis thaliana]
  misc_feature (5)..(500): Homolog of NCBI NO: 16226474 NR Description: AT3g26180/MTC11_8 [Arabidopsis thaliana]

SEQ ID NO: 95401 - DNA, 1473 bp, Arabidopsis thaliana; identical to SEQ ID NO: 91645
  misc_feature (1)..(1473): Ceres Seq. ID no. 12728559
  misc_feature: MA Experiment ID: 20000184 Result: Down-regulated in Transcription
  misc_feature: MA Experiment 20000184 PARAMETER Experiment Name: At_Shoots__P Parameter: Age (day) Value: 7
  misc_feature: MA Experiment 20000184 PARAMETER Experiment Name: At_Shoots__P Parameter: Tissue Value: Shoots vs. Whole Plant
  misc_feature: MA Experiment ID: 20000264 Result: Down-regulated in Transcription
  misc_feature: MA Experiment 20000264 PARAMETER Experiment Name: At_Open_Flower_P Parameter: Age (day) Value: 21
  misc_feature: MA Experiment 20000264 PARAMETER Experiment Name: At_Open_Flower_P Parameter: Plant Line Value: WS
  misc_feature: MA Experiment 20000264 PARAMETER Experiment Name: At_Open_Flower_P Parameter: Tissue Value: Open Flower vs. Whole Plant
  misc_feature: MA Experiment ID: 20000265 Result: Down-regulated in Transcription
  misc_feature: MA Experiment 20000265 PARAMETER Experiment Name: At_Open_Flower_P Parameter: Age (day) Value: 21
  misc_feature: MA Experiment 20000265 PARAMETER Experiment Name: At_Open_Flower_P Parameter: Plant Line Value: WS
  misc_feature: MA Experiment 20000265 PARAMETER Experiment Name: At_Open_Flower_P Parameter: Tissue Value: Closed Flower vs. Whole Plant
  misc_feature: MA Experiment ID: 20000286 Result: Down-regulated in Transcription
  misc_feature: MA Experiment 20000286 PARAMETER Experiment Name: At_Open_Flower_P Parameter: Age (day) Value: 21
  misc_feature: MA Experiment 20000286 PARAMETER Experiment Name: At_Open_Flower_P Parameter: Plant Line Value: WS
  misc_feature: MA Experiment 20000286 PARAMETER Experiment Name: At_Open_Flower_P Parameter: Tissue Value: Half Open vs. Whole Plant
  misc_feature: MA Experiment ID: 20000496 Result: Down-regulated in Transcription
  misc_feature: MA Experiment 20000496 PARAMETER Experiment Name: At_Guard_Cells_P Parameter: Harvest Date Value: 7/19/2002
  misc_feature: MA Experiment 20000496 PARAMETER Experiment Name: At_Guard_Cells_P Parameter: Organism Value: Canola
  misc_feature: MA Experiment 20000496 PARAMETER Experiment Name: At_Guard_Cells_P Parameter: Tissue Value: Guard Cells vs. Leaves
  misc_feature: MA Experiment ID: 20000794 Result: Down-regulated in Transcription
  misc_feature: MA Experiment 20000794 PARAMETER Experiment Name: At_Petals_P Parameter: Age (day) Value: 23-25 days
  misc_feature: MA Experiment 20000794 PARAMETER Experiment Name: At_Petals_P Parameter: Plant Line Value: WS
  misc_feature: MA Experiment 20000794 PARAMETER Experiment Name: At_Petals_P Parameter: Tissue Value: Petals vs. Whole plant
  misc_feature: MA Experiment ID: 20001555 Result: Down-regulated in Transcription
  misc_feature: MA Experiment 20001555 PARAMETER Experiment Name: At_Drought_Soil_Dry_P Parameter: Age (day) Value: 24
  misc_feature: MA Experiment 20001555 PARAMETER Experiment Name: At_Drought_Soil_Dry_P Parameter: Organism Value: A. thaliana
  misc_feature: MA Experiment 20001555 PARAMETER Experiment Name: At_Drought_Soil_Dry_P Parameter: Plant Line Value: WS
  misc_feature: MA Experiment 20001555 PARAMETER Experiment Name: At_Drought_Soil_Dry_P Parameter: Post Timepoint (hr) Value: None
  misc_feature: MA Experiment 20001555 PARAMETER Experiment Name: At_Drought_Soil_Dry_P Parameter: Post-Treatment Value: None
  misc_feature: MA Experiment 20001555 PARAMETER Experiment Name: At_Drought_Soil_Dry_P Parameter: Timepoint (day) Value: 10
  misc_feature: MA Experiment 20001555 PARAMETER Experiment Name: At_Drought_Soil_Dry_P Parameter: Treatment Value: Drought vs. No Drought
  misc_feature: MA Experiment ID: 20001560 Result: Down-regulated in Transcription
  misc_feature: MA Experiment 20001560 PARAMETER Experiment Name: At_Drought_Soil_Dry_P Parameter: Age (day) Value: 28
  misc_feature: MA Experiment 20001560 PARAMETER Experiment Name: At_Drought_Soil_Dry_P Parameter: Organism Value: A. thaliana
  misc_feature: MA Experiment 20001560 PARAMETER Experiment Name: At_Drought_Soil_Dry_P Parameter: Plant Line Value: WS
  misc_feature: MA Experiment 20001560 PARAMETER Experiment Name: At_Drought_Soil_Dry_P Parameter: Post Timepoint (hr) Value: None
  misc_feature: MA Experiment 20001560 PARAMETER Experiment Name: At_Drought_Soil_Dry_P Parameter: Post-Treatment Value: None
  misc_feature: MA Experiment 20001560 PARAMETER Experiment Name: At_Drought_Soil_Dry_P Parameter: Timepoint (day) Value: 14
  misc_feature: MA Experiment 20001560 PARAMETER Experiment Name: At_Drought_Soil_Dry_P Parameter: Treatment Value: Drought vs. No Drought

SEQ ID NO: 95402 - protein, 490 aa, Arabidopsis thaliana; identical to SEQ ID NO: 91646
  peptide (1)..(490): Ceres Seq. ID no. 12728560
  misc_feature (29)..(489): Pfam Name: Cytochrome P450 Pfam Description: Cytochrome P450
  misc_feature (1)..(490): Homolog of NCBI NO: 15222180 NR Description: cytochrome p450 family; protein id: At1g13100.1
  misc_feature (1)..(490): Homolog of NCBI NO: 15222177 NR Description: cytochrome p450 family; protein id: At1g13090.1, by cDNA: 35385., supported by cDNA: gi_13272452, supported by gi_17065513 [Arabidopsis thaliana]
  misc_feature (1)..(490): Homolog of NCBI NO: 21618278 NR Description: putative cytochrome P450 monooxygenase
  misc_feature (1)..(490): Homolog of NCBI NO: 15222182 NR Description: cytochrome p450 family; protein id: At1g13110.1, by cDNA: gi_18087622 [Arabidopsis thaliana]
  misc_feature (1)..(490): Homolog of NCBI NO: 15231632 NR Description: cytochrome p450 family; protein id: At3g26830.1 thaliana] >gi|13878391|sp|Q9LW27|C72F_ARATH Cytochrome P450 71B15
  misc_feature (1)..(485): Homolog of NCBI NO: 15231526 NR Description: cytochrome P450 family; protein id: At3g26210.1 thaliana] >gi|13878383|sp|Q9LTM0|C72N_ARATH Cytochrome P450 71B23
  misc_feature (1)..(299): Homolog of NCBI NO: 26449645 NR Description: putative cytochrome P450 monooxygenase
  misc_feature (1)..(488): Homolog of NCBI NO: 15231524 NR Description: cytochrome p450 family; protein id: At3g26190.1 thaliana] >gi|13878385|sp|Q9LTM2|C72L_ARATH Cytochrome P450 71B21
  misc_feature (1)..(467): Homolog of NCBI NO: 15231520 NR Description: cytochrome p450 family; protein id: At3g26170.1, by cDNA: 262802. [Arabidopsis thaliana] Cytochrome P450 71B19 >gi|11994436|dbj|BAB02438.1| cytochrome
  misc_feature (1)..(474): Homolog of NCBI NO: 15222174 NR Description: cytochrome p450 family; protein id: At1g13080.1, by cDNA: gi_3164139 [Arabidopsis thaliana]

SEQ ID NO: 95403 - protein, 371 aa, Arabidopsis thaliana; identical to SEQ ID NO: 91647
  peptide (1)..(371): Ceres Seq. ID no. 12728561
  misc_feature (1)..(370): Pfam Name: Cytochrome P450 Pfam Description: Cytochrome P450
  misc_feature (1)..(371): Homolog of NCBI NO: 15222180 NR Description: cytochrome p450 family; protein id: At1g13100.1
  misc_feature (1)..(371): Homolog of NCBI NO: 15222177 NR Description: cytochrome p450 family; protein id: At1g13090.1, by cDNA: 35385., supported by cDNA: gi_13272452, supported by gi_17065513 [Arabidopsis thaliana]
  misc_feature (1)..(371): Homolog of NCBI NO: 21618278 NR Description: putative cytochrome P450 monooxygenase
  misc_feature (1)..(371): Homolog of NCBI NO: 15222182 NR Description: cytochrome p450 family; protein id: At1g13110.1, by cDNA: gi_18087622 [Arabidopsis thaliana]
  misc_feature (1)..(371): Homolog of NCBI NO: 15231632 NR Description: cytochrome p450 family; protein id: At3g26830.1 thaliana] >gi|13878391|sp|Q9LW27|C72F_ARATH Cytochrome P450 71B15
  misc_feature (1)..(366): Homolog of NCBI NO: 15231526 NR Description: cytochrome P450 family; protein id: At3g26210.1 thaliana] >gi|13878383|sp|Q9LTM0|C72N_ARATH Cytochrome P450 71B23
  misc_feature (1)..(180): Homolog of NCBI NO: 26449645 NR Description: putative cytochrome P450 monooxygenase
  misc_feature (1)..(369): Homolog of NCBI NO: 15231524 NR Description: cytochrome p450 family; protein id: At3g26190.1 thaliana] >gi|13878385|sp|Q9LTM2|C72L_ARATH Cytochrome P450 71B21
  misc_feature (1)..(348): Homolog of NCBI NO: 15231520 NR Description: cytochrome p450 family; protein id: At3g26170.1, by cDNA: 262802. [Arabidopsis thaliana] Cytochrome P450 71B19 >gi|11994436|dbj|BAB02438.1| cytochrome
  misc_feature (1)..(355): Homolog of NCBI NO: 15222174 NR Description: cytochrome p450 family; protein id: At1g13080.1, by cDNA: gi_3164139 [Arabidopsis thaliana]

SEQ ID NO: 95404 - protein, 283 aa, Arabidopsis thaliana; identical to SEQ ID NO: 91648
  peptide (1)..(283): Ceres Seq. ID no. 12728562
  misc_feature (1)..(282): Pfam Name: Cytochrome P450 Pfam Description: Cytochrome P450
  misc_feature (1)..(283): Homolog of NCBI NO: 15222180 NR Description: cytochrome p450 family; protein id: At1g13100.1
  misc_feature (1)..(283): Homolog of NCBI NO: 15222177 NR Description: cytochrome p450 family; protein id: At1g13090.1, by cDNA: 35385., supported by cDNA: gi_13272452, supported by gi_17065513 [Arabidopsis thaliana]
  misc_feature (1)..(283): Homolog of NCBI NO: 21618278 NR Description: putative cytochrome P450 monooxygenase
  misc_feature (1)..(283): Homolog of NCBI NO: 15222182 NR Description: cytochrome p450 family; protein id: At1g13110.1, by cDNA: gi_18087622 [Arabidopsis thaliana]
  misc_feature (1)..(283): Homolog of NCBI NO: 15231632 NR Description: cytochrome p450 family; protein id: At3g26830.1 thaliana] >gi|13878391|sp|Q9LW27|C72F_ARATH Cytochrome P450 71B15
  misc_feature (1)..(278): Homolog of NCBI NO: 15231526 NR Description: cytochrome P450 family; protein id: At3g26210.1 thaliana] >gi|13878383|sp|Q9LTM0|C72N_ARATH Cytochrome P450 71B23
  misc_feature (1)..(92): Homolog of NCBI NO: 26449645 NR Description: putative cytochrome P450 monooxygenase
  misc_feature (1)..(281): Homolog of NCBI NO: 15231524 NR Description: cytochrome p450 family; protein id: At3g26190.1 thaliana] >gi|13878385|sp|Q9LTM2|C72L_ARATH Cytochrome P450 71B21
  misc_feature (1)..(260): Homolog of NCBI NO: 15231520 NR Description: cytochrome p450 family; protein id: At3g26170.1, by cDNA: 262802. [Arabidopsis thaliana] Cytochrome P450 71B19 >gi|11994436|dbj|BAB02438.1| cytochrome
  misc_feature (1)..(267): Homolog of NCBI NO: 15222174 NR Description: cytochrome p450 family; protein id: At1g13080.1, by cDNA: gi_3164139 [Arabidopsis thaliana]

SEQ ID NO: 95405 - DNA, 1691 bp, Arabidopsis thaliana; identical to SEQ ID NO: 91649
  misc_feature (1)..(1691): Ceres Seq. ID no. 12728563
  misc_feature: MA Experiment ID: 20000166 Result: Down-regulated in Transcription
  misc_feature: MA Experiment 20000166 PARAMETER Experiment Name: At_100uM_ABA_P Parameter: Age (day) Value: 14
  misc_feature: MA Experiment 20000166 PARAMETER Experiment Name: At_100uM_ABA_P Parameter: Organism Value: A. thaliana
  misc_feature: MA Experiment 20000166 PARAMETER Experiment Name: At_100uM_ABA_P Parameter: Plant Line Value: WS
  misc_feature: MA Experiment 20000166 PARAMETER Experiment Name: At_100uM_ABA_P Parameter: Timepoint (hr) Value: 1
  misc_feature: MA Experiment 20000166 PARAMETER Experiment Name: At_100uM_ABA_P Parameter: Tissue Value: Aerial
  misc_feature: MA Experiment 20000166 PARAMETER Experiment Name: At_100uM_ABA_P Parameter: Treatment Value: 100uM ABA vs. No Treatment
  misc_feature: MA Experiment ID: 20000169 Result: Down-regulated in Transcription
  misc_feature: MA Experiment 20000169 PARAMETER Experiment Name: At_100uM_ABA_P Parameter: Age (day) Value: 14
  misc_feature: MA Experiment 20000169 PARAMETER Experiment Name: At_100uM_ABA_P Parameter: Organism Value: A. thaliana
  misc_feature: MA Experiment 20000169 PARAMETER Experiment Name: At_100uM_ABA_P Parameter: Plant Line Value: WS
  misc_feature: MA Experiment 20000169 PARAMETER Experiment Name: At_100uM_ABA_P Parameter: Timepoint (hr) Value: 6
  misc_feature: MA Experiment 20000169 PARAMETER Experiment Name: At_100uM_ABA_P Parameter: Tissue Value: Aerial
  misc_feature: MA Experiment 20000169 PARAMETER Experiment Name: At_100uM_ABA_P Parameter: Treatment Value: 100uM ABA vs. No Treatment
  misc_feature: MA Experiment ID: 20000171 Result: Down-regulated in Transcription
  misc_feature: MA Experiment 20000171 PARAMETER Experiment Name: At_42deg_Heat_P Parameter: Age (day) Value: 14
  misc_feature: MA Experiment 20000171 PARAMETER Experiment Name: At_42deg_Heat_P Parameter: Organism Value: A. thaliana
  misc_feature: MA Experiment 20000171 PARAMETER Experiment Name: At_42deg_Heat_P Parameter: Plant Line Value: WS
  misc_feature: MA Experiment 20000171 PARAMETER Experiment Name: At_42deg_Heat_P Parameter: Temperature (deg C) Value: 42 vs. 22
  misc_feature: MA Experiment 20000171 PARAMETER Experiment Name: At_42deg_Heat_P Parameter: Timepoint (hr) Value: 1
  misc_feature: MA Experiment 20000171 PARAMETER Experiment Name: At_42deg_Heat_P Parameter: Tissue Value: Aerial
  misc_feature: MA Experiment ID: 20000173 Result: Down-regulated in Transcription
  misc_feature: MA Experiment 20000173 PARAMETER Experiment Name: At_42deg_Heat_P Parameter: Age (day) Value: 14
  misc_feature: MA Experiment 20000173 PARAMETER Experiment Name: At_42deg_Heat_P Parameter: Organism Value: A. thaliana
  misc_feature: MA Experiment 20000173 PARAMETER Experiment Name: At_42deg_Heat_P Parameter: Plant Line Value: WS
  misc_feature: MA Experiment 20000173 PARAMETER Experiment Name: At_42deg_Heat_P Parameter: Temperature (deg C) Value: 42 vs. 22
  misc_feature: MA Experiment 20000173 PARAMETER Experiment Name: At_42deg_Heat_P Parameter: Timepoint (hr) Value: 6
  misc_feature: MA Experiment 20000173 PARAMETER Experiment Name: At_42deg_Heat_P Parameter: Tissue Value: Aerial
  misc_feature: MA Experiment ID: 20000180 Result: Up-regulated in Transcription
  misc_feature: MA Experiment 20000180 PARAMETER Experiment Name: At_Germinating_Seeds_P Parameter: Age (hr) Value: 24 vs. 0
  misc_feature: MA Experiment 20000180 PARAMETER Experiment Name: At_Germinating_Seeds_P Parameter: Tissue Value: Germinating Seeds
  misc_feature: MA Experiment ID: 20000227 Result: Down-regulated in Transcription
  misc_feature: MA Experiment 20000227 PARAMETER Experiment Name: At_Root-Tips-vs-Tops_P Parameter: Tissue Value: Root Tips vs. Root Tops
  misc_feature: MA Experiment ID: 20000234 Result: Down-regulated in Transcription
  misc_feature: MA Experiment 20000234 PARAMETER Experiment Name: At_Siliques_P Parameter: Age (day) Value: 21
  misc_feature: MA Experiment 20000234 PARAMETER Experiment Name: At_Siliques_P Parameter: Organism Value: A. thaliana
  misc_feature: MA Experiment 20000234 PARAMETER Experiment Name: At_Siliques_P Parameter: Plant Line Value: WS
  misc_feature: MA Experiment 20000234 PARAMETER Experiment Name: At_Siliques_P Parameter: Tissue Value: Less Than 5mm Siliques vs. Whole Plant
  misc_feature: MA Experiment ID: 20000264 Result: Down-regulated in Transcription
  misc_feature: MA Experiment 20000264 PARAMETER Experiment Name: At_Open_Flower_P Parameter: Age (day) Value: 21
  misc_feature: MA Experiment 20000264 PARAMETER Experiment Name: At_Open_Flower_P Parameter: Plant Line Value: WS
  misc_feature: MA Experiment 20000264 PARAMETER Experiment Name: At_Open_Flower_P Parameter: Tissue Value: Open Flower vs. Whole Plant
  misc_feature: MA Experiment ID: 20000265 Result: Down-regulated in Transcription
  misc_feature: MA Experiment 20000265 PARAMETER Experiment Name: At_Open_Flower_P Parameter: Age (day) Value: 21
  misc_feature: MA Experiment 20000265 PARAMETER Experiment Name: At_Open_Flower_P Parameter: Plant Line Value: WS
  misc_feature: MA Experiment 20000265 PARAMETER Experiment Name: At_Open_Flower_P Parameter: Tissue Value: Closed Flower vs. Whole Plant
  misc_feature: MA Experiment ID: 20000286 Result: Down-regulated in Transcription
  misc_feature: MA Experiment 20000286 PARAMETER Experiment Name: At_Open_Flower_P Parameter: Age (day) Value: 21
  misc_feature: MA Experiment 20000286 PARAMETER Experiment Name: At_Open_Flower_P Parameter: Plant Line Value: WS
  misc_feature: MA Experiment 20000286 PARAMETER Experiment Name: At_Open_Flower_P Parameter: Tissue Value: Half Open vs. Whole Plant
  misc_feature: MA Experiment ID: 20000436 Result: Down-regulated in Transcription
  misc_feature: MA Experiment 20000436 PARAMETER Experiment Name: At_Drought_P Parameter: Age (day) Value: 7
  misc_feature: MA Experiment 20000436 PARAMETER Experiment Name: At_Drought_P Parameter: Organism Value: A. thaliana
  misc_feature: MA Experiment 20000436 PARAMETER Experiment Name: At_Drought_P Parameter: Plant Line Value: WS
  misc_feature: MA Experiment 20000436 PARAMETER Experiment Name: At_Drought_P Parameter: Timepoint (hr) Value: 12
  misc_feature: MA Experiment 20000436 PARAMETER Experiment Name: At_Drought_P Parameter: Tissue Value: Whole Plant
  misc_feature: MA Experiment 20000436 PARAMETER Experiment Name: At_Drought_P Parameter: Treatment Value: Drought vs. No Drought
  misc_feature: MA Experiment ID: 20000437 Result: Down-regulated in Transcription
  misc_feature: MA Experiment 20000437 PARAMETER Experiment Name: At_Drought_P Parameter: Age (day) Value: 8
  misc_feature: MA Experiment 20000437 PARAMETER Experiment Name: At_Drought_P Parameter: Organism Value: A. thaliana
  misc_feature: MA Experiment 20000437 PARAMETER Experiment Name: At_Drought_P Parameter: Plant Line Value: WS
  misc_feature: MA Experiment 20000437 PARAMETER Experiment Name: At_Drought_P Parameter: Timepoint (hr) Value: 24
  misc_feature: MA Experiment 20000437 PARAMETER Experiment Name: At_Drought_P Parameter: Tissue Value: Whole Plant
  misc_feature: MA Experiment 20000437 PARAMETER Experiment Name: At_Drought_P Parameter: Treatment Value: Drought vs. No Drought
  misc_feature: MA Experiment ID: 20000441 Result: Up-regulated in Transcription
  misc_feature: MA Experiment 20000441 PARAMETER Experiment Name: At_1uM_BR-BRZ__P Parameter: Tissue Value: Shoot Apices
  misc_feature: MA Experiment 20000441 PARAMETER Experiment Name: At_1uM_BR-BRZ__P Parameter: Treatment Value: 1uM BR vs. No Treatment
  misc_feature: MA Experiment ID: 20000453 Result: Down-regulated in Transcription
  misc_feature: MA Experiment 20000453 PARAMETER Experiment Name: At_100uM_ABA_P Parameter: Age (day) Value: 15
  misc_feature: MA Experiment 20000453 PARAMETER Experiment Name: At_100uM_ABA_P Parameter: Organism Value: A. thaliana
  misc_feature: MA Experiment 20000453 PARAMETER Experiment Name: At_100uM_ABA_P Parameter: Plant Line Value: WS
  misc_feature: MA Experiment 20000453 PARAMETER Experiment Name: At_100uM_ABA_P Parameter: Timepoint (hr) Value: 24
  misc_feature: MA Experiment 20000453 PARAMETER Experiment Name: At_100uM_ABA_P Parameter: Tissue Value: Aerial
  misc_feature: MA Experiment 20000453 PARAMETER Experiment Name: At_100uM_ABA_P Parameter: Treatment Value: 100uM ABA vs. No Treatment
  misc_feature: MA Experiment ID: 20000455 Result: Down-regulated in Transcription
  misc_feature: MA Experiment 20000455 PARAMETER Experiment Name: At_100uM_ABA_P Parameter: Age (day) Value: 16
  misc_feature: MA Experiment 20000455 PARAMETER Experiment Name: At_100uM_ABA_P Parameter: Organism Value: A. thaliana
  misc_feature: MA Experiment 20000455 PARAMETER Experiment Name: At_100uM_ABA_P Parameter: Plant Line Value: WS
  misc_feature: MA Experiment 20000455 PARAMETER Experiment Name: At_100uM_ABA_P Parameter: Timepoint (hr) Value: 48
  misc_feature: MA Experiment 20000455 PARAMETER Experiment Name: At_100uM_ABA_P Parameter: Tissue Value: Aerial
  misc_feature: MA Experiment 20000455 PARAMETER Experiment Name: At_100uM_ABA_P Parameter: Treatment Value: 100uM ABA vs. No Treatment
  misc_feature: MA Experiment ID: 20000575 Result: Down-regulated in Transcription
  misc_feature: MA Experiment 20000575 PARAMETER Experiment Name: At_100uM_ABA_Mutants__P Parameter: Organism Value: A. thaliana
  misc_feature: MA Experiment 20000575 PARAMETER Experiment Name: At_100uM_ABA_Mutants__P Parameter: Plant Line Value: CS22
  misc_feature: MA Experiment 20000575 PARAMETER Experiment Name: At_100uM_ABA_Mutants__P Parameter: Timepoint (hr) Value: 6
  misc_feature: MA Experiment 20000575 PARAMETER Experiment Name: At_100uM_ABA_Mutants__P Parameter: Tissue Value: Whole Plant
  misc_feature: MA Experiment 20000575 PARAMETER Experiment Name: At_100uM_ABA_Mutants__P Parameter: Treatment Value: 1uM ABA vs. No Treatment
  misc_feature: MA Experiment ID: 20000576 Result: Down-regulated in Transcription
  misc_feature: MA Experiment 20000576 PARAMETER Experiment Name: At_100uM_ABA_Mutants__P Parameter: Organism Value: A. thaliana
  misc_feature: MA Experiment 20000576 PARAMETER Experiment Name: At_100uM_ABA_Mutants__P Parameter: Plant Line Value: CS23
  misc_feature: MA Experiment 20000576 PARAMETER Experiment Name: At_100uM_ABA_Mutants__P Parameter: Timepoint (hr) Value: 6
  misc_feature: MA Experiment 20000576 PARAMETER Experiment Name: At_100uM_ABA_Mutants__P Parameter: Tissue Value: Whole Plant
  misc_feature: MA Experiment 20000576 PARAMETER Experiment Name: At_100uM_ABA_Mutants__P Parameter: Treatment Value: 1uM ABA vs. No Treatment
  misc_feature: MA Experiment ID: 20000794 Result: Down-regulated in Transcription
  misc_feature: MA Experiment 20000794 PARAMETER Experiment Name: At_Petals_P Parameter: Age (day) Value: 23-25 days
  misc_feature: MA Experiment 20000794 PARAMETER Experiment Name: At_Petals_P Parameter: Plant Line Value: WS
  misc_feature: MA Experiment 20000794 PARAMETER Experiment Name: At_Petals_P Parameter: Tissue Value: Petals vs. Whole plant
  misc_feature: MA Experiment ID: 20001248 Result: Down-regulated in Transcription
  misc_feature: MA Experiment 20001248 PARAMETER Experiment Name: At_Far-red-induction_P Parameter: Age (day) Value: 7
  misc_feature: MA Experiment 20001248 PARAMETER Experiment Name: At_Far-red-induction_P Parameter: Light Value: Far-red vs. White
  misc_feature: MA Experiment 20001248 PARAMETER Experiment Name: At_Far-red-induction_P Parameter: Organism Value: A. thaliana
  misc_feature: MA Experiment 20001248 PARAMETER Experiment Name: At_Far-red-induction_P Parameter: Plant Line Value: Columbia
  misc_feature: MA Experiment 20001248 PARAMETER Experiment Name: At_Far-red-induction_P Parameter: Timepoint (hr) Value: 4
  misc_feature: MA Experiment 20001248 PARAMETER Experiment Name: At_Far-red-induction_P Parameter: Tissue Value: Whole Plant
  misc_feature: MA Experiment ID: 20001450 Result: Down-regulated in Transcription
  misc_feature: MA Experiment 20001450 PARAMETER Experiment Name: At_Far-red-induction_P Parameter: Age (day) Value: 7
  misc_feature: MA Experiment 20001450 PARAMETER Experiment Name: At_Far-red-induction_P Parameter: Light Value: Far-red vs. White
  misc_feature: MA Experiment 20001450 PARAMETER Experiment Name: At_Far-red-induction_P Parameter: Organism Value: A. thaliana
  misc_feature: MA Experiment 20001450 PARAMETER Experiment Name: At_Far-red-induction_P Parameter: Plant Line Value: Columbia
  misc_feature: MA Experiment 20001450 PARAMETER Experiment Name: At_Far-red-induction_P Parameter: Timepoint (hr) Value: 8
  misc_feature: MA Experiment 20001450 PARAMETER Experiment Name: At_Far-red-induction_P Parameter: Tissue Value: Whole Plant
  misc_feature: MA Experiment ID: 20001554 Result: Down-regulated in Transcription
  misc_feature: MA Experiment 20001554 PARAMETER Experiment Name: At_Drought_Soil_Dry_P Parameter: Age (day) Value: 21
  misc_feature: MA Experiment 20001554 PARAMETER Experiment Name: At_Drought_Soil_Dry_P Parameter: Organism Value: A. thaliana
  misc_feature: MA Experiment 20001554 PARAMETER Experiment Name: At_Drought_Soil_Dry_P Parameter: Plant Line Value: WS
  misc_feature: MA Experiment 20001554 PARAMETER Experiment Name: At_Drought_Soil_Dry_P Parameter: Post Timepoint (hr) Value: None
  misc_feature: MA Experiment 20001554 PARAMETER Experiment Name: At_Drought_Soil_Dry_P Parameter: Post-Treatment Value: None
  misc_feature: MA Experiment 20001554 PARAMETER Experiment Name: At_Drought_Soil_Dry_P Parameter: Timepoint (day) Value: 7
  misc_feature: MA Experiment 20001554 PARAMETER Experiment Name: At_Drought_Soil_Dry_P Parameter: Treatment Value: Drought vs. No Drought
  misc_feature: MA Experiment ID: 20001555 Result: Down-regulated in Transcription
  misc_feature: MA Experiment 20001555 PARAMETER Experiment Name: At_Drought_Soil_Dry_P Parameter: Age (day) Value: 24
  misc_feature: MA Experiment 20001555 PARAMETER Experiment Name: At_Drought_Soil_Dry_P Parameter: Organism Value: A. thaliana
  misc_feature: MA Experiment 20001555 PARAMETER Experiment Name: At_Drought_Soil_Dry_P Parameter: Plant Line Value: WS
  misc_feature: MA Experiment 20001555 PARAMETER Experiment Name: At_Drought_Soil_Dry_P Parameter: Post Timepoint (hr) Value: None
  misc_feature: MA Experiment 20001555 PARAMETER Experiment Name: At_Drought_Soil_Dry_P Parameter: Post-Treatment Value: None
  misc_feature: MA Experiment 20001555 PARAMETER Experiment Name: At_Drought_Soil_Dry_P Parameter: Timepoint (day) Value: 10
  misc_feature: MA Experiment 20001555 PARAMETER Experiment Name: At_Drought_Soil_Dry_P Parameter: Treatment Value: Drought vs. No Drought
  misc_feature: MA Experiment ID: 20001556 Result: Down-regulated in Transcription
  misc_feature: MA Experiment 20001556 PARAMETER Experiment Name: At_Drought_Soil_Dry_P Parameter: Age (day) Value: 26
  misc_feature: MA Experiment 20001556 PARAMETER Experiment Name: At_Drought_Soil_Dry_P Parameter: Organism Value: A. thaliana
  misc_feature: MA Experiment 20001556 PARAMETER Experiment Name: At_Drought_Soil_Dry_P Parameter: Plant Line Value: WS
  misc_feature: MA Experiment 20001556 PARAMETER Experiment Name: At_Drought_Soil_Dry_P Parameter: Post Timepoint (hr) Value: None
  misc_feature: MA Experiment 20001556 PARAMETER Experiment Name: At_Drought_Soil_Dry_P Parameter: Post-Treatment Value: None
  misc_feature: MA Experiment 20001556 PARAMETER Experiment Name: At_Drought_Soil_Dry_P Parameter: Timepoint (day) Value: 12
  misc_feature: MA Experiment 20001556 PARAMETER Experiment Name: At_Drought_Soil_Dry_P Parameter: Treatment Value: Drought vs. No Drought
  misc_feature: MA Experiment ID: 20001559 Result: Down-regulated in Transcription
  misc_feature: MA Experiment 20001559 PARAMETER Experiment Name: At_Drought_Soil_Dry_P Parameter: Age (day) Value: 28
  misc_feature: MA Experiment 20001559 PARAMETER Experiment Name: At_Drought_Soil_Dry_P Parameter: Organism Value: A. thaliana
  misc_feature: MA Experiment 20001559 PARAMETER Experiment Name: At_Drought_Soil_Dry_P Parameter: Plant Line Value: WS
  misc_feature: MA Experiment 20001559 PARAMETER Experiment Name: At_Drought_Soil_Dry_P Parameter: Post Timepoint (hr) Value: 29
  misc_feature: MA Experiment 20001559 PARAMETER Experiment Name: At_Drought_Soil_Dry_P Parameter: Post-Treatment Value: Re-Water vs. No Drought
  misc_feature: MA Experiment 20001559 PARAMETER Experiment Name: At_Drought_Soil_Dry_P Parameter: Timepoint (day) Value: 14
  misc_feature: MA Experiment 20001559 PARAMETER Experiment Name: At_Drought_Soil_Dry_P Parameter: Treatment Value: Drought vs. No Drought
  misc_feature: MA Experiment ID: 20001560 Result: Down-regulated in Transcription
  misc_feature: MA Experiment 20001560 PARAMETER Experiment Name: At_Drought_Soil_Dry_P Parameter: Age (day) Value: 28
  misc_feature: MA Experiment 20001560 PARAMETER Experiment Name: At_Drought_Soil_Dry_P Parameter: Organism Value: A. thaliana
  misc_feature: MA Experiment 20001560 PARAMETER Experiment Name: At_Drought_Soil_Dry_P Parameter: Plant Line Value: WS
  misc_feature: MA Experiment 20001560 PARAMETER Experiment Name: At_Drought_Soil_Dry_P Parameter: Post Timepoint (hr) Value: None
  misc_feature: MA Experiment 20001560 PARAMETER Experiment Name: At_Drought_Soil_Dry_P Parameter: Post-Treatment Value: None
  misc_feature: MA Experiment 20001560 PARAMETER Experiment Name: At_Drought_Soil_Dry_P Parameter: Timepoint (day) Value: 14
  misc_feature: MA Experiment 20001560 PARAMETER Experiment Name: At_Drought_Soil_Dry_P Parameter: Treatment Value: Drought vs. No Drought
  misc_feature: MA Experiment ID: 20001760 Result: Down-regulated in Transcription
  misc_feature: MA Experiment 20001760 PARAMETER Experiment Name: At_50mM_NH4NO3_L-to-H_P Parameter: Timepoint (hr) Value: 2
  misc_feature: MA Experiment 20001760 PARAMETER Experiment Name: At_50mM_NH4NO3_L-to-H_P Parameter: Tissue Value: Siliques
  misc_feature: MA Experiment 20001760 PARAMETER Experiment Name: At_50mM_NH4NO3_L-to-H_P Parameter: Treatment Value: 50mM NH4NO3 vs 100mM Mannitol
  misc_feature: MA Experiment ID: 20001904 Result: Down-regulated in Transcription
  misc_feature: MA Experiment 20001904 PARAMETER Experiment Name: At_Drought_Reproduction_P Parameter: Age (day) Value: 37
  misc_feature: MA Experiment 20001904 PARAMETER Experiment Name: At_Drought_Reproduction_P Parameter: Organism Value: A. thaliana
  misc_feature: MA Experiment 20001904 PARAMETER Experiment Name: At_Drought_Reproduction_P Parameter: Plant Line Value: WS
  misc_feature: MA Experiment 20001904 PARAMETER Experiment Name: At_Drought_Reproduction_P Parameter: Timepoint (day) Value: 7
  misc_feature: MA Experiment 20001904 PARAMETER Experiment Name: At_Drought_Reproduction_P Parameter: Tissue Value: Rosettes
  misc_feature: MA Experiment 20001904 PARAMETER Experiment Name: At_Drought_Reproduction_P Parameter: Treatment Value: Drought vs. No Drought
  misc_feature: MA Experiment ID: 20001905 Result: Down-regulated in Transcription
  misc_feature: MA Experiment 20001905 PARAMETER Experiment Name: At_Drought_Reproduction_P Parameter: Age (day) Value: 40
  misc_feature: MA Experiment 20001905 PARAMETER Experiment Name: At_Drought_Reproduction_P Parameter: Organism Value: A. thaliana
  misc_feature: MA Experiment 20001905 PARAMETER Experiment Name: At_Drought_Reproduction_P Parameter: Plant Line Value: WS
  misc_feature: MA Experiment 20001905 PARAMETER Experiment Name: At_Drought_Reproduction_P Parameter: Timepoint (day) Value: 10
  misc_feature: MA Experiment 20001905 PARAMETER Experiment Name: At_Drought_Reproduction_P Parameter: Tissue Value: Rosettes
  misc_feature: MA Experiment 20001905 PARAMETER Experiment Name: At_Drought_Reproduction_P Parameter: Treatment Value: Drought vs. No Drought

SEQ ID NO: 95406 - protein, 504 aa, Arabidopsis thaliana; identical to SEQ ID NO: 76886
  peptide (1)..(504): Ceres Seq. ID no. 12728564
  misc_feature (33)..(498): Pfam Name: Cytochrome P450 Pfam Description: Cytochrome P450
  misc_feature (1)..(504): Homolog of NCBI NO: 15222182 NR Description: cytochrome p450 family; protein id: At1g13110.1, by cDNA: gi_18087622 [Arabidopsis thaliana]
  misc_feature (1)..(500): Homolog of NCBI NO: 15231526 NR Description: cytochrome P450 family; protein id: At3g26210.1 thaliana] >gi|13878383|sp|Q9LTM0|C72N_ARATH Cytochrome P450 71B23
  misc_feature (1)..(504): Homolog of NCBI NO: 15222177 NR Description: cytochrome p450 family; protein id: At1g13090.1, by cDNA: 35385., supported by cDNA: gi_13272452, supported by gi_17065513 [Arabidopsis thaliana]
  misc_feature (1)..(504): Homolog of NCBI NO: 21618278 NR Description: putative cytochrome P450 monooxygenase
  misc_feature (1)..(504): Homolog of NCBI NO: 15222180 NR Description: cytochrome p450 family; protein id: At1g13100.1
  misc_feature (1)..(504): Homolog of NCBI NO: 15231524 NR Description: cytochrome p450 family; protein id: At3g26190.1 thaliana] >gi|13878385|sp|Q9LTM2|C72L_ARATH Cytochrome P450 71B21
  misc_feature (1)..(503): Homolog of NCBI NO: 15231525 NR Description: cytochrome p450 family; protein id: At3g26200.1, by cDNA: gi_13430717 [Arabidopsis thaliana] Cytochrome P450 71B22 >gi|11994439|dbj|BAB02441.1| cytochrome
  misc_feature (1)..(484): Homolog of NCBI NO: 15231632 NR Description: cytochrome p450 family; protein id: At3g26830.1 thaliana] >gi|13878391|sp|Q9LW27|C72F_ARATH Cytochrome P450 71B15
  misc_feature (5)..(501): Homolog of NCBI NO: 15231520 NR Description: cytochrome p450 family; protein id: At3g26170.1, by cDNA: 262802. [Arabidopsis thaliana] Cytochrome P450 71B19 >gi|11994436|dbj|BAB02438.1| cytochrome
  misc_feature (5)..(501): Homolog of NCBI NO: 21554748 NR Description: cytochrome P450, putative [Arabidopsis thaliana]

SEQ ID NO: 95407 - protein, 438 aa, Arabidopsis thaliana; identical to SEQ ID NO: 76887
  peptide (1)..(438): Ceres Seq. ID no. 12728565
  misc_feature (1)..(432): Pfam Name: Cytochrome P450 Pfam Description: Cytochrome P450
  misc_feature (1)..(438): Homolog of NCBI NO: 15222182 NR Description: cytochrome p450 family; protein id: At1g13110.1, by cDNA: gi_18087622 [Arabidopsis thaliana]
  misc_feature (1)..(434): Homolog of NCBI NO: 15231526 NR Description: cytochrome P450 family; protein id: At3g26210.1 thaliana] >gi|13878383|sp|Q9LTM0|C72N_ARATH Cytochrome P450 71B23
  misc_feature (1)..(438): Homolog of NCBI NO: 15222177 NR Description: cytochrome p450 family; protein id: At1g13090.1, by cDNA: 35385., supported by cDNA: gi_13272452, supported by gi_17065513 [Arabidopsis thaliana]
  misc_feature (1)..(438): Homolog of NCBI NO: 21618278 NR Description: putative cytochrome P450 monooxygenase
  misc_feature (1)..(438): Homolog of NCBI NO: 15222180 NR Description: cytochrome p450 family; protein id: At1g13100.1
  misc_feature (1)..(438): Homolog of NCBI NO: 15231524 NR Description: cytochrome p450 family; protein id: At3g26190.1 thaliana] >gi|13878385|sp|Q9LTM2|C72L_ARATH Cytochrome P450 71B21
  misc_feature (1)..(437): Homolog of NCBI NO: 15231525 NR Description: cytochrome p450 family; protein id: At3g26200.1, by cDNA: gi_13430717 [Arabidopsis thaliana] Cytochrome P450 71B22 >gi|11994439|dbj|BAB02441.1| cytochrome
  misc_feature (1)..(418): Homolog of NCBI NO: 15231632 NR Description: cytochrome p450 family; protein id: At3g26830.1 thaliana] >gi|13878391|sp|Q9LW27|C72F_ARATH Cytochrome P450 71B15
  misc_feature (1)..(435): Homolog of NCBI NO: 15231520 NR Description: cytochrome p450 family; protein id: At3g26170.1, by cDNA: 262802. [Arabidopsis thaliana] Cytochrome P450 71B19 >gi|11994436|dbj|BAB02438.1| cytochrome
  misc_feature (1)..(435): Homolog of NCBI NO: 21554748 NR Description: cytochrome P450, putative [Arabidopsis thaliana]

SEQ ID NO: 95408 - protein, 398 aa, Arabidopsis thaliana; identical to SEQ ID NO: 91652
  peptide (1)..(398): Ceres Seq. ID no. 12728566
  misc_feature (1)..(392): Pfam Name: Cytochrome P450 Pfam Description: Cytochrome P450
  misc_feature (1)..(398): Homolog of NCBI NO: 15222182 NR Description: cytochrome p450 family; protein id: At1g13110.1, by cDNA: gi_18087622 [Arabidopsis thaliana]
  misc_feature (1)..(394): Homolog of NCBI NO: 15231526 NR Description: cytochrome P450 family; protein id: At3g26210.1 thaliana] >gi|13878383|sp|Q9LTM0|C72N_ARATH Cytochrome P450 71B23
  misc_feature (1)..(398): Homolog of NCBI NO: 15222177 NR Description: cytochrome p450 family; protein id: At1g13090.1, by cDNA: 35385., supported by cDNA: gi_13272452, supported by gi_17065513 [Arabidopsis thaliana]
  misc_feature (1)..(398): Homolog of NCBI NO: 21618278 NR Description: putative cytochrome P450 monooxygenase
  misc_feature (1)..(398): Homolog of NCBI NO: 15222180 NR Description: cytochrome p450 family; protein id: At1g13100.1
  misc_feature (1)..(398): Homolog of NCBI NO: 15231524 NR Description: cytochrome p450 family; protein id: At3g26190.1 thaliana] >gi|13878385|sp|Q9LTM2|C72L_ARATH Cytochrome P450 71B21
  misc_feature (1)..(397): Homolog of NCBI NO: 15231525 NR Description: cytochrome p450 family; protein id: At3g26200.1, by cDNA: gi_13430717 [Arabidopsis thaliana] Cytochrome P450 71B22 >gi|11994439|dbj|BAB02441.1| cytochrome
  misc_feature (1)..(378): Homolog of NCBI NO: 15231632 NR Description: cytochrome p450 family; protein id: At3g26830.1 thaliana] >gi|13878391|sp|Q9LW27|C72F_ARATH Cytochrome P450 71B15
  misc_feature (1)..(395): Homolog of NCBI NO: 15231520 NR Description: cytochrome p450 family; protein id: At3g26170.1, by cDNA: 262802. [Arabidopsis thaliana] Cytochrome P450 71B19 >gi|11994436|dbj|BAB02438.1| cytochrome
  misc_feature (1)..(395): Homolog of NCBI NO: 21554748 NR Description: cytochrome P450, putative [Arabidopsis thaliana]

SEQ ID NO: 95409 - DNA, 1170 bp, Arabidopsis thaliana; identical to SEQ ID NO: 91653
  misc_feature (1)..(1170): Ceres Seq. ID no. 12728599
  misc_feature: MA Experiment ID: 20000180 Result: Down-regulated in Transcription
  misc_feature: MA Experiment 20000180 PARAMETER Experiment Name: At_Germinating_Seeds_P Parameter: Age (hr) Value: 24 vs. 0
  misc_feature: MA Experiment 20000180 PARAMETER Experiment Name: At_Germinating_Seeds_P Parameter: Tissue Value: Germinating Seeds

SEQ ID NO: 95410 - protein, 389 aa, Arabidopsis thaliana; identical to SEQ ID NO: 91654
  peptide (1)..(389): Ceres Seq. ID no. 12728600
  misc_feature (108)..(132): Pfam Name: Leucine Rich Repeat Pfam Description: Leucine Rich Repeat
  misc_feature (1)..(389): Homolog of NCBI NO: 15222215 NR Description: leucine rich repeat protein family; protein id:
  misc_feature (1)..(388): Homolog of NCBI NO: 11994758 NR Description: contains similarity to elicitor-inducible
  misc_feature (1)..(388): Homolog of NCBI NO: 15230865 NR Description: leucine rich repeat protein family; protein id:
  misc_feature (1)..(388): Homolog of NCBI NO: 18409119 NR Description: leucine rich repeat protein family; protein id: supported by cDNA: gi_13605580 [Arabidopsis thaliana]
  misc_feature (1)..(388): Homolog of NCBI NO: 34894182 NR Description: P0439B06.12 [Oryza sativa (japonica
  misc_feature (1)..(365): Homolog of NCBI NO: 7487680 NR Description: hypothetical protein T5F17.10 - Arabidopsis
  misc_feature (1)..(365): Homolog of NCBI NO: 15236148 NR Description: leucine rich repeat protein family (fragment);
  misc_feature (1)..(366): Homolog of NCBI NO: 15228004 NR Description: leucine rich repeat protein family; protein id: [Arabidopsis thaliana] >gi|25408813|pir||D84858 hypothetical
  misc_feature (1)..(373): Homolog of NCBI NO: 34910824 NR Description: putative Hcr2-0B [Oryza sativa (japonica
  misc_feature (5)..(388): Homolog of NCBI NO: 15220050 NR Description: leucine rich repeat protein family; protein id: [Arabidopsis thaliana] >gi|22096215|sp|Q9SSD1|TMM_ARATH TOO MANY protein precursor (TMM) >gi|25406630|pir||C96832

SEQ ID NO: 95411 - protein, 296 aa, Arabidopsis thaliana; identical to SEQ ID NO: 91655
  peptide (1)..(296): Ceres Seq. ID no. 12728601
  misc_feature (15)..(39): Pfam Name: Leucine Rich Repeat Pfam Description: Leucine Rich Repeat
  misc_feature (1)..(296): Homolog of NCBI NO: 15222215 NR Description: leucine rich repeat protein family; protein id:
  misc_feature (1)..(295): Homolog of NCBI NO: 11994758 NR Description: contains similarity to elicitor-inducible
  misc_feature (1)..(295): Homolog of NCBI NO: 15230865 NR Description: leucine rich repeat protein family; protein id:
  misc_feature (1)..(295): Homolog of NCBI NO: 18409119 NR Description: leucine rich repeat protein family; protein id: supported by cDNA: gi_13605580 [Arabidopsis thaliana]
  misc_feature (1)..(295): Homolog of NCBI NO: 34894182 NR Description: P0439B06.12 [Oryza sativa (japonica
  misc_feature (1)..(272): Homolog of NCBI NO: 7487680 NR Description: hypothetical protein T5F17.10 - Arabidopsis
  misc_feature (1)..(272): Homolog of NCBI NO: 15236148 NR Description: leucine rich repeat protein family (fragment);
  misc_feature (1)..(273): Homolog of NCBI NO: 15228004 NR Description: leucine rich repeat protein family; protein id: [Arabidopsis thaliana] >gi|25408813|pir||D84858 hypothetical
  misc_feature (1)..(280): Homolog of NCBI NO: 34910824 NR Description: putative Hcr2-0B [Oryza sativa (japonica
  misc_feature (1)..(295): Homolog of NCBI NO: 15220050 NR Description: leucine rich repeat protein family; protein id: [Arabidopsis thaliana] >gi|22096215|sp|Q9SSD1|TMM_ARATH TOO MANY protein precursor (TMM) >gi|25406630|pir||C96832

SEQ ID NO: 95412 - protein, 219 aa, Arabidopsis thaliana; identical to SEQ ID NO: 91656
  peptide (1)..(219): Ceres Seq. ID no. 12728602
  misc_feature (1)..(219): Homolog of NCBI NO: 15222215 NR Description: leucine rich repeat protein family; protein id:
  misc_feature (1)..(218): Homolog of NCBI NO: 11994758 NR Description: contains similarity to elicitor-inducible
  misc_feature (1)..(218): Homolog of NCBI NO: 15230865 NR Description: leucine rich repeat protein family; protein id:
  misc_feature (1)..(218): Homolog of NCBI NO: 18409119 NR Description: leucine rich repeat protein family; protein id: supported by cDNA: gi_13605580 [Arabidopsis thaliana]
  misc_feature (1)..(218): Homolog of NCBI NO: 34894182 NR Description: P0439B06.12 [Oryza sativa (japonica
  misc_feature (1)..(195): Homolog of NCBI NO: 7487680 NR Description: hypothetical protein T5F17.10 - Arabidopsis
  misc_feature (1)..(195): Homolog of NCBI NO: 15236148 NR Description: leucine rich repeat protein family (fragment);
  misc_feature (1)..(196): Homolog of NCBI NO: 15228004 NR Description: leucine rich repeat protein family; protein id: [Arabidopsis thaliana] >gi|25408813|pir||D84858 hypothetical
  misc_feature (1)..(203): Homolog of NCBI NO: 34910824 NR Description: putative Hcr2-0B [Oryza sativa (japonica
  misc_feature (1)..(218): Homolog of NCBI NO: 15220050 NR Description: leucine rich repeat protein family; protein id: [Arabidopsis thaliana] >gi|22096215|sp|Q9SSD1|TMM_ARATH TOO MANY protein precursor (TMM) >gi|25406630|pir||C96832

SEQ ID NO: 95413 - DNA, 531 bp, Arabidopsis thaliana; identical to SEQ ID NO: 91657
  misc_feature (1)..(531): Ceres Seq. ID no. 12728619
  misc_feature: MA Experiment ID: 20000315 Result: Down-regulated in Transcription
  misc_feature: MA Experiment 20000315 PARAMETER Experiment Name: At_14day_Shoots-Roots_Sub_P Parameter: Age (day) Value: 14
  misc_feature: MA Experiment 20000315 PARAMETER Experiment Name: At_14day_Shoots-Roots_Sub_P Parameter: Organism Value: A. thaliana
  misc_feature: MA Experiment 20000315 PARAMETER Experiment Name: At_14day_Shoots-Roots_Sub_P Parameter: Plant Line Value: WS
  misc_feature: MA Experiment 20000315 PARAMETER Experiment Name: At_14day_Shoots-Roots_Sub_P Parameter: Tissue Value: Shoots vs. Whole Plant
  misc_feature: MA Experiment ID: 20000355 Result: Down-regulated in Transcription
  misc_feature: MA Experiment 20000355 PARAMETER Experiment Name: At_Siliques_Sub_P Parameter: Age (day) Value: 21
  misc_feature: MA Experiment 20000355 PARAMETER Experiment Name: At_Siliques_Sub_P Parameter: Organism Value: A. thaliana
  misc_feature: MA Experiment 20000355 PARAMETER Experiment Name: At_Siliques_Sub_P Parameter: Plant Line Value: WS
  misc_feature: MA Experiment 20000355 PARAMETER Experiment Name: At_Siliques_Sub_P Parameter: Tissue Value: Less Than 5mm Siliques vs. Whole Plant

SEQ ID NO: 95414 - protein, 176 aa, Arabidopsis thaliana; identical to SEQ ID NO: 91658
  peptide (1)..(176): Ceres Seq. ID no. 12728620
  misc_feature (1)..(176): Homolog of NCBI NO: 15222278 NR Description: unknown protein; protein id: At1g13390.1 thaliana] >gi|9958074|gb|AAG09563.1|AC011810_22 Unknown protein
  misc_feature (2)..(176): Homolog of NCBI NO: 18409044 NR Description: expressed protein; protein id: At1g68490.1, by cDNA: 37060. [Arabidopsis thaliana] >gi|25404742|pir||A96709
  misc_feature (2)..(176): Homolog of NCBI NO: 11762168 NR Description: AT5g16110 [Arabidopsis thaliana]
  misc_feature (2)..(176): Homolog of NCBI NO: 30685676 NR Description: expressed protein [Arabidopsis thaliana]
  misc_feature (2)..(176): Homolog of NCBI NO: 18396232 NR Description: Expressed protein; protein id: At3g02555.1, by cDNA: 1232. [Arabidopsis thaliana] >gi|21537194|gb|AAM61535.1|

SEQ ID NO: 95415 - protein, 175 aa, Arabidopsis thaliana; identical to SEQ ID NO: 91659
  peptide (1)..(175): Ceres Seq. ID no. 12728621
  misc_feature (1)..(175): Homolog of NCBI NO: 15222278 NR Description: unknown protein; protein id: At1g13390.1 thaliana] >gi|9958074|gb|AAG09563.1|AC011810_22 Unknown protein
  misc_feature (1)..(175): Homolog of NCBI NO: 18409044 NR Description: expressed protein; protein id: At1g68490.1, by cDNA: 37060. [Arabidopsis thaliana] >gi|25404742|pir||A96709
  misc_feature (1)..(175): Homolog of NCBI NO: 11762168 NR Description: AT5g16110 [Arabidopsis thaliana]
  misc_feature (1)..(175): Homolog of NCBI NO: 30685676 NR Description: expressed protein [Arabidopsis thaliana]
  misc_feature (1)..(175): Homolog of NCBI NO: 18396232 NR Description: Expressed protein; protein id: At3g02555.1, by cDNA: 1232. [Arabidopsis thaliana] >gi|21537194|gb|AAM61535.1|

SEQ ID NO: 95416 - protein, 162 aa, Arabidopsis thaliana; identical to SEQ ID NO: 91660
  peptide (1)..(162): Ceres Seq. ID no. 12728622
  misc_feature (1)..(162): Homolog of NCBI NO: 15222278 NR Description: unknown protein; protein id: At1g13390.1 thaliana] >gi|9958074|gb|AAG09563.1|AC011810_22 Unknown protein
  misc_feature (1)..(162): Homolog of NCBI NO: 18409044 NR Description: expressed protein; protein id: At1g68490.1, by cDNA: 37060. [Arabidopsis thaliana] >gi|25404742|pir||A96709
  misc_feature (1)..(162): Homolog of NCBI NO: 11762168 NR Description: AT5g16110 [Arabidopsis thaliana]
  misc_feature (1)..(162): Homolog of NCBI NO: 30685676 NR Description: expressed protein [Arabidopsis thaliana]
  misc_feature (1)..(162): Homolog of NCBI NO: 18396232 NR Description: Expressed protein; protein id: At3g02555.1, by cDNA: 1232. [Arabidopsis thaliana] >gi|21537194|gb|AAM61535.1|

SEQ ID NO: 95417 - DNA, 1020 bp, Arabidopsis thaliana; identical to SEQ ID NO: 91661
  misc_feature (1)..(1020): Ceres Seq. ID no. 12728623
  misc_feature: MA Experiment ID: 20000314 Result: Up-regulated in Transcription
  misc_feature: MA Experiment 20000314 PARAMETER Experiment Name: At_14day_Shoots-Roots_Sub_P Parameter: Age (day) Value: 14
  misc_feature: MA Experiment 20000314 PARAMETER Experiment Name: At_14day_Shoots-Roots_Sub_P Parameter: Organism Value: A. thaliana
  misc_feature: MA Experiment 20000314 PARAMETER Experiment Name: At_14day_Shoots-Roots_Sub_P Parameter: Plant Line Value: WS
  misc_feature: MA Experiment 20000314 PARAMETER Experiment Name: At_14day_Shoots-Roots_Sub_P Parameter: Tissue Value: Roots vs. Whole Plant
  misc_feature: MA Experiment ID: 20000352 Result: Down-regulated in Transcription
  misc_feature: MA Experiment 20000352 PARAMETER Experiment Name: At_Drought_Sub_P Parameter: Age (day) Value: 7
  misc_feature: MA Experiment 20000352 PARAMETER Experiment Name: At_Drought_Sub_P Parameter: Organism Value: A. thaliana
  misc_feature: MA Experiment 20000352 PARAMETER Experiment Name: At_Drought_Sub_P Parameter: Plant Line Value: WS
  misc_feature: MA Experiment 20000352 PARAMETER Experiment Name: At_Drought_Sub_P Parameter: Timepoint (hr) Value: 6
  misc_feature: MA Experiment 20000352 PARAMETER Experiment Name: At_Drought_Sub_P Parameter: Tissue Value: Whole Plant
  misc_feature: MA Experiment 20000352 PARAMETER Experiment Name: At_Drought_Sub_P Parameter: Treatment Value: Drought vs. No Drought

SEQ ID NO: 95418 - protein, 339 aa, Arabidopsis thaliana; identical to SEQ ID NO: 91662
  peptide (1)..(339): Ceres Seq. ID no. 12728624
  misc_feature (70)..(336): Pfam Name: Sulfotransferase domain Pfam Description: Sulfotransferase domain
  misc_feature (1)..(339): Homolog of NCBI NO: 30683286 NR Description: sulfotransferase family [Arabidopsis thaliana] Similar to steroid sulfotransferases [Arabidopsis thaliana]
  misc_feature (1)..(339): Homolog of NCBI NO: 15226028 NR Description: putative steroid sulfotransferase; protein id:
  misc_feature (1)..(338): Homolog of NCBI NO: 15222843 NR Description: steroid sulfotransferase, putative; protein id: supported by cDNA: 150484. [Arabidopsis thaliana]
  misc_feature (1)..(338): Homolog of NCBI NO: 21553545 NR Description: steroid sulfotransferase, putative [Arabidopsis
  misc_feature (18)..(339): Homolog of NCBI NO: 15239947 NR Description: steroid sulfotransferase-like; protein id:
  misc_feature (19)..(339): Homolog of NCBI NO: 15230602 NR Description: sulfotransferase-like protein; protein id:
  misc_feature (1)..(339): Homolog of NCBI NO: 15230603 NR Description: sulfotransferase-like protein; protein id:
  misc_feature (1)..(339): Homolog of NCBI NO: 15217849 NR Description: steroid sulfotransferase, putative; protein id: [Arabidopsis thaliana] >gi|25288810|pir||F86407 probable
  misc_feature (129)..(333): Homolog of NCBI NO: 15236162 NR Description: steroid sulfotransferase - like protein; protein At4g26280.1 [Arabidopsis thaliana] >gi|7434975|pir||T06012
  misc_feature (18)..(117): Homolog of NCBI NO: 15236162 NR Description: steroid sulfotransferase - like protein; protein At4g26280.1 [Arabidopsis thaliana] >gi|7434975|pir||T06012

SEQ ID NO: 95419 - protein, 187 aa, Arabidopsis thaliana; identical to SEQ ID NO: 91663
  peptide (1)..(187): Ceres Seq. ID no. 12728625
  misc_feature (1)..(184): Pfam Name: Sulfotransferase domain Pfam Description: Sulfotransferase domain
  misc_feature (1)..(187): Homolog of NCBI NO: 30683286 NR Description: sulfotransferase family [Arabidopsis thaliana] Similar to steroid sulfotransferases [Arabidopsis thaliana]
  misc_feature (1)..(187): Homolog of NCBI NO: 15226028 NR Description: putative steroid sulfotransferase; protein id:
  misc_feature (1)..(186): Homolog of NCBI NO: 15222843 NR Description: steroid sulfotransferase, putative; protein id: supported by cDNA: 150484. [Arabidopsis thaliana]
  misc_feature (1)..(186): Homolog of NCBI NO: 21553545 NR Description: steroid sulfotransferase, putative [Arabidopsis
  misc_feature (1)..(187): Homolog of NCBI NO: 15239947 NR Description: steroid sulfotransferase-like; protein id:
  misc_feature (1)..(187): Homolog of NCBI NO: 15230602 NR Description: sulfotransferase-like protein; protein id:
  misc_feature (1)..(187): Homolog of NCBI NO: 15230603 NR Description: sulfotransferase-like protein; protein id:
  misc_feature (1)..(187): Homolog of NCBI NO: 15217849 NR Description: steroid sulfotransferase, putative; protein id: [Arabidopsis thaliana] >gi|25288810|pir||F86407 probable
  misc_feature (1)..(181): Homolog of NCBI NO: 15236162 NR Description: steroid sulfotransferase - like protein; protein At4g26280.1 [Arabidopsis thaliana] >gi|7434975|pir||T06012
  misc_feature (1)..(187): Homolog of NCBI NO: 9759556 NR Description: steroid sulfotransferase-like protein

SEQ ID NO: 95420 - DNA, 615 bp, Arabidopsis thaliana; identical to SEQ ID NO: 91664
  misc_feature (1)..(615): Ceres Seq. ID no. 12728700
  misc_feature: MA Experiment ID: 20000171 Result: Up-regulated in Transcription
  misc_feature: MA Experiment 20000171 PARAMETER Experiment Name: At_42deg_Heat_P Parameter: Age (day) Value: 14
  misc_feature: MA Experiment 20000171 PARAMETER Experiment Name: At_42deg_Heat_P Parameter: Organism Value: A. thaliana
  misc_feature: MA Experiment 20000171 PARAMETER Experiment Name: At_42deg_Heat_P Parameter: Plant Line Value: WS
  misc_feature: MA Experiment 20000171 PARAMETER Experiment Name: At_42deg_Heat_P Parameter: Temperature (deg C) Value: 42 vs. 22
  misc_feature: MA Experiment 20000171 PARAMETER Experiment Name: At_42deg_Heat_P Parameter: Timepoint (hr) Value: 1
  misc_feature: MA Experiment 20000171 PARAMETER Experiment Name: At_42deg_Heat_P Parameter: Tissue Value: Aerial
  misc_feature: MA Experiment ID: 20000184 Result: Up-regulated in Transcription
  misc_feature: MA Experiment 20000184 PARAMETER Experiment Name: At_Shoots__P Parameter: Age (day) Value: 7
  misc_feature: MA Experiment 20000184 PARAMETER Experiment Name: At_Shoots__P Parameter: Tissue Value: Shoots vs. Whole Plant
  misc_feature: MA Experiment ID: 20000185 Result: Up-regulated in Transcription
  misc_feature: MA Experiment 20000185 PARAMETER Experiment Name: At_Roots__P Parameter: Age (day) Value: 7 vs. 21
  misc_feature: MA Experiment 20000185 PARAMETER Experiment Name: At_Roots__P Parameter: Organism Value: A. thaliana
  misc_feature: MA Experiment 20000185 PARAMETER Experiment Name: At_Roots__P Parameter: Tissue Value: Roots vs. Whole Plant
  misc_feature: MA Experiment ID: 20000227 Result: Down-regulated in Transcription
  misc_feature: MA Experiment 20000227 PARAMETER Experiment Name: At_Root-Tips-vs-Tops_P Parameter: Tissue Value: Root Tips vs. Root Tops
  misc_feature: MA Experiment ID: 20000269 Result: Up-regulated in Transcription
  misc_feature: MA Experiment 20000269 PARAMETER Experiment Name: At_1mM_KNO3_L-vs-H_Roots_P Parameter: Age (day) Value: 7,10,12
  misc_feature: MA Experiment 20000269 PARAMETER Experiment Name: At_1mM_KNO3_L-vs-H_Roots_P Parameter: Organism Value: A. thaliana
  misc_feature: MA Experiment 20000269 PARAMETER Experiment Name: At_1mM_KNO3_L-vs-H_Roots_P Parameter: Plant Line Value: WS
  misc_feature: MA Experiment 20000269 PARAMETER Experiment Name: At_1mM_KNO3_L-vs-H_Roots_P Parameter: Timepoint (day) Value: 7,10,12
  misc_feature: MA Experiment 20000269 PARAMETER Experiment Name: At_1mM_KNO3_L-vs-H_Roots_P Parameter: Tissue Value: Roots
  misc_feature: MA Experiment 20000269 PARAMETER Experiment Name: At_1mM_KNO3_L-vs-H_Roots_P Parameter: Treatment Value: 1mM KNO3 vs. 50mM KNO3
  misc_feature: MA Experiment ID: 20000439 Result: Up-regulated in Transcription
  misc_feature: MA Experiment 20000439 PARAMETER Experiment Name: At_Roots__P Parameter: Age (day) Value: 14 vs. 21
  misc_feature: MA Experiment 20000439 PARAMETER Experiment Name: At_Roots__P Parameter: Organism Value: A. thaliana
  misc_feature: MA Experiment 20000439 PARAMETER Experiment Name: At_Roots__P Parameter: Tissue Value: Roots vs. Whole Plant
  misc_feature: MA Experiment ID: 20000527 Result: Down-regulated in Transcription
  misc_feature: MA Experiment 20000527 PARAMETER Experiment Name: At_10percent_PEG_P Parameter: Age (day) Value: 20
  misc_feature: MA Experiment 20000527 PARAMETER Experiment Name: At_10percent_PEG_P Parameter: Organism Value: A. thaliana
  misc_feature: MA Experiment 20000527 PARAMETER Experiment Name: At_10percent_PEG_P Parameter: Plant Line Value: WS
  misc_feature: MA Experiment 20000527 PARAMETER Experiment Name: At_10percent_PEG_P Parameter: Timepoint (day) Value: 20
  misc_feature: MA Experiment 20000527 PARAMETER Experiment Name: At_10percent_PEG_P Parameter: Tissue Value: Whole Plant
  misc_feature: MA Experiment 20000527 PARAMETER Experiment Name: At_10percent_PEG_P Parameter: Treatment Value: 10percent PEG vs. No Treatment

SEQ ID NO: 95421 - protein, 204 aa, Arabidopsis thaliana; identical to SEQ ID NO: 44280
  peptide (1)..(204): Ceres Seq. ID no. 12728701
  misc_feature (48)..(196): Pfam Name: Cupin Pfam Description: Cupin
  misc_feature (1)..(204): Homolog of NCBI NO: 18202452 NR Description: Germin-like protein subfamily T member 1 >gi|8778295|gb|AAF79304.1|AC068602_27 F14D16.12 [Arabidopsis
  misc_feature (1)..(204): Homolog of NCBI NO: 18394676 NR Description: germin, putative; protein id: At1g18970.1,
  misc_feature (1)..(204): Homolog of NCBI NO: 15221902 NR Description: germin, putative; protein id: At1g18980.1,
  misc_feature (6)..(202): Homolog of NCBI NO: 25044823 NR Description: germin-like protein [Ananas comosus]
  misc_feature (4)..(202): Homolog of NCBI NO: 15221388 NR Description: germin subunit, putative; protein id: At1g74820.1
  misc_feature (4)..(203): Homolog of NCBI NO: 11967814 NR Description: oxalate oxidase [Lolium perenne]
  misc_feature (8)..(202): Homolog of NCBI NO: 34902528 NR Description: probable germin protein 4 [Oryza sativa (japonica
  misc_feature (4)..(203): Homolog of NCBI NO: 1171937 NR Description: Oxalate oxidase 2 precursor (Germin)
  misc_feature (4)..(203): Homolog of NCBI NO: 21912428 NR Description: oxalate oxidase 2 [Lolium perenne]
  misc_feature (4)..(203): Homolog of NCBI NO: 22138786 NR Description: oxalate oxidase [Lolium perenne]

SEQ ID NO: 95422 - protein, 123 aa, Arabidopsis thaliana; identical to SEQ ID NO: 91666
  peptide (1)..(123): Ceres Seq. ID no. 12728702
  misc_feature (1)..(115): Pfam Name: Cupin Pfam Description: Cupin
  misc_feature (1)..(123): Homolog of NCBI NO: 18202452 NR Description: Germin-like protein subfamily T member 1 >gi|8778295|gb|AAF79304.1|AC068602_27 F14D16.12 [Arabidopsis
  misc_feature (1)..(123): Homolog of NCBI NO: 18394676 NR Description: germin, putative; protein id: At1g18970.1,
  misc_feature (1)..(123): Homolog of NCBI NO: 15221902 NR Description: germin, putative; protein id: At1g18980.1,
  misc_feature (1)..(121): Homolog of NCBI NO: 25044823 NR Description: germin-like protein [Ananas comosus]
  misc_feature (1)..(121): Homolog of NCBI NO: 15221388 NR Description: germin subunit, putative; protein id: At1g74820.1
  misc_feature (1)..(122): Homolog of NCBI NO: 11967814 NR Description: oxalate oxidase [Lolium perenne]
  misc_feature (1)..(121): Homolog of NCBI NO: 34902528 NR Description: probable germin protein 4 [Oryza sativa (japonica
  misc_feature (1)..(122): Homolog of NCBI NO: 1171937 NR Description: Oxalate oxidase 2 precursor (Germin)
  misc_feature (1)..(122): Homolog of NCBI NO: 21912428 NR Description: oxalate oxidase 2 [Lolium perenne]
  misc_feature (1)..(122): Homolog of NCBI NO: 22138786 NR Description: oxalate oxidase [Lolium perenne]

SEQ ID NO: 95423 - DNA, 1736 bp, Arabidopsis thaliana; identical to SEQ ID NO: 91667
  misc_feature (1)..(1736): Ceres Seq. ID no. 12728711
  misc_feature: MA Experiment ID: 20000184 Result: Down-regulated in Transcription
  misc_feature: MA Experiment 20000184 PARAMETER Experiment Name: At_Shoots__P Parameter: Age (day) Value: 7
  misc_feature: MA Experiment 20000184 PARAMETER Experiment Name: At_Shoots__P Parameter: Tissue Value: Shoots vs. Whole Plant

SEQ ID NO: 95424 - protein, 506 aa, Arabidopsis thaliana; identical to SEQ ID NO: 91668
  peptide (1)..(506): Ceres Seq. ID no. 12728712
  misc_feature (121)..(478): Pfam Name: Glycosyl hydrolases family 28 Pfam Description: Glycosyl hydrolases family 28
  misc_feature (1)..(506): Homolog of NCBI NO: 15221958 NR Description: polygalacturonase, putative; protein id:
  misc_feature (1)..(506): Homolog of NCBI NO: 19698861 NR Description: unknown protein [Arabidopsis thaliana]
  misc_feature (157)..(506): Homolog of NCBI NO: 25518077 NR Description: T29M8.4 protein - Arabidopsis thaliana
  misc_feature (1)..(158): Homolog of NCBI NO: 25518077 NR Description: T29M8.4 protein - Arabidopsis thaliana
  misc_feature (27)..(506): Homolog of NCBI NO: 15229188 NR Description: polygalacturonase, putative; protein id: supported by cDNA: gi_15215708 [Arabidopsis thaliana]
  misc_feature (27)..(506): Homolog of NCBI NO: 23506093 NR Description: At3g42950/F18P9_110 [Arabidopsis thaliana]
  misc_feature (78)..(478): Homolog of NCBI NO: 22329119 NR Description: polygalacturonase, putative; protein id: [Arabidopsis thaliana] >gi|27754320|gb|AAO22613.1| putative [Arabidopsis thaliana] >gi|28393881|gb|AAO42348.1| putative
  misc_feature (83)..(479): Homolog of NCBI NO: 40714685 NR Description: putative polygalacturonase [Oryza sativa
  misc_feature (80)..(479): Homolog of NCBI NO: 34897760 NR Description: ESTs AU029388(E30287),D49277(S16474) correspond a region of the predicted gene.~Similar to Arabidopsis thaliana
  misc_feature (83)..(467): Homolog of NCBI NO: 18412253 NR Description: polygalacturonase, putative; protein id: supported by cDNA: gi_13358184 [Arabidopsis thaliana] AT3g62110 [Arabidopsis thaliana] >gi|23397166|gb|AAN31866.1|

SEQ ID NO: 95425 - protein, 364 aa, Arabidopsis thaliana; identical to SEQ ID NO: 91669
  peptide (1)..(364): Ceres Seq. ID no. 12728713
  misc_feature (1)..(336): Pfam Name: Glycosyl hydrolases family 28 Pfam Description: Glycosyl hydrolases family 28
  misc_feature (1)..(364): Homolog of NCBI NO: 15221958 NR Description: polygalacturonase, putative; protein id:
  misc_feature (1)..(364): Homolog of NCBI NO: 19698861 NR Description: unknown protein [Arabidopsis thaliana]
  misc_feature (15)..(364): Homolog of NCBI NO: 25518077 NR Description: T29M8.4 protein - Arabidopsis thaliana
  misc_feature (1)..(16): Homolog of NCBI NO: 25518077 NR Description: T29M8.4 protein - Arabidopsis thaliana
  misc_feature (1)..(364): Homolog of NCBI NO: 15229188 NR Description: polygalacturonase, putative; protein id: supported by cDNA: gi_15215708 [Arabidopsis thaliana]
  misc_feature (1)..(364): Homolog of NCBI NO: 23506093 NR Description: At3g42950/F18P9_110 [Arabidopsis thaliana]
  misc_feature (1)..(336): Homolog of NCBI NO: 22329119 NR Description: polygalacturonase, putative; protein id: [Arabidopsis thaliana] >gi|27754320|gb|AAO22613.1| putative [Arabidopsis thaliana] >gi|28393881|gb|AAO42348.1| putative
  misc_feature (1)..(337): Homolog of NCBI NO: 40714685 NR Description: putative polygalacturonase [Oryza sativa
  misc_feature (1)..(337): Homolog of NCBI NO: 34897760 NR Description: ESTs AU029388(E30287),D49277(S16474) correspond a region of the predicted gene.~Similar to Arabidopsis thaliana
  misc_feature (1)..(325): Homolog of NCBI NO: 18412253 NR Description: polygalacturonase, putative; protein id: supported by cDNA: gi_13358184 [Arabidopsis thaliana] AT3g62110 [Arabidopsis thaliana] >gi|23397166|gb|AAN31866.1|

SEQ ID NO: 95426 - protein, 342 aa, Arabidopsis thaliana; identical to SEQ ID NO: 79534
  peptide (1)..(342): Ceres Seq. ID no. 12728714
  misc_feature (1)..(314): Pfam Name: Glycosyl hydrolases family 28 Pfam Description: Glycosyl hydrolases family 28
  misc_feature (1)..(342): Homolog of NCBI NO: 15221958 NR Description: polygalacturonase, putative; protein id:
  misc_feature (1)..(342): Homolog of NCBI NO: 19698861 NR Description: unknown protein [Arabidopsis thaliana]
  misc_feature (1)..(342): Homolog of NCBI NO: 25518077 NR Description: T29M8.4 protein - Arabidopsis thaliana
  misc_feature (1)..(342): Homolog of NCBI NO: 15229188 NR Description: polygalacturonase, putative; protein id: supported by cDNA: gi_15215708 [Arabidopsis thaliana]
  misc_feature (1)..(342): Homolog of NCBI NO: 23506093 NR Description: At3g42950/F18P9_110 [Arabidopsis thaliana]
  misc_feature (1)..(314): Homolog of NCBI NO: 22329119 NR Description: polygalacturonase, putative; protein id: [Arabidopsis thaliana] >gi|27754320|gb|AAO22613.1| putative [Arabidopsis thaliana] >gi|28393881|gb|AAO42348.1| putative
  misc_feature (1)..(315): Homolog of NCBI NO: 40714685 NR Description: putative polygalacturonase [Oryza sativa
  misc_feature (1)..(315): Homolog of NCBI NO: 34897760 NR Description: ESTs AU029388(E30287),D49277(S16474) correspond a region of the predicted gene.~Similar to Arabidopsis thaliana
  misc_feature (1)..(303): Homolog of NCBI NO: 18412253 NR Description: polygalacturonase, putative; protein id: supported by cDNA: gi_13358184 [Arabidopsis thaliana] AT3g62110 [Arabidopsis thaliana] >gi|23397166|gb|AAN31866.1|
  misc_feature (1)..(314): Homolog of NCBI NO: 34912726 NR Description: putative polygalacturonase [Oryza sativa cultivar- group)] >gi|15623906|dbj|BAB67963.1| putative

SEQ ID NO: 95427 - DNA, 537 bp, Arabidopsis thaliana; identical to SEQ ID NO: 91671
  misc_feature (1)..(537): Ceres Seq. ID no. 12728715
  misc_feature: MA Experiment ID: 20000184 Result: Down-regulated in Transcription
  misc_feature: MA Experiment 20000184 PARAMETER Experiment Name: At_Shoots__P Parameter: Age (day) Value: 7
  misc_feature: MA Experiment 20000184 PARAMETER Experiment Name: At_Shoots__P Parameter: Tissue Value: Shoots vs. Whole Plant
  misc_feature: MA Experiment ID: 20000264 Result: Down-regulated in Transcription
  misc_feature: MA Experiment 20000264 PARAMETER Experiment Name: At_Open_Flower_P Parameter: Age (day) Value: 21
  misc_feature: MA Experiment 20000264 PARAMETER Experiment Name: At_Open_Flower_P Parameter: Plant Line Value: WS
  misc_feature: MA Experiment 20000264 PARAMETER Experiment Name: At_Open_Flower_P Parameter: Tissue Value: Open Flower vs. Whole Plant
  misc_feature: MA Experiment ID: 20000265 Result: Down-regulated in Transcription
  misc_feature: MA Experiment 20000265 PARAMETER Experiment Name: At_Open_Flower_P Parameter: Age (day) Value: 21
  misc_feature: MA Experiment 20000265 PARAMETER Experiment Name: At_Open_Flower_P Parameter: Plant Line Value: WS
  misc_feature: MA Experiment 20000265 PARAMETER Experiment Name: At_Open_Flower_P Parameter: Tissue Value: Closed Flower vs. Whole Plant
  misc_feature: MA Experiment ID: 20000267 Result: Up-regulated in Transcription
  misc_feature: MA Experiment 20000267 PARAMETER Experiment Name: At_Drought_P Parameter: Age (day) Value: 7
  misc_feature: MA Experiment 20000267 PARAMETER Experiment Name: At_Drought_P Parameter: Organism Value: A. thaliana
  misc_feature: MA Experiment 20000267 PARAMETER Experiment Name: At_Drought_P Parameter: Plant Line Value: WS
  misc_feature: MA Experiment 20000267 PARAMETER Experiment Name: At_Drought_P Parameter: Timepoint (hr) Value: 6
  misc_feature: MA Experiment 20000267 PARAMETER Experiment Name: At_Drought_P Parameter: Tissue Value: Whole Plant
  misc_feature: MA Experiment 20000267 PARAMETER Experiment Name: At_Drought_P Parameter: Treatment Value: Drought vs. No Drought
  misc_feature: MA Experiment ID: 20000286 Result: Down-regulated in Transcription
  misc_feature: MA Experiment 20000286 PARAMETER Experiment Name: At_Open_Flower_P Parameter: Age (day) Value: 21
  misc_feature: MA Experiment 20000286 PARAMETER Experiment Name: At_Open_Flower_P Parameter: Plant Line Value: WS
  misc_feature: MA Experiment 20000286 PARAMETER Experiment Name: At_Open_Flower_P Parameter: Tissue Value: Half Open vs. Whole Plant
  misc_feature: MA Experiment ID: 20000527 Result: Up-regulated in Transcription
  misc_feature: MA Experiment 20000527 PARAMETER Experiment Name: At_10percent_PEG_P Parameter: Age (day) Value: 20
  misc_feature: MA Experiment 20000527 PARAMETER Experiment Name: At_10percent_PEG_P Parameter: Organism Value: A. thaliana
  misc_feature: MA Experiment 20000527 PARAMETER Experiment Name: At_10percent_PEG_P Parameter: Plant Line Value: WS
  misc_feature: MA Experiment 20000527 PARAMETER Experiment Name: At_10percent_PEG_P Parameter: Timepoint (day) Value: 20
  misc_feature: MA Experiment 20000527 PARAMETER Experiment Name: At_10percent_PEG_P Parameter: Tissue Value: Whole Plant
  misc_feature: MA Experiment 20000527 PARAMETER Experiment Name: At_10percent_PEG_P Parameter: Treatment Value: 10percent PEG vs. No Treatment
  misc_feature: MA Experiment ID: 20001773 Result: Down-regulated in Transcription
  misc_feature: MA Experiment 20001773 PARAMETER Experiment Name: At_Far-red-enriched-adult_P Parameter: Age (day) Value: 30
  misc_feature: MA Experiment 20001773 PARAMETER Experiment Name: At_Far-red-enriched-adult_P Parameter: Light Value: Far-red enriched vs. White
  misc_feature: MA Experiment 20001773 PARAMETER Experiment Name: At_Far-red-enriched-adult_P Parameter: Organism Value: A. thaliana
  misc_feature: MA Experiment 20001773 PARAMETER Experiment Name: At_Far-red-enriched-adult_P Parameter: Plant Line Value: Columbia
  misc_feature: MA Experiment 20001773 PARAMETER Experiment Name: At_Far-red-enriched-adult_P Parameter: Timepoint (hr) Value: 48
  misc_feature: MA Experiment 20001773 PARAMETER Experiment Name: At_Far-red-enriched-adult_P Parameter: Tissue Value: Aerial

SEQ ID NO: 95428 - protein, 178 aa, Arabidopsis thaliana; identical to SEQ ID NO: 91672
  peptide (1)..(178): Ceres Seq. ID no. 12728716
  misc_feature (2)..(66): Pfam Name: AP2 domain Pfam Description: AP2 domain
  misc_feature (1)..(178): Homolog of NCBI NO: 22329667 NR Description: AP2 domain transcription factor, putative; id: At1g19210.1, supported by cDNA: gi_12083251 [Arabidopsis
  misc_feature (1)..(178): Homolog of NCBI NO: 29893536 NR Description: putative AP2 domain transcription factor
  misc_feature (1)..(178): Homolog of NCBI NO: 15222040 NR Description: AP2 domain containing protein, putative; protein At1g74930.1 [Arabidopsis thaliana] >gi|25352178|pir||A96779
  misc_feature (4)..(90): Homolog of NCBI NO: 22326940 NR Description: similar to AP2 domain transcription factor, protein id: At5g21960.1 [Arabidopsis thaliana] putative protein [Arabidopsis thaliana]
  misc_feature (5)..(88): Homolog of NCBI NO: 18417729 NR Description: AP2-domain transcription factor, putative;
  misc_feature (7)..(88): Homolog of NCBI NO: 25407707 NR Description: hypothetical protein AT4g31060 [imported] - thaliana >gi|2980760|emb|CAA18187.1| putative protein thaliana] >gi|7270008|emb|CAB79824.1| putative protein
  misc_feature (4)..(178): Homolog of NCBI NO: 15219452 NR Description: transcription factor, putative; protein id: [Arabidopsis thaliana] >gi|25352175|pir||D96507 hypothetical
  misc_feature (5)..(98): Homolog of NCBI NO: 15234561 NR Description: AP2 domain protein RAP2.10; protein id:
  misc_feature (5)..(98): Homolog of NCBI NO: 25456718 NR Description: TINY-like protein [imported] - Arabidopsis (fragment) >gi|2281645|gb|AAC49776.1| AP2 domain containing
  misc_feature (4)..(91): Homolog of NCBI NO: 15224024 NR Description: hypothetical protein; protein id: At1g77640.1

SEQ ID NO: 95429 - DNA, 819 bp, Arabidopsis thaliana; identical to SEQ ID NO: 91673
  misc_feature (1)..(819): Ceres Seq. ID no. 12728717
  misc_feature: MA Experiment ID: 108461 Result: Up-regulated in Transcription
  misc_feature: MA Experiment 108461 PARAMETER Experiment Name: At_Germinating_Seeds_cDNA_P Parameter: Age (day) Value: 1 vs. 0
  misc_feature: MA Experiment 108461 PARAMETER Experiment Name: At_Germinating_Seeds_cDNA_P Parameter: Tissue Value: Germinating Seeds
  misc_feature: MA Experiment ID: 108462 Result: Up-regulated in Transcription
  misc_feature: MA Experiment 108462 PARAMETER Experiment Name: At_Germinating_Seeds_cDNA_P Parameter: Age (day) Value: 2 vs. 0
  misc_feature: MA Experiment 108462 PARAMETER Experiment Name: At_Germinating_Seeds_cDNA_P Parameter: Tissue Value: Germinating Seeds
  misc_feature: MA Experiment ID: 108463 Result: Up-regulated in Transcription
  misc_feature: MA Experiment 108463 PARAMETER Experiment Name: At_Germinating_Seeds_cDNA_P Parameter: Age (day) Value: 3 vs. 0
  misc_feature: MA Experiment 108463 PARAMETER Experiment Name: At_Germinating_Seeds_cDNA_P Parameter: Tissue Value: Germinating Seeds
  misc_feature: MA Experiment ID: 20000180 Result: Up-regulated in Transcription
  misc_feature: MA Experiment 20000180 PARAMETER Experiment Name: At_Germinating_Seeds_P Parameter: Age (hr) Value: 24 vs. 0
  misc_feature: MA Experiment 20000180 PARAMETER Experiment Name: At_Germinating_Seeds_P Parameter: Tissue Value: Germinating Seeds
  misc_feature: MA Experiment ID: 20000185 Result: Up-regulated in Transcription
  misc_feature: MA Experiment 20000185 PARAMETER Experiment Name: At_Roots__P Parameter: Age (day) Value: 7 vs. 21
  misc_feature: MA Experiment 20000185 PARAMETER Experiment Name: At_Roots__P Parameter: Organism Value: A. thaliana
  misc_feature: MA Experiment 20000185 PARAMETER Experiment Name: At_Roots__P Parameter: Tissue Value: Roots vs. Whole Plant
  misc_feature: MA Experiment ID: 20000227 Result: Up-regulated in Transcription
  misc_feature: MA Experiment 20000227 PARAMETER Experiment Name: At_Root-Tips-vs-Tops_P Parameter: Tissue Value: Root Tips vs. Root Tops
  misc_feature: MA Experiment ID: 20000264 Result: Up-regulated in Transcription
  misc_feature: MA Experiment 20000264 PARAMETER Experiment Name: At_Open_Flower_P Parameter: Age (day) Value: 21
  misc_feature: MA Experiment 20000264 PARAMETER Experiment Name: At_Open_Flower_P Parameter: Plant Line Value: WS
  misc_feature: MA Experiment 20000264 PARAMETER Experiment Name: At_Open_Flower_P Parameter: Tissue Value: Open Flower vs. Whole Plant
  misc_feature: MA Experiment ID: 20000265 Result: Up-regulated in Transcription
  misc_feature: MA Experiment 20000265 PARAMETER Experiment Name: At_Open_Flower_P Parameter: Age (day) Value: 21
  misc_feature: MA Experiment 20000265 PARAMETER Experiment Name: At_Open_Flower_P Parameter: Plant Line Value: WS
  misc_feature: MA Experiment 20000265 PARAMETER Experiment Name: At_Open_Flower_P Parameter: Tissue Value: Closed Flower vs. Whole Plant
  misc_feature: MA Experiment ID: 20000286 Result: Up-regulated in Transcription
  misc_feature: MA Experiment 20000286 PARAMETER Experiment Name: At_Open_Flower_P Parameter: Age (day) Value: 21
  misc_feature: MA Experiment 20000286 PARAMETER Experiment Name: At_Open_Flower_P Parameter: Plant Line Value: WS
  misc_feature: MA Experiment 20000286 PARAMETER Experiment Name: At_Open_Flower_P Parameter: Tissue Value: Half Open vs. Whole Plant
  misc_feature: MA Experiment ID: 20000439 Result: Up-regulated in Transcription
  misc_feature: MA Experiment 20000439 PARAMETER Experiment Name: At_Roots__P Parameter: Age (day) Value: 14 vs. 21
  misc_feature: MA Experiment 20000439 PARAMETER Experiment Name: At_Roots__P Parameter: Organism Value: A. thaliana
  misc_feature: MA Experiment 20000439 PARAMETER Experiment Name: At_Roots__P Parameter: Tissue Value: Roots vs. Whole Plant

SEQ ID NO: 95430 - protein, 173 aa, Arabidopsis thaliana; identical to SEQ ID NO: 29808
  peptide (1)..(173): Ceres Seq. ID no. 12728718
  misc_feature (88)..(143): Pfam Name: OB-fold nucleic acid binding domain Pfam Description: OB-fold nucleic acid binding domain
  misc_feature (37)..(173): Homolog of NCBI NO: 18395285 NR Description: expressed protein; protein id: At1g23750.1, by cDNA: 15450. [Arabidopsis thaliana] >gi|25341929|pir||F86371
  misc_feature (33)..(171): Homolog of NCBI NO: 30681801 NR Description: expressed protein [Arabidopsis thaliana]
  misc_feature (37)..(171): Homolog of NCBI NO: 18391179 NR Description: expressed protein; protein id: At1g10590.1, by cDNA: 7488., supported by cDNA: gi_14335099, supported by gi_15027864 [Arabidopsis thaliana] >gi|14335100|gb|AAK59829.1|
  misc_feature (33)..(111): Homolog of NCBI NO: 6573753 NR Description: F20B24.1 [Arabidopsis thaliana]
  misc_feature (112)..(171): Homolog of NCBI NO: 6573753 NR Description: F20B24.1 [Arabidopsis thaliana]
  misc_feature (37)..(171): Homolog of NCBI NO: 34909622 NR Description: P0435B05.31 [Oryza sativa (japonica
  misc_feature (46)..(173): Homolog of NCBI NO: 18403397 NR Description: Expressed protein; protein id: At2g33845.1, by cDNA: 32001. [Arabidopsis thaliana] Expressed protein [Arabidopsis thaliana]
  misc_feature (38)..(173): Homolog of NCBI NO: 34904470 NR Description: OSJNBa0086P08.14 [Oryza sativa (japonica
  misc_feature (45)..(173): Homolog of NCBI NO: 24413970 NR Description: contains EST AU181579(C50456)~similar to Oryza
  misc_feature (37)..(171): Homolog of NCBI NO: 15235304 NR Description: putative protein; protein id: At4g28440.1, by cDNA: 41008., supported by cDNA: gi_15292942, supported by gi_15912308, supported by cDNA: gi_20259656 [Arabidopsis

SEQ ID NO: 95431 - protein, 137 aa, Arabidopsis thaliana; identical to SEQ ID NO: 29809
  peptide (1)..(137): Ceres Seq. ID no. 12728719
  misc_feature (52)..(107): Pfam Name: OB-fold nucleic acid binding domain Pfam Description: OB-fold nucleic acid binding domain
  misc_feature (1)..(137): Homolog of NCBI NO: 18395285 NR Description: expressed protein; protein id: At1g23750.1, by cDNA: 15450. [Arabidopsis thaliana] >gi|25341929|pir||F86371
  misc_feature (1)..(135): Homolog of NCBI NO: 30681801 NR Description: expressed protein [Arabidopsis thaliana]
  misc_feature (1)..(135): Homolog of NCBI NO: 18391179 NR Description: expressed protein; protein id: At1g10590.1, by cDNA: 7488., supported by cDNA: gi_14335099, supported by gi_15027864 [Arabidopsis thaliana] >gi|14335100|gb|AAK59829.1|
  misc_feature (1)..(75): Homolog of NCBI NO: 6573753 NR Description: F20B24.1 [Arabidopsis thaliana]
  misc_feature (76)..(135): Homolog of NCBI NO: 6573753 NR Description: F20B24.1 [Arabidopsis thaliana]
  misc_feature (1)..(135): Homolog of NCBI NO: 34909622 NR Description: P0435B05.31 [Oryza sativa (japonica
  misc_feature (10)..(137): Homolog of NCBI NO: 18403397 NR Description: Expressed protein; protein id: At2g33845.1, by cDNA: 32001. [Arabidopsis thaliana] Expressed protein [Arabidopsis thaliana]
  misc_feature (2)..(137): Homolog of NCBI NO: 34904470 NR Description: OSJNBa0086P08.14 [Oryza sativa (japonica
  misc_feature (9)..(137): Homolog of NCBI NO: 24413970 NR Description: contains EST AU181579(C50456)~similar to Oryza
  misc_feature (1)..(135): Homolog of NCBI NO: 15235304 NR Description: putative protein; protein id: At4g28440.1, by cDNA: 41008., supported by cDNA: gi_15292942, supported by gi_15912308, supported by cDNA: gi_20259656 [Arabidopsis

SEQ ID NO: 95432 - protein, 100 aa, Arabidopsis thaliana; identical to SEQ ID NO: 29810
  peptide (1)..(100): Ceres Seq. ID no. 12728720
  misc_feature (15)..(70): Pfam Name: OB-fold nucleic acid binding domain Pfam Description: OB-fold nucleic acid binding domain
  misc_feature (1)..(100): Homolog of NCBI NO: 18395285 NR Description: expressed protein; protein id: At1g23750.1, by cDNA: 15450. [Arabidopsis thaliana] >gi|25341929|pir||F86371
  misc_feature (1)..(98): Homolog of NCBI NO: 30681801 NR Description: expressed protein [Arabidopsis thaliana]
  misc_feature (1)..(98): Homolog of NCBI NO: 18391179 NR Description: expressed protein; protein id: At1g10590.1, by cDNA: 7488., supported by cDNA: gi_14335099, supported by gi_15027864 [Arabidopsis thaliana] >gi|14335100|gb|AAK59829.1|
  misc_feature (1)..(38): Homolog of NCBI NO: 6573753 NR Description: F20B24.1 [Arabidopsis thaliana]
  misc_feature (39)..(98): Homolog of NCBI NO: 6573753 NR Description: F20B24.1 [Arabidopsis thaliana]
  misc_feature (1)..(98): Homolog of NCBI NO: 34909622 NR Description: P0435B05.31 [Oryza sativa (japonica
  misc_feature (1)..(100): Homolog of NCBI NO: 18403397 NR Description: Expressed protein; protein id: At2g33845.1, by cDNA: 32001. [Arabidopsis thaliana] Expressed protein [Arabidopsis thaliana]
  misc_feature (1)..(100): Homolog of NCBI NO: 34904470 NR Description: OSJNBa0086P08.14 [Oryza sativa (japonica
  misc_feature (1)..(100): Homolog of NCBI NO: 24413970 NR Description: contains EST AU181579(C50456)~similar to Oryza
  misc_feature (1)..(98): Homolog of NCBI NO: 15235304 NR Description: putative protein; protein id: At4g28440.1, by cDNA: 41008., supported by cDNA: gi_15292942, supported by gi_15912308, supported by cDNA: gi_20259656 [Arabidopsis

SEQ ID NO: 95433 - DNA, 1360 bp, Arabidopsis thaliana; identical to SEQ ID NO: 91677
  misc_feature (1)..(1360): Ceres Seq. ID no. 12728755
  misc_feature: MA Experiment ID: 108462 Result: Up-regulated in Transcription
  misc_feature: MA Experiment 108462 PARAMETER Experiment Name: At_Germinating_Seeds_cDNA_P Parameter: Age (day) Value: 2 vs. 0
  misc_feature: MA Experiment 108462 PARAMETER Experiment Name: At_Germinating_Seeds_cDNA_P Parameter: Tissue Value: Germinating Seeds
  misc_feature: MA Experiment ID: 108463 Result: Up-regulated in Transcription
  misc_feature: MA Experiment 108463 PARAMETER Experiment Name: At_Germinating_Seeds_cDNA_P Parameter: Age (day) Value: 3 vs. 0
  misc_feature: MA Experiment 108463 PARAMETER Experiment Name: At_Germinating_Seeds_cDNA_P Parameter: Tissue Value: Germinating Seeds
  misc_feature: MA Experiment ID: 108464 Result: Up-regulated in Transcription
  misc_feature: MA Experiment 108464 PARAMETER Experiment Name: At_Germinating_Seeds_cDNA_P Parameter: Age (day) Value: 4 vs. 0
  misc_feature: MA Experiment 108464 PARAMETER Experiment Name: At_Germinating_Seeds_cDNA_P Parameter: Tissue Value: Germinating Seeds
  misc_feature: MA Experiment ID: 108572 Result: Down-regulated in Transcription
  misc_feature: MA Experiment 108572 PARAMETER Experiment Name: At_Drought_cDNA_P Parameter: Timepoint (hr) Value: 1
  misc_feature: MA Experiment 108572 PARAMETER Experiment Name: At_Drought_cDNA_P Parameter: Tissue Value: Aerial
  misc_feature: MA Experiment 108572 PARAMETER Experiment Name: At_Drought_cDNA_P Parameter: Treatment Value: Drought vs. No Drought
  misc_feature: MA Experiment ID: 108594 Result: Up-regulated in Transcription
  misc_feature: MA Experiment 108594 PARAMETER Experiment Name: At_Ler-rhl_Root_cDNA_P Parameter: Plant Line Value: null
  misc_feature: MA Experiment ID: 20000069 Result: Up-regulated in Transcription
  misc_feature: MA Experiment 20000069 PARAMETER Experiment Name: At_100uM_ABA_Mutants_cDNA_P Parameter: Plant Line Value: CS23
  misc_feature: MA Experiment 20000069 PARAMETER Experiment Name: At_100uM_ABA_Mutants_cDNA_P Parameter: Timepoint (hr) Value: 6
  misc_feature: MA Experiment 20000069 PARAMETER Experiment Name: At_100uM_ABA_Mutants_cDNA_P Parameter: Tissue Value: Aerial
  misc_feature: MA Experiment 20000069 PARAMETER Experiment Name: At_100uM_ABA_Mutants_cDNA_P Parameter: Treatment Value: 100uM ABA vs. No Treatment
  misc_feature: MA Experiment ID: 20000070 Result: Up-regulated in Transcription
  misc_feature: MA Experiment 20000070 PARAMETER Experiment Name: At_100uM_ABA_Mutants_cDNA_P Parameter: Plant Line Value: CS24
  misc_feature: MA Experiment 20000070 PARAMETER Experiment Name: At_100uM_ABA_Mutants_cDNA_P Parameter: Timepoint (hr) Value: 6
  misc_feature: MA Experiment 20000070 PARAMETER Experiment Name: At_100uM_ABA_Mutants_cDNA_P Parameter: Tissue Value: Aerial
  misc_feature: MA Experiment 20000070 PARAMETER Experiment Name: At_100uM_ABA_Mutants_cDNA_P Parameter: Treatment Value: 100uM ABA vs. No Treatment
  misc_feature: MA Experiment ID: 20000071 Result: Up-regulated in Transcription
  misc_feature: MA Experiment 20000071 PARAMETER Experiment Name: At_100uM_ABA_Mutants_cDNA_P Parameter: Plant Line Value: CS8104
  misc_feature: MA Experiment 20000071 PARAMETER Experiment Name: At_100uM_ABA_Mutants_cDNA_P Parameter: Timepoint (hr) Value: 6
  misc_feature: MA Experiment 20000071 PARAMETER Experiment Name: At_100uM_ABA_Mutants_cDNA_P Parameter: Tissue Value: Aerial
  misc_feature: MA Experiment 20000071 PARAMETER Experiment Name: At_100uM_ABA_Mutants_cDNA_P Parameter: Treatment Value: 100uM ABA vs. No Treatment
  misc_feature: MA Experiment ID: 20000072 Result: Up-regulated in Transcription
  misc_feature: MA Experiment 20000072 PARAMETER Experiment Name: At_100uM_ABA_Mutants_cDNA_P Parameter: Plant Line Value: CS8105
  misc_feature: MA Experiment 20000072 PARAMETER Experiment Name: At_100uM_ABA_Mutants_cDNA_P Parameter: Timepoint (hr) Value: 6
  misc_feature: MA Experiment 20000072 PARAMETER Experiment Name: At_100uM_ABA_Mutants_cDNA_P Parameter: Tissue Value: Aerial
  misc_feature: MA Experiment 20000072 PARAMETER Experiment Name: At_100uM_ABA_Mutants_cDNA_P Parameter: Treatment Value: 100uM ABA vs. No Treatment
  misc_feature: MA Experiment ID: 20000086 Result: Up-regulated in Transcription
  misc_feature: MA Experiment 20000086 PARAMETER Experiment Name: At_100uM_ABA_Mutants_cDNA_P Parameter: Plant Line Value: CS22
  misc_feature: MA Experiment 20000086 PARAMETER Experiment Name: At_100uM_ABA_Mutants_cDNA_P Parameter: Timepoint (hr) Value: 6
  misc_feature: MA Experiment 20000086 PARAMETER Experiment Name: At_100uM_ABA_Mutants_cDNA_P Parameter: Tissue Value: Aerial
  misc_feature: MA Experiment 20000086 PARAMETER Experiment Name: At_100uM_ABA_Mutants_cDNA_P Parameter: Treatment Value: 100uM ABA vs. No Treatment
  misc_feature: MA Experiment ID: 20000087 Result: Up-regulated in Transcription
  misc_feature: MA Experiment 20000087 PARAMETER Experiment Name: At_100uM_ABA_Mutants_cDNA_P Parameter: Plant Line Value: WS
  misc_feature: MA Experiment 20000087 PARAMETER Experiment Name: At_100uM_ABA_Mutants_cDNA_P Parameter: Timepoint (hr) Value: 6
  misc_feature: MA Experiment 20000087 PARAMETER Experiment Name: At_100uM_ABA_Mutants_cDNA_P Parameter: Tissue Value: Aerial
  misc_feature: MA Experiment 20000087 PARAMETER Experiment Name: At_100uM_ABA_Mutants_cDNA_P Parameter: Treatment Value: 100uM ABA vs. No Treatment
  misc_feature: MA Experiment ID: 20000111 Result: Down-regulated in Transcription
  misc_feature: MA Experiment 20000111 PARAMETER Experiment Name: At_42deg_Heat_cDNA_P Parameter: Temperature (deg C) Value: 42 vs. 22
  misc_feature: MA Experiment 20000111 PARAMETER Experiment Name: At_42deg_Heat_cDNA_P Parameter: Timepoint (hr) Value: 6
  misc_feature: MA Experiment 20000111 PARAMETER Experiment Name: At_42deg_Heat_cDNA_P Parameter: Tissue Value: Aerial
  misc_feature: MA Experiment ID: 20000113 Result: Down-regulated in Transcription
  misc_feature: MA Experiment 20000113 PARAMETER Experiment Name: At_42deg_Heat_cDNA_P Parameter: Temperature (deg C) Value: 42 vs. 22
  misc_feature: MA Experiment 20000113 PARAMETER Experiment Name: At_42deg_Heat_cDNA_P Parameter: Timepoint (hr) Value: 8
  misc_feature: MA Experiment 20000113 PARAMETER Experiment Name: At_42deg_Heat_cDNA_P Parameter: Tissue Value: Aerial
  misc_feature: MA Experiment ID: 20000117 Result: Up-regulated in Transcription
  misc_feature: MA Experiment 20000117 PARAMETER Experiment Name: At_100uM_ABA_Mutants_cDNA_P Parameter: Plant Line Value: Columbia
  misc_feature: MA Experiment 20000117 PARAMETER Experiment Name: At_100uM_ABA_Mutants_cDNA_P Parameter: Timepoint (hr) Value: 6
  misc_feature: MA Experiment 20000117 PARAMETER Experiment Name: At_100uM_ABA_Mutants_cDNA_P Parameter: Tissue Value: Aerial
  misc_feature: MA Experiment 20000117 PARAMETER Experiment Name: At_100uM_ABA_Mutants_cDNA_P Parameter: Treatment Value: 100uM ABA vs. No Treatment
  misc_feature: MA Experiment ID: 20000144 Result: Down-regulated in Transcription
  misc_feature: MA Experiment 20000144 PARAMETER Experiment Name: At_42deg_Heat_cDNA_P Parameter: Temperature (deg C) Value: 42 vs. 22
  misc_feature: MA Experiment 20000144 PARAMETER Experiment Name: At_42deg_Heat_cDNA_P Parameter: Timepoint (hr) Value: 1
  misc_feature: MA Experiment 20000144 PARAMETER Experiment Name: At_42deg_Heat_cDNA_P Parameter: Tissue Value: Aerial
  misc_feature: MA Experiment ID: 20000171 Result: Down-regulated in Transcription
  misc_feature: MA Experiment 20000171 PARAMETER Experiment Name: At_42deg_Heat_P Parameter: Age (day) Value: 14
  misc_feature: MA Experiment 20000171 PARAMETER Experiment Name: At_42deg_Heat_P Parameter: Organism Value: A. thaliana
  misc_feature: MA Experiment 20000171 PARAMETER Experiment Name: At_42deg_Heat_P Parameter: Plant Line Value: WS
  misc_feature: MA Experiment 20000171 PARAMETER Experiment Name: At_42deg_Heat_P Parameter: Temperature (deg C) Value: 42 vs. 22
  misc_feature: MA Experiment 20000171 PARAMETER Experiment Name: At_42deg_Heat_P Parameter: Timepoint (hr) Value: 1
  misc_feature: MA Experiment 20000171 PARAMETER Experiment Name: At_42deg_Heat_P Parameter: Tissue Value: Aerial
  misc_feature: MA Experiment ID: 20000173 Result: Down-regulated in Transcription
  misc_feature: MA Experiment 20000173 PARAMETER Experiment Name: At_42deg_Heat_P Parameter: Age (day) Value: 14
  misc_feature: MA Experiment 20000173 PARAMETER Experiment Name: At_42deg_Heat_P Parameter: Organism Value: A. thaliana
  misc_feature: MA Experiment 20000173 PARAMETER Experiment Name: At_42deg_Heat_P Parameter: Plant Line Value: WS
  misc_feature: MA Experiment 20000173 PARAMETER Experiment Name: At_42deg_Heat_P Parameter: Temperature (deg C) Value: 42 vs. 22
  misc_feature: MA Experiment 20000173 PARAMETER Experiment Name: At_42deg_Heat_P Parameter: Timepoint (hr) Value: 6
  misc_feature: MA Experiment 20000173 PARAMETER Experiment Name: At_42deg_Heat_P Parameter: Tissue Value: Aerial
  misc_feature: MA Experiment ID: 20000224 Result: Down-regulated in Transcription
  misc_feature: MA Experiment ID: 20000264 Result: Down-regulated in Transcription
  misc_feature: MA Experiment 20000264 PARAMETER Experiment Name: At_Open_Flower_P Parameter: Age (day) Value: 21
  misc_feature: MA Experiment 20000264 PARAMETER Experiment Name: At_Open_Flower_P Parameter: Plant Line Value: WS
  misc_feature: MA Experiment 20000264 PARAMETER Experiment Name: At_Open_Flower_P Parameter: Tissue Value: Open Flower vs. Whole Plant
  misc_feature: MA Experiment ID: 20000265 Result: Down-regulated in Transcription
  misc_feature: MA Experiment 20000265 PARAMETER Experiment Name: At_Open_Flower_P Parameter: Age (day) Value: 21
  misc_feature: MA Experiment 20000265 PARAMETER Experiment Name: At_Open_Flower_P Parameter: Plant Line Value: WS
  misc_feature: MA Experiment 20000265 PARAMETER Experiment Name: At_Open_Flower_P Parameter: Tissue Value: Closed Flower vs. Whole Plant
  misc_feature: MA Experiment ID: 20000268 Result: Down-regulated in Transcription
  misc_feature: MA Experiment 20000268 PARAMETER Experiment Name: At_100mM_NaCl__P Parameter: Age (day) Value: 14
  misc_feature: MA Experiment 20000268 PARAMETER Experiment Name: At_100mM_NaCl__P Parameter: Organism Value: A. thaliana
  misc_feature: MA Experiment 20000268 PARAMETER Experiment Name: At_100mM_NaCl__P Parameter: Plant Line Value: WS
  misc_feature: MA Experiment 20000268 PARAMETER Experiment Name: At_100mM_NaCl__P Parameter: Timepoint (hr) Value: 6
  misc_feature: MA Experiment 20000268 PARAMETER Experiment Name: At_100mM_NaCl__P Parameter: Tissue Value: Whole Plant
  misc_feature: MA Experiment 20000268 PARAMETER Experiment Name: At_100mM_NaCl__P Parameter: Treatment Value: 100mM NaCl vs. No Treatment
  misc_feature: MA Experiment ID: 20000286 Result: Down-regulated in Transcription
  misc_feature: MA Experiment 20000286 PARAMETER Experiment Name: At_Open_Flower_P Parameter: Age (day) Value: 21
  misc_feature: MA Experiment 20000286 PARAMETER Experiment Name: At_Open_Flower_P Parameter: Plant Line Value: WS
  misc_feature: MA Experiment 20000286 PARAMETER Experiment Name: At_Open_Flower_P Parameter: Tissue Value: Half Open vs. Whole Plant
  misc_feature: MA Experiment ID: 20000308 Result: Down-regulated in Transcription
  misc_feature: MA Experiment 20000308 PARAMETER Experiment Name: At_100mM_NaCl__P Parameter: Age (day) Value: 17
  misc_feature: MA Experiment 20000308 PARAMETER Experiment Name: At_100mM_NaCl__P Parameter: Organism Value: A. thaliana
  misc_feature: MA Experiment 20000308 PARAMETER Experiment Name: At_100mM_NaCl__P Parameter: Plant Line Value: WS
  misc_feature: MA Experiment 20000308 PARAMETER Experiment Name: At_100mM_NaCl__P Parameter: Timepoint (hr) Value: 72
  misc_feature: MA Experiment 20000308 PARAMETER Experiment Name: At_100mM_NaCl__P Parameter: Tissue Value: Whole Plant
  misc_feature: MA Experiment 20000308 PARAMETER Experiment Name: At_100mM_NaCl__P Parameter: Treatment Value: 100mM NaCl vs. No Treatment
  misc_feature: MA Experiment ID: 20000438 Result: Up-regulated in Transcription
  misc_feature: MA Experiment 20000438 PARAMETER Experiment Name: At_Shoots__P Parameter: Age (day) Value: 14
  misc_feature: MA Experiment 20000438 PARAMETER Experiment Name: At_Shoots__P Parameter: Tissue Value: Shoots vs. Whole Plant
  misc_feature: MA Experiment ID: 20000441 Result: Up-regulated in Transcription
  misc_feature: MA Experiment 20000441 PARAMETER Experiment Name: At_1uM_BR-BRZ__P Parameter: Tissue Value: Shoot Apices
  misc_feature: MA Experiment 20000441 PARAMETER Experiment Name: At_1uM_BR-BRZ__P Parameter: Treatment Value: 1uM BR vs. No Treatment
  misc_feature: MA Experiment ID: 20000443 Result: Up-regulated in Transcription
  misc_feature: MA Experiment 20000443 PARAMETER Experiment Name: At_1uM_BR-BRZ__P Parameter: Tissue Value: Shoot Apices
  misc_feature: MA Experiment 20000443 PARAMETER Experiment Name: At_1uM_BR-BRZ__P Parameter: Treatment Value: 1uM BRZ vs. No Treatment
  misc_feature: MA Experiment ID: 20000573 Result: Down-regulated in Transcription
  misc_feature: MA Experiment 20000573 PARAMETER Experiment Name: At_100uM_ABA_Mutants__P Parameter: Organism Value: A. thaliana
  misc_feature: MA Experiment 20000573 PARAMETER Experiment Name: At_100uM_ABA_Mutants__P Parameter: Plant Line Value: CS22 vs. Ler wt
  misc_feature: MA Experiment 20000573 PARAMETER Experiment Name: At_100uM_ABA_Mutants__P Parameter: Timepoint (hr) Value: N/A
  misc_feature: MA Experiment 20000573 PARAMETER Experiment Name: At_100uM_ABA_Mutants__P Parameter: Tissue Value: Whole Plant
  misc_feature: MA Experiment 20000573 PARAMETER Experiment Name: At_100uM_ABA_Mutants__P Parameter: Treatment Value: None
  misc_feature: MA Experiment ID: 20000574 Result: Down-regulated in Transcription
  misc_feature: MA Experiment 20000574 PARAMETER Experiment Name: At_100uM_ABA_Mutants__P Parameter: Organism Value: A. thaliana
  misc_feature: MA Experiment 20000574 PARAMETER Experiment Name: At_100uM_ABA_Mutants__P Parameter: Plant Line Value: CS23 vs. Ler wt
  misc_feature: MA Experiment 20000574 PARAMETER Experiment Name: At_100uM_ABA_Mutants__P Parameter: Timepoint (hr) Value: N/A
  misc_feature: MA Experiment 20000574 PARAMETER Experiment Name: At_100uM_ABA_Mutants__P Parameter: Tissue Value: Whole Plant
  misc_feature: MA Experiment 20000574 PARAMETER Experiment Name: At_100uM_ABA_Mutants__P Parameter: Treatment Value: None
  misc_feature: MA Experiment ID: 20000794 Result: Down-regulated in Transcription
  misc_feature: MA Experiment 20000794 PARAMETER Experiment Name: At_Petals_P Parameter: Age (day) Value: 23-25 days
  misc_feature: MA Experiment 20000794 PARAMETER Experiment Name: At_Petals_P Parameter: Plant Line Value: WS
  misc_feature: MA Experiment 20000794 PARAMETER Experiment Name: At_Petals_P Parameter: Tissue Value: Petals vs. Whole plant
  misc_feature: MA Experiment ID: 20001248 Result: Up-regulated in Transcription
  misc_feature: MA Experiment 20001248 PARAMETER Experiment Name: At_Far-red-induction_P Parameter: Age (day) Value: 7
  misc_feature: MA Experiment 20001248 PARAMETER Experiment Name: At_Far-red-induction_P Parameter: Light Value: Far-red vs. White
  misc_feature: MA Experiment 20001248 PARAMETER Experiment Name: At_Far-red-induction_P Parameter: Organism Value: A. thaliana
  misc_feature: MA Experiment 20001248 PARAMETER Experiment Name: At_Far-red-induction_P Parameter: Plant Line Value: Columbia
  misc_feature: MA Experiment 20001248 PARAMETER Experiment Name: At_Far-red-induction_P Parameter: Timepoint (hr) Value: 4
  misc_feature: MA Experiment 20001248 PARAMETER Experiment Name: At_Far-red-induction_P Parameter: Tissue Value: Whole Plant
  misc_feature: MA Experiment ID: 20001450 Result: Up-regulated in Transcription
  misc_feature: MA Experiment 20001450 PARAMETER Experiment Name: At_Far-red-induction_P Parameter: Age (day) Value: 7
  misc_feature: MA Experiment 20001450 PARAMETER Experiment Name: At_Far-red-induction_P Parameter: Light Value: Far-red vs. White
  misc_feature: MA Experiment 20001450 PARAMETER Experiment Name: At_Far-red-induction_P Parameter: Organism Value: A. thaliana
  misc_feature: MA Experiment 20001450 PARAMETER Experiment Name: At_Far-red-induction_P Parameter: Plant Line Value: Columbia
  misc_feature: MA Experiment 20001450 PARAMETER Experiment Name: At_Far-red-induction_P Parameter: Timepoint (hr) Value: 8
  misc_feature: MA Experiment 20001450 PARAMETER Experiment Name: At_Far-red-induction_P Parameter: Tissue Value: Whole Plant
  misc_feature: MA Experiment ID: 20001451 Result: Up-regulated in Transcription
  misc_feature: MA Experiment 20001451 PARAMETER Experiment Name: At_Far-red-induction_P Parameter: Age (day) Value: 7
  misc_feature: MA Experiment 20001451 PARAMETER Experiment Name: At_Far-red-induction_P Parameter: Light Value: Far-red vs. White
  misc_feature: MA Experiment 20001451 PARAMETER Experiment Name: At_Far-red-induction_P Parameter: Organism Value: A. thaliana
  misc_feature: MA Experiment 20001451 PARAMETER Experiment Name: At_Far-red-induction_P Parameter: Plant Line Value: Columbia
  misc_feature: MA Experiment 20001451 PARAMETER Experiment Name: At_Far-red-induction_P Parameter: Timepoint (hr) Value: 24
  misc_feature: MA Experiment 20001451 PARAMETER Experiment Name: At_Far-red-induction_P Parameter: Tissue Value: Whole Plant
  misc_feature: MA Experiment ID: 20001554 Result: Down-regulated in Transcription
  misc_feature: MA Experiment 20001554 PARAMETER Experiment Name: At_Drought_Soil_Dry_P Parameter: Age (day) Value: 21
  misc_feature: MA Experiment 20001554 PARAMETER Experiment Name: At_Drought_Soil_Dry_P Parameter: Organism Value: A. thaliana
  misc_feature: MA Experiment 20001554 PARAMETER Experiment Name: At_Drought_Soil_Dry_P Parameter: Plant Line Value: WS
  misc_feature: MA Experiment 20001554 PARAMETER Experiment Name: At_Drought_Soil_Dry_P Parameter: Post Timepoint (hr) Value: None
  misc_feature: MA Experiment 20001554 PARAMETER Experiment Name: At_Drought_Soil_Dry_P Parameter: Post-Treatment Value: None
  misc_feature: MA Experiment 20001554 PARAMETER Experiment Name: At_Drought_Soil_Dry_P Parameter: Timepoint (day) Value: 7
  misc_feature: MA Experiment 20001554 PARAMETER Experiment Name: At_Drought_Soil_Dry_P Parameter: Treatment Value: Drought vs. No Drought
  misc_feature: MA Experiment ID: 20001556 Result: Down-regulated in Transcription
  misc_feature: MA Experiment 20001556 PARAMETER Experiment Name: At_Drought_Soil_Dry_P Parameter: Age (day) Value: 26
  misc_feature: MA Experiment 20001556 PARAMETER Experiment Name: At_Drought_Soil_Dry_P Parameter: Organism Value: A. thaliana
  misc_feature: MA Experiment 20001556 PARAMETER Experiment Name: At_Drought_Soil_Dry_P Parameter: Plant Line Value: WS
  misc_feature: MA Experiment 20001556 PARAMETER Experiment Name: At_Drought_Soil_Dry_P Parameter: Post Timepoint (hr) Value: None
  misc_feature: MA Experiment 20001556 PARAMETER Experiment Name: At_Drought_Soil_Dry_P Parameter: Post-Treatment Value: None
  misc_feature: MA Experiment 20001556 PARAMETER Experiment Name: At_Drought_Soil_Dry_P Parameter: Timepoint (day) Value: 12
  misc_feature: MA Experiment 20001556 PARAMETER Experiment Name: At_Drought_Soil_Dry_P Parameter: Treatment Value: Drought vs. No Drought
  misc_feature: MA Experiment ID: 20001774 Result: Down-regulated in Transcription
  misc_feature: MA Experiment 20001774 PARAMETER Experiment Name: At_Far-red-enriched-adult_P Parameter: Age (day) Value: 31
  misc_feature: MA Experiment 20001774 PARAMETER Experiment Name: At_Far-red-enriched-adult_P Parameter: Light Value: Far-red enriched vs. White
  misc_feature: MA Experiment 20001774 PARAMETER Experiment Name: At_Far-red-enriched-adult_P Parameter: Organism Value: A. thaliana
  misc_feature: MA Experiment 20001774 PARAMETER Experiment Name: At_Far-red-enriched-adult_P Parameter: Plant Line Value: Columbia
  misc_feature: MA Experiment 20001774 PARAMETER Experiment Name: At_Far-red-enriched-adult_P Parameter: Timepoint (hr) Value: 72
  misc_feature: MA Experiment 20001774 PARAMETER Experiment Name: At_Far-red-enriched-adult_P Parameter: Tissue Value: Aerial
  misc_feature: MA Experiment ID: 20001904 Result: Down-regulated in Transcription
  misc_feature: MA Experiment 20001904 PARAMETER Experiment Name: At_Drought_Reproduction_P Parameter: Age (day) Value: 37
  misc_feature: MA Experiment 20001904 PARAMETER Experiment Name: At_Drought_Reproduction_P Parameter: Organism Value: A. thaliana
  misc_feature: MA Experiment 20001904 PARAMETER Experiment Name: At_Drought_Reproduction_P Parameter: Plant Line Value: WS
  misc_feature: MA Experiment 20001904 PARAMETER Experiment Name: At_Drought_Reproduction_P Parameter: Timepoint (day) Value: 7
  misc_feature: MA Experiment 20001904 PARAMETER Experiment Name: At_Drought_Reproduction_P Parameter: Tissue Value: Rosettes
  misc_feature: MA Experiment 20001904 PARAMETER Experiment Name: At_Drought_Reproduction_P Parameter: Treatment Value: Drought vs. No Drought
  misc_feature: MA Experiment ID: 20001906 Result: Down-regulated in Transcription
  misc_feature: MA Experiment 20001906 PARAMETER Experiment Name: At_Drought_Reproduction_P Parameter: Age (day) Value: 35
  misc_feature: MA Experiment 20001906 PARAMETER Experiment Name: At_Drought_Reproduction_P Parameter: Organism Value: A. thaliana
  misc_feature: MA Experiment 20001906 PARAMETER Experiment Name: At_Drought_Reproduction_P Parameter: Plant Line Value: WS
  misc_feature: MA Experiment 20001906 PARAMETER Experiment Name: At_Drought_Reproduction_P Parameter: Timepoint (day) Value: 5
  misc_feature: MA Experiment 20001906 PARAMETER Experiment Name: At_Drought_Reproduction_P Parameter: Tissue Value: Siliques
  misc_feature: MA Experiment 20001906 PARAMETER Experiment Name: At_Drought_Reproduction_P Parameter: Treatment Value: Drought vs. No Drought

SEQ ID NO: 95434 - protein, 381 aa, Arabidopsis thaliana; identical to SEQ ID NO: 91678
  peptide (1)..(381): Ceres Seq. ID no. 12728756
  misc_feature (214)..(328): Pfam Name: B3 DNA binding domain Pfam Description: B3 DNA binding domain
  misc_feature (21)..(381): Homolog of NCBI NO: 15222622 NR Description: DNA-binding protein RAV2, putative; protein id: supported by cDNA: gi_15810260, supported by cDNA: gi_20259538
  misc_feature (21)..(381): Homolog of NCBI NO: 18409138 NR Description: AP2 domain protein RAP2.8 (RAV2); protein id: supported by cDNA: 19561., supported by cDNA: gi_13430799,
  misc_feature (21)..(381): Homolog of NCBI NO: 21554039 NR Description: putative RAV2-like DNA-binding protein
  misc_feature (47)..(381): Homolog of NCBI NO: 2281641 NR Description: AP2 domain containing protein RAP2.8 [Arabidopsis
  misc_feature (21)..(379): Homolog of NCBI NO: 15222217 NR Description: DNA-binding protein (RAV1); protein id: supported by cDNA: gi_17380761, supported by cDNA: gi_20259028,
  misc_feature (24)..(378): Homolog of NCBI NO: 15230871 NR Description: AP2 domain transcription factor RAV, putative;
  misc_feature (24)..(340): Homolog of NCBI NO: 21593532 NR Description: AP2 domain transcription factor [Arabidopsis
  misc_feature (66)..(327): Homolog of NCBI NO: 34911404 NR Description: DNA-binding protein RAV2-like [Oryza sativa
  misc_feature (29)..(331): Homolog of NCBI NO: 34895690 NR Description: putative DNA binding protein RAV2 [Oryza sativa
  misc_feature (88)..(340): Homolog of NCBI NO: 34895676 NR Description: putative DNA binding protein RAV2 [Oryza sativa

SEQ ID NO: 95435 - protein, 361 aa, Arabidopsis thaliana; identical to SEQ ID NO: 36043
  peptide (1)..(361): Ceres Seq. ID no. 12728757
  misc_feature (194)..(308): Pfam Name: B3 DNA binding domain Pfam Description: B3 DNA binding domain
  misc_feature (1)..(361): Homolog of NCBI NO: 15222622 NR Description: DNA-binding protein RAV2, putative; protein id: supported by cDNA: gi_15810260, supported by cDNA: gi_20259538
  misc_feature (1)..(361): Homolog of NCBI NO: 18409138 NR Description: AP2 domain protein RAP2.8 (RAV2); protein id: supported by cDNA: 19561., supported by cDNA: gi_13430799,
  misc_feature (1)..(361): Homolog of NCBI NO: 21554039 NR Description: putative RAV2-like DNA-binding protein
  misc_feature (27)..(361): Homolog of NCBI NO: 2281641 NR Description: AP2 domain containing protein RAP2.8 [Arabidopsis
  misc_feature (1)..(359): Homolog of NCBI NO: 15222217 NR Description: DNA-binding protein (RAV1); protein id: supported by cDNA: gi_17380761, supported by cDNA: gi_20259028,
  misc_feature (4)..(358): Homolog of NCBI NO: 15230871 NR Description: AP2 domain transcription factor RAV, putative;
  misc_feature (4)..(320): Homolog of NCBI NO: 21593532 NR Description: AP2 domain transcription factor [Arabidopsis
  misc_feature (46)..(307): Homolog of NCBI NO: 34911404 NR Description: DNA-binding protein RAV2-like [Oryza sativa
  misc_feature (9)..(311): Homolog of NCBI NO: 34895690 NR Description: putative DNA binding protein RAV2 [Oryza sativa
  misc_feature (68)..(320): Homolog of NCBI NO: 34895676 NR Description: putative DNA binding protein RAV2 [Oryza sativa

SEQ ID NO: 95436 - protein, 322 aa, Arabidopsis thaliana; identical to SEQ ID NO: 36044
  peptide (1)..(322): Ceres Seq. ID no. 12728758
  misc_feature (155)..(269): Pfam Name: B3 DNA binding domain Pfam Description: B3 DNA binding domain
  misc_feature (1)..(322): Homolog of NCBI NO: 15222622 NR Description: DNA-binding protein RAV2, putative; protein id: supported by cDNA: gi_15810260, supported by cDNA: gi_20259538
  misc_feature (1)..(322): Homolog of NCBI NO: 18409138 NR Description: AP2 domain protein RAP2.8 (RAV2); protein id: supported by cDNA: 19561., supported by cDNA: gi_13430799,
  misc_feature (1)..(322): Homolog of NCBI NO: 21554039 NR Description: putative RAV2-like DNA-binding protein
  misc_feature (1)..(322): Homolog of NCBI NO: 2281641 NR Description: AP2 domain containing protein RAP2.8 [Arabidopsis
  misc_feature (1)..(320): Homolog of NCBI NO: 15222217 NR Description: DNA-binding protein (RAV1); protein id: supported by cDNA: gi_17380761, supported by cDNA: gi_20259028,
  misc_feature (1)..(319): Homolog of NCBI NO: 15230871 NR Description: AP2 domain transcription factor RAV, putative;
  misc_feature (1)..(281): Homolog of NCBI NO: 21593532 NR Description: AP2 domain transcription factor [Arabidopsis
  misc_feature (7)..(268): Homolog of NCBI NO: 34911404 NR Description: DNA-binding protein RAV2-like [Oryza sativa
  misc_feature (1)..(272): Homolog of NCBI NO: 34895690 NR Description: putative DNA binding protein RAV2 [Oryza sativa
  misc_feature (29)..(281): Homolog of NCBI NO: 34895676 NR Description: putative DNA binding protein RAV2 [Oryza sativa

SEQ ID NO: 95437 - DNA, 1080 bp, Arabidopsis thaliana; identical to SEQ ID NO: 91681
  misc_feature (1)..(1080): Ceres Seq. ID no. 12728759
  misc_feature: MA Experiment ID: 20000180 Result: Up-regulated in Transcription
  misc_feature: MA Experiment 20000180 PARAMETER Experiment Name: At_Germinating_Seeds_P Parameter: Age (hr) Value: 24 vs. 0
  misc_feature: MA Experiment 20000180 PARAMETER Experiment Name: At_Germinating_Seeds_P Parameter: Tissue Value: Germinating Seeds
  misc_feature: MA Experiment ID: 20000184 Result: Down-regulated in Transcription
  misc_feature: MA Experiment 20000184 PARAMETER Experiment Name: At_Shoots__P Parameter: Age (day) Value: 7
  misc_feature: MA Experiment 20000184 PARAMETER Experiment Name: At_Shoots__P Parameter: Tissue Value: Shoots vs. Whole Plant

SEQ ID NO: 95438 - protein, 318 aa, Arabidopsis thaliana; identical to SEQ ID NO: 91682
  peptide (1)..(318): Ceres Seq. ID no. 12728760
  misc_feature (163)..(209): Pfam Name: BSD domain Pfam Description: BSD domain
  misc_feature (3)..(318): Homolog of NCBI NO: 15450417 NR Description: At1g26300/F28B23_4 [Arabidopsis thaliana]
  misc_feature (8)..(308): Homolog of NCBI NO: 30697787 NR Description: expressed protein [Arabidopsis thaliana]
  misc_feature (8)..(301): Homolog of NCBI NO: 25404796 NR Description: hypothetical protein T6L1.21 [imported] - thaliana >gi|12323210|gb|AAG51582.1|AC011665_3 hypothetical
  misc_feature (3)..(146): Homolog of NCBI NO: 15222683 NR Description: hypothetical protein; protein id: At1g26300.1
  misc_feature (3)..(300): Homolog of NCBI NO: 25404796 NR Description: hypothetical protein T6L1.21 [imported] - thaliana >gi|12323210|gb|AAG51582.1|AC011665_3 hypothetical
  misc_feature (3)..(300): Homolog of NCBI NO: 30697787 NR Description: expressed protein [Arabidopsis thaliana]
  misc_feature (3)..(146): Homolog of NCBI NO: 6730653 NR Description: F4N2.1 [Arabidopsis thaliana]
  misc_feature (221)..(318): Homolog of NCBI NO: 15222681 NR Description: hypothetical protein; protein id: At1g26280.1
  misc_feature (110)..(258): Homolog of NCBI NO: 18404344 NR Description: expressed protein; protein id: At3g24820.1, by cDNA: 33269. [Arabidopsis thaliana] gb|AAF07359.1~gene_id:K7P8.11~similar to unknown protein

SEQ ID NO: 95439 - protein, 316 aa, Arabidopsis thaliana; identical to SEQ ID NO: 91683
  peptide (1)..(316): Ceres Seq. ID no. 12728761
  misc_feature (161)..(207): Pfam Name: BSD domain Pfam Description: BSD domain
  misc_feature (1)..(316): Homolog of NCBI NO: 15450417 NR Description: At1g26300/F28B23_4 [Arabidopsis thaliana]
  misc_feature (6)..(306): Homolog of NCBI NO: 30697787 NR Description: expressed protein [Arabidopsis thaliana]
  misc_feature (6)..(299): Homolog of NCBI NO: 25404796 NR Description: hypothetical protein T6L1.21 [imported] - thaliana >gi|12323210|gb|AAG51582.1|AC011665_3 hypothetical
  misc_feature (1)..(144): Homolog of NCBI NO: 15222683 NR Description: hypothetical protein; protein id: At1g26300.1
  misc_feature (1)..(298): Homolog of NCBI NO: 25404796 NR Description: hypothetical protein T6L1.21 [imported] - thaliana >gi|12323210|gb|AAG51582.1|AC011665_3 hypothetical
  misc_feature (1)..(298): Homolog of NCBI NO: 30697787 NR Description: expressed protein [Arabidopsis thaliana]
  misc_feature (1)..(144): Homolog of NCBI NO: 6730653 NR Description: F4N2.1 [Arabidopsis thaliana]
  misc_feature (219)..(316): Homolog of NCBI NO: 15222681 NR Description: hypothetical protein; protein id: At1g26280.1
  misc_feature (108)..(256): Homolog of NCBI NO: 18404344 NR Description: expressed protein; protein id: At3g24820.1, by cDNA: 33269. [Arabidopsis thaliana] gb|AAF07359.1~gene_id:K7P8.11~similar to unknown protein

SEQ ID NO: 95440 - DNA, 570 bp, Arabidopsis thaliana; identical to SEQ ID NO: 91684
  misc_feature (1)..(570): Ceres Seq. ID no. 12728798
  misc_feature: MA Experiment ID: 20000315 Result: Down-regulated in Transcription
  misc_feature: MA Experiment 20000315 PARAMETER Experiment Name: At_14day_Shoots-Roots_Sub_P Parameter: Age (day) Value: 14
  misc_feature: MA Experiment 20000315 PARAMETER Experiment Name: At_14day_Shoots-Roots_Sub_P Parameter: Organism Value: A. thaliana
  misc_feature: MA Experiment 20000315 PARAMETER Experiment Name: At_14day_Shoots-Roots_Sub_P Parameter: Plant Line Value: WS
  misc_feature: MA Experiment 20000315 PARAMETER Experiment Name: At_14day_Shoots-Roots_Sub_P Parameter: Tissue Value: Shoots vs. Whole Plant
  misc_feature: MA Experiment ID: 20000328 Result: Down-regulated in Transcription
  misc_feature: MA Experiment 20000328 PARAMETER Experiment Name: At_42deg_Heat_Sub_P Parameter: Age (day) Value: 14
  misc_feature: MA Experiment 20000328 PARAMETER Experiment Name: At_42deg_Heat_Sub_P Parameter: Organism Value: A. thaliana
  misc_feature: MA Experiment 20000328 PARAMETER Experiment Name: At_42deg_Heat_Sub_P Parameter: Plant Line Value: WS
  misc_feature: MA Experiment 20000328 PARAMETER Experiment Name: At_42deg_Heat_Sub_P Parameter: Temperature (deg C) Value: 42 vs. 22
  misc_feature: MA Experiment 20000328 PARAMETER Experiment Name: At_42deg_Heat_Sub_P Parameter: Timepoint (hr) Value: 6
  misc_feature: MA Experiment 20000328 PARAMETER Experiment Name: At_42deg_Heat_Sub_P Parameter: Tissue Value: Aerial
  misc_feature: MA Experiment ID: 20000329 Result: Down-regulated in Transcription
  misc_feature: MA Experiment 20000329 PARAMETER Experiment Name: At_4deg_Cold_Sub_P Parameter: Age (day) Value: 14
  misc_feature: MA Experiment 20000329 PARAMETER Experiment Name: At_4deg_Cold_Sub_P Parameter: Organism Value: A. thaliana
  misc_feature: MA Experiment 20000329 PARAMETER Experiment Name: At_4deg_Cold_Sub_P Parameter: Plant Line Value: WS
  misc_feature: MA Experiment 20000329 PARAMETER Experiment Name: At_4deg_Cold_Sub_P Parameter: Temperature (deg C) Value: 4 vs. 22
  misc_feature: MA Experiment 20000329 PARAMETER Experiment Name: At_4deg_Cold_Sub_P Parameter: Timepoint (hr) Value: 6
  misc_feature: MA Experiment 20000329 PARAMETER Experiment Name: At_4deg_Cold_Sub_P Parameter: Tissue Value: Aerial

SEQ ID NO: 95441 - protein, 189 aa, Arabidopsis thaliana; identical to SEQ ID NO: 77692
  peptide (1)..(189): Ceres Seq. ID no. 12728799
  misc_feature (1)..(189): Homolog of NCBI NO: 18396004 NR Description: Expressed protein; protein id: At1g26665.1, by cDNA: gi_13926326, supported by cDNA: gi_16323257 [Arabidopsis >gi|13926327|gb|AAK49628.1|AF372912_1 At1g26660/T24P13_4
  misc_feature (1)..(166): Homolog of NCBI NO: 25403266 NR Description: protein T24P13.4 [imported] - Arabidopsis >gi|9295719|gb|AAF87025.1|AC006535_3 T24P13.4 [Arabidopsis
  misc_feature (1)..(189): Homolog of NCBI NO: 15238215 NR Description: putative protein; protein id: At5g41910.1 thaliana] >gi|9757936|dbj|BAB08424.1| gene_id:MJC20.1~similar to protein~sp|P45966 [Arabidopsis thaliana]
  misc_feature (13)..(161): Homolog of NCBI NO: 34873422 NR Description: similar to DNA segment, Chr 13, Wayne State
  misc_feature (37)..(161): Homolog of NCBI NO: 20070410 NR Description: DNA segment, Chr 13, Wayne State University 50, [Mus musculus] >gi|27681537|ref|XP_214417.1| similar to DNA Chr 13, Wayne State University 50, expressed [Mus musculus]
  misc_feature (37)..(161): Homolog of NCBI NO: 29145113 NR Description: similar to DNA segment, Chr 13, Wayne State
  misc_feature (37)..(161): Homolog of NCBI NO: 13097162 NR Description: Similar to CG5057 gene product [Homo sapiens]
  misc_feature (39)..(164): Homolog of NCBI NO: 9799628 NR Description: Nut2 [Drosophila melanogaster]
  misc_feature (45)..(181): Homolog of NCBI NO: 29841376 NR Description: similar to GenBank Accession Number BC003353
  misc_feature (39)..(164): Homolog of NCBI NO: 24665095 NR Description: CG5057-PA [Drosophila melanogaster]

SEQ ID NO: 95442 - protein, 110 aa, Arabidopsis thaliana; identical to SEQ ID NO: 77693
  peptide (1)..(110): Ceres Seq. ID no. 12728800
  misc_feature (1)..(110): Homolog of NCBI NO: 18396004 NR Description: Expressed protein; protein id: At1g26665.1, by cDNA: gi_13926326, supported by cDNA: gi_16323257 [Arabidopsis >gi|13926327|gb|AAK49628.1|AF372912_1 At1g26660/T24P13_4
  misc_feature (1)..(87): Homolog of NCBI NO: 25403266 NR Description: protein T24P13.4 [imported] - Arabidopsis >gi|9295719|gb|AAF87025.1|AC006535_3 T24P13.4 [Arabidopsis
  misc_feature (1)..(110): Homolog of NCBI NO: 15238215 NR Description: putative protein; protein id: At5g41910.1 thaliana] >gi|9757936|dbj|BAB08424.1| gene_id:MJC20.1~similar to protein~sp|P45966 [Arabidopsis thaliana]
  misc_feature (1)..(82): Homolog of NCBI NO: 34873422 NR Description: similar to DNA segment, Chr 13, Wayne State
  misc_feature (1)..(82): Homolog of NCBI NO: 20070410 NR Description: DNA segment, Chr 13, Wayne State University 50, [Mus musculus] >gi|27681537|ref|XP_214417.1| similar to DNA Chr 13, Wayne State University 50, expressed [Mus musculus]
  misc_feature (1)..(82): Homolog of NCBI NO: 29145113 NR Description: similar to DNA segment, Chr 13, Wayne State
  misc_feature (1)..(82): Homolog of NCBI NO: 13097162 NR Description: Similar to CG5057 gene product [Homo sapiens]
  misc_feature (1)..(85): Homolog of NCBI NO: 9799628 NR Description: Nut2 [Drosophila melanogaster]
  misc_feature (1)..(102): Homolog of NCBI NO: 29841376 NR Description: similar to GenBank Accession Number BC003353
  misc_feature (1)..(85): Homolog of NCBI NO: 24665095 NR Description: CG5057-PA [Drosophila melanogaster]

SEQ ID NO: 95443 - protein, 105 aa, Arabidopsis thaliana; identical to SEQ ID NO: 77694
  peptide (1)..(105): Ceres Seq. ID no. 12728801
  misc_feature (1)..(105): Homolog of NCBI NO: 18396004 NR Description: Expressed protein; protein id: At1g26665.1, by cDNA: gi_13926326, supported by cDNA: gi_16323257 [Arabidopsis >gi|13926327|gb|AAK49628.1|AF372912_1 At1g26660/T24P13_4
  misc_feature (1)..(82): Homolog of NCBI NO: 25403266 NR Description: protein T24P13.4 [imported] - Arabidopsis >gi|9295719|gb|AAF87025.1|AC006535_3 T24P13.4 [Arabidopsis
  misc_feature (1)..(105): Homolog of NCBI NO: 15238215 NR Description: putative protein; protein id: At5g41910.1 thaliana] >gi|9757936|dbj|BAB08424.1| gene_id:MJC20.1~similar to protein~sp|P45966 [Arabidopsis thaliana]
  misc_feature (1)..(77): Homolog of NCBI NO: 34873422 NR Description: similar to DNA segment, Chr 13, Wayne State
  misc_feature (1)..(77): Homolog of NCBI NO: 20070410 NR Description: DNA segment, Chr 13, Wayne State University 50, [Mus musculus] >gi|27681537|ref|XP_214417.1| similar to DNA Chr 13, Wayne State University 50, expressed [Mus musculus]
  misc_feature (1)..(77): Homolog of NCBI NO: 29145113 NR Description: similar to DNA segment, Chr 13, Wayne State
  misc_feature (1)..(77): Homolog of NCBI NO: 13097162 NR Description: Similar to CG5057 gene product [Homo sapiens]
  misc_feature (1)..(80): Homolog of NCBI NO: 9799628 NR Description: Nut2 [Drosophila melanogaster]
  misc_feature (1)..(97): Homolog of NCBI NO: 29841376 NR Description: similar to GenBank Accession Number BC003353
  misc_feature (1)..(80): Homolog of NCBI NO: 24665095 NR Description: CG5057-PA [Drosophila melanogaster]

SEQ ID NO: 95444 - DNA, 923 bp, Arabidopsis thaliana; identical to SEQ ID NO: 91688
  misc_feature (1)..(923): Ceres Seq. ID no. 12728840
  misc_feature: MA Experiment ID: 108434 Result: Up-regulated in Transcription
  misc_feature: MA Experiment 108434 PARAMETER Experiment Name: At_Root_Tips_cDNA_P Parameter: Tissue Value: Root Tips
  misc_feature: MA Experiment ID: 108463 Result: Down-regulated in Transcription
  misc_feature: MA Experiment 108463 PARAMETER Experiment Name: At_Germinating_Seeds_cDNA_P Parameter: Age (day) Value: 3 vs. 0
  misc_feature: MA Experiment 108463 PARAMETER Experiment Name: At_Germinating_Seeds_cDNA_P Parameter: Tissue Value: Germinating Seeds
  misc_feature: MA Experiment ID: 108464 Result: Down-regulated in Transcription
  misc_feature: MA Experiment 108464 PARAMETER Experiment Name: At_Germinating_Seeds_cDNA_P Parameter: Age (day) Value: 4 vs. 0
  misc_feature: MA Experiment 108464 PARAMETER Experiment Name: At_Germinating_Seeds_cDNA_P Parameter: Tissue Value: Germinating Seeds
  misc_feature: MA Experiment ID: 108573 Result: Down-regulated in Transcription
  misc_feature: MA Experiment 108573 PARAMETER Experiment Name: At_Drought_cDNA_P Parameter: Timepoint (hr) Value: 6
  misc_feature: MA Experiment 108573 PARAMETER Experiment Name: At_Drought_cDNA_P Parameter: Tissue Value: Aerial
  misc_feature: MA Experiment 108573 PARAMETER Experiment Name: At_Drought_cDNA_P Parameter: Treatment Value: Drought vs. No Drought
  misc_feature: MA Experiment ID: 20000086 Result: Up-regulated in Transcription
  misc_feature: MA Experiment 20000086 PARAMETER Experiment Name: At_100uM_ABA_Mutants_cDNA_P Parameter: Plant Line Value: CS22
  misc_feature: MA Experiment 20000086 PARAMETER Experiment Name: At_100uM_ABA_Mutants_cDNA_P Parameter: Timepoint (hr) Value: 6
  misc_feature: MA Experiment 20000086 PARAMETER Experiment Name: At_100uM_ABA_Mutants_cDNA_P Parameter: Tissue Value: Aerial
  misc_feature: MA Experiment 20000086 PARAMETER Experiment Name: At_100uM_ABA_Mutants_cDNA_P Parameter: Treatment Value: 100uM ABA vs. No Treatment
  misc_feature: MA Experiment ID: 20000088 Result: Up-regulated in Transcription
  misc_feature: MA Experiment 20000088 PARAMETER Experiment Name: At_100uM_ABA_Mutants_cDNA_P Parameter: Plant Line Value: Landsberg
  misc_feature: MA Experiment 20000088 PARAMETER Experiment Name: At_100uM_ABA_Mutants_cDNA_P Parameter: Timepoint (hr) Value: 6
  misc_feature: MA Experiment 20000088 PARAMETER Experiment Name: At_100uM_ABA_Mutants_cDNA_P Parameter: Tissue Value: Aerial
  misc_feature: MA Experiment 20000088 PARAMETER Experiment Name: At_100uM_ABA_Mutants_cDNA_P Parameter: Treatment Value: 100uM ABA vs. No Treatment
  misc_feature: MA Experiment ID: 20000089 Result: Up-regulated in Transcription
  misc_feature: MA Experiment ID: 20000090 Result: Up-regulated in Transcription
  misc_feature: MA Experiment ID: 20000227 Result: Up-regulated in Transcription
  misc_feature: MA Experiment 20000227 PARAMETER Experiment Name: At_Root-Tips-vs-Tops_P Parameter: Tissue Value: Root Tips vs. Root Tops
  misc_feature: MA Experiment ID: 20001905 Result: Down-regulated in Transcription
  misc_feature: MA Experiment 20001905 PARAMETER Experiment Name: At_Drought_Reproduction_P Parameter: Age (day) Value: 40
  misc_feature: MA Experiment 20001905 PARAMETER Experiment Name: At_Drought_Reproduction_P Parameter: Organism Value: A. thaliana
  misc_feature: MA Experiment 20001905 PARAMETER Experiment Name: At_Drought_Reproduction_P Parameter: Plant Line Value: WS
  misc_feature: MA Experiment 20001905 PARAMETER Experiment Name: At_Drought_Reproduction_P Parameter: Timepoint (day) Value: 10
  misc_feature: MA Experiment 20001905 PARAMETER Experiment Name: At_Drought_Reproduction_P Parameter: Tissue Value: Rosettes
  misc_feature: MA Experiment 20001905 PARAMETER Experiment Name: At_Drought_Reproduction_P Parameter: Treatment Value: Drought vs. No Drought

SEQ ID NO: 95445 - protein, 210 aa, Arabidopsis thaliana; identical to SEQ ID NO: 26646
  peptide (1)..(210): Ceres Seq. ID no. 12728841
  misc_feature (17)..(210): Homolog of NCBI NO: 18396344 NR Description: adenine phosphoribosyltransferase 1, APRT; id: At1g27450.1, supported by cDNA: 102971. [Arabidopsis >gi|21536559|gb|AAM60891.1| adenine phosphoribosyltransferase 1,
  misc_feature (28)..(210): Homolog of NCBI NO: 30689934 NR Description: adenine phosphoribosyltransferase 1, APRT thaliana] >gi|399046|sp|P31166|APT1_ARATH Adenine
  misc_feature (28)..(122): Homolog of NCBI NO: 25286872 NR Description: protein F17L21.24 [imported] - Arabidopsis >gi|9802535|gb|AAF99737.1|AC004557_16 F17L21.24 [Arabidopsis
  misc_feature (121)..(210): Homolog of NCBI NO: 25286872 NR Description: protein F17L21.24 [imported] - Arabidopsis >gi|9802535|gb|AAF99737.1|AC004557_16 F17L21.24 [Arabidopsis
  misc_feature (20)..(210): Homolog of NCBI NO: 32492063 NR Description: adenine phosphoribosyltransferase [Brassica napus]
  misc_feature (35)..(208): Homolog of NCBI NO: 9711921 NR Description: Adenine phosphoribosyltransferase [Hordeum
  misc_feature (35)..(208): Homolog of NCBI NO: 2499932 NR Description: Adenine phosphoribosyltransferase 1 (APRT)
  misc_feature (31)..(208): Homolog of NCBI NO: 33354190 NR Description: putative adenine phosphoribosyl transferase
  misc_feature (31)..(207): Homolog of NCBI NO: 15235709 NR Description: adenine phosphoribosyltransferase (EC 2.4.2.7) - protein; protein id: At4g22570.1, supported by cDNA: 11009. thaliana] >gi|7433929|pir||T05451 adenine
  misc_feature (28)..(207): Homolog of NCBI NO: 15234553 NR Description: putative adenine phosphoribosyltransferase; id: At4g12440.1 [Arabidopsis thaliana] >gi|7433935|pir||T07636

SEQ ID NO: 95446 - protein, 183 aa, Arabidopsis thaliana; identical to SEQ ID NO: 26647
  peptide (1)..(183): Ceres Seq. ID no. 12728842
  misc_feature (1)..(183): Homolog of NCBI NO: 18396344 NR Description: adenine phosphoribosyltransferase 1, APRT; id: At1g27450.1, supported by cDNA: 102971. [Arabidopsis >gi|21536559|gb|AAM60891.1| adenine phosphoribosyltransferase 1,
  misc_feature (1)..(183): Homolog of NCBI NO: 30689934 NR Description: adenine phosphoribosyltransferase 1, APRT thaliana] >gi|399046|sp|P31166|APT1_ARATH Adenine
  misc_feature (1)..(95): Homolog of NCBI NO: 25286872 NR Description: protein F17L21.24 [imported] - Arabidopsis >gi|9802535|gb|AAF99737.1|AC004557_16 F17L21.24 [Arabidopsis
  misc_feature (94)..(183): Homolog of NCBI NO: 25286872 NR Description: protein F17L21.24 [imported] - Arabidopsis >gi|9802535|gb|AAF99737.1|AC004557_16 F17L21.24 [Arabidopsis
  misc_feature (1)..(183): Homolog of NCBI NO: 32492063 NR Description: adenine phosphoribosyltransferase [Brassica napus]
  misc_feature (8)..(181): Homolog of NCBI NO: 9711921 NR Description: Adenine phosphoribosyltransferase [Hordeum
  misc_feature (8)..(181): Homolog of NCBI NO: 2499932 NR Description: Adenine phosphoribosyltransferase 1 (APRT)
  misc_feature (4)..(181): Homolog of NCBI NO: 33354190 NR Description: putative adenine phosphoribosyl transferase
  misc_feature (4)..(180): Homolog of NCBI NO: 15235709 NR Description: adenine phosphoribosyltransferase (EC 2.4.2.7) - protein; protein id: At4g22570.1, supported by cDNA: 11009. thaliana] >gi|7433929|pir||T05451 adenine
  misc_feature (1)..(180): Homolog of NCBI NO: 15234553 NR Description: putative adenine phosphoribosyltransferase; id: At4g12440.1 [Arabidopsis thaliana] >gi|7433935|pir||T07636

SEQ ID NO: 95447 - protein, 154 aa, Arabidopsis thaliana; identical to SEQ ID NO: 26648
  peptide (1)..(154): Ceres Seq. ID no. 12728843
  misc_feature (1)..(154): Homolog of NCBI NO: 18396344 NR Description: adenine phosphoribosyltransferase 1, APRT; id: At1g27450.1, supported by cDNA: 102971. [Arabidopsis >gi|21536559|gb|AAM60891.1| adenine phosphoribosyltransferase 1,
  misc_feature (1)..(154): Homolog of NCBI NO: 30689934 NR Description: adenine phosphoribosyltransferase 1, APRT thaliana] >gi|399046|sp|P31166|APT1_ARATH Adenine
  misc_feature (1)..(66): Homolog of NCBI NO: 25286872 NR Description: protein F17L21.24 [imported] - Arabidopsis >gi|9802535|gb|AAF99737.1|AC004557_16 F17L21.24 [Arabidopsis
  misc_feature (65)..(154): Homolog of NCBI NO: 25286872 NR Description: protein F17L21.24 [imported] - Arabidopsis >gi|9802535|gb|AAF99737.1|AC004557_16 F17L21.24 [Arabidopsis
  misc_feature (1)..(154): Homolog of NCBI NO: 32492063 NR Description: adenine phosphoribosyltransferase [Brassica napus]
  misc_feature (1)..(152): Homolog of NCBI NO: 9711921 NR Description: Adenine phosphoribosyltransferase [Hordeum
  misc_feature (1)..(152): Homolog of NCBI NO: 2499932 NR Description: Adenine phosphoribosyltransferase 1 (APRT)
  misc_feature (1)..(152): Homolog of NCBI NO: 33354190 NR Description: putative adenine phosphoribosyl transferase
  misc_feature (1)..(151): Homolog of NCBI NO: 15235709 NR Description: adenine phosphoribosyltransferase (EC 2.4.2.7) - protein; protein id: At4g22570.1, supported by cDNA: 11009. thaliana] >gi|7433929|pir||T05451 adenine
  misc_feature (1)..(151): Homolog of NCBI NO: 15234553 NR Description: putative adenine phosphoribosyltransferase; id: At4g12440.1 [Arabidopsis thaliana] >gi|7433935|pir||T07636

SEQ ID NO: 95448 - DNA, 1809 bp, Arabidopsis thaliana; identical to SEQ ID NO: 91692
  misc_feature (1)..(1809): Ceres Seq. ID no. 12728880
  misc_feature: MA Experiment ID: 20000180 Result: Down-regulated in Transcription
  misc_feature: MA Experiment 20000180 PARAMETER Experiment Name: At_Germinating_Seeds_P Parameter: Age (hr) Value: 24 vs. 0
  misc_feature: MA Experiment 20000180 PARAMETER Experiment Name: At_Germinating_Seeds_P Parameter: Tissue Value: Germinating Seeds
  misc_feature: MA Experiment ID: 20000286 Result: Up-regulated in Transcription
  misc_feature: MA Experiment 20000286 PARAMETER Experiment Name: At_Open_Flower_P Parameter: Age (day) Value: 21
  misc_feature: MA Experiment 20000286 PARAMETER Experiment Name: At_Open_Flower_P Parameter: Plant Line Value: WS
  misc_feature: MA Experiment 20000286 PARAMETER Experiment Name: At_Open_Flower_P Parameter: Tissue Value: Half Open vs. Whole Plant
  misc_feature: MA Experiment ID: 20000439 Result: Up-regulated in Transcription
  misc_feature: MA Experiment 20000439 PARAMETER Experiment Name: At_Roots__P Parameter: Age (day) Value: 14 vs. 21
  misc_feature: MA Experiment 20000439 PARAMETER Experiment Name: At_Roots__P Parameter: Organism Value: A. thaliana
  misc_feature: MA Experiment 20000439 PARAMETER Experiment Name: At_Roots__P Parameter: Tissue Value: Roots vs. Whole Plant
  misc_feature: MA Experiment ID: 20000794 Result: Up-regulated in Transcription
  misc_feature: MA Experiment 20000794 PARAMETER Experiment Name: At_Petals_P Parameter: Age (day) Value: 23-25 days
  misc_feature: MA Experiment 20000794 PARAMETER Experiment Name: At_Petals_P Parameter: Plant Line Value: WS
  misc_feature: MA Experiment 20000794 PARAMETER Experiment Name: At_Petals_P Parameter: Tissue Value: Petals vs. Whole plant
  misc_feature: MA Experiment ID: 20001451 Result: Down-regulated in Transcription
  misc_feature: MA Experiment 20001451 PARAMETER Experiment Name: At_Far-red-induction_P Parameter: Age (day) Value: 7
  misc_feature: MA Experiment 20001451 PARAMETER Experiment Name: At_Far-red-induction_P Parameter: Light Value: Far-red vs. White
  misc_feature: MA Experiment 20001451 PARAMETER Experiment Name: At_Far-red-induction_P Parameter: Organism Value: A. thaliana
  misc_feature: MA Experiment 20001451 PARAMETER Experiment Name: At_Far-red-induction_P Parameter: Plant Line Value: Columbia
  misc_feature: MA Experiment 20001451 PARAMETER Experiment Name: At_Far-red-induction_P Parameter: Timepoint (hr) Value: 24
  misc_feature: MA Experiment 20001451 PARAMETER Experiment Name: At_Far-red-induction_P Parameter: Tissue Value: Whole Plant
  misc_feature: MA Experiment ID: 20001554 Result: Up-regulated in Transcription
  misc_feature: MA Experiment 20001554 PARAMETER Experiment Name: At_Drought_Soil_Dry_P Parameter: Age (day) Value: 21
  misc_feature: MA Experiment 20001554 PARAMETER Experiment Name: At_Drought_Soil_Dry_P Parameter: Organism Value: A. thaliana
  misc_feature: MA Experiment 20001554 PARAMETER Experiment Name: At_Drought_Soil_Dry_P Parameter: Plant Line Value: WS
  misc_feature: MA Experiment 20001554 PARAMETER Experiment Name: At_Drought_Soil_Dry_P Parameter: Post Timepoint (hr) Value: None
  misc_feature: MA Experiment 20001554 PARAMETER Experiment Name: At_Drought_Soil_Dry_P Parameter: Post-Treatment Value: None
  misc_feature: MA Experiment 20001554 PARAMETER Experiment Name: At_Drought_Soil_Dry_P Parameter: Timepoint (day) Value: 7
  misc_feature: MA Experiment 20001554 PARAMETER Experiment Name: At_Drought_Soil_Dry_P Parameter: Treatment Value: Drought vs. No Drought

SEQ ID NO: 95449 - protein, 602 aa, Arabidopsis thaliana; identical to SEQ ID NO: 91693
  peptide (1)..(602): Ceres Seq. ID no. 12728881
  misc_feature (331)..(388): Pfam Name: RNA recognition motif. (a.k.a. RRM, RBD, or RNP domain) Pfam Description: RNA recognition motif. (a.k.a. RRM, RBD, or RNP
  misc_feature (1)..(590): Homolog of NCBI NO: 11994270 NR Description: emb|CAB41315.1~gene_id:MSA6.14~similar to unknown
  misc_feature (57)..(593): Homolog of NCBI NO: 14586374 NR Description: putative protein [Arabidopsis thaliana]
  misc_feature (1)..(27): Homolog of NCBI NO: 14586374 NR Description: putative protein [Arabidopsis thaliana]
  misc_feature (1)..(209): Homolog of NCBI NO: 15217946 NR Description: unknown protein; protein id: At1g51520.1, by cDNA: gi_20268749, supported by cDNA: gi_21281142 [Arabidopsis
  misc_feature (281)..(465): Homolog of NCBI NO: 15217946 NR Description: unknown protein; protein id: At1g51520.1, by cDNA: gi_20268749, supported by cDNA: gi_21281142 [Arabidopsis
  misc_feature (281)..(524): Homolog of NCBI NO: 30695000 NR Description: expressed protein [Arabidopsis thaliana]
  misc_feature (1)..(209): Homolog of NCBI NO: 30695000 NR Description: expressed protein [Arabidopsis thaliana]
  misc_feature (141)..(305): Homolog of NCBI NO: 15217946 NR Description: unknown protein; protein id: At1g51520.1, by cDNA: gi_20268749, supported by cDNA: gi_21281142 [Arabidopsis
  misc_feature (141)..(305): Homolog of NCBI NO: 30695000 NR Description: expressed protein [Arabidopsis thaliana]
  misc_feature (50)..(593): Homolog of NCBI NO: 26453236 NR Description: unknown protein [Arabidopsis thaliana]

SEQ ID NO: 95450 - protein, 563 aa, Arabidopsis thaliana; identical to SEQ ID NO: 91694
  peptide (1)..(563): Ceres Seq. ID no. 12728882
  misc_feature (292)..(349): Pfam Name: RNA recognition motif. (a.k.a. RRM, RBD, or RNP domain) Pfam Description: RNA recognition motif. (a.k.a. RRM, RBD, or RNP
  misc_feature (1)..(551): Homolog of NCBI NO: 11994270 NR Description: emb|CAB41315.1~gene_id:MSA6.14~similar to unknown
  misc_feature (18)..(554): Homolog of NCBI NO: 14586374 NR Description: putative protein [Arabidopsis thaliana]
  misc_feature (1)..(170): Homolog of NCBI NO: 15217946 NR Description: unknown protein; protein id: At1g51520.1, by cDNA: gi_20268749, supported by cDNA: gi_21281142 [Arabidopsis
  misc_feature (242)..(426): Homolog of NCBI NO: 15217946 NR Description: unknown protein; protein id: At1g51520.1, by cDNA: gi_20268749, supported by cDNA: gi_21281142 [Arabidopsis
  misc_feature (242)..(485): Homolog of NCBI NO: 30695000 NR Description: expressed protein [Arabidopsis thaliana]
  misc_feature (1)..(170): Homolog of NCBI NO: 30695000 NR Description: expressed protein [Arabidopsis thaliana]
  misc_feature (102)..(266): Homolog of NCBI NO: 15217946 NR Description: unknown protein; protein id: At1g51520.1, by cDNA: gi_20268749, supported by cDNA: gi_21281142 [Arabidopsis
  misc_feature (102)..(266): Homolog of NCBI NO: 30695000 NR Description: expressed protein [Arabidopsis thaliana]
  misc_feature (11)..(554): Homolog of NCBI NO: 26453236 NR Description: unknown protein [Arabidopsis thaliana]
  misc_feature (25)..(554): Homolog of NCBI NO: 30684113 NR Description: expressed protein [Arabidopsis thaliana]

SEQ ID NO: 95451 - protein, 484 aa, Arabidopsis thaliana; identical to SEQ ID NO: 91695
  peptide (1)..(484): Ceres Seq. ID no. 12728883
  misc_feature (213)..(270): Pfam Name: RNA recognition motif. (a.k.a. RRM, RBD, or RNP domain) Pfam Description: RNA recognition motif. (a.k.a. RRM, RBD, or RNP
  misc_feature (1)..(472): Homolog of NCBI NO: 11994270 NR Description: emb|CAB41315.1~gene_id:MSA6.14~similar to unknown
  misc_feature (1)..(475): Homolog of NCBI NO: 14586374 NR Description: putative protein [Arabidopsis thaliana]
  misc_feature (1)..(91): Homolog of NCBI NO: 15217946 NR Description: unknown protein; protein id: At1g51520.1, by cDNA: gi_20268749, supported by cDNA: gi_21281142 [Arabidopsis
  misc_feature (163)..(347): Homolog of NCBI NO: 15217946 NR Description: unknown protein; protein id: At1g51520.1, by cDNA: gi_20268749, supported by cDNA: gi_21281142 [Arabidopsis
  misc_feature (163)..(406): Homolog of NCBI NO: 30695000 NR Description: expressed protein [Arabidopsis thaliana]
  misc_feature (1)..(91): Homolog of NCBI NO: 30695000 NR Description: expressed protein [Arabidopsis thaliana]
  misc_feature (23)..(187): Homolog of NCBI NO: 15217946 NR Description: unknown protein; protein id: At1g51520.1, by cDNA: gi_20268749, supported by cDNA: gi_21281142 [Arabidopsis
  misc_feature (23)..(187): Homolog of NCBI NO: 30695000 NR Description: expressed protein [Arabidopsis thaliana]
  misc_feature (1)..(475): Homolog of NCBI NO: 26453236 NR Description: unknown protein [Arabidopsis thaliana]
  misc_feature (1)..(475): Homolog of NCBI NO: 30684113 NR Description: expressed protein [Arabidopsis thaliana]

SEQ ID NO: 95452 - DNA, 1083 bp, Arabidopsis thaliana; identical to SEQ ID NO: 91696
  misc_feature (1)..(1083): Ceres Seq. ID no. 12728893
  misc_feature: MA Experiment ID: 20000495 Result: Down-regulated in Transcription
  misc_feature: MA Experiment 20000495 PARAMETER Experiment Name: At_Guard_Cells_P Parameter: Harvest Date Value: 8/2/2002
  misc_feature: MA Experiment 20000495 PARAMETER Experiment Name: At_Guard_Cells_P Parameter: Organism Value: A. thaliana
  misc_feature: MA Experiment 20000495 PARAMETER Experiment Name: At_Guard_Cells_P Parameter: Tissue Value: Guard Cells vs. Leaves
  misc_feature: MA Experiment ID: 20000527 Result: Up-regulated in Transcription
  misc_feature: MA Experiment 20000527 PARAMETER Experiment Name: At_10percent_PEG_P Parameter: Age (day) Value: 20
  misc_feature: MA Experiment 20000527 PARAMETER Experiment Name: At_10percent_PEG_P Parameter: Organism Value: A. thaliana
  misc_feature: MA Experiment 20000527 PARAMETER Experiment Name: At_10percent_PEG_P Parameter: Plant Line Value: WS
  misc_feature: MA Experiment 20000527 PARAMETER Experiment Name: At_10percent_PEG_P Parameter: Timepoint (day) Value: 20
  misc_feature: MA Experiment 20000527 PARAMETER Experiment Name: At_10percent_PEG_P Parameter: Tissue Value: Whole Plant
  misc_feature: MA Experiment 20000527 PARAMETER Experiment Name: At_10percent_PEG_P Parameter: Treatment Value: 10percent PEG vs. No Treatment
  misc_feature: MA Experiment ID: 20001247 Result: Up-regulated in Transcription
  misc_feature: MA Experiment 20001247 PARAMETER Experiment Name: At_Far-red-induction_P Parameter: Age (day) Value: 7
  misc_feature: MA Experiment 20001247 PARAMETER Experiment Name: At_Far-red-induction_P Parameter: Light Value: Far-red vs. White
  misc_feature: MA Experiment 20001247 PARAMETER Experiment Name: At_Far-red-induction_P Parameter: Organism Value: A. thaliana
  misc_feature: MA Experiment 20001247 PARAMETER Experiment Name: At_Far-red-induction_P Parameter: Plant Line Value: Columbia
  misc_feature: MA Experiment 20001247 PARAMETER Experiment Name: At_Far-red-induction_P Parameter: Timepoint (hr) Value: 1
  misc_feature: MA Experiment 20001247 PARAMETER Experiment Name: At_Far-red-induction_P Parameter: Tissue Value: Whole Plant

SEQ ID NO: 95453 - protein, 360 aa, Arabidopsis thaliana; identical to SEQ ID NO: 91697
  peptide (1)..(360): Ceres Seq. ID no. 12728894
  misc_feature (6)..(97): Pfam Name: C2 domain Pfam Description: C2 domain
  misc_feature (1)..(360): Homolog of NCBI NO: 15228227 NR Description: unknown protein; protein id: At3g16510.1 thaliana] >gi|9279650|dbj|BAB01150.1| contains similarity to SRC2
  misc_feature (1)..(182): Homolog of NCBI NO: 22328677 NR Description: hypothetical protein; protein id: At4g15755.1
  misc_feature (273)..(356): Homolog of NCBI NO: 22328677 NR Description: hypothetical protein; protein id: At4g15755.1
  misc_feature (1)..(355): Homolog of NCBI NO: 34907166 NR Description: P0423A12.20 [Oryza sativa (japonica
  misc_feature (1)..(229): Homolog of NCBI NO: 7485202 NR Description: hypothetical protein - Arabidopsis thaliana hypothetical protein [Arabidopsis thaliana]
  misc_feature (5)..(289): Homolog of NCBI NO: 11358845 NR Description: shock protein SRC2 homolog [imported] -
  misc_feature (5)..(289): Homolog of NCBI NO: 18390977 NR Description: expressed protein; protein id: At1g09070.1, by cDNA: gi_15010557 [Arabidopsis thaliana]

SEQ ID NO: 95454 - protein, 336 aa, Arabidopsis thaliana; identical to SEQ ID NO: 91698
  peptide (1)..(336): Ceres Seq. ID no. 12728895
  misc_feature (1)..(73): Pfam Name: C2 domain Pfam Description: C2 domain
  misc_feature (1)..(336): Homolog of NCBI NO: 15228227 NR Description: unknown protein; protein id: At3g16510.1 thaliana] >gi|9279650|dbj|BAB01150.1| contains similarity to SRC2
  misc_feature (1)..(158): Homolog of NCBI NO: 22328677 NR Description: hypothetical protein; protein id: At4g15755.1
  misc_feature (249)..(332): Homolog of NCBI NO: 22328677 NR Description: hypothetical protein; protein id: At4g15755.1
  misc_feature (1)..(331): Homolog of NCBI NO: 34907166 NR Description: P0423A12.20 [Oryza sativa (japonica
  misc_feature (1)..(205): Homolog of NCBI NO: 7485202 NR Description: hypothetical protein - Arabidopsis thaliana hypothetical protein [Arabidopsis thaliana]
  misc_feature (1)..(265): Homolog of NCBI NO: 11358845 NR Description: shock protein SRC2 homolog [imported] -
  misc_feature (1)..(265): Homolog of NCBI NO: 18390977 NR Description: expressed protein; protein id: At1g09070.1, by cDNA: gi_15010557 [Arabidopsis thaliana]

SEQ ID NO: 95455 - protein, 242 aa, Arabidopsis thaliana; identical to SEQ ID NO: 91699
  peptide (1)..(242): Ceres Seq. ID no. 12728896
  misc_feature (43)..(190): Pfam Name: Atrophin-1 family Pfam Description: Atrophin-1 family
  misc_feature (1)..(242): Homolog of NCBI NO: 15228227 NR Description: unknown protein; protein id: At3g16510.1 thaliana] >gi|9279650|dbj|BAB01150.1| contains similarity to SRC2
  misc_feature (1)..(64): Homolog of NCBI NO: 22328677 NR Description: hypothetical protein; protein id: At4g15755.1
  misc_feature (155)..(238): Homolog of NCBI NO: 22328677 NR Description: hypothetical protein; protein id: At4g15755.1
  misc_feature (1)..(237): Homolog of NCBI NO: 34907166 NR Description: P0423A12.20 [Oryza sativa (japonica
  misc_feature (1)..(111): Homolog of NCBI NO: 7485202 NR Description: hypothetical protein - Arabidopsis thaliana hypothetical protein [Arabidopsis thaliana]
  misc_feature (1)..(171): Homolog of NCBI NO: 11358845 NR Description: shock protein SRC2 homolog [imported] -
  misc_feature (1)..(171): Homolog of NCBI NO: 18390977 NR Description: expressed protein; protein id: At1g09070.1, by cDNA: gi_15010557 [Arabidopsis thaliana]

SEQ ID NO: 95456 - DNA, 1428 bp, Arabidopsis thaliana; identical to SEQ ID NO: 91700
  misc_feature (1)..(1428): Ceres Seq. ID no. 12728922
  misc_feature: MA Experiment ID: 20000180 Result: Up-regulated in Transcription
  misc_feature: MA Experiment 20000180 PARAMETER Experiment Name: At_Germinating_Seeds_P Parameter: Age (hr) Value: 24 vs. 0
  misc_feature: MA Experiment 20000180 PARAMETER Experiment Name: At_Germinating_Seeds_P Parameter: Tissue Value: Germinating Seeds

SEQ ID NO: 95457 - protein, 475 aa, Arabidopsis thaliana; identical to SEQ ID NO: 91701
  peptide (1)..(475): Ceres Seq. ID no. 12728923
  misc_feature (1)..(475): Homolog of NCBI NO: 30684217 NR Description: tetratricopeptide repeat (TPR)-containing protein
  misc_feature (1)..(426): Homolog of NCBI NO: 30684223 NR Description: tetratricopeptide repeat (TPR)-containing protein
  misc_feature (1)..(377): Homolog of NCBI NO: 11994631 NR Description: gene_id:MGL6.23~unknown protein [Arabidopsis
  misc_feature (22)..(475): Homolog of NCBI NO: 30684223 NR Description: tetratricopeptide repeat (TPR)-containing protein
  misc_feature (22)..(419): Homolog of NCBI NO: 11994631 NR Description: gene_id:MGL6.23~unknown protein [Arabidopsis
  misc_feature (88)..(362): Homolog of NCBI NO: 7511706 NR Description: lustrin A - California red abalone
  misc_feature (54)..(351): Homolog of NCBI NO: 7511706 NR Description: lustrin A - California red abalone
  misc_feature (21)..(323): Homolog of NCBI NO: 7511706 NR Description: lustrin A - California red abalone
  misc_feature (9)..(296): Homolog of NCBI NO: 7511706 NR Description: lustrin A - California red abalone
  misc_feature (24)..(302): Homolog of NCBI NO: 19570055 NR Description: similar to Dictyostelium discoideum (Slime mold).

SEQ ID NO: 95458 - protein, 396 aa, Arabidopsis thaliana; identical to SEQ ID NO: 91702
  peptide (1)..(396): Ceres Seq. ID no. 12728924
  misc_feature (1)..(396): Homolog of NCBI NO: 30684217 NR Description: tetratricopeptide repeat (TPR)-containing protein
  misc_feature (1)..(347): Homolog of NCBI NO: 30684223 NR Description: tetratricopeptide repeat (TPR)-containing protein
  misc_feature (1)..(298): Homolog of NCBI NO: 11994631 NR Description: gene_id:MGL6.23~unknown protein [Arabidopsis
  misc_feature (1)..(396): Homolog of NCBI NO: 30684223 NR Description: tetratricopeptide repeat (TPR)-containing protein
  misc_feature (1)..(340): Homolog of NCBI NO: 11994631 NR Description: gene_id:MGL6.23~unknown protein [Arabidopsis
  misc_feature (9)..(283): Homolog of NCBI NO: 7511706 NR Description: lustrin A - California red abalone
  misc_feature (1)..(272): Homolog of NCBI NO: 7511706 NR Description: lustrin A - California red abalone
  misc_feature (1)..(244): Homolog of NCBI NO: 7511706 NR Description: lustrin A - California red abalone
  misc_feature (1)..(217): Homolog of NCBI NO: 7511706 NR Description: lustrin A - California red abalone
  misc_feature (1)..(223): Homolog of NCBI NO: 19570055 NR Description: similar to Dictyostelium discoideum (Slime mold).

SEQ ID NO: 95459 - protein, 330 aa, Arabidopsis thaliana; identical to SEQ ID NO: 91703
  peptide (1)..(330): Ceres Seq. ID no. 12728925
  misc_feature (1)..(330): Homolog of NCBI NO: 30684217 NR Description: tetratricopeptide repeat (TPR)-containing protein
  misc_feature (1)..(281): Homolog of NCBI NO: 30684223 NR Description: tetratricopeptide repeat (TPR)-containing protein
  misc_feature (1)..(232): Homolog of NCBI NO: 11994631 NR Description: gene_id:MGL6.23~unknown protein [Arabidopsis
  misc_feature (1)..(330): Homolog of NCBI NO: 30684223 NR Description: tetratricopeptide repeat (TPR)-containing protein
  misc_feature (1)..(274): Homolog of NCBI NO: 11994631 NR Description: gene_id:MGL6.23~unknown protein [Arabidopsis
  misc_feature (1)..(217): Homolog of NCBI NO: 7511706 NR Description: lustrin A - California red abalone
  misc_feature (1)..(206): Homolog of NCBI NO: 7511706 NR Description: lustrin A - California red abalone
  misc_feature (1)..(178): Homolog of NCBI NO: 7511706 NR Description: lustrin A - California red abalone
  misc_feature (1)..(151): Homolog of NCBI NO: 7511706 NR Description: lustrin A - California red abalone
  misc_feature (1)..(157): Homolog of NCBI NO: 19570055 NR Description: similar to Dictyostelium discoideum (Slime mold).

SEQ ID NO: 95460 - DNA, 2194 bp, Arabidopsis thaliana; identical to SEQ ID NO: 91704
  misc_feature (1)..(2194): Ceres Seq. ID no. 12728930
  misc_feature: MA Experiment ID: 20000179 Result: Down-regulated in Transcription
  misc_feature: MA Experiment 20000179 PARAMETER Experiment Name: At_Germinating_Seeds_P Parameter: Age (hr) Value: 6 vs. 0
  misc_feature: MA Experiment 20000179 PARAMETER Experiment Name: At_Germinating_Seeds_P Parameter: Tissue Value: Germinating Seeds
  misc_feature: MA Experiment ID: 20000180 Result: Down-regulated in Transcription
  misc_feature: MA Experiment 20000180 PARAMETER Experiment Name: At_Germinating_Seeds_P Parameter: Age (hr) Value: 24 vs. 0
  misc_feature: MA Experiment 20000180 PARAMETER Experiment Name: At_Germinating_Seeds_P Parameter: Tissue Value: Germinating Seeds
  misc_feature: MA Experiment ID: 20000184 Result: Down-regulated in Transcription
  misc_feature: MA Experiment 20000184 PARAMETER Experiment Name: At_Shoots__P Parameter: Age (day) Value: 7
  misc_feature: MA Experiment 20000184 PARAMETER Experiment Name: At_Shoots__P Parameter: Tissue Value: Shoots vs. Whole Plant
  misc_feature: MA Experiment ID: 20000265 Result: Up-regulated in Transcription
  misc_feature: MA Experiment 20000265 PARAMETER Experiment Name: At_Open_Flower_P Parameter: Age (day) Value: 21
  misc_feature: MA Experiment 20000265 PARAMETER Experiment Name: At_Open_Flower_P Parameter: Plant Line Value: WS
  misc_feature: MA Experiment 20000265 PARAMETER Experiment Name: At_Open_Flower_P Parameter: Tissue Value: Closed Flower vs. Whole Plant
  misc_feature: MA Experiment ID: 20000286 Result: Up-regulated in Transcription
  misc_feature: MA Experiment 20000286 PARAMETER Experiment Name: At_Open_Flower_P Parameter: Age (day) Value: 21
  misc_feature: MA Experiment 20000286 PARAMETER Experiment Name: At_Open_Flower_P Parameter: Plant Line Value: WS
  misc_feature: MA Experiment 20000286 PARAMETER Experiment Name: At_Open_Flower_P Parameter: Tissue Value: Half Open vs. Whole Plant
  misc_feature: MA Experiment ID: 20000437 Result: Down-regulated in Transcription
  misc_feature: MA Experiment 20000437 PARAMETER Experiment Name: At_Drought_P Parameter: Age (day) Value: 8
  misc_feature: MA Experiment 20000437 PARAMETER Experiment Name: At_Drought_P Parameter: Organism Value: A. thaliana
  misc_feature: MA Experiment 20000437 PARAMETER Experiment Name: At_Drought_P Parameter: Plant Line Value: WS
  misc_feature: MA Experiment 20000437 PARAMETER Experiment Name: At_Drought_P Parameter: Timepoint (hr) Value: 24
  misc_feature: MA Experiment 20000437 PARAMETER Experiment Name: At_Drought_P Parameter: Tissue Value: Whole Plant
  misc_feature: MA Experiment 20000437 PARAMETER Experiment Name: At_Drought_P Parameter: Treatment Value: Drought vs. No Drought
  misc_feature: MA Experiment ID: 20001451 Result: Down-regulated in Transcription
  misc_feature: MA Experiment 20001451 PARAMETER Experiment Name: At_Far-red-induction_P Parameter: Age (day) Value: 7
  misc_feature: MA Experiment 20001451 PARAMETER Experiment Name: At_Far-red-induction_P Parameter: Light Value: Far-red vs. White
  misc_feature: MA Experiment 20001451 PARAMETER Experiment Name: At_Far-red-induction_P Parameter: Organism Value: A. thaliana
  misc_feature: MA Experiment 20001451 PARAMETER Experiment Name: At_Far-red-induction_P Parameter: Plant Line Value: Columbia
  misc_feature: MA Experiment 20001451 PARAMETER Experiment Name: At_Far-red-induction_P Parameter: Timepoint (hr) Value: 24
  misc_feature: MA Experiment 20001451 PARAMETER Experiment Name: At_Far-red-induction_P Parameter: Tissue Value: Whole Plant
  misc_feature: MA Experiment ID: 20001458 Result: Up-regulated in Transcription
  misc_feature: MA Experiment 20001458 PARAMETER Experiment Name: At_50mM_NH4NO3_L-to-H_P Parameter: Age (day) Value: Undefined
  misc_feature: MA Experiment 20001458 PARAMETER Experiment Name: At_50mM_NH4NO3_L-to-H_P Parameter: Organism Value: Undefined
  misc_feature: MA Experiment 20001458 PARAMETER Experiment Name: At_50mM_NH4NO3_L-to-H_P Parameter: Plant Line Value: Undefined
  misc_feature: MA Experiment 20001458 PARAMETER Experiment Name: At_50mM_NH4NO3_L-to-H_P Parameter: Timepoint (hr) Value: 2
  misc_feature: MA Experiment 20001458 PARAMETER Experiment Name: At_50mM_NH4NO3_L-to-H_P Parameter: Tissue Value: Siliques
  misc_feature: MA Experiment 20001458 PARAMETER Experiment Name: At_50mM_NH4NO3_L-to-H_P Parameter: Treatment Value: 50mM NH4NO3 vs. 100mM Manitol
  misc_feature: MA Experiment ID: 20001557 Result: Up-regulated in Transcription
  misc_feature: MA Experiment 20001557 PARAMETER Experiment Name: At_Drought_Soil_Dry_P Parameter: Age (day) Value: 27
  misc_feature: MA Experiment 20001557 PARAMETER Experiment Name: At_Drought_Soil_Dry_P Parameter: Organism Value: A. thaliana
  misc_feature: MA Experiment 20001557 PARAMETER Experiment Name: At_Drought_Soil_Dry_P Parameter: Plant Line Value: WS
  misc_feature: MA Experiment 20001557 PARAMETER Experiment Name: At_Drought_Soil_Dry_P Parameter: Post Timepoint (hr) Value: 3
  misc_feature: MA Experiment 20001557 PARAMETER Experiment Name: At_Drought_Soil_Dry_P Parameter: Post-Treatment Value: Re-Water vs. No Drought
  misc_feature: MA Experiment 20001557 PARAMETER Experiment Name: At_Drought_Soil_Dry_P Parameter: Timepoint (day) Value: 13
  misc_feature: MA Experiment 20001557 PARAMETER Experiment Name: At_Drought_Soil_Dry_P Parameter: Treatment Value: Drought vs. No Drought
  misc_feature: MA Experiment ID: 20001558 Result: Up-regulated in Transcription
  misc_feature: MA Experiment 20001558 PARAMETER Experiment Name: At_Drought_Soil_Dry_P Parameter: Age (day) Value: 27
  misc_feature: MA Experiment 20001558 PARAMETER Experiment Name: At_Drought_Soil_Dry_P Parameter: Organism Value: A. thaliana
  misc_feature: MA Experiment 20001558 PARAMETER Experiment Name: At_Drought_Soil_Dry_P Parameter: Plant Line Value: WS
  misc_feature: MA Experiment 20001558 PARAMETER Experiment Name: At_Drought_Soil_Dry_P Parameter: Post Timepoint (hr) Value: 6
  misc_feature: MA Experiment 20001558 PARAMETER Experiment Name: At_Drought_Soil_Dry_P Parameter: Post-Treatment Value: Re-Water vs. No Drought
  misc_feature: MA Experiment 20001558 PARAMETER Experiment Name: At_Drought_Soil_Dry_P Parameter: Timepoint (day) Value: 13
  misc_feature: MA Experiment 20001558 PARAMETER Experiment Name: At_Drought_Soil_Dry_P Parameter: Treatment Value: Drought vs. No Drought

SEQ ID NO: 95461 - protein, 668 aa, Arabidopsis thaliana; identical to SEQ ID NO: 91705
  peptide (1)..(668): Ceres Seq. ID no. 12728931
  misc_feature (368)..(403): Pfam Name: Pumilio-family RNA binding repeat Pfam Description: Pumilio-family RNA binding repeat
  misc_feature (332)..(668): Homolog of NCBI NO: 34897258 NR Description: unknown protein [Oryza sativa (japonica
  misc_feature (43)..(364): Homolog of NCBI NO: 34897258 NR Description: unknown protein [Oryza sativa (japonica
  misc_feature (21)..(444): Homolog of NCBI NO: 34785334 NR Description: Minor histocompatibility antigen HA-8 [Homo
  misc_feature (57)..(430): Homolog of NCBI NO: 29126213 NR Description: DNA segment, Chr 19, Brigham & Women's Genetics expressed [Mus musculus] >gi|26341530|dbj|BAC34427.1| unnamed
  misc_feature (77)..(436): Homolog of NCBI NO: 34862110 NR Description: similar to DNA segment, Chr 19, Brigham & Womens
  misc_feature (34)..(428): Homolog of NCBI NO: 27694961 NR Description: Unknown (protein for IMAGE:5537488) [Xenopus
  misc_feature (121)..(444): Homolog of NCBI NO: 29337231 NR Description: Protein KIAA0020
  misc_feature (121)..(444): Homolog of NCBI NO: 33620773 NR Description: minor histocompatibility antigen HA-8; protein 5 by hepatitis B virus X antigen (HBxAg) [Homo sapiens] KIAA0020 [Homo sapiens] >gi|29468238|gb|AAO85462.1| XTP5 [Homo
  misc_feature (82)..(444): Homolog of NCBI NO: 17538003 NR Description: Putative nuclear protein, with a coiled coil of eukaryotic origin (87.0 kD) [Caenorhabditis elegans] Hypothetical protein ZK945.3 in chromosome II
  misc_feature (25)..(471): Homolog of NCBI NO: 19076064 NR Description: conserved hypothetical protein

SEQ ID NO: 95462 - protein, 641 aa, Arabidopsis thaliana; identical to SEQ ID NO: 91706
  peptide (1)..(641): Ceres Seq. ID no. 12728932
  misc_feature (341)..(376): Pfam Name: Pumilio-family RNA binding repeat Pfam Description: Pumilio-family RNA binding repeat
  misc_feature (305)..(641): Homolog of NCBI NO: 34897258 NR Description: unknown protein [Oryza sativa (japonica
  misc_feature (16)..(337): Homolog of NCBI NO: 34897258 NR Description: unknown protein [Oryza sativa (japonica
  misc_feature (1)..(417): Homolog of NCBI NO: 34785334 NR Description: Minor histocompatibility antigen HA-8 [Homo
  misc_feature (30)..(403): Homolog of NCBI NO: 29126213 NR Description: DNA segment, Chr 19, Brigham & Women's Genetics expressed [Mus musculus] >gi|26341530|dbj|BAC34427.1| unnamed
  misc_feature (50)..(409): Homolog of NCBI NO: 34862110 NR Description: similar to DNA segment, Chr 19, Brigham & Womens
  misc_feature (7)..(401): Homolog of NCBI NO: 27694961 NR Description: Unknown (protein for IMAGE:5537488) [Xenopus
  misc_feature (94)..(417): Homolog of NCBI NO: 29337231 NR Description: Protein KIAA0020
  misc_feature (94)..(417): Homolog of NCBI NO: 33620773 NR Description: minor histocompatibility antigen HA-8; protein 5 by hepatitis B virus X antigen (HBxAg) [Homo sapiens] KIAA0020 [Homo sapiens] >gi|29468238|gb|AAO85462.1| XTP5 [Homo
  misc_feature (55)..(417): Homolog of NCBI NO: 17538003 NR Description: Putative nuclear protein, with a coiled coil of eukaryotic origin (87.0 kD) [Caenorhabditis elegans] Hypothetical protein ZK945.3 in chromosome II
  misc_feature (1)..(444): Homolog of NCBI NO: 19076064 NR Description: conserved hypothetical protein

SEQ ID NO: 95463 - protein, 544 aa, Arabidopsis thaliana; identical to SEQ ID NO: 91707
  peptide (1)..(544): Ceres Seq. ID no. 12728933
  misc_feature (244)..(279): Pfam Name: Pumilio-family RNA binding repeat Pfam Description: Pumilio-family RNA binding repeat
  misc_feature (208)..(544): Homolog of NCBI NO: 34897258 NR Description: unknown protein [Oryza sativa (japonica
  misc_feature (1)..(240): Homolog of NCBI NO: 34897258 NR Description: unknown protein [Oryza sativa (japonica
  misc_feature (1)..(320): Homolog of NCBI NO: 34785334 NR Description: Minor histocompatibility antigen HA-8 [Homo
  misc_feature (1)..(306): Homolog of NCBI NO: 29126213 NR Description: DNA segment, Chr 19, Brigham & Women's Genetics expressed [Mus musculus] >gi|26341530|dbj|BAC34427.1| unnamed
  misc_feature (1)..(312): Homolog of NCBI NO: 34862110 NR Description: similar to DNA segment, Chr 19, Brigham & Womens
  misc_feature (1)..(304): Homolog of NCBI NO: 27694961 NR Description: Unknown (protein for IMAGE:5537488) [Xenopus
  misc_feature (1)..(320): Homolog of NCBI NO: 29337231 NR Description: Protein KIAA0020
  misc_feature (1)..(320): Homolog of NCBI NO: 33620773 NR Description: minor histocompatibility antigen HA-8; protein 5 by hepatitis B virus X antigen (HBxAg) [Homo sapiens] KIAA0020 [Homo sapiens] >gi|29468238|gb|AAO85462.1| XTP5 [Homo
  misc_feature (1)..(320): Homolog of NCBI NO: 17538003 NR Description: Putative nuclear protein, with a coiled coil of eukaryotic origin (87.0 kD) [Caenorhabditis elegans] Hypothetical protein ZK945.3 in chromosome II
  misc_feature (1)..(347): Homolog of NCBI NO: 19076064 NR Description: conserved hypothetical protein

SEQ ID NO: 95464 - DNA, 573 bp, Arabidopsis thaliana; identical to SEQ ID NO: 91708
  misc_feature (1)..(573): Ceres Seq. ID no. 12728950
  misc_feature: MA Experiment ID: 20000327 Result: Down-regulated in Transcription
  misc_feature: MA Experiment 20000327 PARAMETER Experiment Name: At_42deg_Heat_Sub_P Parameter: Age (day) Value: 14
  misc_feature: MA Experiment 20000327 PARAMETER Experiment Name: At_42deg_Heat_Sub_P Parameter: Organism Value: A. thaliana
  misc_feature: MA Experiment 20000327 PARAMETER Experiment Name: At_42deg_Heat_Sub_P Parameter: Plant Line Value: WS
  misc_feature: MA Experiment 20000327 PARAMETER Experiment Name: At_42deg_Heat_Sub_P Parameter: Temperature (deg C) Value: 42 vs. 22
  misc_feature: MA Experiment 20000327 PARAMETER Experiment Name: At_42deg_Heat_Sub_P Parameter: Timepoint (hr) Value: 1
  misc_feature: MA Experiment 20000327 PARAMETER Experiment Name: At_42deg_Heat_Sub_P Parameter: Tissue Value: Aerial
  misc_feature: MA Experiment ID: 20000440 Result: Up-regulated in Transcription
  misc_feature: MA Experiment 20000440 PARAMETER Experiment Name: At_Closed-Flower__Sub_P Parameter: Tissue Value: Closed Flower vs. Whole Plant

SEQ ID NO: 95465 - protein, 190 aa, Arabidopsis thaliana; identical to SEQ ID NO: 91709
  peptide (1)..(190): Ceres Seq. ID no. 12728951
  misc_feature (1)..(190): Homolog of NCBI NO: 15228899 NR Description: GATA zinc finger protein; protein id: At3g16870.1 thaliana] >gi|11994746|dbj|BAB03075.1| gene_id:MUH15.3~unknown
  misc_feature (5)..(185): Homolog of NCBI NO: 26453042 NR Description: unknown protein [Arabidopsis thaliana]
  misc_feature (63)..(185): Homolog of NCBI NO: 22328703 NR Description: similar to GATA zinc finger protein; protein id:
  misc_feature (5)..(54): Homolog of NCBI NO: 22328703 NR Description: similar to GATA zinc finger protein; protein id:
  misc_feature (12)..(95): Homolog of NCBI NO: 15239847 NR Description: GATA zinc finger protein; protein id: At5g49300.1 thaliana] >gi|10177159|dbj|BAB10348.1|
  misc_feature (123)..(190): Homolog of NCBI NO: 15239847 NR Description: GATA zinc finger protein; protein id: At5g49300.1 thaliana] >gi|10177159|dbj|BAB10348.1|
  misc_feature (6)..(98): Homolog of NCBI NO: 18397703 NR Description: GATA zinc finger protein; protein id: supported by cDNA: 110655., supported by cDNA: gi_17380939, by cDNA: gi_20258946 [Arabidopsis thaliana]
  misc_feature (17)..(98): Homolog of NCBI NO: 7549639 NR Description: hypothetical protein [Arabidopsis thaliana]
  misc_feature (17)..(98): Homolog of NCBI NO: 21536761 NR Description: unknown [Arabidopsis thaliana]
  misc_feature (35)..(93): Homolog of NCBI NO: 34897256 NR Description: putative zinc finger protein [Oryza sativa

SEQ ID NO: 95466 - protein, 108 aa, Arabidopsis thaliana; identical to SEQ ID NO: 91710
  peptide (1)..(108): Ceres Seq. ID no. 12728952
  misc_feature (1)..(108): Homolog of NCBI NO: 15228899 NR Description: GATA zinc finger protein; protein id: At3g16870.1 thaliana] >gi|11994746|dbj|BAB03075.1| gene_id:MUH15.3~unknown
  misc_feature (1)..(103): Homolog of NCBI NO: 26453042 NR Description: unknown protein [Arabidopsis thaliana]
  misc_feature (1)..(103): Homolog of NCBI NO: 22328703 NR Description: similar to GATA zinc finger protein; protein id:
  misc_feature (1)..(13): Homolog of NCBI NO: 15239847 NR Description: GATA zinc finger protein; protein id: At5g49300.1 thaliana] >gi|10177159|dbj|BAB10348.1|
  misc_feature (41)..(108): Homolog of NCBI NO: 15239847 NR Description: GATA zinc finger protein; protein id: At5g49300.1 thaliana] >gi|10177159|dbj|BAB10348.1|
  misc_feature (1)..(16): Homolog of NCBI NO: 18397703 NR Description: GATA zinc finger protein; protein id: supported by cDNA: 110655., supported by cDNA: gi_17380939, by cDNA: gi_20258946 [Arabidopsis thaliana]
  misc_feature (1)..(16): Homolog of NCBI NO: 7549639 NR Description: hypothetical protein [Arabidopsis thaliana]
  misc_feature (1)..(16): Homolog of NCBI NO: 21536761 NR Description: unknown [Arabidopsis thaliana]
  misc_feature (1)..(11): Homolog of NCBI NO: 34897256 NR Description: putative zinc finger protein [Oryza sativa
  misc_feature (1)..(107): Homolog of NCBI NO: 15236131 NR Description: GATA zinc finger protein; protein id: At4g26150.1

SEQ ID NO: 95467 - DNA, 1980 bp, Arabidopsis thaliana; identical to SEQ ID NO: 91711
  misc_feature (1)..(1980): Ceres Seq. ID no. 12728957
  misc_feature: MA Experiment ID: 20000180 Result: Down-regulated in Transcription
  misc_feature: MA Experiment 20000180 PARAMETER Experiment Name: At_Germinating_Seeds_P Parameter: Age (hr) Value: 24 vs. 0
  misc_feature: MA Experiment 20000180 PARAMETER Experiment Name: At_Germinating_Seeds_P Parameter: Tissue Value: Germinating Seeds
  misc_feature: MA Experiment ID: 20001451 Result: Down-regulated in Transcription
  misc_feature: MA Experiment 20001451 PARAMETER Experiment Name: At_Far-red-induction_P Parameter: Age (day) Value: 7
  misc_feature: MA Experiment 20001451 PARAMETER Experiment Name: At_Far-red-induction_P Parameter: Light Value: Far-red vs. White
  misc_feature: MA Experiment 20001451 PARAMETER Experiment Name: At_Far-red-induction_P Parameter: Organism Value: A. thaliana
  misc_feature: MA Experiment 20001451 PARAMETER Experiment Name: At_Far-red-induction_P Parameter: Plant Line Value: Columbia
  misc_feature: MA Experiment 20001451 PARAMETER Experiment Name: At_Far-red-induction_P Parameter: Timepoint (hr) Value: 24
  misc_feature: MA Experiment 20001451 PARAMETER Experiment Name: At_Far-red-induction_P Parameter: Tissue Value: Whole Plant

SEQ ID NO: 95468 - protein, 659 aa, Arabidopsis thaliana; identical to SEQ ID NO: 91712
  peptide (1)..(659): Ceres Seq. ID no. 12728958
  misc_feature (496)..(530): Pfam Name: PPR repeat Pfam Description: PPR repeat
  misc_feature (128)..(611): Homolog of NCBI NO: 15242446 NR Description: putative protein; protein id: At5g39710.1
  misc_feature (175)..(654): Homolog of NCBI NO: 33859440 NR Description: PPR protein [Oryza sativa (indica cultivar-group)]
  misc_feature (162)..(641): Homolog of NCBI NO: 34896698 NR Description: putative pentatricopeptide repeat protein [Oryza
  misc_feature (175)..(634): Homolog of NCBI NO: 15231863 NR Description: putative protein; protein id: At3g53700.1, by cDNA: gi_15982930 [Arabidopsis thaliana]
  misc_feature (79)..(636): Homolog of NCBI NO: 15231863 NR Description: putative protein; protein id: At3g53700.1, by cDNA: gi_15982930 [Arabidopsis thaliana]
  misc_feature (151)..(650): Homolog of NCBI NO: 15238505 NR Description: putative protein; protein id: At5g65560.1
  misc_feature (161)..(642): Homolog of NCBI NO: 15242446 NR Description: putative protein; protein id: At5g39710.1
  misc_feature (167)..(644): Homolog of NCBI NO: 25404377 NR Description: hypothetical protein F16P17.5 [imported] - thaliana >gi|8493578|gb|AAF75801.1|AC011000_4 Contains a RepB protein domain and multiple PPR PF|01535 repeats. [Arabidopsis
  misc_feature (114)..(644): Homolog of NCBI NO: 15221691 NR Description: unknown protein; protein id: At1g63130.1
  misc_feature (178)..(634): Homolog of NCBI NO: 15221549 NR Description: PPR-repeat protein; protein id: At1g62670.1

SEQ ID NO: 95469 - protein, 530 aa, Arabidopsis thaliana; identical to SEQ ID NO: 91713
  peptide (1)..(530): Ceres Seq. ID no. 12728959
  misc_feature (367)..(401): Pfam Name: PPR repeat Pfam Description: PPR repeat
  misc_feature (1)..(482): Homolog of NCBI NO: 15242446 NR Description: putative protein; protein id: At5g39710.1
  misc_feature (46)..(525): Homolog of NCBI NO: 33859440 NR Description: PPR protein [Oryza sativa (indica cultivar-group)]
  misc_feature (33)..(512): Homolog of NCBI NO: 34896698 NR Description: putative pentatricopeptide repeat protein [Oryza
  misc_feature (46)..(505): Homolog of NCBI NO: 15231863 NR Description: putative protein; protein id: At3g53700.1, by cDNA: gi_15982930 [Arabidopsis thaliana]
  misc_feature (1)..(507): Homolog of NCBI NO: 15231863 NR Description: putative protein; protein id: At3g53700.1, by cDNA: gi_15982930 [Arabidopsis thaliana]
  misc_feature (22)..(521): Homolog of NCBI NO: 15238505 NR Description: putative protein; protein id: At5g65560.1
  misc_feature (32)..(513): Homolog of NCBI NO: 15242446 NR Description: putative protein; protein id: At5g39710.1
  misc_feature (38)..(515): Homolog of NCBI NO: 25404377 NR Description: hypothetical protein F16P17.5 [imported] - thaliana >gi|8493578|gb|AAF75801.1|AC011000_4 Contains a RepB protein domain and multiple PPR PF|01535 repeats. [Arabidopsis
  misc_feature (1)..(515): Homolog of NCBI NO: 15221691 NR Description: unknown protein; protein id: At1g63130.1
  misc_feature (49)..(505): Homolog of NCBI NO: 15221549 NR Description: PPR-repeat protein; protein id: At1g62670.1

SEQ ID NO: 95470 - protein, 512 aa, Arabidopsis thaliana; identical to SEQ ID NO: 91714
  peptide (1)..(512): Ceres Seq. ID no. 12728960
  misc_feature (349)..(383): Pfam Name: PPR repeat Pfam Description: PPR repeat
  misc_feature (1)..(464): Homolog of NCBI NO: 15242446 NR Description: putative protein; protein id: At5g39710.1
  misc_feature (28)..(507): Homolog of NCBI NO: 33859440 NR Description: PPR protein [Oryza sativa (indica cultivar-group)]
  misc_feature (15)..(494): Homolog of NCBI NO: 34896698 NR Description: putative pentatricopeptide repeat protein [Oryza
  misc_feature (28)..(487): Homolog of NCBI NO: 15231863 NR Description: putative protein; protein id: At3g53700.1, by cDNA: gi_15982930 [Arabidopsis thaliana]
  misc_feature (1)..(489): Homolog of NCBI NO: 15231863 NR Description: putative protein; protein id: At3g53700.1, by cDNA: gi_15982930 [Arabidopsis thaliana]
  misc_feature (4)..(503): Homolog of NCBI NO: 15238505 NR Description: putative protein; protein id: At5g65560.1
  misc_feature (14)..(495): Homolog of NCBI NO: 15242446 NR Description: putative protein; protein id: At5g39710.1
  misc_feature (20)..(497): Homolog of NCBI NO: 25404377 NR Description: hypothetical protein F16P17.5 [imported] - thaliana >gi|8493578|gb|AAF75801.1|AC011000_4 Contains a RepB protein domain and multiple PPR PF|01535 repeats. [Arabidopsis
  misc_feature (1)..(497): Homolog of NCBI NO: 15221691 NR Description: unknown protein; protein id: At1g63130.1
  misc_feature (31)..(487): Homolog of NCBI NO: 15221549 NR Description: PPR-repeat protein; protein id: At1g62670.1

SEQ ID NO: 95471 - DNA, 1002 bp, Arabidopsis thaliana; identical to SEQ ID NO: 91715
  misc_feature (1)..(1002): Ceres Seq. ID no. 12728965
  misc_feature: MA Experiment ID: 108434 Result: Down-regulated in Transcription
  misc_feature: MA Experiment 108434 PARAMETER Experiment Name: At_Root_Tips_cDNA_P Parameter: Tissue Value: Root Tips
  misc_feature: MA Experiment ID: 108461 Result: Up-regulated in Transcription
  misc_feature: MA Experiment 108461 PARAMETER Experiment Name: At_Germinating_Seeds_cDNA_P Parameter: Age (day) Value: 1 vs. 0
  misc_feature: MA Experiment 108461 PARAMETER Experiment Name: At_Germinating_Seeds_cDNA_P Parameter: Tissue Value: Germinating Seeds
  misc_feature: MA Experiment ID: 108462 Result: Up-regulated in Transcription
  misc_feature: MA Experiment 108462 PARAMETER Experiment Name: At_Germinating_Seeds_cDNA_P Parameter: Age (day) Value: 2 vs. 0
  misc_feature: MA Experiment 108462 PARAMETER Experiment Name: At_Germinating_Seeds_cDNA_P Parameter: Tissue Value: Germinating Seeds
  misc_feature: MA Experiment ID: 108463 Result: Up-regulated in Transcription
  misc_feature: MA Experiment 108463 PARAMETER Experiment Name: At_Germinating_Seeds_cDNA_P Parameter: Age (day) Value: 3 vs. 0
  misc_feature: MA Experiment 108463 PARAMETER Experiment Name: At_Germinating_Seeds_cDNA_P Parameter: Tissue Value: Germinating Seeds
  misc_feature: MA Experiment ID: 108464 Result: Up-regulated in Transcription
  misc_feature: MA Experiment 108464 PARAMETER Experiment Name: At_Germinating_Seeds_cDNA_P Parameter: Age (day) Value: 4 vs. 0
  misc_feature: MA Experiment 108464 PARAMETER Experiment Name: At_Germinating_Seeds_cDNA_P Parameter: Tissue Value: Germinating Seeds
  misc_feature: MA Experiment ID: 108474 Result: Down-regulated in Transcription
  misc_feature: MA Experiment 108474 PARAMETER Experiment Name: At_Drought_Flowers_cDNA_P Parameter: Timepoint (hr) Value: null
  misc_feature: MA Experiment 108474 PARAMETER Experiment Name: At_Drought_Flowers_cDNA_P Parameter: Treatment Value: Drought vs. No Drought
  misc_feature: MA Experiment ID: 108573 Result: Up-regulated in Transcription
  misc_feature: MA Experiment 108573 PARAMETER Experiment Name: At_Drought_cDNA_P Parameter: Timepoint (hr) Value: 6
  misc_feature: MA Experiment 108573 PARAMETER Experiment Name: At_Drought_cDNA_P Parameter: Tissue Value: Aerial
  misc_feature: MA Experiment 108573 PARAMETER Experiment Name: At_Drought_cDNA_P Parameter: Treatment Value: Drought vs. No Drought
  misc_feature: MA Experiment ID: 108594 Result: Down-regulated in Transcription
  misc_feature: MA Experiment 108594 PARAMETER Experiment Name: At_Ler-rhl_Root_cDNA_P Parameter: Plant Line Value: null
  misc_feature: MA Experiment ID: 108595 Result: Up-regulated in Transcription
  misc_feature: MA Experiment 108595 PARAMETER Experiment Name: At_Ler-pi_Ovule_cDNA_P Parameter: Plant Line Value: null
  misc_feature: MA Experiment ID: 20000071 Result: Up-regulated in Transcription
  misc_feature: MA Experiment 20000071 PARAMETER Experiment Name: At_100uM_ABA_Mutants_cDNA_P Parameter: Plant Line Value: CS8104
  misc_feature: MA Experiment 20000071 PARAMETER Experiment Name: At_100uM_ABA_Mutants_cDNA_P Parameter: Timepoint (hr) Value: 6
  misc_feature: MA Experiment 20000071 PARAMETER Experiment Name: At_100uM_ABA_Mutants_cDNA_P Parameter: Tissue Value: Aerial
  misc_feature: MA Experiment 20000071 PARAMETER Experiment Name: At_100uM_ABA_Mutants_cDNA_P Parameter: Treatment Value: 100uM ABA vs. No Treatment

SEQ ID NO: 95472 - protein, 333 aa, Arabidopsis thaliana; identical to SEQ ID NO: 42185
  peptide (1)..(333): Ceres Seq. ID no. 12728966
  misc_feature (1)..(333): Homolog of NCBI NO: 15228911 NR Description: glycosyl hydrolase family 19 (chitinase); protein At3g16920.1, supported by cDNA: gi_15724261, supported by cDNA: [Arabidopsis thaliana] >gi|7670022|dbj|BAA94976.1| basic
  misc_feature (8)..(332): Homolog of NCBI NO: 15221283 NR Description: glycosyl hydrolase family 19 (chitinase); protein At1g05850.1, supported by cDNA: gi_12083323, supported by cDNA: supported by cDNA: gi_17226328, supported by cDNA: gi_21280934
  misc_feature (48)..(323): Homolog of NCBI NO: 27817867 NR Description: OJ1081_B12.16 [Oryza sativa (japonica
  misc_feature (68)..(321): Homolog of NCBI NO: 7798670 NR Description: class I chitinase [Arabis microphylla]
  misc_feature (68)..(321): Homolog of NCBI NO: 7798632 NR Description: class I chitinase [Arabis holboellii]
  misc_feature (68)..(321): Homolog of NCBI NO: 7798664 NR Description: class I chitinase [Arabis lignifera]
  misc_feature (56)..(321): Homolog of NCBI NO: 7798640 NR Description: class I chitinase [Arabis blepharophylla]
  misc_feature (68)..(319): Homolog of NCBI NO: 7798656 NR Description: class I chitinase [Halimolobos perplexa var.
  misc_feature (68)..(321): Homolog of NCBI NO: 7798666 NR Description: class I chitinase [Arabis lignifera]
  misc_feature (68)..(321): Homolog of NCBI NO: 7798678 NR Description: class I chitinase [Arabis parishii]

SEQ ID NO: 95473 - protein, 212 aa, Arabidopsis thaliana; identical to SEQ ID NO: 91717
  peptide (1)..(212): Ceres Seq. ID no. 12728967
  misc_feature (1)..(212): Homolog of NCBI NO: 15228911 NR Description: glycosyl hydrolase family 19 (chitinase); protein At3g16920.1, supported by cDNA: gi_15724261, supported by cDNA: [Arabidopsis thaliana] >gi|7670022|dbj|BAA94976.1| basic
  misc_feature (1)..(211): Homolog of NCBI NO: 15221283 NR Description: glycosyl hydrolase family 19 (chitinase); protein At1g05850.1, supported by cDNA: gi_12083323, supported by cDNA: supported by cDNA: gi_17226328, supported by cDNA: gi_21280934
  misc_feature (1)..(202): Homolog of NCBI NO: 27817867 NR Description: OJ1081_B12.16 [Oryza sativa (japonica
  misc_feature (1)..(200): Homolog of NCBI NO: 7798670 NR Description: class I chitinase [Arabis microphylla]
  misc_feature (1)..(200): Homolog of NCBI NO: 7798632 NR Description: class I chitinase [Arabis holboellii]
  misc_feature (1)..(200): Homolog of NCBI NO: 7798664 NR Description: class I chitinase [Arabis lignifera]
  misc_feature (1)..(200): Homolog of NCBI NO: 7798640 NR Description: class I chitinase [Arabis blepharophylla]
  misc_feature (1)..(198): Homolog of NCBI NO: 7798656 NR Description: class I chitinase [Halimolobos perplexa var.
  misc_feature (1)..(200): Homolog of NCBI NO: 7798666 NR Description: class I chitinase [Arabis lignifera]
  misc_feature (1)..(200): Homolog of NCBI NO: 7798678 NR Description: class I chitinase [Arabis parishii]

SEQ ID NO: 95474 - protein, 176 aa, Arabidopsis thaliana; identical to SEQ ID NO: 91718
  peptide (1)..(176): Ceres Seq. ID no. 12728968
  misc_feature (1)..(176): Homolog of NCBI NO: 15228911 NR Description: glycosyl hydrolase family 19 (chitinase); protein At3g16920.1, supported by cDNA: gi_15724261, supported by cDNA: [Arabidopsis thaliana] >gi|7670022|dbj|BAA94976.1| basic
  misc_feature (1)..(175): Homolog of NCBI NO: 15221283 NR Description: glycosyl hydrolase family 19 (chitinase); protein At1g05850.1, supported by cDNA: gi_12083323, supported by cDNA: supported by cDNA: gi_17226328, supported by cDNA: gi_21280934
  misc_feature (1)..(166): Homolog of NCBI NO: 27817867 NR Description: OJ1081_B12.16 [Oryza sativa (japonica
  misc_feature (1)..(164): Homolog of NCBI NO: 7798670 NR Description: class I chitinase [Arabis microphylla]
  misc_feature (1)..(164): Homolog of NCBI NO: 7798632 NR Description: class I chitinase [Arabis holboellii]
  misc_feature (1)..(164): Homolog of NCBI NO: 7798664 NR Description: class I chitinase [Arabis lignifera]
  misc_feature (1)..(164): Homolog of NCBI NO: 7798640 NR Description: class I chitinase [Arabis blepharophylla]
  misc_feature (1)..(162): Homolog of NCBI NO: 7798656 NR Description: class I chitinase [Halimolobos perplexa var.
  misc_feature (1)..(164): Homolog of NCBI NO: 7798666 NR Description: class I chitinase [Arabis lignifera]
  misc_feature (1)..(164): Homolog of NCBI NO: 7798678 NR Description: class I chitinase [Arabis parishii]

SEQ ID NO: 95475 - DNA, 552 bp, Arabidopsis thaliana; identical to SEQ ID NO: 91719
  misc_feature (1)..(552): Ceres Seq. ID no. 12728984
  misc_feature: MA Experiment ID: 20000171 Result: Up-regulated in Transcription
  misc_feature: MA Experiment 20000171 PARAMETER Experiment Name: At_42deg_Heat_P Parameter: Age (day) Value: 14
  misc_feature: MA Experiment 20000171 PARAMETER Experiment Name: At_42deg_Heat_P Parameter: Organism Value: A. thaliana
  misc_feature: MA Experiment 20000171 PARAMETER Experiment Name: At_42deg_Heat_P Parameter: Plant Line Value: WS
  misc_feature: MA Experiment 20000171 PARAMETER Experiment Name: At_42deg_Heat_P Parameter: Temperature (deg C) Value: 42 vs. 22
  misc_feature: MA Experiment 20000171 PARAMETER Experiment Name: At_42deg_Heat_P Parameter: Timepoint (hr) Value: 1
  misc_feature: MA Experiment 20000171 PARAMETER Experiment Name: At_42deg_Heat_P Parameter: Tissue Value: Aerial
  misc_feature: MA Experiment ID: 20000173 Result: Up-regulated in Transcription
  misc_feature: MA Experiment 20000173 PARAMETER Experiment Name: At_42deg_Heat_P Parameter: Age (day) Value: 14
  misc_feature: MA Experiment 20000173 PARAMETER Experiment Name: At_42deg_Heat_P Parameter: Organism Value: A. thaliana
  misc_feature: MA Experiment 20000173 PARAMETER Experiment Name: At_42deg_Heat_P Parameter: Plant Line Value: WS
  misc_feature: MA Experiment 20000173 PARAMETER Experiment Name: At_42deg_Heat_P Parameter: Temperature (deg C) Value: 42 vs. 22
  misc_feature: MA Experiment 20000173 PARAMETER Experiment Name: At_42deg_Heat_P Parameter: Timepoint (hr) Value: 6
  misc_feature: MA Experiment 20000173 PARAMETER Experiment Name: At_42deg_Heat_P Parameter: Tissue Value: Aerial
  misc_feature: MA Experiment ID: 20000184 Result: Up-regulated in Transcription
  misc_feature: MA Experiment 20000184 PARAMETER Experiment Name: At_Shoots__P Parameter: Age (day) Value: 7
  misc_feature: MA Experiment 20000184 PARAMETER Experiment Name: At_Shoots__P Parameter: Tissue Value: Shoots vs. Whole Plant
  misc_feature: MA Experiment ID: 20000227 Result: Up-regulated in Transcription
  misc_feature: MA Experiment 20000227 PARAMETER Experiment Name: At_Root-Tips-vs-Tops_P Parameter: Tissue Value: Root Tips vs. Root Tops
  misc_feature: MA Experiment ID: 20000286 Result: Up-regulated in Transcription
  misc_feature: MA Experiment 20000286 PARAMETER Experiment Name: At_Open_Flower_P Parameter: Age (day) Value: 21
  misc_feature: MA Experiment 20000286 PARAMETER Experiment Name: At_Open_Flower_P Parameter: Plant Line Value: WS
  misc_feature: MA Experiment 20000286 PARAMETER Experiment Name: At_Open_Flower_P Parameter: Tissue Value: Half Open vs. Whole Plant
  misc_feature: MA Experiment ID: 20000436 Result: Up-regulated in Transcription
  misc_feature: MA Experiment 20000436 PARAMETER Experiment Name: At_Drought_P Parameter: Age (day) Value: 7
  misc_feature: MA Experiment 20000436 PARAMETER Experiment Name: At_Drought_P Parameter: Organism Value: A. thaliana
  misc_feature: MA Experiment 20000436 PARAMETER Experiment Name: At_Drought_P Parameter: Plant Line Value: WS
  misc_feature: MA Experiment 20000436 PARAMETER Experiment Name: At_Drought_P Parameter: Timepoint (hr) Value: 12
  misc_feature: MA Experiment 20000436 PARAMETER Experiment Name: At_Drought_P Parameter: Tissue Value: Whole Plant
  misc_feature: MA Experiment 20000436 PARAMETER Experiment Name: At_Drought_P Parameter: Treatment Value: Drought vs. No Drought
  misc_feature: MA Experiment ID: 20000451 Result: Down-regulated in Transcription
  misc_feature: MA Experiment 20000451 PARAMETER Experiment Name: At_CS6879_Shoots-Roots_P Parameter: Age (day) Value: 14
  misc_feature: MA Experiment 20000451 PARAMETER Experiment Name: At_CS6879_Shoots-Roots_P Parameter: Organism Value: A. thaliana
  misc_feature: MA Experiment 20000451 PARAMETER Experiment Name: At_CS6879_Shoots-Roots_P Parameter: Plant Line Value: CS6879 vs. WS
  misc_feature: MA Experiment 20000451 PARAMETER Experiment Name: At_CS6879_Shoots-Roots_P Parameter: Tissue Value: Roots
  misc_feature: MA Experiment ID: 20000794 Result: Up-regulated in Transcription
  misc_feature: MA Experiment 20000794 PARAMETER Experiment Name: At_Petals_P Parameter: Age (day) Value: 23-25 days
  misc_feature: MA Experiment 20000794 PARAMETER Experiment Name: At_Petals_P Parameter: Plant Line Value: WS
  misc_feature: MA Experiment 20000794 PARAMETER Experiment Name: At_Petals_P Parameter: Tissue Value: Petals vs. Whole plant
  misc_feature: MA Experiment ID: 20001248 Result: Down-regulated in Transcription
  misc_feature: MA Experiment 20001248 PARAMETER Experiment Name: At_Far-red-induction_P Parameter: Age (day) Value: 7
  misc_feature: MA Experiment 20001248 PARAMETER Experiment Name: At_Far-red-induction_P Parameter: Light Value: Far-red vs. White
  misc_feature: MA Experiment 20001248 PARAMETER Experiment Name: At_Far-red-induction_P Parameter: Organism Value: A. thaliana
  misc_feature: MA Experiment 20001248 PARAMETER Experiment Name: At_Far-red-induction_P Parameter: Plant Line Value: Columbia
  misc_feature: MA Experiment 20001248 PARAMETER Experiment Name: At_Far-red-induction_P Parameter: Timepoint (hr) Value: 4
  misc_feature: MA Experiment 20001248 PARAMETER Experiment Name: At_Far-red-induction_P Parameter: Tissue Value: Whole Plant

SEQ ID NO: 95476 - protein, 183 aa, Arabidopsis thaliana; identical to SEQ ID NO: 91720
  peptide (1)..(183): Ceres Seq. ID no. 12728985
  misc_feature (1)..(183): Homolog of NCBI NO: 15228972 NR Description: hypothetical protein; protein id: At3g17130.1 thaliana] >gi|7670037|dbj|BAA94991.1| gene_id:K14A17.20~unknown
  misc_feature (13)..(180): Homolog of NCBI NO: 18401982 NR Description: expressed protein; protein id: At1g47960.1, by cDNA: 102433., supported by cDNA: gi_15724356, supported by gi_15810208, supported by cDNA: gi_19699119 [Arabidopsis

SEQ ID NO: 95477 - protein, 118 aa, Arabidopsis thaliana; identical to SEQ ID NO: 91721
  peptide (1)..(118): Ceres Seq. ID no. 12728986
  misc_feature (1)..(118): Homolog of NCBI NO: 15228972 NR Description: hypothetical protein; protein id: At3g17130.1 thaliana] >gi|7670037|dbj|BAA94991.1| gene_id:K14A17.20~unknown
  misc_feature (1)..(115): Homolog of NCBI NO: 18401982 NR Description: expressed protein; protein id: At1g47960.1, by cDNA: 102433., supported by cDNA: gi_15724356, supported by gi_15810208, supported by cDNA: gi_19699119 [Arabidopsis

SEQ ID NO: 95478 - protein, 110 aa, Arabidopsis thaliana; identical to SEQ ID NO: 91722
  peptide (1)..(110): Ceres Seq. ID no. 12728987
  misc_feature (1)..(110): Homolog of NCBI NO: 15228972 NR Description: hypothetical protein; protein id: At3g17130.1 thaliana] >gi|7670037|dbj|BAA94991.1| gene_id:K14A17.20~unknown
  misc_feature (1)..(107): Homolog of NCBI NO: 18401982 NR Description: expressed protein; protein id: At1g47960.1, by cDNA: 102433., supported by cDNA: gi_15724356, supported by gi_15810208, supported by cDNA: gi_19699119 [Arabidopsis

SEQ ID NO: 95479 - DNA, 1437 bp, Arabidopsis thaliana; identical to SEQ ID NO: 91723
  misc_feature (1)..(1437): Ceres Seq. ID no. 12728992
  misc_feature: MA Experiment ID: 20000180 Result: Down-regulated in Transcription
  misc_feature: MA Experiment 20000180 PARAMETER Experiment Name: At_Germinating_Seeds_P Parameter: Age (hr) Value: 24 vs. 0
  misc_feature: MA Experiment 20000180 PARAMETER Experiment Name: At_Germinating_Seeds_P Parameter: Tissue Value: Germinating Seeds
  misc_feature: MA Experiment ID: 20001904 Result: Up-regulated in Transcription
  misc_feature: MA Experiment 20001904 PARAMETER Experiment Name: At_Drought_Reproduction_P Parameter: Age (day) Value: 37
  misc_feature: MA Experiment 20001904 PARAMETER Experiment Name: At_Drought_Reproduction_P Parameter: Organism Value: A. thaliana
  misc_feature: MA Experiment 20001904 PARAMETER Experiment Name: At_Drought_Reproduction_P Parameter: Plant Line Value: WS
  misc_feature: MA Experiment 20001904 PARAMETER Experiment Name: At_Drought_Reproduction_P Parameter: Timepoint (day) Value: 7
  misc_feature: MA Experiment 20001904 PARAMETER Experiment Name: At_Drought_Reproduction_P Parameter: Tissue Value: Rosettes
  misc_feature: MA Experiment 20001904 PARAMETER Experiment Name: At_Drought_Reproduction_P Parameter: Treatment Value: Drought vs. No Drought

SEQ ID NO: 95480 - protein, 478 aa, Arabidopsis thaliana; identical to SEQ ID NO: 91724
  peptide (1)..(478): Ceres Seq. ID no. 12728993
  misc_feature (1)..(478): Homolog of NCBI NO: 15228988 NR Description: putative serine carboxypeptidase II; protein id:
  misc_feature (7)..(478): Homolog of NCBI NO: 7670042 NR Description: serine carboxypeptidase II-like protein
  misc_feature (32)..(400): Homolog of NCBI NO: 34894888 NR Description: putative serine carboxypeptidase II-like protein
  misc_feature (403)..(476): Homolog of NCBI NO: 34894888 NR Description: putative serine carboxypeptidase II-like protein
  misc_feature (31)..(478): Homolog of NCBI NO: 10177810 NR Description: serine carboxypeptidase II-like protein
  misc_feature (13)..(288): Homolog of NCBI NO: 15220282 NR Description: Serine carboxypeptidase isolog; protein id: [Arabidopsis thaliana] >gi|25289784|pir||G86244 Serine
  misc_feature (322)..(477): Homolog of NCBI NO: 15220282 NR Description: Serine carboxypeptidase isolog; protein id: [Arabidopsis thaliana] >gi|25289784|pir||G86244 Serine
  misc_feature (7)..(477): Homolog of NCBI NO: 13877871 NR Description: putative serine carboxypeptidase II [Arabidopsis
  misc_feature (34)..(476): Homolog of NCBI NO: 15241571 NR Description: serine-type carboxypeptidase II-like protein; id: At5g08260.1, supported by cDNA: gi_13877962, supported by gi_17065641 [Arabidopsis thaliana] >gi|11264740|pir||T50511
  misc_feature (14)..(477): Homolog of NCBI NO: 15219869 NR Description: hypothetical protein; protein id: At1g61130.1

SEQ ID NO: 95481 - protein, 472 aa, Arabidopsis thaliana; identical to SEQ ID NO: 91725
  peptide (1)..(472): Ceres Seq. ID no. 12728994
  misc_feature (1)..(472): Homolog of NCBI NO: 15228988 NR Description: putative serine carboxypeptidase II; protein id:
  misc_feature (1)..(472): Homolog of NCBI NO: 7670042 NR Description: serine carboxypeptidase II-like protein
  misc_feature (26)..(394): Homolog of NCBI NO: 34894888 NR Description: putative serine carboxypeptidase II-like protein
  misc_feature (397)..(470): Homolog of NCBI NO: 34894888 NR Description: putative serine carboxypeptidase II-like protein
  misc_feature (25)..(472): Homolog of NCBI NO: 10177810 NR Description: serine carboxypeptidase II-like protein
  misc_feature (7)..(282): Homolog of NCBI NO: 15220282 NR Description: Serine carboxypeptidase isolog; protein id: [Arabidopsis thaliana] >gi|25289784|pir||G86244 Serine
  misc_feature (316)..(471): Homolog of NCBI NO: 15220282 NR Description: Serine carboxypeptidase isolog; protein id: [Arabidopsis thaliana] >gi|25289784|pir||G86244 Serine
  misc_feature (1)..(471): Homolog of NCBI NO: 13877871 NR Description: putative serine carboxypeptidase II [Arabidopsis
  misc_feature (28)..(470): Homolog of NCBI NO: 15241571 NR Description: serine-type carboxypeptidase II-like protein; id: At5g08260.1, supported by cDNA: gi_13877962, supported by gi_17065641 [Arabidopsis thaliana] >gi|11264740|pir||T50511
  misc_feature (8)..(471): Homolog of NCBI NO: 15219869 NR Description: hypothetical protein; protein id: At1g61130.1

SEQ ID NO: 95482 - protein, 348 aa, Arabidopsis thaliana; identical to SEQ ID NO: 91726
  peptide (1)..(348): Ceres Seq. ID no. 12728995
  misc_feature (1)..(348): Homolog of NCBI NO: 15228988 NR Description: putative serine carboxypeptidase II; protein id:
  misc_feature (1)..(348): Homolog of NCBI NO: 7670042 NR Description: serine carboxypeptidase II-like protein
  misc_feature (1)..(270): Homolog of NCBI NO: 34894888 NR Description: putative serine carboxypeptidase II-like protein
  misc_feature (273)..(346): Homolog of NCBI NO: 34894888 NR Description: putative serine carboxypeptidase II-like protein
  misc_feature (1)..(348): Homolog of NCBI NO: 10177810 NR Description: serine carboxypeptidase II-like protein
  misc_feature (1)..(158): Homolog of NCBI NO: 15220282 NR Description: Serine carboxypeptidase isolog; protein id: [Arabidopsis thaliana] >gi|25289784|pir||G86244 Serine
  misc_feature (192)..(347): Homolog of NCBI NO: 15220282 NR Description: Serine carboxypeptidase isolog; protein id: [Arabidopsis thaliana] >gi|25289784|pir||G86244 Serine
  misc_feature (1)..(347): Homolog of NCBI NO: 13877871 NR Description: putative serine carboxypeptidase II [Arabidopsis
  misc_feature (1)..(346): Homolog of NCBI NO: 15241571 NR Description: serine-type carboxypeptidase II-like protein; id: At5g08260.1, supported by cDNA: gi_13877962, supported by gi_17065641 [Arabidopsis thaliana] >gi|11264740|pir||T50511
  misc_feature (1)..(347): Homolog of NCBI NO: 15219869 NR Description: hypothetical protein; protein id: At1g61130.1

SEQ ID NO: 95483 - DNA, 6027 bp, Arabidopsis thaliana; identical to SEQ ID NO: 91727
  misc_feature (1)..(6027): Ceres Seq. ID no. 12729019
  misc_feature: MA Experiment ID: 20000180 Result: Up-regulated in Transcription
  misc_feature: MA Experiment 20000180 PARAMETER Experiment Name: At_Germinating_Seeds_P Parameter: Age (hr) Value: 24 vs. 0
  misc_feature: MA Experiment 20000180 PARAMETER Experiment Name: At_Germinating_Seeds_P Parameter: Tissue Value: Germinating Seeds

SEQ ID NO: 95484 - protein, 2008 aa, Arabidopsis thaliana; identical to SEQ ID NO: 91728
  peptide (1)..(2008): Ceres Seq. ID no. 12729020
  misc_feature (1427)..(1992): Pfam Name: Synaptonemal complex protein 1 (SCP-1) Pfam Description: Synaptonemal complex protein 1 (SCP-1)
  misc_feature (30)..(1034): Homolog of NCBI NO: 9280323 NR Description: kinesin (centromeric protein)-like protein
  misc_feature (1376)..(1994): Homolog of NCBI NO: 9280323 NR Description: kinesin (centromeric protein)-like protein
  misc_feature (84)..(1034): Homolog of NCBI NO: 22331168 NR Description: kinesin-related protein; protein id: At3g19050.1
  misc_feature (1376)..(1975): Homolog of NCBI NO: 22331168 NR Description: kinesin-related protein; protein id: At3g19050.1
  misc_feature (92)..(1989): Homolog of NCBI NO: 27261081 NR Description: OJ1340_C08.3 [Oryza sativa (japonica
  misc_feature (155)..(788): Homolog of NCBI NO: 40539007 NR Description: kinesin-like protein [Oryza sativa (japonica
  misc_feature (155)..(934): Homolog of NCBI NO: 15229853 NR Description: kinesin-related protein; protein id: At3g44050.1
  misc_feature (1363)..(1943): Homolog of NCBI NO: 9887310 NR Description: kinesin-like protein KRP180 [Strongylocentrotus
  misc_feature (188)..(719): Homolog of NCBI NO: 9887310 NR Description: kinesin-like protein KRP180 [Strongylocentrotus
  misc_feature (166)..(518): Homolog of NCBI NO: 22331291 NR Description: phragmoplast-associated kinesin-related protein, protein id: At3g23670.1 [Arabidopsis thaliana] AT3g23670/MDB19_16 [Arabidopsis thaliana]

SEQ ID NO: 95485 - protein, 1999 aa, Arabidopsis thaliana; identical to SEQ ID NO: 91729
  peptide (1)..(1999): Ceres Seq. ID no. 12729021
  misc_feature (1418)..(1983): Pfam Name: Synaptonemal complex protein 1 (SCP-1) Pfam Description: Synaptonemal complex protein 1 (SCP-1)
  misc_feature (21)..(1025): Homolog of NCBI NO: 9280323 NR Description: kinesin (centromeric protein)-like protein
  misc_feature (1367)..(1985): Homolog of NCBI NO: 9280323 NR Description: kinesin (centromeric protein)-like protein
  misc_feature (75)..(1025): Homolog of NCBI NO: 22331168 NR Description: kinesin-related protein; protein id: At3g19050.1
  misc_feature (1367)..(1966): Homolog of NCBI NO: 22331168 NR Description: kinesin-related protein; protein id: At3g19050.1
  misc_feature (83)..(1980): Homolog of NCBI NO: 27261081 NR Description: OJ1340_C08.3 [Oryza sativa (japonica
  misc_feature (146)..(779): Homolog of NCBI NO: 40539007 NR Description: kinesin-like protein [Oryza sativa (japonica
  misc_feature (146)..(925): Homolog of NCBI NO: 15229853 NR Description: kinesin-related protein; protein id: At3g44050.1
  misc_feature (1354)..(1934): Homolog of NCBI NO: 9887310 NR Description: kinesin-like protein KRP180 [Strongylocentrotus
  misc_feature (179)..(710): Homolog of NCBI NO: 9887310 NR Description: kinesin-like protein KRP180 [Strongylocentrotus
  misc_feature (157)..(509): Homolog of NCBI NO: 22331291 NR Description: phragmoplast-associated kinesin-related protein, protein id: At3g23670.1 [Arabidopsis thaliana] AT3g23670/MDB19_16 [Arabidopsis thaliana]

SEQ ID NO: 95486 - protein, 1828 aa, Arabidopsis thaliana; identical to SEQ ID NO: 91730
  peptide (1)..(1828): Ceres Seq. ID no. 12729022
  misc_feature (1247)..(1812): Pfam Name: Synaptonemal complex protein 1 (SCP-1) Pfam Description: Synaptonemal complex protein 1 (SCP-1)
  misc_feature (1)..(854): Homolog of NCBI NO: 9280323 NR Description: kinesin (centromeric protein)-like protein
  misc_feature (1196)..(1814): Homolog of NCBI NO: 9280323 NR Description: kinesin (centromeric protein)-like protein
  misc_feature (1)..(854): Homolog of NCBI NO: 22331168 NR Description: kinesin-related protein; protein id: At3g19050.1
  misc_feature (1196)..(1795): Homolog of NCBI NO: 22331168 NR Description: kinesin-related protein; protein id: At3g19050.1
  misc_feature (1)..(1809): Homolog of NCBI NO: 27261081 NR Description: OJ1340_C08.3 [Oryza sativa (japonica
  misc_feature (1)..(608): Homolog of NCBI NO: 40539007 NR Description: kinesin-like protein [Oryza sativa (japonica
  misc_feature (1)..(754): Homolog of NCBI NO: 15229853 NR Description: kinesin-related protein; protein id: At3g44050.1
  misc_feature (1183)..(1763): Homolog of NCBI NO: 9887310 NR Description: kinesin-like protein KRP180 [Strongylocentrotus
  misc_feature (8)..(539): Homolog of NCBI NO: 9887310 NR Description: kinesin-like protein KRP180 [Strongylocentrotus
  misc_feature (1)..(338): Homolog of NCBI NO: 22331291 NR Description: phragmoplast-associated kinesin-related protein, protein id: At3g23670.1 [Arabidopsis thaliana] AT3g23670/MDB19_16 [Arabidopsis thaliana]

SEQ ID NO: 95487 - DNA, 1324 bp, Arabidopsis thaliana; identical to SEQ ID NO: 91731
  misc_feature (1)..(1324): Ceres Seq. ID no. 12729055
  misc_feature: MA Experiment ID: 20000171 Result: Up-regulated in Transcription
  misc_feature: MA Experiment 20000171 PARAMETER Experiment Name: At_42deg_Heat_P Parameter: Age (day) Value: 14
  misc_feature: MA Experiment 20000171 PARAMETER Experiment Name: At_42deg_Heat_P Parameter: Organism Value: A. thaliana
  misc_feature: MA Experiment 20000171 PARAMETER Experiment Name: At_42deg_Heat_P Parameter: Plant Line Value: WS
  misc_feature: MA Experiment 20000171 PARAMETER Experiment Name: At_42deg_Heat_P Parameter: Temperature (deg C) Value: 42 vs. 22
  misc_feature: MA Experiment 20000171 PARAMETER Experiment Name: At_42deg_Heat_P Parameter: Timepoint (hr) Value: 1
  misc_feature: MA Experiment 20000171 PARAMETER Experiment Name: At_42deg_Heat_P Parameter: Tissue Value: Aerial
  misc_feature: MA Experiment ID: 20000173 Result: Up-regulated in Transcription
  misc_feature: MA Experiment 20000173 PARAMETER Experiment Name: At_42deg_Heat_P Parameter: Age (day) Value: 14
  misc_feature: MA Experiment 20000173 PARAMETER Experiment Name: At_42deg_Heat_P Parameter: Organism Value: A. thaliana
  misc_feature: MA Experiment 20000173 PARAMETER Experiment Name: At_42deg_Heat_P Parameter: Plant Line Value: WS
  misc_feature: MA Experiment 20000173 PARAMETER Experiment Name: At_42deg_Heat_P Parameter: Temperature (deg C) Value: 42 vs. 22
  misc_feature: MA Experiment 20000173 PARAMETER Experiment Name: At_42deg_Heat_P Parameter: Timepoint (hr) Value: 6
  misc_feature: MA Experiment 20000173 PARAMETER Experiment Name: At_42deg_Heat_P Parameter: Tissue Value: Aerial
  misc_feature: MA Experiment ID: 20001248 Result: Down-regulated in Transcription
  misc_feature: MA Experiment 20001248 PARAMETER Experiment Name: At_Far-red-induction_P Parameter: Age (day) Value: 7
  misc_feature: MA Experiment 20001248 PARAMETER Experiment Name: At_Far-red-induction_P Parameter: Light Value: Far-red vs. White
  misc_feature: MA Experiment 20001248 PARAMETER Experiment Name: At_Far-red-induction_P Parameter: Organism Value: A. thaliana
  misc_feature: MA Experiment 20001248 PARAMETER Experiment Name: At_Far-red-induction_P Parameter: Plant Line Value: Columbia
  misc_feature: MA Experiment 20001248 PARAMETER Experiment Name: At_Far-red-induction_P Parameter: Timepoint (hr) Value: 4
  misc_feature: MA Experiment 20001248 PARAMETER Experiment Name: At_Far-red-induction_P Parameter: Tissue Value: Whole Plant

SEQ ID NO: 95488 - protein, 350 aa, Arabidopsis thaliana; identical to SEQ ID NO: 91732
  peptide (1)..(350): Ceres Seq. ID no. 12729056
  misc_feature (289)..(318): Pfam Name: Zn-finger in Ran binding protein and others Pfam Description: Zn-finger in Ran binding protein and others
  misc_feature (6)..(350): Homolog of NCBI NO: 9294149 NR Description: gene_id:MKP6.17~unknown protein [Arabidopsis
  misc_feature (17)..(350): Homolog of NCBI NO: 30684602 NR Description: expressed protein [Arabidopsis thaliana] unknown protein [Arabidopsis thaliana]
  misc_feature (21)..(350): Homolog of NCBI NO: 34902516 NR Description: P0581F09.16 [Oryza sativa (japonica >gi|13486724|dbj|BAB39959.1| hypothetical protein~similar to thaliana chromosome 3, MKP6.17 [Oryza sativa (japonica sativa
  misc_feature (48)..(202): Homolog of NCBI NO: 18419592 NR Description: unknown [Narcissus pseudonarcissus]
  misc_feature (24)..(232): Homolog of NCBI NO: 33300639 NR Description: hypothetical protein DKFZp547E052 [Homo sapiens]
  misc_feature (49)..(232): Homolog of NCBI NO: 16041108 NR Description: hypothetical protein [Macaca fascicularis]
  misc_feature (49)..(232): Homolog of NCBI NO: 26325686 NR Description: unnamed protein product [Mus musculus] unnamed protein product [Mus musculus]
  misc_feature (24)..(232): Homolog of NCBI NO: 34876979 NR Description: hypothetical protein XP_237331 [Rattus norvegicus]
  misc_feature (78)..(232): Homolog of NCBI NO: 18410961 NR Description: putative protein; protein id: At3g58460.1, by cDNA: 35896. [Arabidopsis thaliana] putative protein [Arabidopsis thaliana]
  misc_feature (78)..(232): Homolog of NCBI NO: 21593075 NR Description: unknown [Arabidopsis thaliana]

SEQ ID NO: 95489 - protein, 334 aa, Arabidopsis thaliana; identical to SEQ ID NO: 91733
  peptide (1)..(334): Ceres Seq. ID no. 12729057
  misc_feature (273)..(302): Pfam Name: Zn-finger in Ran binding protein and others Pfam Description: Zn-finger in Ran binding protein and others
  misc_feature (1)..(334): Homolog of NCBI NO: 9294149 NR Description: gene_id:MKP6.17~unknown protein [Arabidopsis
  misc_feature (1)..(334): Homolog of NCBI NO: 30684602 NR Description: expressed protein [Arabidopsis thaliana] unknown protein [Arabidopsis thaliana]
  misc_feature (5)..(334): Homolog of NCBI NO: 34902516 NR Description: P0581F09.16 [Oryza sativa (japonica >gi|13486724|dbj|BAB39959.1| hypothetical protein~similar to thaliana chromosome 3, MKP6.17 [Oryza sativa (japonica sativa
  misc_feature (32)..(186): Homolog of NCBI NO: 18419592 NR Description: unknown [Narcissus pseudonarcissus]
  misc_feature (8)..(216): Homolog of NCBI NO: 33300639 NR Description: hypothetical protein DKFZp547E052 [Homo sapiens]
  misc_feature (33)..(216): Homolog of NCBI NO: 16041108 NR Description: hypothetical protein [Macaca fascicularis]
  misc_feature (33)..(216): Homolog of NCBI NO: 26325686 NR Description: unnamed protein product [Mus musculus] unnamed protein product [Mus musculus]
  misc_feature (8)..(216): Homolog of NCBI NO: 34876979 NR Description: hypothetical protein XP_237331 [Rattus norvegicus]
  misc_feature (62)..(216): Homolog of NCBI NO: 18410961 NR Description: putative protein; protein id: At3g58460.1, by cDNA: 35896. [Arabidopsis thaliana] putative protein [Arabidopsis thaliana]
  misc_feature (62)..(216): Homolog of NCBI NO: 21593075 NR Description: unknown [Arabidopsis thaliana]

SEQ ID NO: 95490 - protein, 321 aa, Arabidopsis thaliana; identical to SEQ ID NO: 91734
  peptide (1)..(321): Ceres Seq. ID no. 12729058
  misc_feature (260)..(289): Pfam Name: Zn-finger in Ran binding protein and others Pfam Description: Zn-finger in Ran binding protein and others
  misc_feature (1)..(321): Homolog of NCBI NO: 9294149 NR Description: gene_id:MKP6.17~unknown protein [Arabidopsis
  misc_feature (1)..(321): Homolog of NCBI NO: 30684602 NR Description: expressed protein [Arabidopsis thaliana] unknown protein [Arabidopsis thaliana]
  misc_feature (1)..(321): Homolog of NCBI NO: 34902516 NR Description: P0581F09.16 [Oryza sativa (japonica >gi|13486724|dbj|BAB39959.1| hypothetical protein~similar to thaliana chromosome 3, MKP6.17 [Oryza sativa (japonica sativa
  misc_feature (19)..(173): Homolog of NCBI NO: 18419592 NR Description: unknown [Narcissus pseudonarcissus]
  misc_feature (1)..(203): Homolog of NCBI NO: 33300639 NR Description: hypothetical protein DKFZp547E052 [Homo sapiens]
  misc_feature (20)..(203): Homolog of NCBI NO: 16041108 NR Description: hypothetical protein [Macaca fascicularis]
  misc_feature (20)..(203): Homolog of NCBI NO: 26325686 NR Description: unnamed protein product [Mus musculus] unnamed protein product [Mus musculus]
  misc_feature (1)..(203): Homolog of NCBI NO: 34876979 NR Description: hypothetical protein XP_237331 [Rattus norvegicus]
  misc_feature (49)..(203): Homolog of NCBI NO: 18410961 NR Description: putative protein; protein id: At3g58460.1, by cDNA: 35896. [Arabidopsis thaliana] putative protein [Arabidopsis thaliana]
  misc_feature (49)..(203): Homolog of NCBI NO: 21593075 NR Description: unknown [Arabidopsis thaliana]

SEQ ID NO: 95491 - DNA, 2067 bp, Arabidopsis thaliana; identical to SEQ ID NO: 91735
  misc_feature (1)..(2067): Ceres Seq. ID no. 12729094
  misc_feature: MA Experiment ID: 20000180 Result: Down-regulated in Transcription
  misc_feature: MA Experiment 20000180 PARAMETER Experiment Name: At_Germinating_Seeds_P Parameter: Age (hr) Value: 24 vs. 0
  misc_feature: MA Experiment 20000180 PARAMETER Experiment Name: At_Germinating_Seeds_P Parameter: Tissue Value: Germinating Seeds

SEQ ID NO: 95492 - protein, 688 aa, Arabidopsis thaliana; identical to SEQ ID NO: 91736
  peptide (1)..(688): Ceres Seq. ID no. 12729095
  misc_feature (555)..(589): Pfam Name: PPR repeat Pfam Description: PPR repeat
  misc_feature (84)..(688): Homolog of NCBI NO: 34393854 NR Description: pentatricopeptide (PPR) repeat-containing
  misc_feature (162)..(670): Homolog of NCBI NO: 25404380 NR Description: hypothetical protein F16P17.7 [imported] - thaliana >gi|8493580|gb|AAF75803.1|AC011000_6 Contains weak to leaf protein from Ipomea nil gb|D85101 and contains a RepB
  misc_feature (165)..(670): Homolog of NCBI NO: 15221549 NR Description: PPR-repeat protein; protein id: At1g62670.1
  misc_feature (68)..(670): Homolog of NCBI NO: 15221674 NR Description: unknown protein; protein id: At1g63080.1
  misc_feature (162)..(665): Homolog of NCBI NO: 15221635 NR Description: unknown protein; protein id: At1g62930.1
  misc_feature (59)..(670): Homolog of NCBI NO: 15221515 NR Description: putative membrane-associated salt-inducible (AL021637); similar to EST gb|AA728420; protein id: At1g62590.1
  misc_feature (165)..(670): Homolog of NCBI NO: 6630464 NR Description: F23N19.4 [Arabidopsis thaliana]
  misc_feature (154)..(677): Homolog of NCBI NO: 34908368 NR Description: P0529E05.10 [Oryza sativa (japonica
  misc_feature (157)..(670): Homolog of NCBI NO: 22531122 NR Description: putative membrane-associated salt-inducible
  misc_feature (166)..(654): Homolog of NCBI NO: 15218325 NR Description: hypothetical protein; protein id: At1g09900.1

SEQ ID NO: 95493 - protein, 520 aa, Arabidopsis thaliana; identical to SEQ ID NO: 91737
  peptide (1)..(520): Ceres Seq. ID no. 12729096
  misc_feature (387)..(421): Pfam Name: PPR repeat Pfam Description: PPR repeat
  misc_feature (1)..(520): Homolog of NCBI NO: 34393854 NR Description: pentatricopeptide (PPR) repeat-containing
  misc_feature (1)..(502): Homolog of NCBI NO: 25404380 NR Description: hypothetical protein F16P17.7 [imported] - thaliana >gi|8493580|gb|AAF75803.1|AC011000_6 Contains weak to leaf protein from Ipomea nil gb|D85101 and contains a RepB
  misc_feature (1)..(502): Homolog of NCBI NO: 15221549 NR Description: PPR-repeat protein; protein id: At1g62670.1
  misc_feature (1)..(502): Homolog of NCBI NO: 15221674 NR Description: unknown protein; protein id: At1g63080.1
  misc_feature (1)..(497): Homolog of NCBI NO: 15221635 NR Description: unknown protein; protein id: At1g62930.1
  misc_feature (1)..(502): Homolog of NCBI NO: 15221515 NR Description: putative membrane-associated salt-inducible (AL021637); similar to EST gb|AA728420; protein id: At1g62590.1
  misc_feature (1)..(502): Homolog of NCBI NO: 6630464 NR Description: F23N19.4 [Arabidopsis thaliana]
  misc_feature (1)..(509): Homolog of NCBI NO: 34908368 NR Description: P0529E05.10 [Oryza sativa (japonica
  misc_feature (1)..(502): Homolog of NCBI NO: 22531122 NR Description: putative membrane-associated salt-inducible
  misc_feature (1)..(486): Homolog of NCBI NO: 15218325 NR Description: hypothetical protein; protein id: At1g09900.1

SEQ ID NO: 95494 - protein, 501 aa, Arabidopsis thaliana; identical to SEQ ID NO: 91738
  peptide (1)..(501): Ceres Seq. ID no. 12729097
  misc_feature (368)..(402): Pfam Name: PPR repeat Pfam Description: PPR repeat
  misc_feature (1)..(501): Homolog of NCBI NO: 34393854 NR Description: pentatricopeptide (PPR) repeat-containing
  misc_feature (1)..(483): Homolog of NCBI NO: 25404380 NR Description: hypothetical protein F16P17.7 [imported] - thaliana >gi|8493580|gb|AAF75803.1|AC011000_6 Contains weak to leaf protein from Ipomea nil gb|D85101 and contains a RepB
  misc_feature (1)..(483): Homolog of NCBI NO: 15221549 NR Description: PPR-repeat protein; protein id: At1g62670.1
  misc_feature (1)..(483): Homolog of NCBI NO: 15221674 NR Description: unknown protein; protein id: At1g63080.1
  misc_feature (1)..(478): Homolog of NCBI NO: 15221635 NR Description: unknown protein; protein id: At1g62930.1
  misc_feature (1)..(483): Homolog of NCBI NO: 15221515 NR Description: putative membrane-associated salt-inducible (AL021637); similar to EST gb|AA728420; protein id: At1g62590.1
  misc_feature (1)..(483): Homolog of NCBI NO: 6630464 NR Description: F23N19.4 [Arabidopsis thaliana]
  misc_feature (1)..(490): Homolog of NCBI NO: 34908368 NR Description: P0529E05.10 [Oryza sativa (japonica
  misc_feature (1)..(483): Homolog of NCBI NO: 22531122 NR Description: putative membrane-associated salt-inducible
  misc_feature (1)..(467): Homolog of NCBI NO: 15218325 NR Description: hypothetical protein; protein id: At1g09900.1

SEQ ID NO: 95495 - DNA, 1533 bp, Arabidopsis thaliana; identical to SEQ ID NO: 91739
  misc_feature (1)..(1533): Ceres Seq. ID no. 12729098
  misc_feature: MA Experiment ID: 108573 Result: Up-regulated in Transcription
  misc_feature: MA Experiment 108573 PARAMETER Experiment Name: At_Drought_cDNA_P Parameter: Timepoint (hr) Value: 6
  misc_feature: MA Experiment 108573 PARAMETER Experiment Name: At_Drought_cDNA_P Parameter: Tissue Value: Aerial
  misc_feature: MA Experiment 108573 PARAMETER Experiment Name: At_Drought_cDNA_P Parameter: Treatment Value: Drought vs. No Drought
  misc_feature: MA Experiment ID: 20000144 Result: Down-regulated in Transcription
  misc_feature: MA Experiment 20000144 PARAMETER Experiment Name: At_42deg_Heat_cDNA_P Parameter: Temperature (deg C) Value: 42 vs. 22
  misc_feature: MA Experiment 20000144 PARAMETER Experiment Name: At_42deg_Heat_cDNA_P Parameter: Timepoint (hr) Value: 1
  misc_feature: MA Experiment 20000144 PARAMETER Experiment Name: At_42deg_Heat_cDNA_P Parameter: Tissue Value: Aerial
  misc_feature: MA Experiment ID: 20000224 Result: Up-regulated in Transcription

SEQ ID NO: 95496 - protein, 510 aa, Arabidopsis thaliana; identical to SEQ ID NO: 87363
  peptide (1)..(510): Ceres Seq. ID no. 12729099
  misc_feature (23)..(314): Pfam Name: Protein kinase domain Pfam Description: Protein kinase domain
  misc_feature (1)..(510): Homolog of NCBI NO: 9294059 NR Description: MAP kinase [Arabidopsis thaliana]
  misc_feature (1)..(510): Homolog of NCBI NO: 18401750 NR Description: putative MAP kinase; protein id: At3g18040.1,
  misc_feature (1)..(510): Homolog of NCBI NO: 7106544 NR Description: ATMPK9 [Arabidopsis thaliana]
  misc_feature (1)..(509): Homolog of NCBI NO: 15220976 NR Description: mitogen-activated protein kinase, putative; id: At1g18150.1, supported by cDNA: gi_7106541 [Arabidopsis >gi|9719729|gb|AAF97831.1|AC034107_14 Strong similarity
  misc_feature (5)..(509): Homolog of NCBI NO: 25406284 NR Description: probable MAP kinase F25P22.9 [imported] -
  misc_feature (12)..(510): Homolog of NCBI NO: 5815410 NR Description: blast and wounding induced mitogen-activated
  misc_feature (12)..(510): Homolog of NCBI NO: 6689924 NR Description: MAP kinase homolog [Oryza sativa]
  misc_feature (1)..(509): Homolog of NCBI NO: 38174819 NR Description: putative MAP kinase [Hordeum vulgare subsp.
  misc_feature (1)..(509): Homolog of NCBI NO: 8671782 NR Description: T10O22.12 [Arabidopsis thaliana]
  misc_feature (1)..(450): Homolog of NCBI NO: 7106542 NR Description: ATMPK8 [Arabidopsis thaliana]

SEQ ID NO: 95497 - protein, 422 aa, Arabidopsis thaliana; identical to SEQ ID NO: 87364
  peptide (1)..(422): Ceres Seq. ID no. 12729100
  misc_feature (1)..(226): Pfam Name: Protein kinase domain Pfam Description: Protein kinase domain
  misc_feature (1)..(422): Homolog of NCBI NO: 9294059 NR Description: MAP kinase [Arabidopsis thaliana]
  misc_feature (1)..(422): Homolog of NCBI NO: 18401750 NR Description: putative MAP kinase; protein id: At3g18040.1,
  misc_feature (1)..(422): Homolog of NCBI NO: 7106544 NR Description: ATMPK9 [Arabidopsis thaliana]
  misc_feature (1)..(421): Homolog of NCBI NO: 15220976 NR Description: mitogen-activated protein kinase, putative; id: At1g18150.1, supported by cDNA: gi_7106541 [Arabidopsis >gi|9719729|gb|AAF97831.1|AC034107_14 Strong similarity
  misc_feature (1)..(421): Homolog of NCBI NO: 25406284 NR Description: probable MAP kinase F25P22.9 [imported] -
  misc_feature (1)..(422): Homolog of NCBI NO: 5815410 NR Description: blast and wounding induced mitogen-activated
  misc_feature (1)..(422): Homolog of NCBI NO: 6689924 NR Description: MAP kinase homolog [Oryza sativa]
  misc_feature (1)..(421): Homolog of NCBI NO: 38174819 NR Description: putative MAP kinase [Hordeum vulgare subsp.
  misc_feature (1)..(421): Homolog of NCBI NO: 8671782 NR Description: T10O22.12 [Arabidopsis thaliana]
  misc_feature (1)..(362): Homolog of NCBI NO: 7106542 NR Description: ATMPK8 [Arabidopsis thaliana]

SEQ ID NO: 95498 - protein, 404 aa, Arabidopsis thaliana; identical to SEQ ID NO: 91742
  peptide (1)..(404): Ceres Seq. ID no. 12729101
  misc_feature (1)..(208): Pfam Name: Protein kinase domain Pfam Description: Protein kinase domain
  misc_feature (1)..(404): Homolog of NCBI NO: 9294059 NR Description: MAP kinase [Arabidopsis thaliana]
  misc_feature (1)..(404): Homolog of NCBI NO: 18401750 NR Description: putative MAP kinase; protein id: At3g18040.1,
  misc_feature (1)..(404): Homolog of NCBI NO: 7106544 NR Description: ATMPK9 [Arabidopsis thaliana]
  misc_feature (1)..(403): Homolog of NCBI NO: 15220976 NR Description: mitogen-activated protein kinase, putative; id: At1g18150.1, supported by cDNA: gi_7106541 [Arabidopsis >gi|9719729|gb|AAF97831.1|AC034107_14 Strong similarity
  misc_feature (1)..(403): Homolog of NCBI NO: 25406284 NR Description: probable MAP kinase F25P22.9 [imported] -
  misc_feature (1)..(404): Homolog of NCBI NO: 5815410 NR Description: blast and wounding induced mitogen-activated
  misc_feature (1)..(404): Homolog of NCBI NO: 6689924 NR Description: MAP kinase homolog [Oryza sativa]
  misc_feature (1)..(403): Homolog of NCBI NO: 38174819 NR Description: putative MAP kinase [Hordeum vulgare subsp.
  misc_feature (1)..(403): Homolog of NCBI NO: 8671782 NR Description: T10O22.12 [Arabidopsis thaliana]
  misc_feature (1)..(344): Homolog of NCBI NO: 7106542 NR Description: ATMPK8 [Arabidopsis thaliana]

SEQ ID NO: 95499 - DNA, 1506 bp, Arabidopsis thaliana; identical to SEQ ID NO: 91743
  misc_feature (1)..(1506): Ceres Seq. ID no. 12729102
  misc_feature: MA Experiment ID: 20000235 Result: Up-regulated in Transcription
  misc_feature: MA Experiment 20000235 PARAMETER Experiment Name: At_Siliques_P Parameter: Age (day) Value: 21
  misc_feature: MA Experiment 20000235 PARAMETER Experiment Name: At_Siliques_P Parameter: Organism Value: A. thaliana
  misc_feature: MA Experiment 20000235 PARAMETER Experiment Name: At_Siliques_P Parameter: Plant Line Value: WS
  misc_feature: MA Experiment 20000235 PARAMETER Experiment Name: At_Siliques_P Parameter: Tissue Value: 5-10mm Siliques vs. Whole Plant
  misc_feature: MA Experiment ID: 20000496 Result: Up-regulated in Transcription
  misc_feature: MA Experiment 20000496 PARAMETER Experiment Name: At_Guard_Cells_P Parameter: Harvest Date Value: 7/19/2002
  misc_feature: MA Experiment 20000496 PARAMETER Experiment Name: At_Guard_Cells_P Parameter: Organism Value: Canola
  misc_feature: MA Experiment 20000496 PARAMETER Experiment Name: At_Guard_Cells_P Parameter: Tissue Value: Guard Cells vs. Leaves
  misc_feature: MA Experiment ID: 20001451 Result: Down-regulated in Transcription
  misc_feature: MA Experiment 20001451 PARAMETER Experiment Name: At_Far-red-induction_P Parameter: Age (day) Value: 7
  misc_feature: MA Experiment 20001451 PARAMETER Experiment Name: At_Far-red-induction_P Parameter: Light Value: Far-red vs. White
  misc_feature: MA Experiment 20001451 PARAMETER Experiment Name: At_Far-red-induction_P Parameter: Organism Value: A. thaliana
  misc_feature: MA Experiment 20001451 PARAMETER Experiment Name: At_Far-red-induction_P Parameter: Plant Line Value: Columbia
  misc_feature: MA Experiment 20001451 PARAMETER Experiment Name: At_Far-red-induction_P Parameter: Timepoint (hr) Value: 24
  misc_feature: MA Experiment 20001451 PARAMETER Experiment Name: At_Far-red-induction_P Parameter: Tissue Value: Whole Plant
  misc_feature: MA Experiment ID: 20001558 Result: Down-regulated in Transcription
  misc_feature: MA Experiment 20001558 PARAMETER Experiment Name: At_Drought_Soil_Dry_P Parameter: Age (day) Value: 27
  misc_feature: MA Experiment 20001558 PARAMETER Experiment Name: At_Drought_Soil_Dry_P Parameter: Organism Value: A. thaliana
  misc_feature: MA Experiment 20001558 PARAMETER Experiment Name: At_Drought_Soil_Dry_P Parameter: Plant Line Value: WS
  misc_feature: MA Experiment 20001558 PARAMETER Experiment Name: At_Drought_Soil_Dry_P Parameter: Post Timepoint (hr) Value: 6
  misc_feature: MA Experiment 20001558 PARAMETER Experiment Name: At_Drought_Soil_Dry_P Parameter: Post-Treatment Value: Re-Water vs. No Drought
  misc_feature: MA Experiment 20001558 PARAMETER Experiment Name: At_Drought_Soil_Dry_P Parameter: Timepoint (day) Value: 13
  misc_feature: MA Experiment 20001558 PARAMETER Experiment Name: At_Drought_Soil_Dry_P Parameter: Treatment Value: Drought vs. No Drought

SEQ ID NO: 95500 - protein, 501 aa, Arabidopsis thaliana; identical to SEQ ID NO: 91744
  peptide (1)..(501): Ceres Seq. ID no. 12729103
  misc_feature (31)..(501): Pfam Name: Glycosyl hydrolase family 1 Pfam Description: Glycosyl hydrolase family 1
  misc_feature (1)..(501): Homolog of NCBI NO: 22331147 NR Description: glycosyl hydrolase family 1; protein id:
  misc_feature (1)..(501): Homolog of NCBI NO: 9294062 NR Description: beta-glucosidase [Arabidopsis thaliana]
  misc_feature (3)..(501): Homolog of NCBI NO: 15229584 NR Description: glycosyl hydrolase family 1; protein id: supported by cDNA: 11984. [Arabidopsis thaliana]
  misc_feature (3)..(500): Homolog of NCBI NO: 17226270 NR Description: beta-mannosidase enzyme [Lycopersicon esculentum]
  misc_feature (27)..(501): Homolog of NCBI NO: 1362162 NR Description: beta-glucosidase BGQ60 precursor - barley
  misc_feature (28)..(501): Homolog of NCBI NO: 34899014 NR Description: putative non-cyanogenic beta-glucosidase
  misc_feature (1)..(497): Homolog of NCBI NO: 18875458 NR Description: beta-glucosidase [Oryza sativa]
  misc_feature (28)..(497): Homolog of NCBI NO: 22658440 NR Description: beta-glucosidase [Oryza sativa (japonica
  misc_feature (30)..(501): Homolog of NCBI NO: 38344467 NR Description: OSJNBa0022H21.2 [Oryza sativa (japonica
  misc_feature (35)..(499): Homolog of NCBI NO: 30696622 NR Description: glycosyl hydrolase family 1 [Arabidopsis thaliana]

SEQ ID NO: 95501 - protein, 405 aa, Arabidopsis thaliana; identical to SEQ ID NO: 91745
  peptide (1)..(405): Ceres Seq. ID no. 12729104
  misc_feature (1)..(405): Pfam Name: Glycosyl hydrolase family 1 Pfam Description: Glycosyl hydrolase family 1
  misc_feature (1)..(405): Homolog of NCBI NO: 22331147 NR Description: glycosyl hydrolase family 1; protein id:
  misc_feature (1)..(405): Homolog of NCBI NO: 9294062 NR Description: beta-glucosidase [Arabidopsis thaliana]
  misc_feature (1)..(405): Homolog of NCBI NO: 15229584 NR Description: glycosyl hydrolase family 1; protein id: supported by cDNA: 11984. [Arabidopsis thaliana]
  misc_feature (1)..(404): Homolog of NCBI NO: 17226270 NR Description: beta-mannosidase enzyme [Lycopersicon esculentum]
  misc_feature (1)..(405): Homolog of NCBI NO: 1362162 NR Description: beta-glucosidase BGQ60 precursor - barley
  misc_feature (1)..(405): Homolog of NCBI NO: 34899014 NR Description: putative non-cyanogenic beta-glucosidase
  misc_feature (1)..(401): Homolog of NCBI NO: 18875458 NR Description: beta-glucosidase [Oryza sativa]
  misc_feature (1)..(401): Homolog of NCBI NO: 22658440 NR Description: beta-glucosidase [Oryza sativa (japonica
  misc_feature (1)..(405): Homolog of NCBI NO: 38344467 NR Description: OSJNBa0022H21.2 [Oryza sativa (japonica
  misc_feature (1)..(403): Homolog of NCBI NO: 30696622 NR Description: glycosyl hydrolase family 1 [Arabidopsis thaliana]

SEQ ID NO: 95502 - protein, 312 aa, Arabidopsis thaliana; identical to SEQ ID NO: 91746
  peptide (1)..(312): Ceres Seq. ID no. 12729105
  misc_feature (1)..(312): Pfam Name: Glycosyl hydrolase family 1 Pfam Description: Glycosyl hydrolase family 1
  misc_feature (1)..(312): Homolog of NCBI NO: 22331147 NR Description: glycosyl hydrolase family 1; protein id:
  misc_feature (1)..(312): Homolog of NCBI NO: 9294062 NR Description: beta-glucosidase [Arabidopsis thaliana]
  misc_feature (1)..(312): Homolog of NCBI NO: 15229584 NR Description: glycosyl hydrolase family 1; protein id: supported by cDNA: 11984. [Arabidopsis thaliana]
  misc_feature (1)..(311): Homolog of NCBI NO: 17226270 NR Description: beta-mannosidase enzyme [Lycopersicon esculentum]
  misc_feature (1)..(312): Homolog of NCBI NO: 1362162 NR Description: beta-glucosidase BGQ60 precursor - barley
  misc_feature (1)..(312): Homolog of NCBI NO: 34899014 NR Description: putative non-cyanogenic beta-glucosidase
  misc_feature (1)..(308): Homolog of NCBI NO: 18875458 NR Description: beta-glucosidase [Oryza sativa]
  misc_feature (1)..(308): Homolog of NCBI NO: 22658440 NR Description: beta-glucosidase [Oryza sativa (japonica
  misc_feature (1)..(312): Homolog of NCBI NO: 38344467 NR Description: OSJNBa0022H21.2 [Oryza sativa (japonica
  misc_feature (1)..(310): Homolog of NCBI NO: 30696622 NR Description: glycosyl hydrolase family 1 [Arabidopsis thaliana]

SEQ ID NO: 95503 - DNA, 1311 bp, Arabidopsis thaliana; identical to SEQ ID NO: 91747
  misc_feature (1)..(1311): Ceres Seq. ID no. 12729130
  misc_feature: MA Experiment ID: 108573 Result: Up-regulated in Transcription
  misc_feature: MA Experiment 108573 PARAMETER Experiment Name: At_Drought_cDNA_P Parameter: Timepoint (hr) Value: 6
  misc_feature: MA Experiment 108573 PARAMETER Experiment Name: At_Drought_cDNA_P Parameter: Tissue Value: Aerial
  misc_feature: MA Experiment 108573 PARAMETER Experiment Name: At_Drought_cDNA_P Parameter: Treatment Value: Drought vs. No Drought
  misc_feature: MA Experiment ID: 20000224 Result: Up-regulated in Transcription

SEQ ID NO: 95504 - protein, 436 aa, Arabidopsis thaliana; identical to SEQ ID NO: 38880
  peptide (1)..(436): Ceres Seq. ID no. 12729131
  misc_feature (177)..(299): Pfam Name: BTB/POZ domain Pfam Description: BTB/POZ domain
  misc_feature (1)..(436): Homolog of NCBI NO: 21536509 NR Description: unknown [Arabidopsis thaliana]
  misc_feature (1)..(436): Homolog of NCBI NO: 30678912 NR Description: expressed protein [Arabidopsis thaliana] unknown protein [Arabidopsis thaliana] AT3g03740/F20H23_23 [Arabidopsis thaliana]
  misc_feature (1)..(392): Homolog of NCBI NO: 34900034 NR Description: OJ1641_C04.24 [Oryza sativa (japonica >gi|22202734|dbj|BAC07391.1| putative zinc finger POZ domain
  misc_feature (1)..(392): Homolog of NCBI NO: 28269444 NR Description: unknown protein [Oryza sativa (japonica
  misc_feature (7)..(392): Homolog of NCBI NO: 15242126 NR Description: hypothetical protein (fragment); protein id: supported by cDNA: 113260., supported by cDNA: gi_14596182
  misc_feature (7)..(392): Homolog of NCBI NO: 21536843 NR Description: unknown [Arabidopsis thaliana]
  misc_feature (7)..(392): Homolog of NCBI NO: 11282376 NR Description: hypothetical protein F23N14.80 - Arabidopsis >gi|7362795|emb|CAB83071.1| putative protein [Arabidopsis
  misc_feature (7)..(392): Homolog of NCBI NO: 30691638 NR Description: expressed protein [Arabidopsis thaliana]
  misc_feature (7)..(384): Homolog of NCBI NO: 14596183 NR Description: Unknown protein [Arabidopsis thaliana]
  misc_feature (3)..(392): Homolog of NCBI NO: 23617108 NR Description: contains ESTs to Arabidopsis thaliana chromosome 5, At5g19000~unknown protein

SEQ ID NO: 95505 - protein, 315 aa, Arabidopsis thaliana; identical to SEQ ID NO: 38881
  peptide (1)..(315): Ceres Seq. ID no. 12729132
  misc_feature (56)..(178): Pfam Name: BTB/POZ domain Pfam Description: BTB/POZ domain
  misc_feature (1)..(315): Homolog of NCBI NO: 21536509 NR Description: unknown [Arabidopsis thaliana]
  misc_feature (1)..(315): Homolog of NCBI NO: 30678912 NR Description: expressed protein [Arabidopsis thaliana] unknown protein [Arabidopsis thaliana] AT3g03740/F20H23_23 [Arabidopsis thaliana]
  misc_feature (1)..(271): Homolog of NCBI NO: 34900034 NR Description: OJ1641_C04.24 [Oryza sativa (japonica >gi|22202734|dbj|BAC07391.1| putative zinc finger POZ domain
  misc_feature (1)..(271): Homolog of NCBI NO: 28269444 NR Description: unknown protein [Oryza sativa (japonica
  misc_feature (1)..(271): Homolog of NCBI NO: 15242126 NR Description: hypothetical protein (fragment); protein id: supported by cDNA: 113260., supported by cDNA: gi_14596182
  misc_feature (1)..(271): Homolog of NCBI NO: 21536843 NR Description: unknown [Arabidopsis thaliana]
  misc_feature (1)..(271): Homolog of NCBI NO: 11282376 NR Description: hypothetical protein F23N14.80 - Arabidopsis >gi|7362795|emb|CAB83071.1| putative protein [Arabidopsis
  misc_feature (1)..(271): Homolog of NCBI NO: 30691638 NR Description: expressed protein [Arabidopsis thaliana]
  misc_feature (1)..(263): Homolog of NCBI NO: 14596183 NR Description: Unknown protein [Arabidopsis thaliana]
  misc_feature (1)..(271): Homolog of NCBI NO: 23617108 NR Description: contains ESTs to Arabidopsis thaliana chromosome 5, At5g19000~unknown protein

SEQ ID NO: 95506 - protein, 304 aa, Arabidopsis thaliana; identical to SEQ ID NO: 91750
  peptide (1)..(304): Ceres Seq. ID no. 12729133
  misc_feature (45)..(167): Pfam Name: BTB/POZ domain Pfam Description: BTB/POZ domain
  misc_feature (1)..(304): Homolog of NCBI NO: 21536509 NR Description: unknown [Arabidopsis thaliana]
  misc_feature (1)..(304): Homolog of NCBI NO: 30678912 NR Description: expressed protein [Arabidopsis thaliana] unknown protein [Arabidopsis thaliana] AT3g03740/F20H23_23 [Arabidopsis thaliana]
  misc_feature (1)..(260): Homolog of NCBI NO: 34900034 NR Description: OJ1641_C04.24 [Oryza sativa (japonica >gi|22202734|dbj|BAC07391.1| putative zinc finger POZ domain
  misc_feature (1)..(260): Homolog of NCBI NO: 28269444 NR Description: unknown protein [Oryza sativa (japonica
  misc_feature (1)..(260): Homolog of NCBI NO: 15242126 NR Description: hypothetical protein (fragment); protein id: supported by cDNA: 113260., supported by cDNA: gi_14596182
  misc_feature (1)..(260): Homolog of NCBI NO: 21536843 NR Description: unknown [Arabidopsis thaliana]
  misc_feature (1)..(260): Homolog of NCBI NO: 11282376 NR Description: hypothetical protein F23N14.80 - Arabidopsis >gi|7362795|emb|CAB83071.1| putative protein [Arabidopsis
  misc_feature (1)..(260): Homolog of NCBI NO: 30691638 NR Description: expressed protein [Arabidopsis thaliana]
  misc_feature (1)..(252): Homolog of NCBI NO: 14596183 NR Description: Unknown protein [Arabidopsis thaliana]
  misc_feature (1)..(260): Homolog of NCBI NO: 23617108 NR Description: contains ESTs to Arabidopsis thaliana chromosome 5, At5g19000~unknown protein

SEQ ID NO: 95507 - DNA, 627 bp, Arabidopsis thaliana; identical to SEQ ID NO: 91751
  misc_feature (1)..(627): Ceres Seq. ID no. 12729164
  misc_feature: MA Experiment ID: 20000173 Result: Up-regulated in Transcription
  misc_feature: MA Experiment 20000173 PARAMETER Experiment Name: At_42deg_Heat_P Parameter: Age (day) Value: 14
  misc_feature: MA Experiment 20000173 PARAMETER Experiment Name: At_42deg_Heat_P Parameter: Organism Value: A. thaliana
  misc_feature: MA Experiment 20000173 PARAMETER Experiment Name: At_42deg_Heat_P Parameter: Plant Line Value: WS
  misc_feature: MA Experiment 20000173 PARAMETER Experiment Name: At_42deg_Heat_P Parameter: Temperature (deg C) Value: 42 vs. 22
  misc_feature: MA Experiment 20000173 PARAMETER Experiment Name: At_42deg_Heat_P Parameter: Timepoint (hr) Value: 6
  misc_feature: MA Experiment 20000173 PARAMETER Experiment Name: At_42deg_Heat_P Parameter: Tissue Value: Aerial
  misc_feature: MA Experiment ID: 20000234 Result: Up-regulated in Transcription
  misc_feature: MA Experiment 20000234 PARAMETER Experiment Name: At_Siliques_P Parameter: Age (day) Value: 21
  misc_feature: MA Experiment 20000234 PARAMETER Experiment Name: At_Siliques_P Parameter: Organism Value: A. thaliana
  misc_feature: MA Experiment 20000234 PARAMETER Experiment Name: At_Siliques_P Parameter: Plant Line Value: WS
  misc_feature: MA Experiment 20000234 PARAMETER Experiment Name: At_Siliques_P Parameter: Tissue Value: Less Than 5mm Siliques vs. Whole Plant
  misc_feature: MA Experiment ID: 20000265 Result: Up-regulated in Transcription
  misc_feature: MA Experiment 20000265 PARAMETER Experiment Name: At_Open_Flower_P Parameter: Age (day) Value: 21
  misc_feature: MA Experiment 20000265 PARAMETER Experiment Name: At_Open_Flower_P Parameter: Plant Line Value: WS
  misc_feature: MA Experiment 20000265 PARAMETER Experiment Name: At_Open_Flower_P Parameter: Tissue Value: Closed Flower vs. Whole Plant
  misc_feature: MA Experiment ID: 20000436 Result: Up-regulated in Transcription
  misc_feature: MA Experiment 20000436 PARAMETER Experiment Name: At_Drought_P Parameter: Age (day) Value: 7
  misc_feature: MA Experiment 20000436 PARAMETER Experiment Name: At_Drought_P Parameter: Organism Value: A. thaliana
  misc_feature: MA Experiment 20000436 PARAMETER Experiment Name: At_Drought_P Parameter: Plant Line Value: WS
  misc_feature: MA Experiment 20000436 PARAMETER Experiment Name: At_Drought_P Parameter: Timepoint (hr) Value: 12
  misc_feature: MA Experiment 20000436 PARAMETER Experiment Name: At_Drought_P Parameter: Tissue Value: Whole Plant
  misc_feature: MA Experiment 20000436 PARAMETER Experiment Name: At_Drought_P Parameter: Treatment Value: Drought vs. No Drought
  misc_feature: MA Experiment ID: 20000437 Result: Up-regulated in Transcription
  misc_feature: MA Experiment 20000437 PARAMETER Experiment Name: At_Drought_P Parameter: Age (day) Value: 8
  misc_feature: MA Experiment 20000437 PARAMETER Experiment Name: At_Drought_P Parameter: Organism Value: A. thaliana
  misc_feature: MA Experiment 20000437 PARAMETER Experiment Name: At_Drought_P Parameter: Plant Line Value: WS
  misc_feature: MA Experiment 20000437 PARAMETER Experiment Name: At_Drought_P Parameter: Timepoint (hr) Value: 24
  misc_feature: MA Experiment 20000437 PARAMETER Experiment Name: At_Drought_P Parameter: Tissue Value: Whole Plant
  misc_feature: MA Experiment 20000437 PARAMETER Experiment Name: At_Drought_P Parameter: Treatment Value: Drought vs. No Drought
  misc_feature: MA Experiment ID: 20001457 Result: Up-regulated in Transcription
  misc_feature: MA Experiment 20001457 PARAMETER Experiment Name: At_50mM_NH4NO3_L-to-H_P Parameter: Age (day) Value: Undefined
  misc_feature: MA Experiment 20001457 PARAMETER Experiment Name: At_50mM_NH4NO3_L-to-H_P Parameter: Organism Value: Undefined
  misc_feature: MA Experiment 20001457 PARAMETER Experiment Name: At_50mM_NH4NO3_L-to-H_P Parameter: Plant Line Value: Undefined
  misc_feature: MA Experiment 20001457 PARAMETER Experiment Name: At_50mM_NH4NO3_L-to-H_P Parameter: Timepoint (hr) Value: 0.5
  misc_feature: MA Experiment 20001457 PARAMETER Experiment Name: At_50mM_NH4NO3_L-to-H_P Parameter: Tissue Value: Siliques
  misc_feature: MA Experiment 20001457 PARAMETER Experiment Name: At_50mM_NH4NO3_L-to-H_P Parameter: Treatment Value: 50mM NH4NO3 vs. 100mM Manitol
  misc_feature: MA Experiment ID: 20001555 Result: Up-regulated in Transcription
  misc_feature: MA Experiment 20001555 PARAMETER Experiment Name: At_Drought_Soil_Dry_P Parameter: Age (day) Value: 24
  misc_feature: MA Experiment 20001555 PARAMETER Experiment Name: At_Drought_Soil_Dry_P Parameter: Organism Value: A. thaliana
  misc_feature: MA Experiment 20001555 PARAMETER Experiment Name: At_Drought_Soil_Dry_P Parameter: Plant Line Value: WS
  misc_feature: MA Experiment 20001555 PARAMETER Experiment Name: At_Drought_Soil_Dry_P Parameter: Post Timepoint (hr) Value: None
  misc_feature: MA Experiment 20001555 PARAMETER Experiment Name: At_Drought_Soil_Dry_P Parameter: Post-Treatment Value: None
  misc_feature: MA Experiment 20001555 PARAMETER Experiment Name: At_Drought_Soil_Dry_P Parameter: Timepoint (day) Value: 10
  misc_feature: MA Experiment 20001555 PARAMETER Experiment Name: At_Drought_Soil_Dry_P Parameter: Treatment Value: Drought vs. No Drought
  misc_feature: MA Experiment ID: 20001556 Result: Up-regulated in Transcription
  misc_feature: MA Experiment 20001556 PARAMETER Experiment Name: At_Drought_Soil_Dry_P Parameter: Age (day) Value: 26
  misc_feature: MA Experiment 20001556 PARAMETER Experiment Name: At_Drought_Soil_Dry_P Parameter: Organism Value: A. thaliana
  misc_feature: MA Experiment 20001556 PARAMETER Experiment Name: At_Drought_Soil_Dry_P Parameter: Plant Line Value: WS
  misc_feature: MA Experiment 20001556 PARAMETER Experiment Name: At_Drought_Soil_Dry_P Parameter: Post Timepoint (hr) Value: None
  misc_feature: MA Experiment 20001556 PARAMETER Experiment Name: At_Drought_Soil_Dry_P Parameter: Post-Treatment Value: None
  misc_feature: MA Experiment 20001556 PARAMETER Experiment Name: At_Drought_Soil_Dry_P Parameter: Timepoint (day) Value: 12
  misc_feature: MA Experiment 20001556 PARAMETER Experiment Name: At_Drought_Soil_Dry_P Parameter: Treatment Value: Drought vs. No Drought
  misc_feature: MA Experiment ID: 20001904 Result: Up-regulated in Transcription
  misc_feature: MA Experiment 20001904 PARAMETER Experiment Name: At_Drought_Reproduction_P Parameter: Age (day) Value: 37
  misc_feature: MA Experiment 20001904 PARAMETER Experiment Name: At_Drought_Reproduction_P Parameter: Organism Value: A. thaliana
  misc_feature: MA Experiment 20001904 PARAMETER Experiment Name: At_Drought_Reproduction_P Parameter: Plant Line Value: WS
  misc_feature: MA Experiment 20001904 PARAMETER Experiment Name: At_Drought_Reproduction_P Parameter: Timepoint (day) Value: 7
  misc_feature: MA Experiment 20001904 PARAMETER Experiment Name: At_Drought_Reproduction_P Parameter: Tissue Value: Rosettes
  misc_feature: MA Experiment 20001904 PARAMETER Experiment Name: At_Drought_Reproduction_P Parameter: Treatment Value: Drought vs. No Drought
  misc_feature: MA Experiment ID: 20001905 Result: Up-regulated in Transcription
  misc_feature: MA Experiment 20001905 PARAMETER Experiment Name: At_Drought_Reproduction_P Parameter: Age (day) Value: 40
  misc_feature: MA Experiment 20001905 PARAMETER Experiment Name: At_Drought_Reproduction_P Parameter: Organism Value: A. thaliana
  misc_feature: MA Experiment 20001905 PARAMETER Experiment Name: At_Drought_Reproduction_P Parameter: Plant Line Value: WS
  misc_feature: MA Experiment 20001905 PARAMETER Experiment Name: At_Drought_Reproduction_P Parameter: Timepoint (day) Value: 10
  misc_feature: MA Experiment 20001905 PARAMETER Experiment Name: At_Drought_Reproduction_P Parameter: Tissue Value: Rosettes
  misc_feature: MA Experiment 20001905 PARAMETER Experiment Name: At_Drought_Reproduction_P Parameter: Treatment Value: Drought vs. No Drought
  misc_feature: MA Experiment ID: 20001911 Result: Up-regulated in Transcription
  misc_feature: MA Experiment 20001911 PARAMETER Experiment Name: At_Drought_Reproduction_P Parameter: Age (day) Value: 40
  misc_feature: MA Experiment 20001911 PARAMETER Experiment Name: At_Drought_Reproduction_P Parameter: Organism Value: A. thaliana
  misc_feature: MA Experiment 20001911 PARAMETER Experiment Name: At_Drought_Reproduction_P Parameter: Plant Line Value: WS
  misc_feature: MA Experiment 20001911 PARAMETER Experiment Name: At_Drought_Reproduction_P Parameter: Timepoint (day) Value: 10
  misc_feature: MA Experiment 20001911 PARAMETER Experiment Name: At_Drought_Reproduction_P Parameter: Tissue Value: Flowers
  misc_feature: MA Experiment 20001911 PARAMETER Experiment Name: At_Drought_Reproduction_P Parameter: Treatment Value: Drought vs. No Drought

SEQ ID NO: 95508 - protein, 208 aa, Arabidopsis thaliana; identical to SEQ ID NO: 91752
  peptide (1)..(208): Ceres Seq. ID no. 12729165
  misc_feature (29)..(184): Pfam Name: Adenylylsulphate kinase Pfam Description: Adenylylsulphate kinase
  misc_feature (1)..(208): Homolog of NCBI NO: 15228666 NR Description: putative adenylylsulfate kinase; protein id: [Arabidopsis thaliana] >gi|6006852|gb|AAF00628.1|AC009540_5
  misc_feature (2)..(205): Homolog of NCBI NO: 6563285 NR Description: adenosine-5'-phosphosulfate kinase [Zea mays]
  misc_feature (2)..(207): Homolog of NCBI NO: 34393551 NR Description: putative adenosine-5'-phosphosulfate kinase
  misc_feature (1)..(206): Homolog of NCBI NO: 15225999 NR Description: putative adenosine phosphosulfate kinase; protein At2g14750.1, supported by cDNA: 14216., supported by cDNA: supported by cDNA: gi_450234 [Arabidopsis thaliana]
  misc_feature (1)..(206): Homolog of NCBI NO: 21553403 NR Description: putative adenosine phosphosulfate kinase
  misc_feature (1)..(152): Homolog of NCBI NO: 6223636 NR Description: putative adenylylsulfate kinase, 3' partial
  misc_feature (2)..(206): Homolog of NCBI NO: 7387809 NR Description: Adenylylsulfate kinase, chloroplast precursor
  misc_feature (9)..(206): Homolog of NCBI NO: 15236087 NR Description: adenosine-5-phosphosulfate-kinase; protein id: supported by cDNA: gi_18087562, supported by cDNA: gi_20453396, by cDNA: gi_2829132 [Arabidopsis thaliana]
  misc_feature (5)..(206): Homolog of NCBI NO: 9757873 NR Description: adenylylsulfate kinase-like protein [Arabidopsis
  misc_feature (5)..(206): Homolog of NCBI NO: 18425199 NR Description: adenylylsulfate kinase-like protein; protein id: supported by cDNA: 125039. [Arabidopsis thaliana] putative adenylylsulfate kinase [Arabidopsis thaliana]

SEQ ID NO: 95509 - DNA, 1236 bp, Arabidopsis thaliana; identical to SEQ ID NO: 91753
  misc_feature (1)..(1236): Ceres Seq. ID no. 12729166
  misc_feature: MA Experiment ID: 20000355 Result: Up-regulated in Transcription
  misc_feature: MA Experiment 20000355 PARAMETER Experiment Name: At_Siliques_Sub_P Parameter: Age (day) Value: 21
  misc_feature: MA Experiment 20000355 PARAMETER Experiment Name: At_Siliques_Sub_P Parameter: Organism Value: A. thaliana
  misc_feature: MA Experiment 20000355 PARAMETER Experiment Name: At_Siliques_Sub_P Parameter: Plant Line Value: WS
  misc_feature: MA Experiment 20000355 PARAMETER Experiment Name: At_Siliques_Sub_P Parameter: Tissue Value: Less Than 5mm Siliques vs. Whole Plant
  misc_feature: MA Experiment ID: 20000440 Result: Up-regulated in Transcription
  misc_feature: MA Experiment 20000440 PARAMETER Experiment Name: At_Closed-Flower__Sub_P Parameter: Tissue Value: Closed Flower vs. Whole Plant
  misc_feature: MA Experiment ID: 20001806 Result: Down-regulated in Transcription
  misc_feature: MA Experiment 20001806 PARAMETER Experiment Name: At_50mM_NH4NO3_L-to-H_Sub_P Parameter: Timepoint (hr) Value: 4
  misc_feature: MA Experiment 20001806 PARAMETER Experiment Name: At_50mM_NH4NO3_L-to-H_Sub_P Parameter: Tissue Value: Leaf
  misc_feature: MA Experiment 20001806 PARAMETER Experiment Name: At_50mM_NH4NO3_L-to-H_Sub_P Parameter: Treatment Value: 50mM NH4NO3 vs 100mM Mannitol

SEQ ID NO: 95510 - protein, 411 aa, Arabidopsis thaliana; identical to SEQ ID NO: 91754
  peptide (1)..(411): Ceres Seq. ID no. 12729167
  misc_feature (176)..(408): Pfam Name: Glutamate/Leucine/Phenylalanine/Valine dehydrogenase Pfam Description: Glutamate/Leucine/Phenylalanine/Valine
  misc_feature (1)..(411): Homolog of NCBI NO: 15228667 NR Description: putative glutamate dehydrogenase; protein id: [Arabidopsis thaliana] >gi|12229816|sp|Q9S7A0|DHE3_ARATH Probable dehydrogenase 3 (GDH 3) >gi|6006851|gb|AAF00627.1|AC009540_4
  misc_feature (1)..(411): Homolog of NCBI NO: 15238762 NR Description: glutamate dehydrogenase (EC 1.4.1.-) 1 protein id: At5g18170.1, supported by cDNA: gi_1098959, supported cDNA: gi_1293094, supported by cDNA: gi_15146203 [Arabidopsis
  misc_feature (1)..(409): Homolog of NCBI NO: 12643806 NR Description: Glutamate dehydrogenase B (GDH B)
  misc_feature (1)..(409): Homolog of NCBI NO: 7431768 NR Description: glutamate dehydrogenase (EC 1.4.1.-) B - tobacco >gi|4688955|emb|CAA69601.2| NADH glutamate dehydrogenase
  misc_feature (1)..(409): Homolog of NCBI NO: 20873461 NR Description: glutamate dehydrogenase [Nicotiana tabacum]
  misc_feature (1)..(409): Homolog of NCBI NO: 21314959 NR Description: NADH-glutamate dehydrogenase [Lycopersicon
  misc_feature (1)..(409): Homolog of NCBI NO: 28269441 NR Description: glutamate dehydrogenase [Oryza sativa (japonica
  misc_feature (1)..(409): Homolog of NCBI NO: 12229803 NR Description: Glutamate dehydrogenase (GDH) (Legdh1)
  misc_feature (1)..(409): Homolog of NCBI NO: 4150965 NR Description: glutamate dehydrogenase [Asparagus officinalis]
  misc_feature (1)..(409): Homolog of NCBI NO: 7431775 NR Description: glutamate dehydrogenase (EC 1.4.1.2) - maize

SEQ ID NO: 95511 - protein, 347 aa, Arabidopsis thaliana; identical to SEQ ID NO: 91755
  peptide (1)..(347): Ceres Seq. ID no. 12729168
  misc_feature (112)..(344): Pfam Name: Glutamate/Leucine/Phenylalanine/Valine dehydrogenase Pfam Description: Glutamate/Leucine/Phenylalanine/Valine
  misc_feature (1)..(347): Homolog of NCBI NO: 15228667 NR Description: putative glutamate dehydrogenase; protein id: [Arabidopsis thaliana] >gi|12229816|sp|Q9S7A0|DHE3_ARATH Probable dehydrogenase 3 (GDH 3) >gi|6006851|gb|AAF00627.1|AC009540_4
  misc_feature (1)..(347): Homolog of NCBI NO: 15238762 NR Description: glutamate dehydrogenase (EC 1.4.1.-) 1 protein id: At5g18170.1, supported by cDNA: gi_1098959, supported cDNA: gi_1293094, supported by cDNA: gi_15146203 [Arabidopsis
  misc_feature (1)..(345): Homolog of NCBI NO: 12643806 NR Description: Glutamate dehydrogenase B (GDH B)
  misc_feature (1)..(345): Homolog of NCBI NO: 7431768 NR Description: glutamate dehydrogenase (EC 1.4.1.-) B - tobacco >gi|4688955|emb|CAA69601.2| NADH glutamate dehydrogenase
  misc_feature (1)..(345): Homolog of NCBI NO: 20873461 NR Description: glutamate dehydrogenase [Nicotiana tabacum]
  misc_feature (1)..(345): Homolog of NCBI NO: 21314959 NR Description: NADH-glutamate dehydrogenase [Lycopersicon
  misc_feature (1)..(345): Homolog of NCBI NO: 28269441 NR Description: glutamate dehydrogenase [Oryza sativa (japonica
  misc_feature (1)..(345): Homolog of NCBI NO: 12229803 NR Description: Glutamate dehydrogenase (GDH) (Legdh1)
  misc_feature (1)..(345): Homolog of NCBI NO: 4150965 NR Description: glutamate dehydrogenase [Asparagus officinalis]
  misc_feature (1)..(345): Homolog of NCBI NO: 7431775 NR Description: glutamate dehydrogenase (EC 1.4.1.2) - maize

SEQ ID NO: 95512 - protein, 325 aa, Arabidopsis thaliana; identical to SEQ ID NO: 91756
  peptide (1)..(325): Ceres Seq. ID no. 12729169
  misc_feature (90)..(322): Pfam Name: Glutamate/Leucine/Phenylalanine/Valine dehydrogenase Pfam Description: Glutamate/Leucine/Phenylalanine/Valine
  misc_feature (1)..(325): Homolog of NCBI NO: 15228667 NR Description: putative glutamate dehydrogenase; protein id: [Arabidopsis thaliana] >gi|12229816|sp|Q9S7A0|DHE3_ARATH Probable dehydrogenase 3 (GDH 3) >gi|6006851|gb|AAF00627.1|AC009540_4
  misc_feature (1)..(325): Homolog of NCBI NO: 15238762 NR Description: glutamate dehydrogenase (EC 1.4.1.-) 1 protein id: At5g18170.1, supported by cDNA: gi_1098959, supported cDNA: gi_1293094, supported by cDNA: gi_15146203 [Arabidopsis
  misc_feature (1)..(323): Homolog of NCBI NO: 12643806 NR Description: Glutamate dehydrogenase B (GDH B)
  misc_feature (1)..(323): Homolog of NCBI NO: 7431768 NR Description: glutamate dehydrogenase (EC 1.4.1.-) B - tobacco >gi|4688955|emb|CAA69601.2| NADH glutamate dehydrogenase
  misc_feature (1)..(323): Homolog of NCBI NO: 20873461 NR Description: glutamate dehydrogenase [Nicotiana tabacum]
  misc_feature (1)..(323): Homolog of NCBI NO: 21314959 NR Description: NADH-glutamate dehydrogenase [Lycopersicon
  misc_feature (1)..(323): Homolog of NCBI NO: 28269441 NR Description: glutamate dehydrogenase [Oryza sativa (japonica
  misc_feature (1)..(323): Homolog of NCBI NO: 12229803 NR Description: Glutamate dehydrogenase (GDH) (Legdh1)
  misc_feature (1)..(323): Homolog of NCBI NO: 4150965 NR Description: glutamate dehydrogenase [Asparagus officinalis]
  misc_feature (1)..(323): Homolog of NCBI NO: 7431775 NR Description: glutamate dehydrogenase (EC 1.4.1.2) - maize

SEQ ID NO: 95513 - DNA, 1359 bp, Arabidopsis thaliana; identical to SEQ ID NO: 91757
  misc_feature (1)..(1359): Ceres Seq. ID no. 12729181
  misc_feature: MA Experiment ID: 20000171 Result: Up-regulated in Transcription
  misc_feature: MA Experiment 20000171 PARAMETER Experiment Name: At_42deg_Heat_P Parameter: Age (day) Value: 14
  misc_feature: MA Experiment 20000171 PARAMETER Experiment Name: At_42deg_Heat_P Parameter: Organism Value: A. thaliana
  misc_feature: MA Experiment 20000171 PARAMETER Experiment Name: At_42deg_Heat_P Parameter: Plant Line Value: WS
  misc_feature: MA Experiment 20000171 PARAMETER Experiment Name: At_42deg_Heat_P Parameter: Temperature (deg C) Value: 42 vs. 22
  misc_feature: MA Experiment 20000171 PARAMETER Experiment Name: At_42deg_Heat_P Parameter: Timepoint (hr) Value: 1
  misc_feature: MA Experiment 20000171 PARAMETER Experiment Name: At_42deg_Heat_P Parameter: Tissue Value: Aerial
  misc_feature: MA Experiment ID: 20000182 Result: Up-regulated in Transcription
  misc_feature: MA Experiment 20000182 PARAMETER Experiment Name: At_2mM_SA_P Parameter: Age (day) Value: 14
  misc_feature: MA Experiment 20000182 PARAMETER Experiment Name: At_2mM_SA_P Parameter: Organism Value: A. thaliana
  misc_feature: MA Experiment 20000182 PARAMETER Experiment Name: At_2mM_SA_P Parameter: Plant Line Value: WS
  misc_feature: MA Experiment 20000182 PARAMETER Experiment Name: At_2mM_SA_P Parameter: Timepoint (hr) Value: 6
  misc_feature: MA Experiment 20000182 PARAMETER Experiment Name: At_2mM_SA_P Parameter: Tissue Value: Aerial
  misc_feature: MA Experiment 20000182 PARAMETER Experiment Name: At_2mM_SA_P Parameter: Treatment Value: 2mM SA vs. No Treatment
  misc_feature: MA Experiment ID: 20000437 Result: Up-regulated in Transcription
  misc_feature: MA Experiment 20000437 PARAMETER Experiment Name: At_Drought_P Parameter: Age (day) Value: 8
  misc_feature: MA Experiment 20000437 PARAMETER Experiment Name: At_Drought_P Parameter: Organism Value: A. thaliana
  misc_feature: MA Experiment 20000437 PARAMETER Experiment Name: At_Drought_P Parameter: Plant Line Value: WS
  misc_feature: MA Experiment 20000437 PARAMETER Experiment Name: At_Drought_P Parameter: Timepoint (hr) Value: 24
  misc_feature: MA Experiment 20000437 PARAMETER Experiment Name: At_Drought_P Parameter: Tissue Value: Whole Plant
  misc_feature: MA Experiment 20000437 PARAMETER Experiment Name: At_Drought_P Parameter: Treatment Value: Drought vs. No Drought

SEQ ID NO: 95514 - protein, 452 aa, Arabidopsis thaliana; identical to SEQ ID NO: 91758
  peptide (1)..(452): Ceres Seq. ID no. 12729182
  misc_feature (1)..(313): Pfam Name: Glycosyl hydrolases family 17 Pfam Description: Glycosyl hydrolases family 17
  misc_feature (1)..(452): Homolog of NCBI NO: 6223646 NR Description: putative beta-1,3-glucanase [Arabidopsis thaliana]
  misc_feature (1)..(452): Homolog of NCBI NO: 22330833 NR Description: glycosyl hydrolase family 17; protein id:
  misc_feature (1)..(449): Homolog of NCBI NO: 15238768 NR Description: glycosyl hydrolase family 17; protein id:
  misc_feature (1)..(449): Homolog of NCBI NO: 15217739 NR Description: glycosyl hydrolase family 17; protein id:
  misc_feature (1)..(449): Homolog of NCBI NO: 25404490 NR Description: hypothetical protein F13O11.7 [imported] -
  misc_feature (1)..(449): Homolog of NCBI NO: 15224778 NR Description: glycosyl hydrolase family 17; protein id:
  misc_feature (2)..(451): Homolog of NCBI NO: 28269434 NR Description: putative beta-1,3 glucanase [Oryza sativa
  misc_feature (1)..(444): Homolog of NCBI NO: 18483232 NR Description: 3-glucanase [Sorghum bicolor]
  misc_feature (2)..(422): Homolog of NCBI NO: 34395009 NR Description: putative 3-glucanase [Oryza sativa (japonica
  misc_feature (76)..(449): Homolog of NCBI NO: 7486246 NR Description: hypothetical protein F27F23.24 - Arabidopsis

SEQ ID NO: 95515 - protein, 439 aa, Arabidopsis thaliana; identical to SEQ ID NO: 91759
  peptide (1)..(439): Ceres Seq. ID no. 12729183
  misc_feature (1)..(300): Pfam Name: Glycosyl hydrolases family 17 Pfam Description: Glycosyl hydrolases family 17
  misc_feature (1)..(439): Homolog of NCBI NO: 6223646 NR Description: putative beta-1,3-glucanase [Arabidopsis thaliana]
  misc_feature (1)..(439): Homolog of NCBI NO: 22330833 NR Description: glycosyl hydrolase family 17; protein id:
  misc_feature (1)..(436): Homolog of NCBI NO: 15238768 NR Description: glycosyl hydrolase family 17; protein id:
  misc_feature (1)..(436): Homolog of NCBI NO: 15217739 NR Description: glycosyl hydrolase family 17; protein id:
  misc_feature (1)..(436): Homolog of NCBI NO: 25404490 NR Description: hypothetical protein F13O11.7 [imported] -
  misc_feature (1)..(436): Homolog of NCBI NO: 15224778 NR Description: glycosyl hydrolase family 17; protein id:
  misc_feature (1)..(438): Homolog of NCBI NO: 28269434 NR Description: putative beta-1,3 glucanase [Oryza sativa
  misc_feature (1)..(431): Homolog of NCBI NO: 18483232 NR Description: 3-glucanase [Sorghum bicolor]
  misc_feature (1)..(409): Homolog of NCBI NO: 34395009 NR Description: putative 3-glucanase [Oryza sativa (japonica
  misc_feature (63)..(436): Homolog of NCBI NO: 7486246 NR Description: hypothetical protein F27F23.24 - Arabidopsis

SEQ ID NO: 95516 - protein, 420 aa, Arabidopsis thaliana; identical to SEQ ID NO: 91760
  peptide (1)..(420): Ceres Seq. ID no. 12729184
  misc_feature (1)..(281): Pfam Name: Glycosyl hydrolases family 17 Pfam Description: Glycosyl hydrolases family 17
  misc_feature (1)..(420): Homolog of NCBI NO: 6223646 NR Description: putative beta-1,3-glucanase [Arabidopsis thaliana]
  misc_feature (1)..(420): Homolog of NCBI NO: 22330833 NR Description: glycosyl hydrolase family 17; protein id:
  misc_feature (1)..(417): Homolog of NCBI NO: 15238768 NR Description: glycosyl hydrolase family 17; protein id:
  misc_feature (1)..(417): Homolog of NCBI NO: 15217739 NR Description: glycosyl hydrolase family 17; protein id:
  misc_feature (1)..(417): Homolog of NCBI NO: 25404490 NR Description: hypothetical protein F13O11.7 [imported] -
  misc_feature (1)..(417): Homolog of NCBI NO: 15224778 NR Description: glycosyl hydrolase family 17; protein id:
  misc_feature (1)..(419): Homolog of NCBI NO: 28269434 NR Description: putative beta-1,3 glucanase [Oryza sativa
  misc_feature (1)..(412): Homolog of NCBI NO: 18483232 NR Description: 3-glucanase [Sorghum bicolor]
  misc_feature (1)..(390): Homolog of NCBI NO: 34395009 NR Description: putative 3-glucanase [Oryza sativa (japonica
  misc_feature (44)..(417): Homolog of NCBI NO: 7486246 NR Description: hypothetical protein F27F23.24 - Arabidopsis

SEQ ID NO: 95517 - DNA, 1328 bp, Arabidopsis thaliana; identical to SEQ ID NO: 91761
  misc_feature (1)..(1328): Ceres Seq. ID no. 12729185
  misc_feature: MA Experiment ID: 20000185 Result: Up-regulated in Transcription
  misc_feature: MA Experiment 20000185 PARAMETER Experiment Name: At_Roots__P Parameter: Age (day) Value: 7 vs. 21
  misc_feature: MA Experiment 20000185 PARAMETER Experiment Name: At_Roots__P Parameter: Organism Value: A. thaliana
  misc_feature: MA Experiment 20000185 PARAMETER Experiment Name: At_Roots__P Parameter: Tissue Value: Roots vs. Whole Plant
  misc_feature: MA Experiment ID: 20000453 Result: Up-regulated in Transcription
  misc_feature: MA Experiment 20000453 PARAMETER Experiment Name: At_100uM_ABA_P Parameter: Age (day) Value: 15
  misc_feature: MA Experiment 20000453 PARAMETER Experiment Name: At_100uM_ABA_P Parameter: Organism Value: A. thaliana
  misc_feature: MA Experiment 20000453 PARAMETER Experiment Name: At_100uM_ABA_P Parameter: Plant Line Value: WS
  misc_feature: MA Experiment 20000453 PARAMETER Experiment Name: At_100uM_ABA_P Parameter: Timepoint (hr) Value: 24
  misc_feature: MA Experiment 20000453 PARAMETER Experiment Name: At_100uM_ABA_P Parameter: Tissue Value: Aerial
  misc_feature: MA Experiment 20000453 PARAMETER Experiment Name: At_100uM_ABA_P Parameter: Treatment Value: 100uM ABA vs. No Treatment
  misc_feature: MA Experiment ID: 20000496 Result: Up-regulated in Transcription
  misc_feature: MA Experiment 20000496 PARAMETER Experiment Name: At_Guard_Cells_P Parameter: Harvest Date Value: 7/19/2002
  misc_feature: MA Experiment 20000496 PARAMETER Experiment Name: At_Guard_Cells_P Parameter: Organism Value: Canola
  misc_feature: MA Experiment 20000496 PARAMETER Experiment Name: At_Guard_Cells_P Parameter: Tissue Value: Guard Cells vs. Leaves
  misc_feature: MA Experiment ID: 20000794 Result: Up-regulated in Transcription
  misc_feature: MA Experiment 20000794 PARAMETER Experiment Name: At_Petals_P Parameter: Age (day) Value: 23-25 days
  misc_feature: MA Experiment 20000794 PARAMETER Experiment Name: At_Petals_P Parameter: Plant Line Value: WS
  misc_feature: MA Experiment 20000794 PARAMETER Experiment Name: At_Petals_P Parameter: Tissue Value: Petals vs. Whole plant
  misc_feature: MA Experiment ID: 20001557 Result: Down-regulated in Transcription
  misc_feature: MA Experiment 20001557 PARAMETER Experiment Name: At_Drought_Soil_Dry_P Parameter: Age (day) Value: 27
  misc_feature: MA Experiment 20001557 PARAMETER Experiment Name: At_Drought_Soil_Dry_P Parameter: Organism Value: A. thaliana
  misc_feature: MA Experiment 20001557 PARAMETER Experiment Name: At_Drought_Soil_Dry_P Parameter: Plant Line Value: WS
  misc_feature: MA Experiment 20001557 PARAMETER Experiment Name: At_Drought_Soil_Dry_P Parameter: Post Timepoint (hr) Value: 3
  misc_feature: MA Experiment 20001557 PARAMETER Experiment Name: At_Drought_Soil_Dry_P Parameter: Post-Treatment Value: Re-Water vs. No Drought
  misc_feature: MA Experiment 20001557 PARAMETER Experiment Name: At_Drought_Soil_Dry_P Parameter: Timepoint (day) Value: 13
  misc_feature: MA Experiment 20001557 PARAMETER Experiment Name: At_Drought_Soil_Dry_P Parameter: Treatment Value: Drought vs. No Drought
  misc_feature: MA Experiment ID: 20001558 Result: Down-regulated in Transcription
  misc_feature: MA Experiment 20001558 PARAMETER Experiment Name: At_Drought_Soil_Dry_P Parameter: Age (day) Value: 27
  misc_feature: MA Experiment 20001558 PARAMETER Experiment Name: At_Drought_Soil_Dry_P Parameter: Organism Value: A. thaliana
  misc_feature: MA Experiment 20001558 PARAMETER Experiment Name: At_Drought_Soil_Dry_P Parameter: Plant Line Value: WS
  misc_feature: MA Experiment 20001558 PARAMETER Experiment Name: At_Drought_Soil_Dry_P Parameter: Post Timepoint (hr) Value: 6
  misc_feature: MA Experiment 20001558 PARAMETER Experiment Name: At_Drought_Soil_Dry_P Parameter: Post-Treatment Value: Re-Water vs. No Drought
  misc_feature: MA Experiment 20001558 PARAMETER Experiment Name: At_Drought_Soil_Dry_P Parameter: Timepoint (day) Value: 13
  misc_feature: MA Experiment 20001558 PARAMETER Experiment Name: At_Drought_Soil_Dry_P Parameter: Treatment Value: Drought vs. No Drought
  misc_feature: MA Experiment ID: 20001560 Result: Down-regulated in Transcription
  misc_feature: MA Experiment 20001560 PARAMETER Experiment Name: At_Drought_Soil_Dry_P Parameter: Age (day) Value: 28
  misc_feature: MA Experiment 20001560 PARAMETER Experiment Name: At_Drought_Soil_Dry_P Parameter: Organism Value: A. thaliana
  misc_feature: MA Experiment 20001560 PARAMETER Experiment Name: At_Drought_Soil_Dry_P Parameter: Plant Line Value: WS
  misc_feature: MA Experiment 20001560 PARAMETER Experiment Name: At_Drought_Soil_Dry_P Parameter: Post Timepoint (hr) Value: None
  misc_feature: MA Experiment 20001560 PARAMETER Experiment Name: At_Drought_Soil_Dry_P Parameter: Post-Treatment Value: None
  misc_feature: MA Experiment 20001560 PARAMETER Experiment Name: At_Drought_Soil_Dry_P Parameter: Timepoint (day) Value: 14
  misc_feature: MA Experiment 20001560 PARAMETER Experiment Name: At_Drought_Soil_Dry_P Parameter: Treatment Value: Drought vs. No Drought

SEQ ID NO: 95518 - protein, 388 aa, Arabidopsis thaliana; identical to SEQ ID NO: 91762
  peptide (1)..(388): Ceres Seq. ID no. 12729186
  misc_feature (47)..(98): Pfam Name: Myb-like DNA-binding domain Pfam Description: Myb-like DNA-binding domain
  misc_feature (1)..(388): Homolog of NCBI NO: 22330835 NR Description: transfactor-like; protein id: At3g04030.1, by cDNA: gi_18377832 [Arabidopsis thaliana] AT3g04030/T11I18_14 [Arabidopsis thaliana]
  misc_feature (1)..(388): Homolog of NCBI NO: 6223653 NR Description: transfactor-like [Arabidopsis thaliana]
  misc_feature (1)..(388): Homolog of NCBI NO: 30686726 NR Description: transfactor-related protein [Arabidopsis
  misc_feature (1)..(388): Homolog of NCBI NO: 15238770 NR Description: transfactor-like protein; protein id: supported by cDNA: gi_14596180 [Arabidopsis thaliana]
  misc_feature (1)..(388): Homolog of NCBI NO: 28059694 NR Description: transfactor-like protein [Arabidopsis thaliana]
  misc_feature (1)..(388): Homolog of NCBI NO: 14596181 NR Description: transfactor-like protein [Arabidopsis thaliana]
  misc_feature (1)..(252): Homolog of NCBI NO: 34394528 NR Description: transfactor-like protein [Oryza sativa (japonica
  misc_feature (19)..(273): Homolog of NCBI NO: 18404044 NR Description: transfactor, putative; protein id: At3g24120.1, by cDNA: 6626., supported by cDNA: gi_15215653, supported by gi_20334891 [Arabidopsis thaliana] >gi|15215654|gb|AAK91372.1|
  misc_feature (31)..(268): Homolog of NCBI NO: 18414049 NR Description: putative protein; protein id: At4g13640.1, by cDNA: 38327. [Arabidopsis thaliana]
  misc_feature (31)..(264): Homolog of NCBI NO: 15222366 NR Description: transfactor, putative; protein id: At1g69580.1

SEQ ID NO: 95519 - protein, 371 aa, Arabidopsis thaliana; identical to SEQ ID NO: 91763
  peptide (1)..(371): Ceres Seq. ID no. 12729187
  misc_feature (30)..(81): Pfam Name: Myb-like DNA-binding domain Pfam Description: Myb-like DNA-binding domain
  misc_feature (1)..(371): Homolog of NCBI NO: 22330835 NR Description: transfactor-like; protein id: At3g04030.1, by cDNA: gi_18377832 [Arabidopsis thaliana] AT3g04030/T11I18_14 [Arabidopsis thaliana]
  misc_feature (1)..(371): Homolog of NCBI NO: 6223653 NR Description: transfactor-like [Arabidopsis thaliana]
  misc_feature (1)..(371): Homolog of NCBI NO: 30686726 NR Description: transfactor-related protein [Arabidopsis
  misc_feature (1)..(371): Homolog of NCBI NO: 15238770 NR Description: transfactor-like protein; protein id: supported by cDNA: gi_14596180 [Arabidopsis thaliana]
  misc_feature (1)..(371): Homolog of NCBI NO: 28059694 NR Description: transfactor-like protein [Arabidopsis thaliana]
  misc_feature (1)..(371): Homolog of NCBI NO: 14596181 NR Description: transfactor-like protein [Arabidopsis thaliana]
  misc_feature (1)..(235): Homolog of NCBI NO: 34394528 NR Description: transfactor-like protein [Oryza sativa (japonica
  misc_feature (2)..(256): Homolog of NCBI NO: 18404044 NR Description: transfactor, putative; protein id: At3g24120.1, by cDNA: 6626., supported by cDNA: gi_15215653, supported by gi_20334891 [Arabidopsis thaliana] >gi|15215654|gb|AAK91372.1|
  misc_feature (14)..(251): Homolog of NCBI NO: 18414049 NR Description: putative protein; protein id: At4g13640.1, by cDNA: 38327. [Arabidopsis thaliana]
  misc_feature (14)..(247): Homolog of NCBI NO: 15222366 NR Description: transfactor, putative; protein id: At1g69580.1

SEQ ID NO: 95520 - protein, 312 aa, Arabidopsis thaliana; identical to SEQ ID NO: 91764
  peptide (1)..(312): Ceres Seq. ID no. 12729188
  misc_feature (1)..(312): Homolog of NCBI NO: 22330835 NR Description: transfactor-like; protein id: At3g04030.1, by cDNA: gi_18377832 [Arabidopsis thaliana] AT3g04030/T11I18_14 [Arabidopsis thaliana]
  misc_feature (1)..(312): Homolog of NCBI NO: 6223653 NR Description: transfactor-like [Arabidopsis thaliana]
  misc_feature (1)..(312): Homolog of NCBI NO: 30686726 NR Description: transfactor-related protein [Arabidopsis
  misc_feature (1)..(312): Homolog of NCBI NO: 15238770 NR Description: transfactor-like protein; protein id: supported by cDNA: gi_14596180 [Arabidopsis thaliana]
  misc_feature (1)..(312): Homolog of NCBI NO: 28059694 NR Description: transfactor-like protein [Arabidopsis thaliana]
  misc_feature (1)..(312): Homolog of NCBI NO: 14596181 NR Description: transfactor-like protein [Arabidopsis thaliana]
  misc_feature (1)..(176): Homolog of NCBI NO: 34394528 NR Description: transfactor-like protein [Oryza sativa (japonica
  misc_feature (1)..(197): Homolog of NCBI NO: 18404044 NR Description: transfactor, putative; protein id: At3g24120.1, by cDNA: 6626., supported by cDNA: gi_15215653, supported by gi_20334891 [Arabidopsis thaliana] >gi|15215654|gb|AAK91372.1|
  misc_feature (1)..(192): Homolog of NCBI NO: 18414049 NR Description: putative protein; protein id: At4g13640.1, by cDNA: 38327. [Arabidopsis thaliana]
  misc_feature (1)..(188): Homolog of NCBI NO: 15222366 NR Description: transfactor, putative; protein id: At1g69580.1

SEQ ID NO: 95521 - DNA, 348 bp, Arabidopsis thaliana; identical to SEQ ID NO: 91765
  misc_feature (1)..(348): Ceres Seq. ID no. 12729337
  misc_feature: MA Experiment ID: 20000440 Result: Up-regulated in Transcription
  misc_feature: MA Experiment 20000440 PARAMETER Experiment Name: At_Closed-Flower__Sub_P Parameter: Tissue Value: Closed Flower vs. Whole Plant

SEQ ID NO: 95522 - protein, 115 aa, Arabidopsis thaliana; identical to SEQ ID NO: 91766
  peptide (1)..(115): Ceres Seq. ID no. 12729338
  misc_feature (44)..(102): Pfam Name: Keratin Pfam Description: Keratin
  misc_feature (1)..(115): Homolog of NCBI NO: 15224559 NR Description: putative glycine-rich protein; protein id:
  misc_feature (1)..(115): Homolog of NCBI NO: 18266043 NR Description: glycine-rich protein [Brassica oleracea]
  misc_feature (1)..(115): Homolog of NCBI NO: 4206767 NR Description: glycine-rich protein 3 short isoform [Arabidopsis
  misc_feature (1)..(115): Homolog of NCBI NO: 18396043 NR Description: expressed protein; protein id: At2g05380.1, by cDNA: gi_15146251, supported by cDNA: gi_20466661, supported cDNA: gi_4206766 [Arabidopsis thaliana]
  misc_feature (1)..(115): Homolog of NCBI NO: 20466662 NR Description: unknown protein [Arabidopsis thaliana]
  misc_feature (1)..(113): Homolog of NCBI NO: 15224560 NR Description: putative glycine-rich protein; protein id: supported by cDNA: gi_15215617, supported by cDNA: gi_15529156, by cDNA: gi_20334893 [Arabidopsis thaliana]
  misc_feature (41)..(115): Homolog of NCBI NO: 81625 NR Description: glycine-rich protein 3 precursor - Arabidopsis
  misc_feature (41)..(115): Homolog of NCBI NO: 259447 NR Description: glycine-rich protein; atGRP [Arabidopsis thaliana]
  misc_feature (1)..(114): Homolog of NCBI NO: 15224540 NR Description: putative glycine-rich protein; protein id: supported by cDNA: 105261. [Arabidopsis thaliana]
  misc_feature (41)..(115): Homolog of NCBI NO: 15224548 NR Description: putative glycine-rich protein; protein id: supported by cDNA: gi_17473738, supported by cDNA: gi_20148476

SEQ ID NO: 95523 - protein, 74 aa, Arabidopsis thaliana; identical to SEQ ID NO: 91767
  peptide (1)..(74): Ceres Seq. ID no. 12729339
  misc_feature (10)..(73): Homolog of NCBI NO: 25411166 NR Description: hypothetical protein At2g05380 [imported] -

SEQ ID NO: 95524 - protein, 68 aa, Arabidopsis thaliana; identical to SEQ ID NO: 91768
  peptide (1)..(68): Ceres Seq. ID no. 12729340
  misc_feature (4)..(67): Homolog of NCBI NO: 25411166 NR Description: hypothetical protein At2g05380 [imported] -

SEQ ID NO: 95525 - DNA, 1422 bp, Arabidopsis thaliana; identical to SEQ ID NO: 91769
  misc_feature (1)..(1422): Ceres Seq. ID no. 12729358
  misc_feature: MA Experiment ID: 108576 Result: Down-regulated in Transcription
  misc_feature: MA Experiment 108576 PARAMETER Experiment Name: At_42deg_Heat_cDNA_P Parameter: Temperature (deg C) Value: 42 vs. 22
  misc_feature: MA Experiment 108576 PARAMETER Experiment Name: At_42deg_Heat_cDNA_P Parameter: Timepoint (hr) Value: 1
  misc_feature: MA Experiment 108576 PARAMETER Experiment Name: At_42deg_Heat_cDNA_P Parameter: Tissue Value: Aerial
  misc_feature: MA Experiment ID: 108668 Result: Down-regulated in Transcription
  misc_feature: MA Experiment 108668 PARAMETER Experiment Name: At_2mM_SA_cDNA_P Parameter: Plant Line Value: WS
  misc_feature: MA Experiment 108668 PARAMETER Experiment Name: At_2mM_SA_cDNA_P Parameter: Timepoint (hr) Value: 6
  misc_feature: MA Experiment 108668 PARAMETER Experiment Name: At_2mM_SA_cDNA_P Parameter: Treatment Value: 2mM SA vs. No Treatment

SEQ ID NO: 95526 - protein, 473 aa, Arabidopsis thaliana; identical to SEQ ID NO: 91770
  peptide (1)..(473): Ceres Seq. ID no. 12729359
  misc_feature (25)..(344): Pfam Name: Glycosyl hydrolases family 17 Pfam Description: Glycosyl hydrolases family 17
  misc_feature (1)..(473): Homolog of NCBI NO: 25316444 NR Description: probable beta-1,3-glucanase [imported] -
  misc_feature (1)..(464): Homolog of NCBI NO: 30678225 NR Description: glycosyl hydrolase family 17 [Arabidopsis
  misc_feature (8)..(467): Homolog of NCBI NO: 9758115 NR Description: beta-1,3-glucanase-like protein [Arabidopsis
  misc_feature (8)..(464): Homolog of NCBI NO: 18423719 NR Description: glycosyl hydrolase family 17; protein id: supported by cDNA: 7119., supported by cDNA: gi_18700154
  misc_feature (8)..(464): Homolog of NCBI NO: 18700155 NR Description: AT5g55180/MCO15_13 [Arabidopsis thaliana]
  misc_feature (8)..(464): Homolog of NCBI NO: 21594590 NR Description: beta-1,3-glucanase-like protein [Arabidopsis
  misc_feature (10)..(464): Homolog of NCBI NO: 11071974 NR Description: elicitor inducible beta-1,3-glucanase Nt-SubE76
  misc_feature (12)..(461): Homolog of NCBI NO: 15236882 NR Description: glycosyl hydrolase family 17; protein id:
  misc_feature (7)..(351): Homolog of NCBI NO: 27529826 NR Description: beta-1,3-glucanase-like protein [Nicotiana
  misc_feature (6)..(348): Homolog of NCBI NO: 11279331 NR Description: beta-1,3-glucanase (EC 3.2.1.-) precursor

SEQ ID NO: 95527 - protein, 340 aa, Arabidopsis thaliana; identical to SEQ ID NO: 91771
  peptide (1)..(340): Ceres Seq. ID no. 12729360
  misc_feature (1)..(211): Pfam Name: Glycosyl hydrolases family 17 Pfam Description: Glycosyl hydrolases family 17
  misc_feature (1)..(340): Homolog of NCBI NO: 25316444 NR Description: probable beta-1,3-glucanase [imported] -
  misc_feature (1)..(331): Homolog of NCBI NO: 30678225 NR Description: glycosyl hydrolase family 17 [Arabidopsis
  misc_feature (1)..(334): Homolog of NCBI NO: 9758115 NR Description: beta-1,3-glucanase-like protein [Arabidopsis
  misc_feature (1)..(331): Homolog of NCBI NO: 18423719 NR Description: glycosyl hydrolase family 17; protein id: supported by cDNA: 7119., supported by cDNA: gi_18700154
  misc_feature (1)..(331): Homolog of NCBI NO: 18700155 NR Description: AT5g55180/MCO15_13 [Arabidopsis thaliana]
  misc_feature (1)..(331): Homolog of NCBI NO: 21594590 NR Description: beta-1,3-glucanase-like protein [Arabidopsis
  misc_feature (1)..(331): Homolog of NCBI NO: 11071974 NR Description: elicitor inducible beta-1,3-glucanase Nt-SubE76
  misc_feature (1)..(328): Homolog of NCBI NO: 15236882 NR Description: glycosyl hydrolase family 17; protein id:
  misc_feature (1)..(218): Homolog of NCBI NO: 27529826 NR Description: beta-1,3-glucanase-like protein [Nicotiana
  misc_feature (1)..(215): Homolog of NCBI NO: 11279331 NR Description: beta-1,3-glucanase (EC 3.2.1.-) precursor

SEQ ID NO: 95528 - protein, 332 aa, Arabidopsis thaliana; identical to SEQ ID NO: 91772
  peptide (1)..(332): Ceres Seq. ID no. 12729361
  misc_feature (1)..(203): Pfam Name: Glycosyl hydrolases family 17 Pfam Description: Glycosyl hydrolases family 17
  misc_feature (1)..(332): Homolog of NCBI NO: 25316444 NR Description: probable beta-1,3-glucanase [imported] -
  misc_feature (1)..(323): Homolog of NCBI NO: 30678225 NR Description: glycosyl hydrolase family 17 [Arabidopsis
  misc_feature (1)..(326): Homolog of NCBI NO: 9758115 NR Description: beta-1,3-glucanase-like protein [Arabidopsis
  misc_feature (1)..(323): Homolog of NCBI NO: 18423719 NR Description: glycosyl hydrolase family 17; protein id: supported by cDNA: 7119., supported by cDNA: gi_18700154
  misc_feature (1)..(323): Homolog of NCBI NO: 18700155 NR Description: AT5g55180/MCO15_13 [Arabidopsis thaliana]
  misc_feature (1)..(323): Homolog of NCBI NO: 21594590 NR Description: beta-1,3-glucanase-like protein [Arabidopsis
  misc_feature (1)..(323): Homolog of NCBI NO: 11071974 NR Description: elicitor inducible beta-1,3-glucanase Nt-SubE76
  misc_feature (1)..(320): Homolog of NCBI NO: 15236882 NR Description: glycosyl hydrolase family 17; protein id:
  misc_feature (1)..(210): Homolog of NCBI NO: 27529826 NR Description: beta-1,3-glucanase-like protein [Nicotiana
  misc_feature (1)..(207): Homolog of NCBI NO: 11279331 NR Description: beta-1,3-glucanase (EC 3.2.1.-) precursor

SEQ ID NO: 95529 - DNA, 1583 bp, Arabidopsis thaliana; identical to SEQ ID NO: 91773
  misc_feature (1)..(1583): Ceres Seq. ID no. 12729365
  misc_feature: MA Experiment ID: 20000355 Result: Up-regulated in Transcription
  misc_feature: MA Experiment 20000355 PARAMETER Experiment Name: At_Siliques_Sub_P Parameter: Age (day) Value: 21
  misc_feature: MA Experiment 20000355 PARAMETER Experiment Name: At_Siliques_Sub_P Parameter: Organism Value: A. thaliana
  misc_feature: MA Experiment 20000355 PARAMETER Experiment Name: At_Siliques_Sub_P Parameter: Plant Line Value: WS
  misc_feature: MA Experiment 20000355 PARAMETER Experiment Name: At_Siliques_Sub_P Parameter: Tissue Value: Less Than 5mm Siliques vs. Whole Plant

SEQ ID NO: 95530 - protein, 496 aa, Arabidopsis thaliana; identical to SEQ ID NO: 91774
  peptide (1)..(496): Ceres Seq. ID no. 12729366
  misc_feature (77)..(489): Pfam Name: Serine carboxypeptidase Pfam Description: Serine carboxypeptidase
  misc_feature (10)..(496): Homolog of NCBI NO: 15224995 NR Description: putative serine carboxypeptidase II; protein id:
  misc_feature (10)..(495): Homolog of NCBI NO: 15231099 NR Description: serine-type carboxypeptidase like protein;
  misc_feature (10)..(495): Homolog of NCBI NO: 15231101 NR Description: serine-type carboxypeptidase-like protein;
  misc_feature (46)..(495): Homolog of NCBI NO: 28393031 NR Description: putative serine-type carboxypeptidase
  misc_feature (10)..(496): Homolog of NCBI NO: 15231103 NR Description: serine-type carboxypeptidase-like protein;
  misc_feature (9)..(495): Homolog of NCBI NO: 15229439 NR Description: serin carboxypeptidase - like protein; protein
  misc_feature (67)..(493): Homolog of NCBI NO: 11967861 NR Description: putative serine carboxypeptidase [Pisum sativum]
  misc_feature (67)..(487): Homolog of NCBI NO: 34329345 NR Description: putative serine carboxypeptidase [Medicago
  misc_feature (68)..(493): Homolog of NCBI NO: 1706082 NR Description: Serine carboxypeptidase II-3 precursor (CP-MII.3)
  misc_feature (68)..(493): Homolog of NCBI NO: 34899032 NR Description: putative serine carboxypeptidase II-3 precursor

SEQ ID NO: 95531 - protein, 487 aa, Arabidopsis thaliana; identical to SEQ ID NO: 91775
  peptide (1)..(487): Ceres Seq. ID no. 12729367
  misc_feature (68)..(480): Pfam Name: Serine carboxypeptidase Pfam Description: Serine carboxypeptidase
  misc_feature (1)..(487): Homolog of NCBI NO: 15224995 NR Description: putative serine carboxypeptidase II; protein id:
  misc_feature (1)..(486): Homolog of NCBI NO: 15231099 NR Description: serine-type carboxypeptidase like protein;
  misc_feature (1)..(486): Homolog of NCBI NO: 15231101 NR Description: serine-type carboxypeptidase-like protein;
  misc_feature (37)..(486): Homolog of NCBI NO: 28393031 NR Description: putative serine-type carboxypeptidase
  misc_feature (1)..(487): Homolog of NCBI NO: 15231103 NR Description: serine-type carboxypeptidase-like protein;
  misc_feature (1)..(486): Homolog of NCBI NO: 15229439 NR Description: serin carboxypeptidase - like protein; protein
  misc_feature (58)..(484): Homolog of NCBI NO: 11967861 NR Description: putative serine carboxypeptidase [Pisum sativum]
  misc_feature (58)..(478): Homolog of NCBI NO: 34329345 NR Description: putative serine carboxypeptidase [Medicago
  misc_feature (59)..(484): Homolog of NCBI NO: 1706082 NR Description: Serine carboxypeptidase II-3 precursor (CP-MII.3)
  misc_feature (59)..(484): Homolog of NCBI NO: 34899032 NR Description: putative serine carboxypeptidase II-3 precursor

SEQ ID NO: 95532 - protein, 333 aa, Arabidopsis thaliana; identical to SEQ ID NO: 91776
  peptide (1)..(333): Ceres Seq. ID no. 12729368
  misc_feature (1)..(326): Pfam Name: Serine carboxypeptidase Pfam Description: Serine carboxypeptidase
  misc_feature (1)..(333): Homolog of NCBI NO: 15224995 NR Description: putative serine carboxypeptidase II; protein id:
  misc_feature (1)..(332): Homolog of NCBI NO: 15231099 NR Description: serine-type carboxypeptidase like protein;
  misc_feature (1)..(332): Homolog of NCBI NO: 15231101 NR Description: serine-type carboxypeptidase-like protein;
  misc_feature (1)..(332): Homolog of NCBI NO: 28393031 NR Description: putative serine-type carboxypeptidase
  misc_feature (1)..(333): Homolog of NCBI NO: 15231103 NR Description: serine-type carboxypeptidase-like protein;
  misc_feature (1)..(332): Homolog of NCBI NO: 15229439 NR Description: serin carboxypeptidase - like protein; protein
  misc_feature (1)..(330): Homolog of NCBI NO: 11967861 NR Description: putative serine carboxypeptidase [Pisum sativum]
  misc_feature (1)..(324): Homolog of NCBI NO: 34329345 NR Description: putative serine carboxypeptidase [Medicago
  misc_feature (1)..(330): Homolog of NCBI NO: 1706082 NR Description: Serine carboxypeptidase II-3 precursor (CP-MII.3)
  misc_feature (1)..(330): Homolog of NCBI NO: 34899032 NR Description: putative serine carboxypeptidase II-3 precursor

SEQ ID NO: 95533 - DNA, 1407 bp, Arabidopsis thaliana; identical to SEQ ID NO: 91777
  misc_feature (1)..(1407): Ceres Seq. ID no. 12729409
  misc_feature: MA Experiment ID: 20000314 Result: Up-regulated in Transcription
  misc_feature: MA Experiment 20000314 PARAMETER Experiment Name: At_14day_Shoots-Roots_Sub_P Parameter: Age (day) Value: 14
  misc_feature: MA Experiment 20000314 PARAMETER Experiment Name: At_14day_Shoots-Roots_Sub_P Parameter: Organism Value: A. thaliana
  misc_feature: MA Experiment 20000314 PARAMETER Experiment Name: At_14day_Shoots-Roots_Sub_P Parameter: Plant Line Value: WS
  misc_feature: MA Experiment 20000314 PARAMETER Experiment Name: At_14day_Shoots-Roots_Sub_P Parameter: Tissue Value: Roots vs. Whole Plant
  misc_feature: MA Experiment ID: 20000440 Result: Down-regulated in Transcription
  misc_feature: MA Experiment 20000440 PARAMETER Experiment Name: At_Closed-Flower__Sub_P Parameter: Tissue Value: Closed Flower vs. Whole Plant

SEQ ID NO: 95534 - protein, 468 aa, Arabidopsis thaliana; identical to SEQ ID NO: 91778
  peptide (1)..(468): Ceres Seq. ID no. 12729410
  misc_feature (36)..(453): Pfam Name: Serine carboxypeptidase Pfam Description: Serine carboxypeptidase
  misc_feature (1)..(468): Homolog of NCBI NO: 15224454 NR Description: putative serine carboxypeptidase II; protein id: [Arabidopsis thaliana] >gi|25289797|pir||D84503 probable serine
  misc_feature (1)..(296): Homolog of NCBI NO: 28393789 NR Description: putative serine carboxypeptidase II [Arabidopsis
  misc_feature (280)..(468): Homolog of NCBI NO: 28393789 NR Description: putative serine carboxypeptidase II [Arabidopsis
  misc_feature (2)..(468): Homolog of NCBI NO: 15238328 NR Description: serine carboxypeptidase II-like; protein id:
  misc_feature (1)..(462): Homolog of NCBI NO: 15238327 NR Description: serine carboxypeptidase-II like; protein id:
  misc_feature (5)..(459): Homolog of NCBI NO: 15218514 NR Description: serine carboxypeptidase II, putative; protein id:
  misc_feature (10)..(459): Homolog of NCBI NO: 30685740 NR Description: serine carboxypeptidase -related [Arabidopsis >gi|18377727|gb|AAL67013.1| putative serine carboxypeptidase II
  misc_feature (10)..(459): Homolog of NCBI NO: 25289793 NR Description: probable serine carboxypeptidase II [imported] - thaliana >gi|2459435|gb|AAB80670.1| putative serine
  misc_feature (30)..(459): Homolog of NCBI NO: 18396647 NR Description: serine carboxypeptidase II, putative; protein id: supported by cDNA: gi_16648968 [Arabidopsis thaliana]
  misc_feature (30)..(459): Homolog of NCBI NO: 25289785 NR Description: probable serine carboxypeptidase II [imported] - thaliana >gi|12322985|gb|AAG51475.1|AC069471_6 serine

SEQ ID NO: 95535 - protein, 460 aa, Arabidopsis thaliana; identical to SEQ ID NO: 91779
  peptide (1)..(460): Ceres Seq. ID no. 12729411
  misc_feature (28)..(445): Pfam Name: Serine carboxypeptidase Pfam Description: Serine carboxypeptidase
  misc_feature (1)..(460): Homolog of NCBI NO: 15224454 NR Description: putative serine carboxypeptidase II; protein id: [Arabidopsis thaliana] >gi|25289797|pir||D84503 probable serine
  misc_feature (1)..(288): Homolog of NCBI NO: 28393789 NR Description: putative serine carboxypeptidase II [Arabidopsis
  misc_feature (272)..(460): Homolog of NCBI NO: 28393789 NR Description: putative serine carboxypeptidase II [Arabidopsis
  misc_feature (1)..(460): Homolog of NCBI NO: 15238328 NR Description: serine carboxypeptidase II-like; protein id:
  misc_feature (1)..(454): Homolog of NCBI NO: 15238327 NR Description: serine carboxypeptidase-II like; protein id:
  misc_feature (1)..(451): Homolog of NCBI NO: 15218514 NR Description: serine carboxypeptidase II, putative; protein id:
  misc_feature (2)..(451): Homolog of NCBI NO: 30685740 NR Description: serine carboxypeptidase -related [Arabidopsis >gi|18377727|gb|AAL67013.1| putative serine carboxypeptidase II
  misc_feature (2)..(451): Homolog of NCBI NO: 25289793 NR Description: probable serine carboxypeptidase II [imported] - thaliana >gi|2459435|gb|AAB80670.1| putative serine
  misc_feature (22)..(451): Homolog of NCBI NO: 18396647 NR Description: serine carboxypeptidase II, putative; protein id: supported by cDNA: gi_16648968 [Arabidopsis thaliana]
  misc_feature (22)..(451): Homolog of NCBI NO: 25289785 NR Description: probable serine carboxypeptidase II [imported] - thaliana >gi|12322985|gb|AAG51475.1|AC069471_6 serine

SEQ ID NO: 95536 - protein, 457 aa, Arabidopsis thaliana; identical to SEQ ID NO: 91780
  peptide (1)..(457): Ceres Seq. ID no. 12729412
  misc_feature (25)..(442): Pfam Name: Serine carboxypeptidase Pfam Description: Serine carboxypeptidase
  misc_feature (1)..(457): Homolog of NCBI NO: 15224454 NR Description: putative serine carboxypeptidase II; protein id: [Arabidopsis thaliana] >gi|25289797|pir||D84503 probable serine
  misc_feature (1)..(285): Homolog of NCBI NO: 28393789 NR Description: putative serine carboxypeptidase II [Arabidopsis
  misc_feature (269)..(457): Homolog of NCBI NO: 28393789 NR Description: putative serine carboxypeptidase II [Arabidopsis
  misc_feature (1)..(457): Homolog of NCBI NO: 15238328 NR Description: serine carboxypeptidase II-like; protein id:
  misc_feature (1)..(451): Homolog of NCBI NO: 15238327 NR Description: serine carboxypeptidase-II like; protein id:
  misc_feature (1)..(448): Homolog of NCBI NO: 15218514 NR Description: serine carboxypeptidase II, putative; protein id:
  misc_feature (1)..(448): Homolog of NCBI NO: 30685740 NR Description: serine carboxypeptidase -related [Arabidopsis >gi|18377727|gb|AAL67013.1| putative serine carboxypeptidase II
  misc_feature (1)..(448): Homolog of NCBI NO: 25289793 NR Description: probable serine carboxypeptidase II [imported] - thaliana >gi|2459435|gb|AAB80670.1| putative serine
  misc_feature (19)..(448): Homolog of NCBI NO: 18396647 NR Description: serine carboxypeptidase II, putative; protein id: supported by cDNA: gi_16648968 [Arabidopsis thaliana]
  misc_feature (19)..(448): Homolog of NCBI NO: 25289785 NR Description: probable serine carboxypeptidase II [imported] - thaliana >gi|12322985|gb|AAG51475.1|AC069471_6 serine

SEQ ID NO: 95537 - DNA, 1455 bp, Arabidopsis thaliana; identical to SEQ ID NO: 91781
  misc_feature (1)..(1455): Ceres Seq. ID no. 12729515
  misc_feature: MA Experiment ID: 20000328 Result: Down-regulated in Transcription
  misc_feature: MA Experiment 20000328 PARAMETER Experiment Name: At_42deg_Heat_Sub_P Parameter: Age (day) Value: 14
  misc_feature: MA Experiment 20000328 PARAMETER Experiment Name: At_42deg_Heat_Sub_P Parameter: Organism Value: A. thaliana
  misc_feature: MA Experiment 20000328 PARAMETER Experiment Name: At_42deg_Heat_Sub_P Parameter: Plant Line Value: WS
  misc_feature: MA Experiment 20000328 PARAMETER Experiment Name: At_42deg_Heat_Sub_P Parameter: Temperature (deg C) Value: 42 vs. 22
  misc_feature: MA Experiment 20000328 PARAMETER Experiment Name: At_42deg_Heat_Sub_P Parameter: Timepoint (hr) Value: 6
  misc_feature: MA Experiment 20000328 PARAMETER Experiment Name: At_42deg_Heat_Sub_P Parameter: Tissue Value: Aerial
  misc_feature: MA Experiment ID: 20000346 Result: Up-regulated in Transcription
  misc_feature: MA Experiment 20000346 PARAMETER Experiment Name: At_2mM_SA_Sub_P Parameter: Age (day) Value: 14
  misc_feature: MA Experiment 20000346 PARAMETER Experiment Name: At_2mM_SA_Sub_P Parameter: Organism Value: A. thaliana
  misc_feature: MA Experiment 20000346 PARAMETER Experiment Name: At_2mM_SA_Sub_P Parameter: Plant Line Value: WS
  misc_feature: MA Experiment 20000346 PARAMETER Experiment Name: At_2mM_SA_Sub_P Parameter: Timepoint (hr) Value: 1
  misc_feature: MA Experiment 20000346 PARAMETER Experiment Name: At_2mM_SA_Sub_P Parameter: Tissue Value: Aerial
  misc_feature: MA Experiment 20000346 PARAMETER Experiment Name: At_2mM_SA_Sub_P Parameter: Treatment Value: 2mM SA vs. No Treatment
  misc_feature: MA Experiment ID: 20000347 Result: Up-regulated in Transcription
  misc_feature: MA Experiment 20000347 PARAMETER Experiment Name: At_2mM_SA_Sub_P Parameter: Age (day) Value: 14
  misc_feature: MA Experiment 20000347 PARAMETER Experiment Name: At_2mM_SA_Sub_P Parameter: Organism Value: A. thaliana
  misc_feature: MA Experiment 20000347 PARAMETER Experiment Name: At_2mM_SA_Sub_P Parameter: Plant Line Value: WS
  misc_feature: MA Experiment 20000347 PARAMETER Experiment Name: At_2mM_SA_Sub_P Parameter: Timepoint (hr) Value: 6
  misc_feature: MA Experiment 20000347 PARAMETER Experiment Name: At_2mM_SA_Sub_P Parameter: Tissue Value: Aerial
  misc_feature: MA Experiment 20000347 PARAMETER Experiment Name: At_2mM_SA_Sub_P Parameter: Treatment Value: 2mM SA vs. No Treatment
  misc_feature: MA Experiment ID: 20000355 Result: Down-regulated in Transcription
  misc_feature: MA Experiment 20000355 PARAMETER Experiment Name: At_Siliques_Sub_P Parameter: Age (day) Value: 21
  misc_feature: MA Experiment 20000355 PARAMETER Experiment Name: At_Siliques_Sub_P Parameter: Organism Value: A. thaliana
  misc_feature: MA Experiment 20000355 PARAMETER Experiment Name: At_Siliques_Sub_P Parameter: Plant Line Value: WS
  misc_feature: MA Experiment 20000355 PARAMETER Experiment Name: At_Siliques_Sub_P Parameter: Tissue Value: Less Than 5mm Siliques vs. Whole Plant
  misc_feature: MA Experiment ID: 20000440 Result: Down-regulated in Transcription
  misc_feature: MA Experiment 20000440 PARAMETER Experiment Name: At_Closed-Flower__Sub_P Parameter: Tissue Value: Closed Flower vs. Whole Plant

SEQ ID NO: 95538 - protein, 484 aa, Arabidopsis thaliana; identical to SEQ ID NO: 91782
  peptide (1)..(484): Ceres Seq. ID no. 12729516
  misc_feature (1)..(484): Homolog of NCBI NO: 22325667 NR Description: putative receptor-like protein kinase; protein At2g13800.1, supported by cDNA: gi_20453087 [Arabidopsis >gi|20453088|gb|AAM19787.1| At2g13800/F13J11.15 [Arabidopsis
  misc_feature (1)..(484): Homolog of NCBI NO: 30678986 NR Description: leucine-rich repeat protein kinase family thaliana] >gi|15810409|gb|AAL07092.1| unknown protein
  misc_feature (1)..(484): Homolog of NCBI NO: 25411516 NR Description: probable receptor-like protein kinase [imported] -
  misc_feature (2)..(484): Homolog of NCBI NO: 14573459 NR Description: somatic embryogenesis receptor-like kinase 3
  misc_feature (2)..(484): Homolog of NCBI NO: 18418211 NR Description: somatic embryogenesis receptor-like kinase -like protein id: At4g33430.1, supported by cDNA: gi_14573458
  misc_feature (30)..(484): Homolog of NCBI NO: 25411517 NR Description: probable receptor-like protein kinase [imported] -
  misc_feature (30)..(484): Homolog of NCBI NO: 7488244 NR Description: protein kinase homolog F17M5.190 - Arabidopsis
  misc_feature (3)..(484): Homolog of NCBI NO: 25406123 NR Description: hypothetical protein F14O23.21 [imported] - thaliana >gi|7239510|gb|AAF43236.1|AC012654_20 Contains
  misc_feature (6)..(484): Homolog of NCBI NO: 24935324 NR Description: somatic embryogenesis receptor kinase 1 [Medicago >gi|24935326|gb|AAN64294.1| somatic embryogenesis receptor kinase
  misc_feature (6)..(484): Homolog of NCBI NO: 7488932 NR Description: probable somatic embryogenesis receptor-like

SEQ ID NO: 95539 - protein, 409 aa, Arabidopsis thaliana; identical to SEQ ID NO: 91783
  peptide (1)..(409): Ceres Seq. ID no. 12729517
  misc_feature (1)..(409): Homolog of NCBI NO: 22325667 NR Description: putative receptor-like protein kinase; protein At2g13800.1, supported by cDNA: gi_20453087 [Arabidopsis >gi|20453088|gb|AAM19787.1| At2g13800/F13J11.15 [Arabidopsis
  misc_feature (1)..(409): Homolog of NCBI NO: 30678986 NR Description: leucine-rich repeat protein kinase family thaliana] >gi|15810409|gb|AAL07092.1| unknown protein
  misc_feature (1)..(409): Homolog of NCBI NO: 25411516 NR Description: probable receptor-like protein kinase [imported] -
  misc_feature (1)..(409): Homolog of NCBI NO: 14573459 NR Description: somatic embryogenesis receptor-like kinase 3
  misc_feature (1)..(409): Homolog of NCBI NO: 18418211 NR Description: somatic embryogenesis receptor-like kinase -like protein id: At4g33430.1, supported by cDNA: gi_14573458
  misc_feature (1)..(409): Homolog of NCBI NO: 25411517 NR Description: probable receptor-like protein kinase [imported] -
  misc_feature (1)..(409): Homolog of NCBI NO: 7488244 NR Description: protein kinase homolog F17M5.190 - Arabidopsis
  misc_feature (1)..(409): Homolog of NCBI NO: 25406123 NR Description: hypothetical protein F14O23.21 [imported] - thaliana >gi|7239510|gb|AAF43236.1|AC012654_20 Contains
  misc_feature (1)..(409): Homolog of NCBI NO: 24935324 NR Description: somatic embryogenesis receptor kinase 1 [Medicago >gi|24935326|gb|AAN64294.1| somatic embryogenesis receptor kinase
  misc_feature (1)..(409): Homolog of NCBI NO: 7488932 NR Description: probable somatic embryogenesis receptor-like

SEQ ID NO: 95540 - protein, 279 aa, Arabidopsis thaliana; identical to SEQ ID NO: 91784
  peptide (1)..(279): Ceres Seq. ID no. 12729518
  misc_feature (1)..(279): Homolog of NCBI NO: 22325667 NR Description: putative receptor-like protein kinase; protein At2g13800.1, supported by cDNA: gi_20453087 [Arabidopsis >gi|20453088|gb|AAM19787.1| At2g13800/F13J11.15 [Arabidopsis
  misc_feature (1)..(279): Homolog of NCBI NO: 30678986 NR Description: leucine-rich repeat protein kinase family thaliana] >gi|15810409|gb|AAL07092.1| unknown protein
  misc_feature (1)..(279): Homolog of NCBI NO: 25411516 NR Description: probable receptor-like protein kinase [imported] -
  misc_feature (1)..(279): Homolog of NCBI NO: 14573459 NR Description: somatic embryogenesis receptor-like kinase 3
  misc_feature (1)..(279): Homolog of NCBI NO: 18418211 NR Description: somatic embryogenesis receptor-like kinase -like protein id: At4g33430.1, supported by cDNA: gi_14573458
  misc_feature (1)..(279): Homolog of NCBI NO: 25411517 NR Description: probable receptor-like protein kinase [imported] -
  misc_feature (1)..(279): Homolog of NCBI NO: 7488244 NR Description: protein kinase homolog F17M5.190 - Arabidopsis
  misc_feature (1)..(279): Homolog of NCBI NO: 25406123 NR Description: hypothetical protein F14O23.21 [imported] - thaliana >gi|7239510|gb|AAF43236.1|AC012654_20 Contains
  misc_feature (1)..(279): Homolog of NCBI NO: 24935324 NR Description: somatic embryogenesis receptor kinase 1 [Medicago >gi|24935326|gb|AAN64294.1| somatic embryogenesis receptor kinase
  misc_feature (1)..(279): Homolog of NCBI NO: 7488932 NR Description: probable somatic embryogenesis receptor-like

SEQ ID NO: 95541 - DNA, 1080 bp, Arabidopsis thaliana; identical to SEQ ID NO: 91785
  misc_feature (1)..(1080): Ceres Seq. ID no. 12729529
  misc_feature: MA Experiment ID: 20000437 Result: Up-regulated in Transcription
  misc_feature: MA Experiment 20000437 PARAMETER Experiment Name: At_Drought_P Parameter: Age (day) Value: 8
  misc_feature: MA Experiment 20000437 PARAMETER Experiment Name: At_Drought_P Parameter: Organism Value: A. thaliana
  misc_feature: MA Experiment 20000437 PARAMETER Experiment Name: At_Drought_P Parameter: Plant Line Value: WS
  misc_feature: MA Experiment 20000437 PARAMETER Experiment Name: At_Drought_P Parameter: Timepoint (hr) Value: 24
  misc_feature: MA Experiment 20000437 PARAMETER Experiment Name: At_Drought_P Parameter: Tissue Value: Whole Plant
  misc_feature: MA Experiment 20000437 PARAMETER Experiment Name: At_Drought_P Parameter: Treatment Value: Drought vs. No Drought

SEQ ID NO: 95542 - protein, 359 aa, Arabidopsis thaliana; identical to SEQ ID NO: 88264
  peptide (1)..(359): Ceres Seq. ID no. 12729530
  misc_feature (28)..(359): Pfam Name: SAM dependent carboxyl methyltransferase Pfam Description: SAM dependent carboxyl methyltransferase
  misc_feature (1)..(359): Homolog of NCBI NO: 15225569 NR Description: S-adenosyl-L-methionine:carboxyl family; protein id: At2g14060.1 [Arabidopsis thaliana]
  misc_feature (1)..(359): Homolog of NCBI NO: 8885604 NR Description: S-adenosyl-L-methionine:salicylic acid carboxyl
  misc_feature (1)..(359): Homolog of NCBI NO: 15240823 NR Description: S-adenosyl-L-methionine:carboxyl
  misc_feature (1)..(359): Homolog of NCBI NO: 9279749 NR Description: S-adenosyl-L-methionine:salicylic acid carboxyl
  misc_feature (29)..(359): Homolog of NCBI NO: 15233213 NR Description: S-adenosyl-L-methionine:carboxyl
  misc_feature (1)..(359): Homolog of NCBI NO: 15237695 NR Description: S-adenosyl-L-methionine:carboxyl
  misc_feature (1)..(359): Homolog of NCBI NO: 15237696 NR Description: S-adenosyl-L-methionine:carboxyl
  misc_feature (1)..(359): Homolog of NCBI NO: 15239970 NR Description: S-adenosyl-L-methionine:carboxyl
  misc_feature (1)..(359): Homolog of NCBI NO: 37904506 NR Description: methyl transferase [Arabidopsis lyrata subsp.
  misc_feature (1)..(359): Homolog of NCBI NO: 22330992 NR Description: S-adenosyl-L-methionine:carboxyl

SEQ ID NO: 95543 - protein, 325 aa, Arabidopsis thaliana; identical to SEQ ID NO: 88265
  peptide (1)..(325): Ceres Seq. ID no. 12729531
  misc_feature (1)..(325): Pfam Name: SAM dependent carboxyl methyltransferase Pfam Description: SAM dependent carboxyl methyltransferase
  misc_feature (1)..(325): Homolog of NCBI NO: 15225569 NR Description: S-adenosyl-L-methionine:carboxyl family; protein id: At2g14060.1 [Arabidopsis thaliana]
  misc_feature (1)..(325): Homolog of NCBI NO: 8885604 NR Description: S-adenosyl-L-methionine:salicylic acid carboxyl
  misc_feature (1)..(325): Homolog of NCBI NO: 15240823 NR Description: S-adenosyl-L-methionine:carboxyl
  misc_feature (1)..(325): Homolog of NCBI NO: 9279749 NR Description: S-adenosyl-L-methionine:salicylic acid carboxyl
  misc_feature (1)..(325): Homolog of NCBI NO: 15233213 NR Description: S-adenosyl-L-methionine:carboxyl
  misc_feature (1)..(325): Homolog of NCBI NO: 15237695 NR Description: S-adenosyl-L-methionine:carboxyl
  misc_feature (1)..(325): Homolog of NCBI NO: 15237696 NR Description: S-adenosyl-L-methionine:carboxyl
  misc_feature (1)..(325): Homolog of NCBI NO: 15239970 NR Description: S-adenosyl-L-methionine:carboxyl
  misc_feature (1)..(325): Homolog of NCBI NO: 37904506 NR Description: methyl transferase [Arabidopsis lyrata subsp.
  misc_feature (1)..(325): Homolog of NCBI NO: 22330992 NR Description: S-adenosyl-L-methionine:carboxyl

SEQ ID NO: 95544 - protein, 298 aa, Arabidopsis thaliana; identical to SEQ ID NO: 91788
  peptide (1)..(298): Ceres Seq. ID no. 12729532
  misc_feature (1)..(298): Pfam Name: SAM dependent carboxyl methyltransferase Pfam Description: SAM dependent carboxyl methyltransferase
  misc_feature (1)..(298): Homolog of NCBI NO: 15225569 NR Description: S-adenosyl-L-methionine:carboxyl family; protein id: At2g14060.1 [Arabidopsis thaliana]
  misc_feature (1)..(298): Homolog of NCBI NO: 8885604 NR Description: S-adenosyl-L-methionine:salicylic acid carboxyl
  misc_feature (1)..(298): Homolog of NCBI NO: 15240823 NR Description: S-adenosyl-L-methionine:carboxyl
  misc_feature (1)..(298): Homolog of NCBI NO: 9279749 NR Description: S-adenosyl-L-methionine:salicylic acid carboxyl
  misc_feature (1)..(298): Homolog of NCBI NO: 15233213 NR Description: S-adenosyl-L-methionine:carboxyl
  misc_feature (1)..(298): Homolog of NCBI NO: 15237695 NR Description: S-adenosyl-L-methionine:carboxyl
  misc_feature (1)..(298): Homolog of NCBI NO: 15237696 NR Description: S-adenosyl-L-methionine:carboxyl
  misc_feature (1)..(298): Homolog of NCBI NO: 15239970 NR Description: S-adenosyl-L-methionine:carboxyl
  misc_feature (1)..(298): Homolog of NCBI NO: 37904506 NR Description: methyl transferase [Arabidopsis lyrata subsp.
  misc_feature (1)..(298): Homolog of NCBI NO: 22330992 NR Description: S-adenosyl-L-methionine:carboxyl

SEQ ID NO: 95545 - DNA, 1557 bp, Arabidopsis thaliana; identical to SEQ ID NO: 91789
  misc_feature (1)..(1557): Ceres Seq. ID no. 12729533
  misc_feature: MA Experiment ID: 20000180 Result: Up-regulated in Transcription
  misc_feature: MA Experiment 20000180 PARAMETER Experiment Name: At_Germinating_Seeds_P Parameter: Age (hr) Value: 24 vs. 0
  misc_feature: MA Experiment 20000180 PARAMETER Experiment Name: At_Germinating_Seeds_P Parameter: Tissue Value: Germinating Seeds
  misc_feature: MA Experiment ID: 20000185 Result: Up-regulated in Transcription
  misc_feature: MA Experiment 20000185 PARAMETER Experiment Name: At_Roots__P Parameter: Age (day) Value: 7 vs. 21
  misc_feature: MA Experiment 20000185 PARAMETER Experiment Name: At_Roots__P Parameter: Organism Value: A. thaliana
  misc_feature: MA Experiment 20000185 PARAMETER Experiment Name: At_Roots__P Parameter: Tissue Value: Roots vs. Whole Plant
  misc_feature: MA Experiment ID: 20000451 Result: Down-regulated in Transcription
  misc_feature: MA Experiment 20000451 PARAMETER Experiment Name: At_CS6879_Shoots-Roots_P Parameter: Age (day) Value: 14
  misc_feature: MA Experiment 20000451 PARAMETER Experiment Name: At_CS6879_Shoots-Roots_P Parameter: Organism Value: A. thaliana
  misc_feature: MA Experiment 20000451 PARAMETER Experiment Name: At_CS6879_Shoots-Roots_P Parameter: Plant Line Value: CS6879 vs. WS
  misc_feature: MA Experiment 20000451 PARAMETER Experiment Name: At_CS6879_Shoots-Roots_P Parameter: Tissue Value: Roots

SEQ ID NO: 95546 - protein, 518 aa, Arabidopsis thaliana; identical to SEQ ID NO: 91790
  peptide (1)..(518): Ceres Seq. ID no. 12729534
  misc_feature (1)..(518): Homolog of NCBI NO: 15225585 NR Description: cytochrome p450 family; protein id: At2g14100.1
  misc_feature (1)..(509): Homolog of NCBI NO: 15231047 NR Description: cytochrome P450, putative; protein id: At3g20090.1
  misc_feature (17)..(507): Homolog of NCBI NO: 15231049 NR Description: cytochrome p450 family; protein id: At3g20100.1, by cDNA: 149380., supported by cDNA: gi_15215771 [Arabidopsis
  misc_feature (2)..(510): Homolog of NCBI NO: 15231053 NR Description: cytochrome p450 family; protein id: At3g20140.1
  misc_feature (2)..(507): Homolog of NCBI NO: 9294003 NR Description: cytochrome P450-like protein [Arabidopsis
  misc_feature (17)..(507): Homolog of NCBI NO: 21553521 NR Description: cytochrome P450, putative [Arabidopsis thaliana]
  misc_feature (2)..(507): Homolog of NCBI NO: 15231052 NR Description: cytochrome p450 family; protein id: At3g20130.1
  misc_feature (17)..(507): Homolog of NCBI NO: 15233774 NR Description: cytochrome p450 family; protein id: At4g15350.1
  misc_feature (17)..(507): Homolog of NCBI NO: 9293969 NR Description: cytochrome P450-like protein [Arabidopsis
  misc_feature (1)..(514): Homolog of NCBI NO: 18402480 NR Description: cytochrome P450, putative; protein id: supported by cDNA: 147792. [Arabidopsis thaliana]

SEQ ID NO: 95547 - protein, 390 aa, Arabidopsis thaliana; identical to SEQ ID NO: 91791
  peptide (1)..(390): Ceres Seq. ID no. 12729535
  misc_feature (1)..(390): Homolog of NCBI NO: 15225585 NR Description: cytochrome p450 family; protein id: At2g14100.1
  misc_feature (1)..(381): Homolog of NCBI NO: 15231047 NR Description: cytochrome P450, putative; protein id: At3g20090.1
  misc_feature (1)..(379): Homolog of NCBI NO: 15231049 NR Description: cytochrome p450 family; protein id: At3g20100.1, by cDNA: 149380., supported by cDNA: gi_15215771 [Arabidopsis
  misc_feature (1)..(382): Homolog of NCBI NO: 15231053 NR Description: cytochrome p450 family; protein id: At3g20140.1
  misc_feature (1)..(379): Homolog of NCBI NO: 9294003 NR Description: cytochrome P450-like protein [Arabidopsis
  misc_feature (1)..(379): Homolog of NCBI NO: 21553521 NR Description: cytochrome P450, putative [Arabidopsis thaliana]
  misc_feature (1)..(379): Homolog of NCBI NO: 15231052 NR Description: cytochrome p450 family; protein id: At3g20130.1
  misc_feature (1)..(379): Homolog of NCBI NO: 15233774 NR Description: cytochrome p450 family; protein id: At4g15350.1
  misc_feature (1)..(379): Homolog of NCBI NO: 9293969 NR Description: cytochrome P450-like protein [Arabidopsis
  misc_feature (1)..(386): Homolog of NCBI NO: 18402480 NR Description: cytochrome P450, putative; protein id: supported by cDNA: 147792. [Arabidopsis thaliana]

SEQ ID NO: 95548 - protein, 380 aa, Arabidopsis thaliana; identical to SEQ ID NO: 91792
  peptide (1)..(380): Ceres Seq. ID no. 12729536
  misc_feature (1)..(380): Homolog of NCBI NO: 15225585 NR Description: cytochrome p450 family; protein id: At2g14100.1
  misc_feature (1)..(371): Homolog of NCBI NO: 15231047 NR Description: cytochrome P450, putative; protein id: At3g20090.1
  misc_feature (1)..(369): Homolog of NCBI NO: 15231049 NR Description: cytochrome p450 family; protein id: At3g20100.1, by cDNA: 149380., supported by cDNA: gi_15215771 [Arabidopsis
  misc_feature (1)..(372): Homolog of NCBI NO: 15231053 NR Description: cytochrome p450 family; protein id: At3g20140.1
  misc_feature (1)..(369): Homolog of NCBI NO: 9294003 NR Description: cytochrome P450-like protein [Arabidopsis
  misc_feature (1)..(369): Homolog of NCBI NO: 21553521 NR Description: cytochrome P450, putative [Arabidopsis thaliana]
  misc_feature (1)..(369): Homolog of NCBI NO: 15231052 NR Description: cytochrome p450 family; protein id: At3g20130.1
  misc_feature (1)..(369): Homolog of NCBI NO: 15233774 NR Description: cytochrome p450 family; protein id: At4g15350.1
  misc_feature (1)..(369): Homolog of NCBI NO: 9293969 NR Description: cytochrome P450-like protein [Arabidopsis
  misc_feature (1)..(376): Homolog of NCBI NO: 18402480 NR Description: cytochrome P450, putative; protein id: supported by cDNA: 147792. [Arabidopsis thaliana]

SEQ ID NO: 95549 - DNA, 1075 bp, Arabidopsis thaliana; identical to SEQ ID NO: 91793
  misc_feature (1)..(1075): Ceres Seq. ID no. 12729537
  misc_feature: MA Experiment ID: 20000451 Result: Down-regulated in Transcription
  misc_feature: MA Experiment 20000451 PARAMETER Experiment Name: At_CS6879_Shoots-Roots_P Parameter: Age (day) Value: 14
  misc_feature: MA Experiment 20000451 PARAMETER Experiment Name: At_CS6879_Shoots-Roots_P Parameter: Organism Value: A. thaliana
  misc_feature: MA Experiment 20000451 PARAMETER Experiment Name: At_CS6879_Shoots-Roots_P Parameter: Plant Line Value: CS6879 vs. WS
  misc_feature: MA Experiment 20000451 PARAMETER Experiment Name: At_CS6879_Shoots-Roots_P Parameter: Tissue Value: Roots
  misc_feature: MA Experiment ID: 20001757 Result: Down-regulated in Transcription
  misc_feature: MA Experiment 20001757 PARAMETER Experiment Name: At_50mM_NH4NO3_L-to-H_P Parameter: Timepoint (hr) Value: 6
  misc_feature: MA Experiment 20001757 PARAMETER Experiment Name: At_50mM_NH4NO3_L-to-H_P Parameter: Tissue Value: Leaf
  misc_feature: MA Experiment 20001757 PARAMETER Experiment Name: At_50mM_NH4NO3_L-to-H_P Parameter: Treatment Value: 50mM NH4NO3 vs 100mM Mannitol

SEQ ID NO: 95550 - protein, 234 aa, Arabidopsis thaliana; identical to SEQ ID NO: 91794
  peptide (1)..(234): Ceres Seq. ID no. 12729538
  misc_feature (75)..(173): Pfam Name: K-box region Pfam Description: K-box region
  misc_feature (1)..(234): Homolog of NCBI NO: 15225607 NR Description: MADS-box protein ANR1; protein id: At2g14210.1
  misc_feature (1)..(234): Homolog of NCBI NO: 25307925 NR Description: MADS-box transcription factor ANR1 [validated] -
  misc_feature (1)..(226): Homolog of NCBI NO: 7489303 NR Description: MADS-box transcription factor DEFH125 - garden
  misc_feature (1)..(233): Homolog of NCBI NO: 34452085 NR Description: MADS-box protein 14 [Petunia x hybrida]
  misc_feature (1)..(234): Homolog of NCBI NO: 30313677 NR Description: transcription factor MADS27 [Oryza sativa
  misc_feature (1)..(233): Homolog of NCBI NO: 29611976 NR Description: MADS-box transcription factor MADS2 [Zea mays]
  misc_feature (1)..(233): Homolog of NCBI NO: 9964296 NR Description: MADS box protein 2 [Zea mays]
  misc_feature (1)..(215): Homolog of NCBI NO: 38344968 NR Description: OSJNBa0072F16.13 [Oryza sativa (japonica
  misc_feature (1)..(190): Homolog of NCBI NO: 15235748 NR Description: MADS-box protein; protein id: At4g37940.1, by cDNA: gi_18478602 [Arabidopsis thaliana]
  misc_feature (1)..(217): Homolog of NCBI NO: 15227254 NR Description: MADS-box protein AGL17; protein id: At2g22630.1

SEQ ID NO: 95551 - protein, 172 aa, Arabidopsis thaliana; identical to SEQ ID NO: 91795
  peptide (1)..(172): Ceres Seq. ID no. 12729539
  misc_feature (13)..(111): Pfam Name: K-box region Pfam Description: K-box region
  misc_feature (1)..(172): Homolog of NCBI NO: 15225607 NR Description: MADS-box protein ANR1; protein id: At2g14210.1
  misc_feature (1)..(172): Homolog of NCBI NO: 25307925 NR Description: MADS-box transcription factor ANR1 [validated] -
  misc_feature (1)..(164): Homolog of NCBI NO: 7489303 NR Description: MADS-box transcription factor DEFH125 - garden
  misc_feature (1)..(171): Homolog of NCBI NO: 34452085 NR Description: MADS-box protein 14 [Petunia x hybrida]
  misc_feature (1)..(172): Homolog of NCBI NO: 30313677 NR Description: transcription factor MADS27 [Oryza sativa
  misc_feature (1)..(171): Homolog of NCBI NO: 29611976 NR Description: MADS-box transcription factor MADS2 [Zea mays]
  misc_feature (1)..(171): Homolog of NCBI NO: 9964296 NR Description: MADS box protein 2 [Zea mays]
  misc_feature (1)..(153): Homolog of NCBI NO: 38344968 NR Description: OSJNBa0072F16.13 [Oryza sativa (japonica
  misc_feature (1)..(128): Homolog of NCBI NO: 15235748 NR Description: MADS-box protein; protein id: At4g37940.1, by cDNA: gi_18478602 [Arabidopsis thaliana]
  misc_feature (1)..(155): Homolog of NCBI NO: 15227254 NR Description: MADS-box protein AGL17; protein id: At2g22630.1

SEQ ID NO: 95552 - DNA, 1912 bp, Arabidopsis thaliana; identical to SEQ ID NO: 91796
  misc_feature (1)..(1912): Ceres Seq. ID no. 12729562
  misc_feature: MA Experiment ID: 20000332 Result: Up-regulated in Transcription
  misc_feature: MA Experiment 20000332 PARAMETER Experiment Name: At_4deg_Cold_Sub_P Parameter: Age (day) Value: 14
  misc_feature: MA Experiment 20000332 PARAMETER Experiment Name: At_4deg_Cold_Sub_P Parameter: Organism Value: A. thaliana
  misc_feature: MA Experiment 20000332 PARAMETER Experiment Name: At_4deg_Cold_Sub_P Parameter: Plant Line Value: WS
  misc_feature: MA Experiment 20000332 PARAMETER Experiment Name: At_4deg_Cold_Sub_P Parameter: Temperature (deg C) Value: 4 vs. 22
  misc_feature: MA Experiment 20000332 PARAMETER Experiment Name: At_4deg_Cold_Sub_P Parameter: Timepoint (hr) Value: 2
  misc_feature: MA Experiment 20000332 PARAMETER Experiment Name: At_4deg_Cold_Sub_P Parameter: Tissue Value: Aerial
  misc_feature: MA Experiment ID: 20001806 Result: Up-regulated in Transcription
  misc_feature: MA Experiment 20001806 PARAMETER Experiment Name: At_50mM_NH4NO3_L-to-H_Sub_P Parameter: Timepoint (hr) Value: 4
  misc_feature: MA Experiment 20001806 PARAMETER Experiment Name: At_50mM_NH4NO3_L-to-H_Sub_P Parameter: Tissue Value: Leaf
  misc_feature: MA Experiment 20001806 PARAMETER Experiment Name: At_50mM_NH4NO3_L-to-H_Sub_P Parameter: Treatment Value: 50mM NH4NO3 vs 100mM Mannitol

SEQ ID NO: 95553 - protein, 488 aa, Arabidopsis thaliana; identical to SEQ ID NO: 91797
  peptide (1)..(488): Ceres Seq. ID no. 12729563
  misc_feature (52)..(228): Pfam Name: Sugar (and other) transporter Pfam Description: Sugar (and other) transporter
  misc_feature (1)..(488): Homolog of NCBI NO: 15223557 NR Description: integral membrane protein, putative; protein id: supported by cDNA: gi_16648956, supported by cDNA: gi_20259851 thaliana] >gi|16648957|gb|AAL24330.1| similar to integral
  misc_feature (220)..(488): Homolog of NCBI NO: 8778437 NR Description: F18O14.22 [Arabidopsis thaliana]
  misc_feature (1)..(228): Homolog of NCBI NO: 8778437 NR Description: F18O14.22 [Arabidopsis thaliana]
  misc_feature (1)..(488): Homolog of NCBI NO: 15222158 NR Description: integral membrane protein, putative; protein id:
  misc_feature (11)..(488): Homolog of NCBI NO: 7446725 NR Description: probable sugar transporter protein - beet
  misc_feature (1)..(488): Homolog of NCBI NO: 5091611 NR Description: Similar to gb|U43629 integral membrane protein Beta vulgaris and is a member of the sugar transporter family
  misc_feature (44)..(486): Homolog of NCBI NO: 21536914 NR Description: putative sugar transporter [Arabidopsis thaliana]
  misc_feature (44)..(486): Homolog of NCBI NO: 18407508 NR Description: putative sugar transporter; protein id: supported by cDNA: 114959. [Arabidopsis thaliana]
  misc_feature (49)..(485): Homolog of NCBI NO: 23504385 NR Description: putative sugar transporter [Lycopersicon
  misc_feature (43)..(484): Homolog of NCBI NO: 30695810 NR Description: sugar transporter, putative [Arabidopsis thaliana]

SEQ ID NO: 95554 - protein, 461 aa, Arabidopsis thaliana; identical to SEQ ID NO: 91798
  peptide (1)..(461): Ceres Seq. ID no. 12729564
  misc_feature (25)..(201): Pfam Name: Sugar (and other) transporter Pfam Description: Sugar (and other) transporter
  misc_feature (1)..(461): Homolog of NCBI NO: 15223557 NR Description: integral membrane protein, putative; protein id: supported by cDNA: gi_16648956, supported by cDNA: gi_20259851 thaliana] >gi|16648957|gb|AAL24330.1| similar to integral
  misc_feature (193)..(461): Homolog of NCBI NO: 8778437 NR Description: F18O14.22 [Arabidopsis thaliana]
  misc_feature (1)..(201): Homolog of NCBI NO: 8778437 NR Description: F18O14.22 [Arabidopsis thaliana]
  misc_feature (1)..(461): Homolog of NCBI NO: 15222158 NR Description: integral membrane protein, putative; protein id:
  misc_feature (1)..(461): Homolog of NCBI NO: 7446725 NR Description: probable sugar transporter protein - beet
  misc_feature (1)..(461): Homolog of NCBI NO: 5091611 NR Description: Similar to gb|U43629 integral membrane protein Beta vulgaris and is a member of the sugar transporter family
  misc_feature (17)..(459): Homolog of NCBI NO: 21536914 NR Description: putative sugar transporter [Arabidopsis thaliana]
  misc_feature (17)..(459): Homolog of NCBI NO: 18407508 NR Description: putative sugar transporter; protein id: supported by cDNA: 114959. [Arabidopsis thaliana]
  misc_feature (22)..(458): Homolog of NCBI NO: 23504385 NR Description: putative sugar transporter [Lycopersicon
  misc_feature (16)..(457): Homolog of NCBI NO: 30695810 NR Description: sugar transporter, putative [Arabidopsis thaliana]

SEQ ID NO: 95555 - protein, 454 aa, Arabidopsis thaliana; identical to SEQ ID NO: 91799
  peptide (1)..(454): Ceres Seq. ID no. 12729565
  misc_feature (18)..(194): Pfam Name: Sugar (and other) transporter Pfam Description: Sugar (and other) transporter
  misc_feature (1)..(454): Homolog of NCBI NO: 15223557 NR Description: integral membrane protein, putative; protein id: supported by cDNA: gi_16648956, supported by cDNA: gi_20259851 thaliana] >gi|16648957|gb|AAL24330.1| similar to integral
  misc_feature (186)..(454): Homolog of NCBI NO: 8778437 NR Description: F18O14.22 [Arabidopsis thaliana]
  misc_feature (1)..(194): Homolog of NCBI NO: 8778437 NR Description: F18O14.22 [Arabidopsis thaliana]
  misc_feature (1)..(454): Homolog of NCBI NO: 15222158 NR Description: integral membrane protein, putative; protein id:
  misc_feature (1)..(454): Homolog of NCBI NO: 7446725 NR Description: probable sugar transporter protein - beet
  misc_feature (1)..(454): Homolog of NCBI NO: 5091611 NR Description: Similar to gb|U43629 integral membrane protein Beta vulgaris and is a member of the sugar transporter family
  misc_feature (10)..(452): Homolog of NCBI NO: 21536914 NR Description: putative sugar transporter [Arabidopsis thaliana]
  misc_feature (10)..(452): Homolog of NCBI NO: 18407508 NR Description: putative sugar transporter; protein id: supported by cDNA: 114959. [Arabidopsis thaliana]
  misc_feature (15)..(451): Homolog of NCBI NO: 23504385 NR Description: putative sugar transporter [Lycopersicon
  misc_feature (9)..(450): Homolog of NCBI NO: 30695810 NR Description: sugar transporter, putative [Arabidopsis thaliana]

SEQ ID NO: 95556 - DNA, 975 bp, Arabidopsis thaliana; identical to SEQ ID NO: 91800
  misc_feature (1)..(975): Ceres Seq. ID no. 12729589
  misc_feature: MA Experiment ID: 20000307 Result: Up-regulated in Transcription
  misc_feature: MA Experiment 20000307 PARAMETER Experiment Name: At_Germinating_Seeds_Sub_P Parameter: Age (hr) Value: 24 vs. 0
  misc_feature: MA Experiment 20000307 PARAMETER Experiment Name: At_Germinating_Seeds_Sub_P Parameter: Organism Value: A. thaliana
  misc_feature: MA Experiment 20000307 PARAMETER Experiment Name: At_Germinating_Seeds_Sub_P Parameter: Plant Line Value: WS
  misc_feature: MA Experiment 20000307 PARAMETER Experiment Name: At_Germinating_Seeds_Sub_P Parameter: Tissue Value: Germinating Seeds
  misc_feature: MA Experiment ID: 20000314 Result: Down-regulated in Transcription
  misc_feature: MA Experiment 20000314 PARAMETER Experiment Name: At_14day_Shoots-Roots_Sub_P Parameter: Age (day) Value: 14
  misc_feature: MA Experiment 20000314 PARAMETER Experiment Name: At_14day_Shoots-Roots_Sub_P Parameter: Organism Value: A. thaliana
  misc_feature: MA Experiment 20000314 PARAMETER Experiment Name: At_14day_Shoots-Roots_Sub_P Parameter: Plant Line Value: WS
  misc_feature: MA Experiment 20000314 PARAMETER Experiment Name: At_14day_Shoots-Roots_Sub_P Parameter: Tissue Value: Roots vs. Whole Plant
  misc_feature: MA Experiment ID: 20000315 Result: Down-regulated in Transcription
  misc_feature: MA Experiment 20000315 PARAMETER Experiment Name: At_14day_Shoots-Roots_Sub_P Parameter: Age (day) Value: 14
  misc_feature: MA Experiment 20000315 PARAMETER Experiment Name: At_14day_Shoots-Roots_Sub_P Parameter: Organism Value: A. thaliana
  misc_feature: MA Experiment 20000315 PARAMETER Experiment Name: At_14day_Shoots-Roots_Sub_P Parameter: Plant Line Value: WS
  misc_feature: MA Experiment 20000315 PARAMETER Experiment Name: At_14day_Shoots-Roots_Sub_P Parameter: Tissue Value: Shoots vs. Whole Plant
  misc_feature: MA Experiment ID: 20000328 Result: Up-regulated in Transcription
  misc_feature: MA Experiment 20000328 PARAMETER Experiment Name: At_42deg_Heat_Sub_P Parameter: Age (day) Value: 14
  misc_feature: MA Experiment 20000328 PARAMETER Experiment Name: At_42deg_Heat_Sub_P Parameter: Organism Value: A. thaliana
  misc_feature: MA Experiment 20000328 PARAMETER Experiment Name: At_42deg_Heat_Sub_P Parameter: Plant Line Value: WS
  misc_feature: MA Experiment 20000328 PARAMETER Experiment Name: At_42deg_Heat_Sub_P Parameter: Temperature (deg C) Value: 42 vs. 22
  misc_feature: MA Experiment 20000328 PARAMETER Experiment Name: At_42deg_Heat_Sub_P Parameter: Timepoint (hr) Value: 6
  misc_feature: MA Experiment 20000328 PARAMETER Experiment Name: At_42deg_Heat_Sub_P Parameter: Tissue Value: Aerial
  misc_feature: MA Experiment ID: 20000332 Result: Up-regulated in Transcription
  misc_feature: MA Experiment 20000332 PARAMETER Experiment Name: At_4deg_Cold_Sub_P Parameter: Age (day) Value: 14
  misc_feature: MA Experiment 20000332 PARAMETER Experiment Name: At_4deg_Cold_Sub_P Parameter: Organism Value: A. thaliana
  misc_feature: MA Experiment 20000332 PARAMETER Experiment Name: At_4deg_Cold_Sub_P Parameter: Plant Line Value: WS
  misc_feature: MA Experiment 20000332 PARAMETER Experiment Name: At_4deg_Cold_Sub_P Parameter: Temperature (deg C) Value: 4 vs. 22
  misc_feature: MA Experiment 20000332 PARAMETER Experiment Name: At_4deg_Cold_Sub_P Parameter: Timepoint (hr) Value: 2
  misc_feature: MA Experiment 20000332 PARAMETER Experiment Name: At_4deg_Cold_Sub_P Parameter: Tissue Value: Aerial
  misc_feature: MA Experiment ID: 20000346 Result: Up-regulated in Transcription
  misc_feature: MA Experiment 20000346 PARAMETER Experiment Name: At_2mM_SA_Sub_P Parameter: Age (day) Value: 14
  misc_feature: MA Experiment 20000346 PARAMETER Experiment Name: At_2mM_SA_Sub_P Parameter: Organism Value: A. thaliana
  misc_feature: MA Experiment 20000346 PARAMETER Experiment Name: At_2mM_SA_Sub_P Parameter: Plant Line Value: WS
  misc_feature: MA Experiment 20000346 PARAMETER Experiment Name: At_2mM_SA_Sub_P Parameter: Timepoint (hr) Value: 1
  misc_feature: MA Experiment 20000346 PARAMETER Experiment Name: At_2mM_SA_Sub_P Parameter: Tissue Value: Aerial
  misc_feature: MA Experiment 20000346 PARAMETER Experiment Name: At_2mM_SA_Sub_P Parameter: Treatment Value: 2mM SA vs. No Treatment

SEQ ID NO: 95557 - protein, 324 aa, Arabidopsis thaliana; identical to SEQ ID NO: 91801
  peptide (1)..(324): Ceres Seq. ID no. 12729590
  misc_feature (17)..(324): Pfam Name: Isoflavone reductase Pfam Description: Isoflavone reductase
  misc_feature (15)..(324): Homolog of NCBI NO: 15223574 NR Description: isoflavone reductase homolog P3, putative;
  misc_feature (15)..(324): Homolog of NCBI NO: 8778426 NR Description: F18O14.30 [Arabidopsis thaliana]
  misc_feature (17)..(323): Homolog of NCBI NO: 18410820 NR Description: isoflavone reductase homolog P3; protein id: supported by cDNA: 11944., supported by cDNA: gi_17529217
  misc_feature (17)..(323): Homolog of NCBI NO: 25344798 NR Description: probable NADPH oxidoreductase, 14094-12769 - Arabidopsis thaliana >gi|10092264|gb|AAG12677.1|AC025814_1
  misc_feature (17)..(323): Homolog of NCBI NO: 15222190 NR Description: isoflavone reductase homolog P3, putative; id: At1g75290.1 [Arabidopsis thaliana] >gi|25344800|pir||D96783
  misc_feature (17)..(324): Homolog of NCBI NO: 10764491 NR Description: allergenic isoflavone reductase-like protein Bet
  misc_feature (17)..(324): Homolog of NCBI NO: 3243234 NR Description: isoflavone reductase related protein [Pyrus
  misc_feature (17)..(316): Homolog of NCBI NO: 4731376 NR Description: isoflavone reductase homolog Bet v 6.0101 [Betula
  misc_feature (17)..(324): Homolog of NCBI NO: 3114901 NR Description: phenylcoumaran benzylic ether reductase [Populus subsp. trichocarpa] >gi|3114905|emb|CAA06709.1| phenylcoumaran ether reductase [Populus balsamifera subsp. trichocarpa] [Populus
  misc_feature (17)..(323): Homolog of NCBI NO: 15222191 NR Description: isoflavone reductase homolog P3, putative; id: At1g75300.1 [Arabidopsis thaliana] >gi|25344801|pir||E96783

SEQ ID NO: 95558 - protein, 310 aa, Arabidopsis thaliana; identical to SEQ ID NO: 91802
  peptide (1)..(310): Ceres Seq. ID no. 12729591
  misc_feature (3)..(310): Pfam Name: Isoflavone reductase Pfam Description: Isoflavone reductase
  misc_feature (1)..(310): Homolog of NCBI NO: 15223574 NR Description: isoflavone reductase homolog P3, putative;
  misc_feature (1)..(310): Homolog of NCBI NO: 8778426 NR Description: F18O14.30 [Arabidopsis thaliana]
  misc_feature (3)..(309): Homolog of NCBI NO: 18410820 NR Description: isoflavone reductase homolog P3; protein id: supported by cDNA: 11944., supported by cDNA: gi_17529217
  misc_feature (3)..(309): Homolog of NCBI NO: 25344798 NR Description: probable NADPH oxidoreductase, 14094-12769 - Arabidopsis thaliana >gi|10092264|gb|AAG12677.1|AC025814_1
  misc_feature (3)..(309): Homolog of NCBI NO: 15222190 NR Description: isoflavone reductase homolog P3, putative; id: At1g75290.1 [Arabidopsis thaliana] >gi|25344800|pir||D96783
  misc_feature (3)..(310): Homolog of NCBI NO: 10764491 NR Description: allergenic isoflavone reductase-like protein Bet
  misc_feature (3)..(310): Homolog of NCBI NO: 3243234 NR Description: isoflavone reductase related protein [Pyrus
  misc_feature (3)..(302): Homolog of NCBI NO: 4731376 NR Description: isoflavone reductase homolog Bet v 6.0101 [Betula
  misc_feature (3)..(310): Homolog of NCBI NO: 3114901 NR Description: phenylcoumaran benzylic ether reductase [Populus subsp. trichocarpa] >gi|3114905|emb|CAA06709.1| phenylcoumaran ether reductase [Populus balsamifera subsp. trichocarpa] [Populus
  misc_feature (3)..(309): Homolog of NCBI NO: 15222191 NR Description: isoflavone reductase homolog P3, putative; id: At1g75300.1 [Arabidopsis thaliana] >gi|25344801|pir||E96783

SEQ ID NO: 95559 - DNA, 4474 bp, Arabidopsis thaliana; identical to SEQ ID NO: 91803
  misc_feature (1)..(4474): Ceres Seq. ID no. 12729600
  misc_feature: MA Experiment ID: 20000180 Result: Up-regulated in Transcription
  misc_feature: MA Experiment 20000180 PARAMETER Experiment Name: At_Germinating_Seeds_P Parameter: Age (hr) Value: 24 vs. 0
  misc_feature: MA Experiment 20000180 PARAMETER Experiment Name: At_Germinating_Seeds_P Parameter: Tissue Value: Germinating Seeds
  misc_feature: MA Experiment ID: 20000185 Result: Down-regulated in Transcription
  misc_feature: MA Experiment 20000185 PARAMETER Experiment Name: At_Roots__P Parameter: Age (day) Value: 7 vs. 21
  misc_feature: MA Experiment 20000185 PARAMETER Experiment Name: At_Roots__P Parameter: Organism Value: A. thaliana
  misc_feature: MA Experiment 20000185 PARAMETER Experiment Name: At_Roots__P Parameter: Tissue Value: Roots vs. Whole Plant
  misc_feature: MA Experiment ID: 20000227 Result: Down-regulated in Transcription
  misc_feature: MA Experiment 20000227 PARAMETER Experiment Name: At_Root-Tips-vs-Tops_P Parameter: Tissue Value: Root Tips vs. Root Tops
  misc_feature: MA Experiment ID: 20000438 Result: Up-regulated in Transcription
  misc_feature: MA Experiment 20000438 PARAMETER Experiment Name: At_Shoots__P Parameter: Age (day) Value: 14
  misc_feature: MA Experiment 20000438 PARAMETER Experiment Name: At_Shoots__P Parameter: Tissue Value: Shoots vs. Whole Plant
  misc_feature: MA Experiment ID: 20001248 Result: Down-regulated in Transcription
  misc_feature: MA Experiment 20001248 PARAMETER Experiment Name: At_Far-red-induction_P Parameter: Age (day) Value: 7
  misc_feature: MA Experiment 20001248 PARAMETER Experiment Name: At_Far-red-induction_P Parameter: Light Value: Far-red vs. White
  misc_feature: MA Experiment 20001248 PARAMETER Experiment Name: At_Far-red-induction_P Parameter: Organism Value: A. thaliana
  misc_feature: MA Experiment 20001248 PARAMETER Experiment Name: At_Far-red-induction_P Parameter: Plant Line Value: Columbia
  misc_feature: MA Experiment 20001248 PARAMETER Experiment Name: At_Far-red-induction_P Parameter: Timepoint (hr) Value: 4
  misc_feature: MA Experiment 20001248 PARAMETER Experiment Name: At_Far-red-induction_P Parameter: Tissue Value: Whole Plant
  misc_feature: MA Experiment ID: 20001451 Result: Down-regulated in Transcription
  misc_feature: MA Experiment 20001451 PARAMETER Experiment Name: At_Far-red-induction_P Parameter: Age (day) Value: 7
  misc_feature: MA Experiment 20001451 PARAMETER Experiment Name: At_Far-red-induction_P Parameter: Light Value: Far-red vs. White
  misc_feature: MA Experiment 20001451 PARAMETER Experiment Name: At_Far-red-induction_P Parameter: Organism Value: A. thaliana
  misc_feature: MA Experiment 20001451 PARAMETER Experiment Name: At_Far-red-induction_P Parameter: Plant Line Value: Columbia
  misc_feature: MA Experiment 20001451 PARAMETER Experiment Name: At_Far-red-induction_P Parameter: Timepoint (hr) Value: 24
  misc_feature: MA Experiment 20001451 PARAMETER Experiment Name: At_Far-red-induction_P Parameter: Tissue Value: Whole Plant
  misc_feature: MA Experiment ID: 20001911 Result: Up-regulated in Transcription
  misc_feature: MA Experiment 20001911 PARAMETER Experiment Name: At_Drought_Reproduction_P Parameter: Age (day) Value: 40
  misc_feature: MA Experiment 20001911 PARAMETER Experiment Name: At_Drought_Reproduction_P Parameter: Organism Value: A. thaliana
  misc_feature: MA Experiment 20001911 PARAMETER Experiment Name: At_Drought_Reproduction_P Parameter: Plant Line Value: WS
  misc_feature: MA Experiment 20001911 PARAMETER Experiment Name: At_Drought_Reproduction_P Parameter: Timepoint (day) Value: 10
  misc_feature: MA Experiment 20001911 PARAMETER Experiment Name: At_Drought_Reproduction_P Parameter: Tissue Value: Flowers
  misc_feature: MA Experiment 20001911 PARAMETER Experiment Name: At_Drought_Reproduction_P Parameter: Treatment Value: Drought vs. No Drought

SEQ ID NO: 95560 - protein, 1470 aa, Arabidopsis thaliana; identical to SEQ ID NO: 91804
  peptide (1)..(1470): Ceres Seq. ID no. 12729601
  misc_feature (1318)..(1452): Pfam Name: Jacalin-like lectin domain Pfam Description: Jacalin-like lectin domain
  misc_feature (490)..(862): Homolog of NCBI NO: 25453570 NR Description: hypothetical protein DYW7 [imported] - thaliana (fragment) >gi|7799758|emb|CAA06829.1| DYW7 protein
  misc_feature (105)..(862): Homolog of NCBI NO: 30103011 NR Description: putative pentatricopeptide repeat containing
  misc_feature (899)..(1456): Homolog of NCBI NO: 34910006 NR Description: P0413G02.3 [Oryza sativa (japonica
  misc_feature (492)..(862): Homolog of NCBI NO: 22093801 NR Description: hypothetical protein~predicted by
  misc_feature (300)..(463): Homolog of NCBI NO: 22093801 NR Description: hypothetical protein~predicted by
  misc_feature (71)..(862): Homolog of NCBI NO: 9279687 NR Description: gb|AAC35225.1~gene_id:MWI23.6~strong similarity
  misc_feature (71)..(862): Homolog of NCBI NO: 15228829 NR Description: hypothetical protein; protein id: At3g22690.1
  misc_feature (220)..(862): Homolog of NCBI NO: 15235498 NR Description: hypothetical protein; protein id: At4g02750.1
  misc_feature (316)..(862): Homolog of NCBI NO: 15229097 NR Description: putative protein; protein id: At3g49140.1
  misc_feature (449)..(862): Homolog of NCBI NO: 18394615 NR Description: hypothetical protein; protein id: At1g18485.1

SEQ ID NO: 95561 - protein, 1347 aa, Arabidopsis thaliana; identical to SEQ ID NO: 91805
  peptide (1)..(1347): Ceres Seq. ID no. 12729602
  misc_feature (1195)..(1329): Pfam Name: Jacalin-like lectin domain Pfam Description: Jacalin-like lectin domain
  misc_feature (367)..(739): Homolog of NCBI NO: 25453570 NR Description: hypothetical protein DYW7 [imported] - thaliana (fragment) >gi|7799758|emb|CAA06829.1| DYW7 protein
  misc_feature (1)..(739): Homolog of NCBI NO: 30103011 NR Description: putative pentatricopeptide repeat containing
  misc_feature (776)..(1333): Homolog of NCBI NO: 34910006 NR Description: P0413G02.3 [Oryza sativa (japonica
  misc_feature (369)..(739): Homolog of NCBI NO: 22093801 NR Description: hypothetical protein~predicted by
  misc_feature (177)..(340): Homolog of NCBI NO: 22093801 NR Description: hypothetical protein~predicted by
  misc_feature (1)..(739): Homolog of NCBI NO: 9279687 NR Description: gb|AAC35225.1~gene_id:MWI23.6~strong similarity
  misc_feature (1)..(739): Homolog of NCBI NO: 15228829 NR Description: hypothetical protein; protein id: At3g22690.1
  misc_feature (97)..(739): Homolog of NCBI NO: 15235498 NR Description: hypothetical protein; protein id: At4g02750.1
  misc_feature (193)..(739): Homolog of NCBI NO: 15229097 NR Description: putative protein; protein id: At3g49140.1
  misc_feature (326)..(739): Homolog of NCBI NO: 18394615 NR Description: hypothetical protein; protein id: At1g18485.1

SEQ ID NO: 95562 - protein, 1330 aa, Arabidopsis thaliana; identical to SEQ ID NO: 91806
  peptide (1)..(1330): Ceres Seq. ID no. 12729603
  misc_feature (1178)..(1312): Pfam Name: Jacalin-like lectin domain Pfam Description: Jacalin-like lectin domain
  misc_feature (350)..(722): Homolog of NCBI NO: 25453570 NR Description: hypothetical protein DYW7 [imported] - thaliana (fragment) >gi|7799758|emb|CAA06829.1| DYW7 protein
  misc_feature (1)..(722): Homolog of NCBI NO: 30103011 NR Description: putative pentatricopeptide repeat containing
  misc_feature (759)..(1316): Homolog of NCBI NO: 34910006 NR Description: P0413G02.3 [Oryza sativa (japonica
  misc_feature (352)..(722): Homolog of NCBI NO: 22093801 NR Description: hypothetical protein~predicted by
  misc_feature (160)..(323): Homolog of NCBI NO: 22093801 NR Description: hypothetical protein~predicted by
  misc_feature (1)..(722): Homolog of NCBI NO: 9279687 NR Description: gb|AAC35225.1~gene_id:MWI23.6~strong similarity
  misc_feature (1)..(722): Homolog of NCBI NO: 15228829 NR Description: hypothetical protein; protein id: At3g22690.1
  misc_feature (80)..(722): Homolog of NCBI NO: 15235498 NR Description: hypothetical protein; protein id: At4g02750.1
  misc_feature (176)..(722): Homolog of NCBI NO: 15229097 NR Description: putative protein; protein id: At3g49140.1
  misc_feature (309)..(722): Homolog of NCBI NO: 18394615 NR Description: hypothetical protein; protein id: At1g18485.1

SEQ ID NO: 95563 - DNA, 1038 bp, Arabidopsis thaliana; identical to SEQ ID NO: 91807
  misc_feature (1)..(1038): Ceres Seq. ID no. 12729604
  misc_feature: MA Experiment ID: 20000440 Result: Up-regulated in Transcription
  misc_feature: MA Experiment 20000440 PARAMETER Experiment Name: At_Closed-Flower__Sub_P Parameter: Tissue Value: Closed Flower vs. Whole Plant

SEQ ID NO: 95564 - protein, 345 aa, Arabidopsis thaliana; identical to SEQ ID NO: 91808
  peptide (1)..(345): Ceres Seq. ID no. 12729605
  misc_feature (110)..(273): Pfam Name: Domain of unknown function (DUF702) Pfam Description: Domain of unknown function (DUF702)
  misc_feature (1)..(345): Homolog of NCBI NO: 15223669 NR Description: hypothetical protein; protein id: At1g19790.1
  misc_feature (1)..(344): Homolog of NCBI NO: 15222285 NR Description: unknown protein; protein id: At1g75520.1
  misc_feature (97)..(344): Homolog of NCBI NO: 15239350 NR Description: zinc finger protein SHI-like; protein id: supported by cDNA: gi_4929802 [Arabidopsis thaliana] putative zinc finger protein SHI [Arabidopsis thaliana]
  misc_feature (41)..(328): Homolog of NCBI NO: 15234365 NR Description: putative protein; protein id: At4g36260.1
  misc_feature (77)..(322): Homolog of NCBI NO: 34906658 NR Description: putative LRP(lateral root primordia) 1 [Oryza
  misc_feature (82)..(183): Homolog of NCBI NO: 15224110 NR Description: unknown protein; protein id: At2g18120.1
  misc_feature (200)..(276): Homolog of NCBI NO: 15224110 NR Description: unknown protein; protein id: At2g18120.1
  misc_feature (80)..(306): Homolog of NCBI NO: 882341 NR Description: LRP1
  misc_feature (80)..(306): Homolog of NCBI NO: 18416839 NR Description: lateral root primordia (LRP1); protein id: [Arabidopsis thaliana] >gi|14586363|emb|CAC42894.1| lateral root
  misc_feature (222)..(307): Homolog of NCBI NO: 15226540 NR Description: hypothetical protein; protein id: At2g21400.1

SEQ ID NO: 95565 - protein, 272 aa, Arabidopsis thaliana; identical to SEQ ID NO: 91809
  peptide (1)..(272): Ceres Seq. ID no. 12729606
  misc_feature (37)..(200): Pfam Name: Domain of unknown function (DUF702) Pfam Description: Domain of unknown function (DUF702)
  misc_feature (1)..(272): Homolog of NCBI NO: 15223669 NR Description: hypothetical protein; protein id: At1g19790.1
  misc_feature (1)..(271): Homolog of NCBI NO: 15222285 NR Description: unknown protein; protein id: At1g75520.1
  misc_feature (24)..(271): Homolog of NCBI NO: 15239350 NR Description: zinc finger protein SHI-like; protein id: supported by cDNA: gi_4929802 [Arabidopsis thaliana] putative zinc finger protein SHI [Arabidopsis thaliana]
  misc_feature (1)..(255): Homolog of NCBI NO: 15234365 NR Description: putative protein; protein id: At4g36260.1
  misc_feature (4)..(249): Homolog of NCBI NO: 34906658 NR Description: putative LRP(lateral root primordia) 1 [Oryza
  misc_feature (9)..(110): Homolog of NCBI NO: 15224110 NR Description: unknown protein; protein id: At2g18120.1
  misc_feature (127)..(203): Homolog of NCBI NO: 15224110 NR Description: unknown protein; protein id: At2g18120.1
  misc_feature (7)..(233): Homolog of NCBI NO: 882341 NR Description: LRP1
  misc_feature (7)..(233): Homolog of NCBI NO: 18416839 NR Description: lateral root primordia (LRP1); protein id: [Arabidopsis thaliana] >gi|14586363|emb|CAC42894.1| lateral root
  misc_feature (149)..(234): Homolog of NCBI NO: 15226540 NR Description: hypothetical protein; protein id: At2g21400.1

SEQ ID NO: 95566 - protein, 229 aa, Arabidopsis thaliana; identical to SEQ ID NO: 91810
  peptide (1)..(229): Ceres Seq. ID no. 12729607
  misc_feature (1)..(157): Pfam Name: Domain of unknown function (DUF702) Pfam Description: Domain of unknown function (DUF702)
  misc_feature (1)..(229): Homolog of NCBI NO: 15223669 NR Description: hypothetical protein; protein id: At1g19790.1
  misc_feature (1)..(228): Homolog of NCBI NO: 15222285 NR Description: unknown protein; protein id: At1g75520.1
  misc_feature (1)..(228): Homolog of NCBI NO: 15239350 NR Description: zinc finger protein SHI-like; protein id: supported by cDNA: gi_4929802 [Arabidopsis thaliana] putative zinc finger protein SHI [Arabidopsis thaliana]
  misc_feature (1)..(212): Homolog of NCBI NO: 15234365 NR Description: putative protein; protein id: At4g36260.1
  misc_feature (1)..(206): Homolog of NCBI NO: 34906658 NR Description: putative LRP(lateral root primordia) 1 [Oryza
  misc_feature (1)..(67): Homolog of NCBI NO: 15224110 NR Description: unknown protein; protein id: At2g18120.1
  misc_feature (84)..(160): Homolog of NCBI NO: 15224110 NR Description: unknown protein; protein id: At2g18120.1
  misc_feature (1)..(190): Homolog of NCBI NO: 882341 NR Description: LRP1
  misc_feature (1)..(190): Homolog of NCBI NO: 18416839 NR Description: lateral root primordia (LRP1); protein id: [Arabidopsis thaliana] >gi|14586363|emb|CAC42894.1| lateral root
  misc_feature (106)..(191): Homolog of NCBI NO: 15226540 NR Description: hypothetical protein; protein id: At2g21400.1

SEQ ID NO: 95567 - DNA, 414 bp, Arabidopsis thaliana; identical to SEQ ID NO: 91811
  misc_feature (1)..(414): Ceres Seq. ID no. 12729622
  misc_feature: MA Experiment ID: 20000440 Result: Up-regulated in Transcription
  misc_feature: MA Experiment 20000440 PARAMETER Experiment Name: At_Closed-Flower__Sub_P Parameter: Tissue Value: Closed Flower vs. Whole Plant

SEQ ID NO: 95568 - protein, 137 aa, Arabidopsis thaliana; identical to SEQ ID NO: 91812
  peptide (1)..(137): Ceres Seq. ID no. 12729623
  misc_feature (17)..(136): Pfam Name: Core histone H2A/H2B/H3/H4 Pfam Description: Core histone H2A/H2B/H3/H4
  misc_feature (1)..(137): Homolog of NCBI NO: 15223698 NR Description: histone H3, putative; protein id: At1g19890.1
  misc_feature (1)..(137): Homolog of NCBI NO: 15236103 NR Description: histone H3.3; protein id: At4g40030.1, supported cDNA: gi_14326561 [Arabidopsis thaliana] Histon H3; protein id: At4g40040.1, supported by cDNA: 2670.
  misc_feature (1)..(137): Homolog of NCBI NO: 18698662 NR Description: disease-resistent-related protein [Oryza sativa]
  misc_feature (1)..(137): Homolog of NCBI NO: 122090 NR Description: Histone H3 >gi|81287|pir||S00940 histone H3 -
  misc_feature (1)..(137): Homolog of NCBI NO: 2119018 NR Description: histone H3 (clone CH-I) - Chlamydomonas
  misc_feature (1)..(137): Homolog of NCBI NO: 15232146 NR Description: histone H3, putative; protein id: At3g27360.1, by cDNA: gi_14335141, supported by cDNA: gi_18655352 [Arabidopsis >gi|15238433|ref|NP_201339.1| histone H3 (sp|P05203); id:
  misc_feature (1)..(137): Homolog of NCBI NO: 122087 NR Description: Histone H3 >gi|81849|pir||S04520 histone H3
  misc_feature (1)..(137): Homolog of NCBI NO: 19880141 NR Description: histone 3 [Eimeria tenella]
  misc_feature (1)..(137): Homolog of NCBI NO: 28192620 NR Description: histone H3 [Toxoplasma gondii]
  misc_feature (1)..(136): Homolog of NCBI NO: 33772147 NR Description: histone 3 [Malus x domestica]

SEQ ID NO: 95569 - DNA, 1843 bp, Arabidopsis thaliana; identical to SEQ ID NO: 91813
  misc_feature (1)..(1843): Ceres Seq. ID no. 12729624
  misc_feature: MA Experiment ID: 20000185 Result: Up-regulated in Transcription
  misc_feature: MA Experiment 20000185 PARAMETER Experiment Name: At_Roots__P Parameter: Age (day) Value: 7 vs. 21
  misc_feature: MA Experiment 20000185 PARAMETER Experiment Name: At_Roots__P Parameter: Organism Value: A. thaliana
  misc_feature: MA Experiment 20000185 PARAMETER Experiment Name: At_Roots__P Parameter: Tissue Value: Roots vs. Whole Plant
  misc_feature: MA Experiment ID: 20000227 Result: Up-regulated in Transcription
  misc_feature: MA Experiment 20000227 PARAMETER Experiment Name: At_Root-Tips-vs-Tops_P Parameter: Tissue Value: Root Tips vs. Root Tops
  misc_feature: MA Experiment ID: 20000267 Result: Down-regulated in Transcription
  misc_feature: MA Experiment 20000267 PARAMETER Experiment Name: At_Drought_P Parameter: Age (day) Value: 7
  misc_feature: MA Experiment 20000267 PARAMETER Experiment Name: At_Drought_P Parameter: Organism Value: A. thaliana
  misc_feature: MA Experiment 20000267 PARAMETER Experiment Name: At_Drought_P Parameter: Plant Line Value: WS
  misc_feature: MA Experiment 20000267 PARAMETER Experiment Name: At_Drought_P Parameter: Timepoint (hr) Value: 6
  misc_feature: MA Experiment 20000267 PARAMETER Experiment Name: At_Drought_P Parameter: Tissue Value: Whole Plant
  misc_feature: MA Experiment 20000267 PARAMETER Experiment Name: At_Drought_P Parameter: Treatment Value: Drought vs. No Drought
  misc_feature: MA Experiment ID: 20000286 Result: Down-regulated in Transcription
  misc_feature: MA Experiment 20000286 PARAMETER Experiment Name: At_Open_Flower_P Parameter: Age (day) Value: 21
  misc_feature: MA Experiment 20000286 PARAMETER Experiment Name: At_Open_Flower_P Parameter: Plant Line Value: WS
  misc_feature: MA Experiment 20000286 PARAMETER Experiment Name: At_Open_Flower_P Parameter: Tissue Value: Half Open vs. Whole Plant
  misc_feature: MA Experiment ID: 20000436 Result: Down-regulated in Transcription
  misc_feature: MA Experiment 20000436 PARAMETER Experiment Name: At_Drought_P Parameter: Age (day) Value: 7
  misc_feature: MA Experiment 20000436 PARAMETER Experiment Name: At_Drought_P Parameter: Organism Value: A. thaliana
  misc_feature: MA Experiment 20000436 PARAMETER Experiment Name: At_Drought_P Parameter: Plant Line Value: WS
  misc_feature: MA Experiment 20000436 PARAMETER Experiment Name: At_Drought_P Parameter: Timepoint (hr) Value: 12
  misc_feature: MA Experiment 20000436 PARAMETER Experiment Name: At_Drought_P Parameter: Tissue Value: Whole Plant
  misc_feature: MA Experiment 20000436 PARAMETER Experiment Name: At_Drought_P Parameter: Treatment Value: Drought vs. No Drought
  misc_feature: MA Experiment ID: 20000437 Result: Down-regulated in Transcription
  misc_feature: MA Experiment 20000437 PARAMETER Experiment Name: At_Drought_P Parameter: Age (day) Value: 8
  misc_feature: MA Experiment 20000437 PARAMETER Experiment Name: At_Drought_P Parameter: Organism Value: A. thaliana
  misc_feature: MA Experiment 20000437 PARAMETER Experiment Name: At_Drought_P Parameter: Plant Line Value: WS
  misc_feature: MA Experiment 20000437 PARAMETER Experiment Name: At_Drought_P Parameter: Timepoint (hr) Value: 24
  misc_feature: MA Experiment 20000437 PARAMETER Experiment Name: At_Drought_P Parameter: Tissue Value: Whole Plant
  misc_feature: MA Experiment 20000437 PARAMETER Experiment Name: At_Drought_P Parameter: Treatment Value: Drought vs. No Drought
  misc_feature: MA Experiment ID: 20000439 Result: Up-regulated in Transcription
  misc_feature: MA Experiment 20000439 PARAMETER Experiment Name: At_Roots__P Parameter: Age (day) Value: 14 vs. 21
  misc_feature: MA Experiment 20000439 PARAMETER Experiment Name: At_Roots__P Parameter: Organism Value: A. thaliana
  misc_feature: MA Experiment 20000439 PARAMETER Experiment Name: At_Roots__P Parameter: Tissue Value: Roots vs. Whole Plant
  misc_feature: MA Experiment ID: 20000451 Result: Down-regulated in Transcription
  misc_feature: MA Experiment 20000451 PARAMETER Experiment Name: At_CS6879_Shoots-Roots_P Parameter: Age (day) Value: 14
  misc_feature: MA Experiment 20000451 PARAMETER Experiment Name: At_CS6879_Shoots-Roots_P Parameter: Organism Value: A. thaliana
  misc_feature: MA Experiment 20000451 PARAMETER Experiment Name: At_CS6879_Shoots-Roots_P Parameter: Plant Line Value: CS6879 vs. WS
  misc_feature: MA Experiment 20000451 PARAMETER Experiment Name: At_CS6879_Shoots-Roots_P Parameter: Tissue Value: Roots
  misc_feature: MA Experiment ID: 20001761 Result: Down-regulated in Transcription
  misc_feature: MA Experiment 20001761 PARAMETER Experiment Name: At_50mM_NH4NO3_L-to-H_P Parameter: Timepoint (hr) Value: 4
  misc_feature: MA Experiment 20001761 PARAMETER Experiment Name: At_50mM_NH4NO3_L-to-H_P Parameter: Tissue Value: Siliques
  misc_feature: MA Experiment 20001761 PARAMETER Experiment Name: At_50mM_NH4NO3_L-to-H_P Parameter: Treatment Value: 50mM NH4NO3 vs 100mM Mannitol
  misc_feature: MA Experiment ID: 20001906 Result: Up-regulated in Transcription
  misc_feature: MA Experiment 20001906 PARAMETER Experiment Name: At_Drought_Reproduction_P Parameter: Age (day) Value: 35
  misc_feature: MA Experiment 20001906 PARAMETER Experiment Name: At_Drought_Reproduction_P Parameter: Organism Value: A. thaliana
  misc_feature: MA Experiment 20001906 PARAMETER Experiment Name: At_Drought_Reproduction_P Parameter: Plant Line Value: WS
  misc_feature: MA Experiment 20001906 PARAMETER Experiment Name: At_Drought_Reproduction_P Parameter: Timepoint (day) Value: 5
  misc_feature: MA Experiment 20001906 PARAMETER Experiment Name: At_Drought_Reproduction_P Parameter: Tissue Value: Siliques
  misc_feature: MA Experiment 20001906 PARAMETER Experiment Name: At_Drought_Reproduction_P Parameter: Treatment Value: Drought vs. No Drought
  misc_feature: MA Experiment ID: 20001907 Result: Up-regulated in Transcription
  misc_feature: MA Experiment 20001907 PARAMETER Experiment Name: At_Drought_Reproduction_P Parameter: Age (day) Value: 37
  misc_feature: MA Experiment 20001907 PARAMETER Experiment Name: At_Drought_Reproduction_P Parameter: Organism Value: A. thaliana
  misc_feature: MA Experiment 20001907 PARAMETER Experiment Name: At_Drought_Reproduction_P Parameter: Plant Line Value: WS
  misc_feature: MA Experiment 20001907 PARAMETER Experiment Name: At_Drought_Reproduction_P Parameter: Timepoint (day) Value: 7
  misc_feature: MA Experiment 20001907 PARAMETER Experiment Name: At_Drought_Reproduction_P Parameter: Tissue Value: Siliques
  misc_feature: MA Experiment 20001907 PARAMETER Experiment Name: At_Drought_Reproduction_P Parameter: Treatment Value: Drought vs. No Drought
  misc_feature: MA Experiment ID: 20001908 Result: Up-regulated in Transcription
  misc_feature: MA Experiment 20001908 PARAMETER Experiment Name: At_Drought_Reproduction_P Parameter: Age (day) Value: 40
  misc_feature: MA Experiment 20001908 PARAMETER Experiment Name: At_Drought_Reproduction_P Parameter: Organism Value: A. thaliana
  misc_feature: MA Experiment 20001908 PARAMETER Experiment Name: At_Drought_Reproduction_P Parameter: Plant Line Value: WS
  misc_feature: MA Experiment 20001908 PARAMETER Experiment Name: At_Drought_Reproduction_P Parameter: Timepoint (day) Value: 10
  misc_feature: MA Experiment 20001908 PARAMETER Experiment Name: At_Drought_Reproduction_P Parameter: Tissue Value: Siliques
  misc_feature: MA Experiment 20001908 PARAMETER Experiment Name: At_Drought_Reproduction_P Parameter: Treatment Value: Drought vs. No Drought

SEQ ID NO: 95570 - protein, 567 aa, Arabidopsis thaliana; identical to SEQ ID NO: 91814
  peptide (1)..(567): Ceres Seq. ID no. 12729625
  misc_feature (20)..(567): Homolog of NCBI NO: 15223699 NR Description: unknown protein; protein id: At1g19900.1, by cDNA: gi_16604506 [Arabidopsis thaliana]
  misc_feature (64)..(567): Homolog of NCBI NO: 25352604 NR Description: hypothetical protein F6F9.4 [imported] - thaliana >gi|10086483|gb|AAG12543.1|AC007797_3 Unknown Protein
  misc_feature (38)..(567): Homolog of NCBI NO: 15222300 NR Description: unknown protein; protein id: At1g75620.1 thaliana] >gi|9369366|gb|AAF87115.1|AC006434_11 F10A5.18
  misc_feature (52)..(567): Homolog of NCBI NO: 15230360 NR Description: putative protein; protein id: At3g57620.1 thaliana] >gi|7485502|pir||T06758 probable galactose oxidase (EC
  misc_feature (25)..(566): Homolog of NCBI NO: 25352602 NR Description: F14L17.20 protein - Arabidopsis thaliana Weak similarity to glyoxal oxidase (glx2) from Phanerochaete
  misc_feature (25)..(563): Homolog of NCBI NO: 15223754 NR Description: hypothetical protein; protein id: At1g14430.1
  misc_feature (50)..(566): Homolog of NCBI NO: 15241135 NR Description: putative protein; protein id: At5g19580.1,
  misc_feature (50)..(566): Homolog of NCBI NO: 19310437 NR Description: AT5g19580/T20D1_100 [Arabidopsis thaliana]
  misc_feature (31)..(566): Homolog of NCBI NO: 15232379 NR Description: putative protein; protein id: At3g53950.1, by cDNA: gi_15809875 [Arabidopsis thaliana]
  misc_feature (50)..(566): Homolog of NCBI NO: 15220398 NR Description: glyoxal oxidase (glx1), putative; protein id: [Arabidopsis thaliana] >gi|9828629|gb|AAG00252.1|AC002130_17 [Arabidopsis thaliana] >gi|27754377|gb|AAO22637.1| putative

SEQ ID NO: 95571 - protein, 548 aa, Arabidopsis thaliana; identical to SEQ ID NO: 91815
  peptide (1)..(548): Ceres Seq. ID no. 12729626
  misc_feature (1)..(548): Homolog of NCBI NO: 15223699 NR Description: unknown protein; protein id: At1g19900.1, by cDNA: gi_16604506 [Arabidopsis thaliana]
  misc_feature (45)..(548): Homolog of NCBI NO: 25352604 NR Description: hypothetical protein F6F9.4 [imported] - thaliana >gi|10086483|gb|AAG12543.1|AC007797_3 Unknown Protein
  misc_feature (19)..(548): Homolog of NCBI NO: 15222300 NR Description: unknown protein; protein id: At1g75620.1 thaliana] >gi|9369366|gb|AAF87115.1|AC006434_11 F10A5.18
  misc_feature (33)..(548): Homolog of NCBI NO: 15230360 NR Description: putative protein; protein id: At3g57620.1 thaliana] >gi|7485502|pir||T06758 probable galactose oxidase (EC
  misc_feature (6)..(547): Homolog of NCBI NO: 25352602 NR Description: F14L17.20 protein - Arabidopsis thaliana Weak similarity to glyoxal oxidase (glx2) from Phanerochaete
  misc_feature (6)..(544): Homolog of NCBI NO: 15223754 NR Description: hypothetical protein; protein id: At1g14430.1
  misc_feature (31)..(547): Homolog of NCBI NO: 15241135 NR Description: putative protein; protein id: At5g19580.1,
  misc_feature (31)..(547): Homolog of NCBI NO: 19310437 NR Description: AT5g19580/T20D1_100 [Arabidopsis thaliana]
  misc_feature (12)..(547): Homolog of NCBI NO: 15232379 NR Description: putative protein; protein id: At3g53950.1, by cDNA: gi_15809875 [Arabidopsis thaliana]
  misc_feature (31)..(547): Homolog of NCBI NO: 15220398 NR Description: glyoxal oxidase (glx1), putative; protein id: [Arabidopsis thaliana] >gi|9828629|gb|AAG00252.1|AC002130_17 [Arabidopsis thaliana] >gi|27754377|gb|AAO22637.1| putative

SEQ ID NO: 95572 - protein, 504 aa, Arabidopsis thaliana; identical to SEQ ID NO: 91816
  peptide (1)..(504): Ceres Seq. ID no. 12729627
  misc_feature (1)..(504): Homolog of NCBI NO: 15223699 NR Description: unknown protein; protein id: At1g19900.1, by cDNA: gi_16604506 [Arabidopsis thaliana]
  misc_feature (1)..(504): Homolog of NCBI NO: 25352604 NR Description: hypothetical protein F6F9.4 [imported] - thaliana >gi|10086483|gb|AAG12543.1|AC007797_3 Unknown Protein
  misc_feature (1)..(504): Homolog of NCBI NO: 15222300 NR Description: unknown protein; protein id: At1g75620.1 thaliana] >gi|9369366|gb|AAF87115.1|AC006434_11 F10A5.18
  misc_feature (1)..(504): Homolog of NCBI NO: 15230360 NR Description: putative protein; protein id: At3g57620.1 thaliana] >gi|7485502|pir||T06758 probable galactose oxidase (EC
  misc_feature (1)..(503): Homolog of NCBI NO: 25352602 NR Description: F14L17.20 protein - Arabidopsis thaliana Weak similarity to glyoxal oxidase (glx2) from Phanerochaete
  misc_feature (1)..(500): Homolog of NCBI NO: 15223754 NR Description: hypothetical protein; protein id: At1g14430.1
  misc_feature (1)..(503): Homolog of NCBI NO: 15241135 NR Description: putative protein; protein id: At5g19580.1,
  misc_feature (1)..(503): Homolog of NCBI NO: 19310437 NR Description: AT5g19580/T20D1_100 [Arabidopsis thaliana]
  misc_feature (1)..(503): Homolog of NCBI NO: 15232379 NR Description: putative protein; protein id: At3g53950.1, by cDNA: gi_15809875 [Arabidopsis thaliana]
  misc_feature (1)..(503): Homolog of NCBI NO: 15220398 NR Description: glyoxal oxidase (glx1), putative; protein id: [Arabidopsis thaliana] >gi|9828629|gb|AAG00252.1|AC002130_17 [Arabidopsis thaliana] >gi|27754377|gb|AAO22637.1| putative

SEQ ID NO: 95573 - DNA, 1366 bp, Arabidopsis thaliana; identical to SEQ ID NO: 91817
  misc_feature (1)..(1366): Ceres Seq. ID no. 12729653
  misc_feature: MA Experiment ID: 20000171 Result: Up-regulated in Transcription
  misc_feature: MA Experiment 20000171 PARAMETER Experiment Name: At_42deg_Heat_P Parameter: Age (day) Value: 14
  misc_feature: MA Experiment 20000171 PARAMETER Experiment Name: At_42deg_Heat_P Parameter: Organism Value: A. thaliana
  misc_feature: MA Experiment 20000171 PARAMETER Experiment Name: At_42deg_Heat_P Parameter: Plant Line Value: WS
  misc_feature: MA Experiment 20000171 PARAMETER Experiment Name: At_42deg_Heat_P Parameter: Temperature (deg C) Value: 42 vs. 22
  misc_feature: MA Experiment 20000171 PARAMETER Experiment Name: At_42deg_Heat_P Parameter: Timepoint (hr) Value: 1
  misc_feature: MA Experiment 20000171 PARAMETER Experiment Name: At_42deg_Heat_P Parameter: Tissue Value: Aerial
  misc_feature: MA Experiment ID: 20000173 Result: Up-regulated in Transcription
  misc_feature: MA Experiment 20000173 PARAMETER Experiment Name: At_42deg_Heat_P Parameter: Age (day) Value: 14
  misc_feature: MA Experiment 20000173 PARAMETER Experiment Name: At_42deg_Heat_P Parameter: Organism Value: A. thaliana
  misc_feature: MA Experiment 20000173 PARAMETER Experiment Name: At_42deg_Heat_P Parameter: Plant Line Value: WS
  misc_feature: MA Experiment 20000173 PARAMETER Experiment Name: At_42deg_Heat_P Parameter: Temperature (deg C) Value: 42 vs. 22
  misc_feature: MA Experiment 20000173 PARAMETER Experiment Name: At_42deg_Heat_P Parameter: Timepoint (hr) Value: 6
  misc_feature: MA Experiment 20000173 PARAMETER Experiment Name: At_42deg_Heat_P Parameter: Tissue Value: Aerial
  misc_feature: MA Experiment ID: 20000185 Result: Up-regulated in Transcription
  misc_feature: MA Experiment 20000185 PARAMETER Experiment Name: At_Roots__P Parameter: Age (day) Value: 7 vs. 21
  misc_feature: MA Experiment 20000185 PARAMETER Experiment Name: At_Roots__P Parameter: Organism Value: A. thaliana
  misc_feature: MA Experiment 20000185 PARAMETER Experiment Name: At_Roots__P Parameter: Tissue Value: Roots vs. Whole Plant
  misc_feature: MA Experiment ID: 20000227 Result: Up-regulated in Transcription
  misc_feature: MA Experiment 20000227 PARAMETER Experiment Name: At_Root-Tips-vs-Tops_P Parameter: Tissue Value: Root Tips vs. Root Tops
  misc_feature: MA Experiment ID: 20000234 Result: Up-regulated in Transcription
  misc_feature: MA Experiment 20000234 PARAMETER Experiment Name: At_Siliques_P Parameter: Age (day) Value: 21
  misc_feature: MA Experiment 20000234 PARAMETER Experiment Name: At_Siliques_P Parameter: Organism Value: A. thaliana
  misc_feature: MA Experiment 20000234 PARAMETER Experiment Name: At_Siliques_P Parameter: Plant Line Value: WS
  misc_feature: MA Experiment 20000234 PARAMETER Experiment Name: At_Siliques_P Parameter: Tissue Value: Less Than 5mm Siliques vs. Whole Plant
  misc_feature: MA Experiment ID: 20000264 Result: Up-regulated in Transcription
  misc_feature: MA Experiment 20000264 PARAMETER Experiment Name: At_Open_Flower_P Parameter: Age (day) Value: 21
  misc_feature: MA Experiment 20000264 PARAMETER Experiment Name: At_Open_Flower_P Parameter: Plant Line Value: WS
  misc_feature: MA Experiment 20000264 PARAMETER Experiment Name: At_Open_Flower_P Parameter: Tissue Value: Open Flower vs. Whole Plant
  misc_feature: MA Experiment ID: 20000265 Result: Up-regulated in Transcription
  misc_feature: MA Experiment 20000265 PARAMETER Experiment Name: At_Open_Flower_P Parameter: Age (day) Value: 21
  misc_feature: MA Experiment 20000265 PARAMETER Experiment Name: At_Open_Flower_P Parameter: Plant Line Value: WS
  misc_feature: MA Experiment 20000265 PARAMETER Experiment Name: At_Open_Flower_P Parameter: Tissue Value: Closed Flower vs. Whole Plant
  misc_feature: MA Experiment ID: 20000437 Result: Down-regulated in Transcription
  misc_feature: MA Experiment 20000437 PARAMETER Experiment Name: At_Drought_P Parameter: Age (day) Value: 8
  misc_feature: MA Experiment 20000437 PARAMETER Experiment Name: At_Drought_P Parameter: Organism Value: A. thaliana
  misc_feature: MA Experiment 20000437 PARAMETER Experiment Name: At_Drought_P Parameter: Plant Line Value: WS
  misc_feature: MA Experiment 20000437 PARAMETER Experiment Name: At_Drought_P Parameter: Timepoint (hr) Value: 24
  misc_feature: MA Experiment 20000437 PARAMETER Experiment Name: At_Drought_P Parameter: Tissue Value: Whole Plant
  misc_feature: MA Experiment 20000437 PARAMETER Experiment Name: At_Drought_P Parameter: Treatment Value: Drought vs. No Drought
  misc_feature: MA Experiment ID: 20001557 Result: Up-regulated in Transcription
  misc_feature: MA Experiment 20001557 PARAMETER Experiment Name: At_Drought_Soil_Dry_P Parameter: Age (day) Value: 27
  misc_feature: MA Experiment 20001557 PARAMETER Experiment Name: At_Drought_Soil_Dry_P Parameter: Organism Value: A. thaliana
  misc_feature: MA Experiment 20001557 PARAMETER Experiment Name: At_Drought_Soil_Dry_P Parameter: Plant Line Value: WS
  misc_feature: MA Experiment 20001557 PARAMETER Experiment Name: At_Drought_Soil_Dry_P Parameter: Post Timepoint (hr) Value: 3
  misc_feature: MA Experiment 20001557 PARAMETER Experiment Name: At_Drought_Soil_Dry_P Parameter: Post-Treatment Value: Re-Water vs. No Drought
  misc_feature: MA Experiment 20001557 PARAMETER Experiment Name: At_Drought_Soil_Dry_P Parameter: Timepoint (day) Value: 13
  misc_feature: MA Experiment 20001557 PARAMETER Experiment Name: At_Drought_Soil_Dry_P Parameter: Treatment Value: Drought vs. No Drought
  misc_feature: MA Experiment ID: 20001558 Result: Up-regulated in Transcription
  misc_feature: MA Experiment 20001558 PARAMETER Experiment Name: At_Drought_Soil_Dry_P Parameter: Age (day) Value: 27
  misc_feature: MA Experiment 20001558 PARAMETER Experiment Name: At_Drought_Soil_Dry_P Parameter: Organism Value: A. thaliana
  misc_feature: MA Experiment 20001558 PARAMETER Experiment Name: At_Drought_Soil_Dry_P Parameter: Plant Line Value: WS
  misc_feature: MA Experiment 20001558 PARAMETER Experiment Name: At_Drought_Soil_Dry_P Parameter: Post Timepoint (hr) Value: 6
  misc_feature: MA Experiment 20001558 PARAMETER Experiment Name: At_Drought_Soil_Dry_P Parameter: Post-Treatment Value: Re-Water vs. No Drought
  misc_feature: MA Experiment 20001558 PARAMETER Experiment Name: At_Drought_Soil_Dry_P Parameter: Timepoint (day) Value: 13
  misc_feature: MA Experiment 20001558 PARAMETER Experiment Name: At_Drought_Soil_Dry_P Parameter: Treatment Value: Drought vs. No Drought

SEQ ID NO: 95574 - protein, 315 aa, Arabidopsis thaliana; identical to SEQ ID NO: 91818
  peptide (1)..(315): Ceres Seq. ID no. 12729654
  misc_feature (150)..(310): Pfam Name: Herpesvirus latent membrane protein 1 (LMP1) Pfam Description: Herpesvirus latent membrane protein 1 (LMP1)
  misc_feature (1)..(315): Homolog of NCBI NO: 25518088 NR Description: T20H2.2 protein - Arabidopsis thaliana Contains similarity to pigpen protein from Mus musculus and contains protein of unknown function DUF78 PF|01918 domain.
  misc_feature (1)..(315): Homolog of NCBI NO: 18394837 NR Description: expressed protein; protein id: At1g20220.1, by cDNA: gi_16612273 [Arabidopsis thaliana]
  misc_feature (1)..(275): Homolog of NCBI NO: 24417384 NR Description: unknown [Arabidopsis thaliana]
  misc_feature (1)..(308): Homolog of NCBI NO: 18410994 NR Description: expressed protein; protein id: At1g76010.1, by cDNA: gi_15724323, supported by cDNA: gi_15809881, supported cDNA: gi_16226598 [Arabidopsis thaliana]
  misc_feature (1)..(256): Homolog of NCBI NO: 34897552 NR Description: OSJNBa0042L16.13 [Oryza sativa (japonica
  misc_feature (41)..(308): Homolog of NCBI NO: 25404999 NR Description: protein T4O12.22 [imported] - Arabidopsis >gi|8778814|gb|AAF79819.1|AC007396_20 T4O12.22 [Arabidopsis
  misc_feature (1)..(48): Homolog of NCBI NO: 25404999 NR Description: protein T4O12.22 [imported] - Arabidopsis >gi|8778814|gb|AAF79819.1|AC007396_20 T4O12.22 [Arabidopsis
  misc_feature (177)..(310): Homolog of NCBI NO: 25404999 NR Description: protein T4O12.22 [imported] - Arabidopsis >gi|8778814|gb|AAF79819.1|AC007396_20 T4O12.22 [Arabidopsis
  misc_feature (137)..(315): Homolog of NCBI NO: 25404999 NR Description: protein T4O12.22 [imported] - Arabidopsis >gi|8778814|gb|AAF79819.1|AC007396_20 T4O12.22 [Arabidopsis
  misc_feature (1)..(146): Homolog of NCBI NO: 15231369 NR Description: unknown protein; protein id: At3g07030.1 thaliana] >gi|6729010|gb|AAF27007.1|AC016827_18 unknown protein

SEQ ID NO: 95575 - protein, 290 aa, Arabidopsis thaliana; identical to SEQ ID NO: 91819
  peptide (1)..(290): Ceres Seq. ID no. 12729655
  misc_feature (125)..(285): Pfam Name: Herpesvirus latent membrane protein 1 (LMP1) Pfam Description: Herpesvirus latent membrane protein 1 (LMP1)
  misc_feature (1)..(290): Homolog of NCBI NO: 25518088 NR Description: T20H2.2 protein - Arabidopsis thaliana Contains similarity to pigpen protein from Mus musculus and contains protein of unknown function DUF78 PF|01918 domain.
  misc_feature (1)..(290): Homolog of NCBI NO: 18394837 NR Description: expressed protein; protein id: At1g20220.1, by cDNA: gi_16612273 [Arabidopsis thaliana]
  misc_feature (1)..(250): Homolog of NCBI NO: 24417384 NR Description: unknown [Arabidopsis thaliana]
  misc_feature (1)..(283): Homolog of NCBI NO: 18410994 NR Description: expressed protein; protein id: At1g76010.1, by cDNA: gi_15724323, supported by cDNA: gi_15809881, supported cDNA: gi_16226598 [Arabidopsis thaliana]
  misc_feature (1)..(231): Homolog of NCBI NO: 34897552 NR Description: OSJNBa0042L16.13 [Oryza sativa (japonica
  misc_feature (16)..(283): Homolog of NCBI NO: 25404999 NR Description: protein T4O12.22 [imported] - Arabidopsis >gi|8778814|gb|AAF79819.1|AC007396_20 T4O12.22 [Arabidopsis
  misc_feature (1)..(23): Homolog of NCBI NO: 25404999 NR Description: protein T4O12.22 [imported] - Arabidopsis >gi|8778814|gb|AAF79819.1|AC007396_20 T4O12.22 [Arabidopsis
  misc_feature (152)..(285): Homolog of NCBI NO: 25404999 NR Description: protein T4O12.22 [imported] - Arabidopsis >gi|8778814|gb|AAF79819.1|AC007396_20 T4O12.22 [Arabidopsis
  misc_feature (112)..(290): Homolog of NCBI NO: 25404999 NR Description: protein T4O12.22 [imported] - Arabidopsis >gi|8778814|gb|AAF79819.1|AC007396_20 T4O12.22 [Arabidopsis
  misc_feature (1)..(121): Homolog of NCBI NO: 15231369 NR Description: unknown protein; protein id: At3g07030.1 thaliana] >gi|6729010|gb|AAF27007.1|AC016827_18 unknown protein

SEQ ID NO: 95576 - protein, 279 aa, Arabidopsis thaliana; identical to SEQ ID NO: 91820
  peptide (1)..(279): Ceres Seq. ID no. 12729656
  misc_feature (114)..(274): Pfam Name: Herpesvirus latent membrane protein 1 (LMP1) Pfam Description: Herpesvirus latent membrane protein 1 (LMP1)
  misc_feature (1)..(279): Homolog of NCBI NO: 25518088 NR Description: T20H2.2 protein - Arabidopsis thaliana Contains similarity to pigpen protein from Mus musculus and contains protein of unknown function DUF78 PF|01918 domain.
  misc_feature (1)..(279): Homolog of NCBI NO: 18394837 NR Description: expressed protein; protein id: At1g20220.1, by cDNA: gi_16612273 [Arabidopsis thaliana]
  misc_feature (1)..(239): Homolog of NCBI NO: 24417384 NR Description: unknown [Arabidopsis thaliana]
  misc_feature (1)..(272): Homolog of NCBI NO: 18410994 NR Description: expressed protein; protein id: At1g76010.1, by cDNA: gi_15724323, supported by cDNA: gi_15809881, supported cDNA: gi_16226598 [Arabidopsis thaliana]
  misc_feature (1)..(220): Homolog of NCBI NO: 34897552 NR Description: OSJNBa0042L16.13 [Oryza sativa (japonica
  misc_feature (5)..(272): Homolog of NCBI NO: 25404999 NR Description: protein T4O12.22 [imported] - Arabidopsis >gi|8778814|gb|AAF79819.1|AC007396_20 T4O12.22 [Arabidopsis
  misc_feature (1)..(12): Homolog of NCBI NO: 25404999 NR Description: protein T4O12.22 [imported] - Arabidopsis >gi|8778814|gb|AAF79819.1|AC007396_20 T4O12.22 [Arabidopsis
  misc_feature (141)..(274): Homolog of NCBI NO: 25404999 NR Description: protein T4O12.22 [imported] - Arabidopsis >gi|8778814|gb|AAF79819.1|AC007396_20 T4O12.22 [Arabidopsis
  misc_feature (101)..(279): Homolog of NCBI NO: 25404999 NR Description: protein T4O12.22 [imported] - Arabidopsis >gi|8778814|gb|AAF79819.1|AC007396_20 T4O12.22 [Arabidopsis
  misc_feature (1)..(110): Homolog of NCBI NO: 15231369 NR Description: unknown protein; protein id: At3g07030.1 thaliana] >gi|6729010|gb|AAF27007.1|AC016827_18 unknown protein

SEQ ID NO: 95577 - DNA, 2283 bp, Arabidopsis thaliana; identical to SEQ ID NO: 91821
  misc_feature (1)..(2283): Ceres Seq. ID no. 12729657
  misc_feature: MA Experiment ID: 20000307 Result: Down-regulated in Transcription
  misc_feature: MA Experiment 20000307 PARAMETER Experiment Name: At_Germinating_Seeds_Sub_P Parameter: Age (hr) Value: 24 vs. 0
  misc_feature: MA Experiment 20000307 PARAMETER Experiment Name: At_Germinating_Seeds_Sub_P Parameter: Organism Value: A. thaliana
  misc_feature: MA Experiment 20000307 PARAMETER Experiment Name: At_Germinating_Seeds_Sub_P Parameter: Plant Line Value: WS
  misc_feature: MA Experiment 20000307 PARAMETER Experiment Name: At_Germinating_Seeds_Sub_P Parameter: Tissue Value: Germinating Seeds
  misc_feature: MA Experiment ID: 20000328 Result: Down-regulated in Transcription
  misc_feature: MA Experiment 20000328 PARAMETER Experiment Name: At_42deg_Heat_Sub_P Parameter: Age (day) Value: 14
  misc_feature: MA Experiment 20000328 PARAMETER Experiment Name: At_42deg_Heat_Sub_P Parameter: Organism Value: A. thaliana
  misc_feature: MA Experiment 20000328 PARAMETER Experiment Name: At_42deg_Heat_Sub_P Parameter: Plant Line Value: WS
  misc_feature: MA Experiment 20000328 PARAMETER Experiment Name: At_42deg_Heat_Sub_P Parameter: Temperature (deg C) Value: 42 vs. 22
  misc_feature: MA Experiment 20000328 PARAMETER Experiment Name: At_42deg_Heat_Sub_P Parameter: Timepoint (hr) Value: 6
  misc_feature: MA Experiment 20000328 PARAMETER Experiment Name: At_42deg_Heat_Sub_P Parameter: Tissue Value: Aerial

SEQ ID NO: 95578 - protein, 760 aa, Arabidopsis thaliana; identical to SEQ ID NO: 91822
  peptide (1)..(760): Ceres Seq. ID no. 12729658
  misc_feature (218)..(252): Pfam Name: PPR repeat Pfam Description: PPR repeat
  misc_feature (32)..(760): Homolog of NCBI NO: 15227144 NR Description: hypothetical protein; protein id: At2g22070.1
  misc_feature (30)..(760): Homolog of NCBI NO: 34393605 NR Description: pentatricopeptide (PPR) repeat-containing
  misc_feature (320)..(760): Homolog of NCBI NO: 15234006 NR Description: putative protein; protein id: At4g18750.1
  misc_feature (22)..(311): Homolog of NCBI NO: 15234006 NR Description: putative protein; protein id: At4g18750.1
  misc_feature (56)..(760): Homolog of NCBI NO: 34896896 NR Description: hypothetical protein [Oryza sativa (japonica group)] >gi|24899461|gb|AAN65031.1| hypothetical protein [Oryza
  misc_feature (315)..(760): Homolog of NCBI NO: 34915012 NR Description: P0458A05.10 [Oryza sativa (japonica
  misc_feature (36)..(320): Homolog of NCBI NO: 34915012 NR Description: P0458A05.10 [Oryza sativa (japonica
  misc_feature (332)..(760): Homolog of NCBI NO: 38606535 NR Description: OSJNBa0016O02.23 [Oryza sativa (japonica
  misc_feature (30)..(224): Homolog of NCBI NO: 38606535 NR Description: OSJNBa0016O02.23 [Oryza sativa (japonica
  misc_feature (35)..(231): Homolog of NCBI NO: 38606535 NR Description: OSJNBa0016O02.23 [Oryza sativa (japonica

SEQ ID NO: 95579 - protein, 654 aa, Arabidopsis thaliana; identical to SEQ ID NO: 91823
  peptide (1)..(654): Ceres Seq. ID no. 12729659
  misc_feature (112)..(146): Pfam Name: PPR repeat Pfam Description: PPR repeat
  misc_feature (1)..(654): Homolog of NCBI NO: 15227144 NR Description: hypothetical protein; protein id: At2g22070.1
  misc_feature (1)..(654): Homolog of NCBI NO: 34393605 NR Description: pentatricopeptide (PPR) repeat-containing
  misc_feature (214)..(654): Homolog of NCBI NO: 15234006 NR Description: putative protein; protein id: At4g18750.1
  misc_feature (1)..(205): Homolog of NCBI NO: 15234006 NR Description: putative protein; protein id: At4g18750.1
  misc_feature (1)..(654): Homolog of NCBI NO: 34896896 NR Description: hypothetical protein [Oryza sativa (japonica group)] >gi|24899461|gb|AAN65031.1| hypothetical protein [Oryza
  misc_feature (209)..(654): Homolog of NCBI NO: 34915012 NR Description: P0458A05.10 [Oryza sativa (japonica
  misc_feature (1)..(214): Homolog of NCBI NO: 34915012 NR Description: P0458A05.10 [Oryza sativa (japonica
  misc_feature (226)..(654): Homolog of NCBI NO: 38606535 NR Description: OSJNBa0016O02.23 [Oryza sativa (japonica
  misc_feature (1)..(118): Homolog of NCBI NO: 38606535 NR Description: OSJNBa0016O02.23 [Oryza sativa (japonica
  misc_feature (1)..(125): Homolog of NCBI NO: 38606535 NR Description: OSJNBa0016O02.23 [Oryza sativa (japonica

SEQ ID NO: 95580 - protein, 612 aa, Arabidopsis thaliana; identical to SEQ ID NO: 91824
  peptide (1)..(612): Ceres Seq. ID no. 12729660
  misc_feature (70)..(104): Pfam Name: PPR repeat Pfam Description: PPR repeat
  misc_feature (1)..(612): Homolog of NCBI NO: 15227144 NR Description: hypothetical protein; protein id: At2g22070.1
  misc_feature (1)..(612): Homolog of NCBI NO: 34393605 NR Description: pentatricopeptide (PPR) repeat-containing
  misc_feature (172)..(612): Homolog of NCBI NO: 15234006 NR Description: putative protein; protein id: At4g18750.1
  misc_feature (1)..(163): Homolog of NCBI NO: 15234006 NR Description: putative protein; protein id: At4g18750.1
  misc_feature (1)..(612): Homolog of NCBI NO: 34896896 NR Description: hypothetical protein [Oryza sativa (japonica group)] >gi|24899461|gb|AAN65031.1| hypothetical protein [Oryza
  misc_feature (167)..(612): Homolog of NCBI NO: 34915012 NR Description: P0458A05.10 [Oryza sativa (japonica
  misc_feature (1)..(172): Homolog of NCBI NO: 34915012 NR Description: P0458A05.10 [Oryza sativa (japonica
  misc_feature (184)..(612): Homolog of NCBI NO: 38606535 NR Description: OSJNBa0016O02.23 [Oryza sativa (japonica
  misc_feature (1)..(76): Homolog of NCBI NO: 38606535 NR Description: OSJNBa0016O02.23 [Oryza sativa (japonica
  misc_feature (1)..(83): Homolog of NCBI NO: 38606535 NR Description: OSJNBa0016O02.23 [Oryza sativa (japonica

SEQ ID NO: 95581 - DNA, 1828 bp, Arabidopsis thaliana; identical to SEQ ID NO: 91825
  misc_feature (1)..(1828): Ceres Seq. ID no. 12729665
  misc_feature: MA Experiment ID: 20000173 Result: Down-regulated in Transcription
  misc_feature: MA Experiment 20000173 PARAMETER Experiment Name: At_42deg_Heat_P Parameter: Age (day) Value: 14
  misc_feature: MA Experiment 20000173 PARAMETER Experiment Name: At_42deg_Heat_P Parameter: Organism Value: A. thaliana
  misc_feature: MA Experiment 20000173 PARAMETER Experiment Name: At_42deg_Heat_P Parameter: Plant Line Value: WS
  misc_feature: MA Experiment 20000173 PARAMETER Experiment Name: At_42deg_Heat_P Parameter: Temperature (deg C) Value: 42 vs. 22
  misc_feature: MA Experiment 20000173 PARAMETER Experiment Name: At_42deg_Heat_P Parameter: Timepoint (hr) Value: 6
  misc_feature: MA Experiment 20000173 PARAMETER Experiment Name: At_42deg_Heat_P Parameter: Tissue Value: Aerial
  misc_feature: MA Experiment ID: 20000179 Result: Down-regulated in Transcription
  misc_feature: MA Experiment 20000179 PARAMETER Experiment Name: At_Germinating_Seeds_P Parameter: Age (hr) Value: 6 vs. 0
  misc_feature: MA Experiment 20000179 PARAMETER Experiment Name: At_Germinating_Seeds_P Parameter: Tissue Value: Germinating Seeds
  misc_feature: MA Experiment ID: 20000180 Result: Down-regulated in Transcription
  misc_feature: MA Experiment 20000180 PARAMETER Experiment Name: At_Germinating_Seeds_P Parameter: Age (hr) Value: 24 vs. 0
  misc_feature: MA Experiment 20000180 PARAMETER Experiment Name: At_Germinating_Seeds_P Parameter: Tissue Value: Germinating Seeds
  misc_feature: MA Experiment ID: 20000185 Result: Down-regulated in Transcription
  misc_feature: MA Experiment 20000185 PARAMETER Experiment Name: At_Roots__P Parameter: Age (day) Value: 7 vs. 21
  misc_feature: MA Experiment 20000185 PARAMETER Experiment Name: At_Roots__P Parameter: Organism Value: A. thaliana
  misc_feature: MA Experiment 20000185 PARAMETER Experiment Name: At_Roots__P Parameter: Tissue Value: Roots vs. Whole Plant

SEQ ID NO: 95582 - protein, 555 aa, Arabidopsis thaliana; identical to SEQ ID NO: 91826
  peptide (1)..(555): Ceres Seq. ID no. 12729666
  misc_feature (484)..(518): Pfam Name: PPR repeat Pfam Description: PPR repeat
  misc_feature (19)..(555): Homolog of NCBI NO: 18394846 NR Description: expressed protein; protein id: At1g20300.1, by cDNA: gi_15450346, supported by cDNA: gi_17386103 [Arabidopsis
  misc_feature (117)..(555): Homolog of NCBI NO: 14488357 NR Description: unknown protein [Oryza sativa (japonica
  misc_feature (107)..(555): Homolog of NCBI NO: 15223926 NR Description: hypothetical protein; protein id: At1g77360.1
  misc_feature (126)..(545): Homolog of NCBI NO: 15223927 NR Description: hypothetical protein; protein id: At1g71060.1
  misc_feature (126)..(545): Homolog of NCBI NO: 15219049 NR Description: hypothetical protein; protein id: At1g52640.1
  misc_feature (105)..(549): Homolog of NCBI NO: 15222036 NR Description: hypothetical protein; protein id: At1g74900.1
  misc_feature (115)..(541): Homolog of NCBI NO: 15229604 NR Description: putative protein; protein id: At3g49730.1
  misc_feature (128)..(547): Homolog of NCBI NO: 21686921 NR Description: putative reverse transcriptase [Oryza sativa
  misc_feature (115)..(549): Homolog of NCBI NO: 15239161 NR Description: putative protein; protein id: At5g65820.1
  misc_feature (135)..(544): Homolog of NCBI NO: 15228767 NR Description: putative protein; protein id: At3g62470.1

SEQ ID NO: 95583 - protein, 537 aa, Arabidopsis thaliana; identical to SEQ ID NO: 91827
  peptide (1)..(537): Ceres Seq. ID no. 12729667
  misc_feature (466)..(500): Pfam Name: PPR repeat Pfam Description: PPR repeat
  misc_feature (1)..(537): Homolog of NCBI NO: 18394846 NR Description: expressed protein; protein id: At1g20300.1, by cDNA: gi_15450346, supported by cDNA: gi_17386103 [Arabidopsis
  misc_feature (99)..(537): Homolog of NCBI NO: 14488357 NR Description: unknown protein [Oryza sativa (japonica
  misc_feature (89)..(537): Homolog of NCBI NO: 15223926 NR Description: hypothetical protein; protein id: At1g77360.1
  misc_feature (108)..(527): Homolog of NCBI NO: 15223927 NR Description: hypothetical protein; protein id: At1g71060.1
  misc_feature (108)..(527): Homolog of NCBI NO: 15219049 NR Description: hypothetical protein; protein id: At1g52640.1
  misc_feature (87)..(531): Homolog of NCBI NO: 15222036 NR Description: hypothetical protein; protein id: At1g74900.1
  misc_feature (97)..(523): Homolog of NCBI NO: 15229604 NR Description: putative protein; protein id: At3g49730.1
  misc_feature (110)..(529): Homolog of NCBI NO: 21686921 NR Description: putative reverse transcriptase [Oryza sativa
  misc_feature (97)..(531): Homolog of NCBI NO: 15239161 NR Description: putative protein; protein id: At5g65820.1
  misc_feature (117)..(526): Homolog of NCBI NO: 15228767 NR Description: putative protein; protein id: At3g62470.1

SEQ ID NO: 95584 - protein, 381 aa, Arabidopsis thaliana; identical to SEQ ID NO: 91828
  peptide (1)..(381): Ceres Seq. ID no. 12729668
  misc_feature (310)..(344): Pfam Name: PPR repeat Pfam Description: PPR repeat
  misc_feature (1)..(381): Homolog of NCBI NO: 18394846 NR Description: expressed protein; protein id: At1g20300.1, by cDNA: gi_15450346, supported by cDNA: gi_17386103 [Arabidopsis
  misc_feature (1)..(381): Homolog of NCBI NO: 14488357 NR Description: unknown protein [Oryza sativa (japonica
  misc_feature (1)..(381): Homolog of NCBI NO: 15223926 NR Description: hypothetical protein; protein id: At1g77360.1
  misc_feature (1)..(371): Homolog of NCBI NO: 15223927 NR Description: hypothetical protein; protein id: At1g71060.1
  misc_feature (1)..(371): Homolog of NCBI NO: 15219049 NR Description: hypothetical protein; protein id: At1g52640.1
  misc_feature (1)..(375): Homolog of NCBI NO: 15222036 NR Description: hypothetical protein; protein id: At1g74900.1
  misc_feature (1)..(367): Homolog of NCBI NO: 15229604 NR Description: putative protein; protein id: At3g49730.1
  misc_feature (1)..(373): Homolog of NCBI NO: 21686921 NR Description: putative reverse transcriptase [Oryza sativa
  misc_feature (1)..(375): Homolog of NCBI NO: 15239161 NR Description: putative protein; protein id: At5g65820.1
  misc_feature (1)..(370): Homolog of NCBI NO: 15228767 NR Description: putative protein; protein id: At3g62470.1

SEQ ID NO: 95585 - DNA, 1837 bp, Arabidopsis thaliana; identical to SEQ ID NO: 91829
  misc_feature (1)..(1837): Ceres Seq. ID no. 12729691
  misc_feature: MA Experiment ID: 20000171 Result: Down-regulated in Transcription
  misc_feature: MA Experiment 20000171 PARAMETER Experiment Name: At_42deg_Heat_P Parameter: Age (day) Value: 14
  misc_feature: MA Experiment 20000171 PARAMETER Experiment Name: At_42deg_Heat_P Parameter: Organism Value: A. thaliana
  misc_feature: MA Experiment 20000171 PARAMETER Experiment Name: At_42deg_Heat_P Parameter: Plant Line Value: WS
  misc_feature: MA Experiment 20000171 PARAMETER Experiment Name: At_42deg_Heat_P Parameter: Temperature (deg C) Value: 42 vs. 22
  misc_feature: MA Experiment 20000171 PARAMETER Experiment Name: At_42deg_Heat_P Parameter: Timepoint (hr) Value: 1
  misc_feature: MA Experiment 20000171 PARAMETER Experiment Name: At_42deg_Heat_P Parameter: Tissue Value: Aerial
  misc_feature: MA Experiment ID: 20000173 Result: Down-regulated in Transcription
  misc_feature: MA Experiment 20000173 PARAMETER Experiment Name: At_42deg_Heat_P Parameter: Age (day) Value: 14
  misc_feature: MA Experiment 20000173 PARAMETER Experiment Name: At_42deg_Heat_P Parameter: Organism Value: A. thaliana
  misc_feature: MA Experiment 20000173 PARAMETER Experiment Name: At_42deg_Heat_P Parameter: Plant Line Value: WS
  misc_feature: MA Experiment 20000173 PARAMETER Experiment Name: At_42deg_Heat_P Parameter: Temperature (deg C) Value: 42 vs. 22
  misc_feature: MA Experiment 20000173 PARAMETER Experiment Name: At_42deg_Heat_P Parameter: Timepoint (hr) Value: 6
  misc_feature: MA Experiment 20000173 PARAMETER Experiment Name: At_42deg_Heat_P Parameter: Tissue Value: Aerial
  misc_feature: MA Experiment ID: 20000182 Result: Up-regulated in Transcription
  misc_feature: MA Experiment 20000182 PARAMETER Experiment Name: At_2mM_SA_P Parameter: Age (day) Value: 14
  misc_feature: MA Experiment 20000182 PARAMETER Experiment Name: At_2mM_SA_P Parameter: Organism Value: A. thaliana
  misc_feature: MA Experiment 20000182 PARAMETER Experiment Name: At_2mM_SA_P Parameter: Plant Line Value: WS
  misc_feature: MA Experiment 20000182 PARAMETER Experiment Name: At_2mM_SA_P Parameter: Timepoint (hr) Value: 6
  misc_feature: MA Experiment 20000182 PARAMETER Experiment Name: At_2mM_SA_P Parameter: Tissue Value: Aerial
  misc_feature: MA Experiment 20000182 PARAMETER Experiment Name: At_2mM_SA_P Parameter: Treatment Value: 2mM SA vs. No Treatment
  misc_feature: MA Experiment ID: 20000184 Result: Down-regulated in Transcription
  misc_feature: MA Experiment 20000184 PARAMETER Experiment Name: At_Shoots__P Parameter: Age (day) Value: 7
  misc_feature: MA Experiment 20000184 PARAMETER Experiment Name: At_Shoots__P Parameter: Tissue Value: Shoots vs. Whole Plant
  misc_feature: MA Experiment ID: 20000185 Result: Down-regulated in Transcription
  misc_feature: MA Experiment 20000185 PARAMETER Experiment Name: At_Roots__P Parameter: Age (day) Value: 7 vs. 21
  misc_feature: MA Experiment 20000185 PARAMETER Experiment Name: At_Roots__P Parameter: Organism Value: A. thaliana
  misc_feature: MA Experiment 20000185 PARAMETER Experiment Name: At_Roots__P Parameter: Tissue Value: Roots vs. Whole Plant
  misc_feature: MA Experiment ID: 20000211 Result: Up-regulated in Transcription
  misc_feature: MA Experiment 20000211 PARAMETER Experiment Name: At_0.001percent_MeJA__P Parameter: Age (day) Value: 14
  misc_feature: MA Experiment 20000211 PARAMETER Experiment Name: At_0.001percent_MeJA__P Parameter: Organism Value: A. thaliana
  misc_feature: MA Experiment 20000211 PARAMETER Experiment Name: At_0.001percent_MeJA__P Parameter: Plant Line Value: WS
  misc_feature: MA Experiment 20000211 PARAMETER Experiment Name: At_0.001percent_MeJA__P Parameter: Timepoint (hr) Value: 1
  misc_feature: MA Experiment 20000211 PARAMETER Experiment Name: At_0.001percent_MeJA__P Parameter: Tissue Value: Aerial
  misc_feature: MA Experiment 20000211 PARAMETER Experiment Name: At_0.001percent_MeJA__P Parameter: Treatment Value: 0.001percent MeJA vs. No Treatment
  misc_feature: MA Experiment ID: 20000213 Result: Up-regulated in Transcription
  misc_feature: MA Experiment 20000213 PARAMETER Experiment Name: At_4deg_Cold_P Parameter: Timepoint (hr) Value: 2
  misc_feature: MA Experiment ID: 20000234 Result: Down-regulated in Transcription
  misc_feature: MA Experiment 20000234 PARAMETER Experiment Name: At_Siliques_P Parameter: Age (day) Value: 21
  misc_feature: MA Experiment 20000234 PARAMETER Experiment Name: At_Siliques_P Parameter: Organism Value: A. thaliana
  misc_feature: MA Experiment 20000234 PARAMETER Experiment Name: At_Siliques_P Parameter: Plant Line Value: WS
  misc_feature: MA Experiment 20000234 PARAMETER Experiment Name: At_Siliques_P Parameter: Tissue Value: Less Than 5mm Siliques vs. Whole Plant
  misc_feature: MA Experiment ID: 20000264 Result: Down-regulated in Transcription
  misc_feature: MA Experiment 20000264 PARAMETER Experiment Name: At_Open_Flower_P Parameter: Age (day) Value: 21
  misc_feature: MA Experiment 20000264 PARAMETER Experiment Name: At_Open_Flower_P Parameter: Plant Line Value: WS
  misc_feature: MA Experiment 20000264 PARAMETER Experiment Name: At_Open_Flower_P Parameter: Tissue Value: Open Flower vs. Whole Plant
  misc_feature: MA Experiment ID: 20000265 Result: Down-regulated in Transcription
  misc_feature: MA Experiment 20000265 PARAMETER Experiment Name: At_Open_Flower_P Parameter: Age (day) Value: 21
  misc_feature: MA Experiment 20000265 PARAMETER Experiment Name: At_Open_Flower_P Parameter: Plant Line Value: WS
  misc_feature: MA Experiment 20000265 PARAMETER Experiment Name: At_Open_Flower_P Parameter: Tissue Value: Closed Flower vs. Whole Plant
  misc_feature: MA Experiment ID: 20000286 Result: Down-regulated in Transcription
  misc_feature: MA Experiment 20000286 PARAMETER Experiment Name: At_Open_Flower_P Parameter: Age (day) Value: 21
  misc_feature: MA Experiment 20000286 PARAMETER Experiment Name: At_Open_Flower_P Parameter: Plant Line Value: WS
  misc_feature: MA Experiment 20000286 PARAMETER Experiment Name: At_Open_Flower_P Parameter: Tissue Value: Half Open vs. Whole Plant
  misc_feature: MA Experiment ID: 20000438 Result: Down-regulated in Transcription
  misc_feature: MA Experiment 20000438 PARAMETER Experiment Name: At_Shoots__P Parameter: Age (day) Value: 14
  misc_feature: MA Experiment 20000438 PARAMETER Experiment Name: At_Shoots__P Parameter: Tissue Value: Shoots vs. Whole Plant
  misc_feature: MA Experiment ID: 20000439 Result: Down-regulated in Transcription
  misc_feature: MA Experiment 20000439 PARAMETER Experiment Name: At_Roots__P Parameter: Age (day) Value: 14 vs. 21
  misc_feature: MA Experiment 20000439 PARAMETER Experiment Name: At_Roots__P Parameter: Organism Value: A. thaliana
  misc_feature: MA Experiment 20000439 PARAMETER Experiment Name: At_Roots__P Parameter: Tissue Value: Roots vs. Whole Plant
  misc_feature: MA Experiment ID: 20000460 Result: Up-regulated in Transcription
  misc_feature: MA Experiment 20000460 PARAMETER Experiment Name: At_10percent_PEG_P Parameter: Age (day) Value: 12
  misc_feature: MA Experiment 20000460 PARAMETER Experiment Name: At_10percent_PEG_P Parameter: Organism Value: A. thaliana
  misc_feature: MA Experiment 20000460 PARAMETER Experiment Name: At_10percent_PEG_P Parameter: Plant Line Value: WS
  misc_feature: MA Experiment 20000460 PARAMETER Experiment Name: At_10percent_PEG_P Parameter: Timepoint (day) Value: 12
  misc_feature: MA Experiment 20000460 PARAMETER Experiment Name: At_10percent_PEG_P Parameter: Tissue Value: Whole Plant
  misc_feature: MA Experiment 20000460 PARAMETER Experiment Name: At_10percent_PEG_P Parameter: Treatment Value: 10percent PEG vs. No Treatment
  misc_feature: MA Experiment ID: 20000495 Result: Down-regulated in Transcription
  misc_feature: MA Experiment 20000495 PARAMETER Experiment Name: At_Guard_Cells_P Parameter: Harvest Date Value: 8/2/2002
  misc_feature: MA Experiment 20000495 PARAMETER Experiment Name: At_Guard_Cells_P Parameter: Organism Value: A. thaliana
  misc_feature: MA Experiment 20000495 PARAMETER Experiment Name: At_Guard_Cells_P Parameter: Tissue Value: Guard Cells vs. Leaves
  misc_feature: MA Experiment ID: 20000573 Result: Down-regulated in Transcription
  misc_feature: MA Experiment 20000573 PARAMETER Experiment Name: At_100uM_ABA_Mutants__P Parameter: Organism Value: A. thaliana
  misc_feature: MA Experiment 20000573 PARAMETER Experiment Name: At_100uM_ABA_Mutants__P Parameter: Plant Line Value: CS22 vs. Ler wt
  misc_feature: MA Experiment 20000573 PARAMETER Experiment Name: At_100uM_ABA_Mutants__P Parameter: Timepoint (hr) Value: N/A
  misc_feature: MA Experiment 20000573 PARAMETER Experiment Name: At_100uM_ABA_Mutants__P Parameter: Tissue Value: Whole Plant
  misc_feature: MA Experiment 20000573 PARAMETER Experiment Name: At_100uM_ABA_Mutants__P Parameter: Treatment Value: None
  misc_feature: MA Experiment ID: 20000794 Result: Down-regulated in Transcription
  misc_feature: MA Experiment 20000794 PARAMETER Experiment Name: At_Petals_P Parameter: Age (day) Value: 23-25 days
  misc_feature: MA Experiment 20000794 PARAMETER Experiment Name: At_Petals_P Parameter: Plant Line Value: WS
  misc_feature: MA Experiment 20000794 PARAMETER Experiment Name: At_Petals_P Parameter: Tissue Value: Petals vs. Whole plant
  misc_feature: MA Experiment ID: 20001451 Result: Down-regulated in Transcription
  misc_feature: MA Experiment 20001451 PARAMETER Experiment Name: At_Far-red-induction_P Parameter: Age (day) Value: 7
  misc_feature: MA Experiment 20001451 PARAMETER Experiment Name: At_Far-red-induction_P Parameter: Light Value: Far-red vs. White
  misc_feature: MA Experiment 20001451 PARAMETER Experiment Name: At_Far-red-induction_P Parameter: Organism Value: A. thaliana
  misc_feature: MA Experiment 20001451 PARAMETER Experiment Name: At_Far-red-induction_P Parameter: Plant Line Value: Columbia
  misc_feature: MA Experiment 20001451 PARAMETER Experiment Name: At_Far-red-induction_P Parameter: Timepoint (hr) Value: 24
  misc_feature: MA Experiment 20001451 PARAMETER Experiment Name: At_Far-red-induction_P Parameter: Tissue Value: Whole Plant
  misc_feature: MA Experiment ID: 20001560 Result: Down-regulated in Transcription
  misc_feature: MA Experiment 20001560 PARAMETER Experiment Name: At_Drought_Soil_Dry_P Parameter: Age (day) Value: 28
  misc_feature: MA Experiment 20001560 PARAMETER Experiment Name: At_Drought_Soil_Dry_P Parameter: Organism Value: A. thaliana
  misc_feature: MA Experiment 20001560 PARAMETER Experiment Name: At_Drought_Soil_Dry_P Parameter: Plant Line Value: WS
  misc_feature: MA Experiment 20001560 PARAMETER Experiment Name: At_Drought_Soil_Dry_P Parameter: Post Timepoint (hr) Value: None
  misc_feature: MA Experiment 20001560 PARAMETER Experiment Name: At_Drought_Soil_Dry_P Parameter: Post-Treatment Value: None
  misc_feature: MA Experiment 20001560 PARAMETER Experiment Name: At_Drought_Soil_Dry_P Parameter: Timepoint (day) Value: 14
  misc_feature: MA Experiment 20001560 PARAMETER Experiment Name: At_Drought_Soil_Dry_P Parameter: Treatment Value: Drought vs. No Drought
  misc_feature: MA Experiment ID: 20001904 Result: Down-regulated in Transcription
  misc_feature: MA Experiment 20001904 PARAMETER Experiment Name: At_Drought_Reproduction_P Parameter: Age (day) Value: 37
  misc_feature: MA Experiment 20001904 PARAMETER Experiment Name: At_Drought_Reproduction_P Parameter: Organism Value: A. thaliana
  misc_feature: MA Experiment 20001904 PARAMETER Experiment Name: At_Drought_Reproduction_P Parameter: Plant Line Value: WS
  misc_feature: MA Experiment 20001904 PARAMETER Experiment Name: At_Drought_Reproduction_P Parameter: Timepoint (day) Value: 7
  misc_feature: MA Experiment 20001904 PARAMETER Experiment Name: At_Drought_Reproduction_P Parameter: Tissue Value: Rosettes
  misc_feature: MA Experiment 20001904 PARAMETER Experiment Name: At_Drought_Reproduction_P Parameter: Treatment Value: Drought vs. No Drought
  misc_feature: MA Experiment ID: 20001905 Result: Down-regulated in Transcription
  misc_feature: MA Experiment 20001905 PARAMETER Experiment Name: At_Drought_Reproduction_P Parameter: Age (day) Value: 40
  misc_feature: MA Experiment 20001905 PARAMETER Experiment Name: At_Drought_Reproduction_P Parameter: Organism Value: A. thaliana
  misc_feature: MA Experiment 20001905 PARAMETER Experiment Name: At_Drought_Reproduction_P Parameter: Plant Line Value: WS
  misc_feature: MA Experiment 20001905 PARAMETER Experiment Name: At_Drought_Reproduction_P Parameter: Timepoint (day) Value: 10
  misc_feature: MA Experiment 20001905 PARAMETER Experiment Name: At_Drought_Reproduction_P Parameter: Tissue Value: Rosettes
  misc_feature: MA Experiment 20001905 PARAMETER Experiment Name: At_Drought_Reproduction_P Parameter: Treatment Value: Drought vs. No Drought
  misc_feature: MA Experiment ID: 20001911 Result: Down-regulated in Transcription
  misc_feature: MA Experiment 20001911 PARAMETER Experiment Name: At_Drought_Reproduction_P Parameter: Age (day) Value: 40
  misc_feature: MA Experiment 20001911 PARAMETER Experiment Name: At_Drought_Reproduction_P Parameter: Organism Value: A. thaliana
  misc_feature: MA Experiment 20001911 PARAMETER Experiment Name: At_Drought_Reproduction_P Parameter: Plant Line Value: WS
  misc_feature: MA Experiment 20001911 PARAMETER Experiment Name: At_Drought_Reproduction_P Parameter: Timepoint (day) Value: 10
  misc_feature: MA Experiment 20001911 PARAMETER Experiment Name: At_Drought_Reproduction_P Parameter: Tissue Value: Flowers
  misc_feature: MA Experiment 20001911 PARAMETER Experiment Name: At_Drought_Reproduction_P Parameter: Treatment Value: Drought vs. No Drought

SEQ ID NO: 95586 - protein, 550 aa, Arabidopsis thaliana; identical to SEQ ID NO: 91830
  peptide (1)..(550): Ceres Seq. ID no. 12729692
  misc_feature (63)..(475): Pfam Name: AMP-binding enzyme Pfam Description: AMP-binding enzyme
  misc_feature (5)..(550): Homolog of NCBI NO: 18394871 NR Description: expressed protein; protein id: At1g20510.1 thaliana] >gi|13430676|gb|AAK25960.1|AF360250_1 unknown protein thaliana] >gi|14532846|gb|AAK64105.1| unknown protein
  misc_feature (5)..(550): Homolog of NCBI NO: 29893225 NR Description: 4-coumarate-CoA ligase-like protein [Arabidopsis
  misc_feature (5)..(459): Homolog of NCBI NO: 8778603 NR Description: F5M15.17 [Arabidopsis thaliana]
  misc_feature (455)..(550): Homolog of NCBI NO: 8778603 NR Description: F5M15.17 [Arabidopsis thaliana]
  misc_feature (8)..(541): Homolog of NCBI NO: 25402913 NR Description: protein F5M15.18 [imported] - Arabidopsis >gi|8778604|gb|AAF79612.1|AC027665_13 F5M15.18 [Arabidopsis
  misc_feature (1)..(546): Homolog of NCBI NO: 15217956 NR Description: hypothetical protein; protein id: At1g20480.1
  misc_feature (1)..(546): Homolog of NCBI NO: 29888143 NR Description: 4-coumarate-CoA ligase-like protein [Arabidopsis
  misc_feature (3)..(546): Homolog of NCBI NO: 29888141 NR Description: 4-coumarate-CoA ligase-like protein [Arabidopsis
  misc_feature (3)..(546): Homolog of NCBI NO: 30693203 NR Description: 4-coumarate:CoA ligase (4-coumaroyl-CoA synthase)
  misc_feature (8)..(405): Homolog of NCBI NO: 15217958 NR Description: hypothetical protein; protein id: At1g20490.1

SEQ ID NO: 95587 - protein, 546 aa, Arabidopsis thaliana; identical to SEQ ID NO: 91831
  peptide (1)..(546): Ceres Seq. ID no. 12729693
  misc_feature (59)..(471): Pfam Name: AMP-binding enzyme Pfam Description: AMP-binding enzyme
  misc_feature (1)..(546): Homolog of NCBI NO: 18394871 NR Description: expressed protein; protein id: At1g20510.1 thaliana] >gi|13430676|gb|AAK25960.1|AF360250_1 unknown protein thaliana] >gi|14532846|gb|AAK64105.1| unknown protein
  misc_feature (1)..(546): Homolog of NCBI NO: 29893225 NR Description: 4-coumarate-CoA ligase-like protein [Arabidopsis
  misc_feature (1)..(455): Homolog of NCBI NO: 8778603 NR Description: F5M15.17 [Arabidopsis thaliana]
  misc_feature (451)..(546): Homolog of NCBI NO: 8778603 NR Description: F5M15.17 [Arabidopsis thaliana]
  misc_feature (4)..(537): Homolog of NCBI NO: 25402913 NR Description: protein F5M15.18 [imported] - Arabidopsis >gi|8778604|gb|AAF79612.1|AC027665_13 F5M15.18 [Arabidopsis
  misc_feature (1)..(542): Homolog of NCBI NO: 15217956 NR Description: hypothetical protein; protein id: At1g20480.1
  misc_feature (1)..(542): Homolog of NCBI NO: 29888143 NR Description: 4-coumarate-CoA ligase-like protein [Arabidopsis
  misc_feature (1)..(542): Homolog of NCBI NO: 29888141 NR Description: 4-coumarate-CoA ligase-like protein [Arabidopsis
  misc_feature (1)..(542): Homolog of NCBI NO: 30693203 NR Description: 4-coumarate:CoA ligase (4-coumaroyl-CoA synthase)
  misc_feature (4)..(401): Homolog of NCBI NO: 15217958 NR Description: hypothetical protein; protein id: At1g20490.1

SEQ ID NO: 95588 - protein, 444 aa, Arabidopsis thaliana; identical to SEQ ID NO: 91832
  peptide (1)..(444): Ceres Seq. ID no. 12729694
  misc_feature (1)..(369): Pfam Name: AMP-binding enzyme Pfam Description: AMP-binding enzyme
  misc_feature (1)..(444): Homolog of NCBI NO: 18394871 NR Description: expressed protein; protein id: At1g20510.1 thaliana] >gi|13430676|gb|AAK25960.1|AF360250_1 unknown protein thaliana] >gi|14532846|gb|AAK64105.1| unknown protein
  misc_feature (1)..(444): Homolog of NCBI NO: 29893225 NR Description: 4-coumarate-CoA ligase-like protein [Arabidopsis
  misc_feature (1)..(353): Homolog of NCBI NO: 8778603 NR Description: F5M15.17 [Arabidopsis thaliana]
  misc_feature (349)..(444): Homolog of NCBI NO: 8778603 NR Description: F5M15.17 [Arabidopsis thaliana]
  misc_feature (1)..(435): Homolog of NCBI NO: 25402913 NR Description: protein F5M15.18 [imported] - Arabidopsis >gi|8778604|gb|AAF79612.1|AC027665_13 F5M15.18 [Arabidopsis
  misc_feature (1)..(440): Homolog of NCBI NO: 15217956 NR Description: hypothetical protein; protein id: At1g20480.1
  misc_feature (1)..(440): Homolog of NCBI NO: 29888143 NR Description: 4-coumarate-CoA ligase-like protein [Arabidopsis
  misc_feature (1)..(440): Homolog of NCBI NO: 29888141 NR Description: 4-coumarate-CoA ligase-like protein [Arabidopsis
  misc_feature (1)..(440): Homolog of NCBI NO: 30693203 NR Description: 4-coumarate:CoA ligase (4-coumaroyl-CoA synthase)
  misc_feature (1)..(299): Homolog of NCBI NO: 15217958 NR Description: hypothetical protein; protein id: At1g20490.1

SEQ ID NO: 95589 - DNA, 3068 bp, Arabidopsis thaliana; identical to SEQ ID NO: 91833
  misc_feature (1)..(3068): Ceres Seq. ID no. 12729703
  misc_feature: MA Experiment ID: 20000307 Result: Up-regulated in Transcription
  misc_feature: MA Experiment 20000307 PARAMETER Experiment Name: At_Germinating_Seeds_Sub_P Parameter: Age (hr) Value: 24 vs. 0
  misc_feature: MA Experiment 20000307 PARAMETER Experiment Name: At_Germinating_Seeds_Sub_P Parameter: Organism Value: A. thaliana
  misc_feature: MA Experiment 20000307 PARAMETER Experiment Name: At_Germinating_Seeds_Sub_P Parameter: Plant Line Value: WS
  misc_feature: MA Experiment 20000307 PARAMETER Experiment Name: At_Germinating_Seeds_Sub_P Parameter: Tissue Value: Germinating Seeds
  misc_feature: MA Experiment ID: 20000327 Result: Up-regulated in Transcription
  misc_feature: MA Experiment 20000327 PARAMETER Experiment Name: At_42deg_Heat_Sub_P Parameter: Age (day) Value: 14
  misc_feature: MA Experiment 20000327 PARAMETER Experiment Name: At_42deg_Heat_Sub_P Parameter: Organism Value: A. thaliana
  misc_feature: MA Experiment 20000327 PARAMETER Experiment Name: At_42deg_Heat_Sub_P Parameter: Plant Line Value: WS
  misc_feature: MA Experiment 20000327 PARAMETER Experiment Name: At_42deg_Heat_Sub_P Parameter: Temperature (deg C) Value: 42 vs. 22
  misc_feature: MA Experiment 20000327 PARAMETER Experiment Name: At_42deg_Heat_Sub_P Parameter: Timepoint (hr) Value: 1
  misc_feature: MA Experiment 20000327 PARAMETER Experiment Name: At_42deg_Heat_Sub_P Parameter: Tissue Value: Aerial

SEQ ID NO: 95590 - protein, 844 aa, Arabidopsis thaliana; identical to SEQ ID NO: 91834
  peptide (1)..(844): Ceres Seq. ID no. 12729704
  misc_feature (744)..(827): Pfam Name: PB1 domain Pfam Description: PB1 domain
  misc_feature (1)..(722): Homolog of NCBI NO: 15223014 NR Description: hypothetical protein; protein id: At1g76350.1
  misc_feature (663)..(838): Homolog of NCBI NO: 15223014 NR Description: hypothetical protein; protein id: At1g76350.1
  misc_feature (92)..(682): Homolog of NCBI NO: 33468530 NR Description: NIN-like protein 1 [Lotus corniculatus var.
  misc_feature (663)..(828): Homolog of NCBI NO: 33468530 NR Description: NIN-like protein 1 [Lotus corniculatus var.
  misc_feature (13)..(63): Homolog of NCBI NO: 33468530 NR Description: NIN-like protein 1 [Lotus corniculatus var.
  misc_feature (104)..(480): Homolog of NCBI NO: 20503001 NR Description: Putataive nodule inception protein [Oryza sativa
  misc_feature (520)..(719): Homolog of NCBI NO: 20503001 NR Description: Putataive nodule inception protein [Oryza sativa
  misc_feature (724)..(827): Homolog of NCBI NO: 20503001 NR Description: Putataive nodule inception protein [Oryza sativa
  misc_feature (81)..(499): Homolog of NCBI NO: 7486018 NR Description: hypothetical protein F23E12.170 - Arabidopsis >gi|3080423|emb|CAA18742.1| putative protein [Arabidopsis >gi|7270479|emb|CAB80244.1| putative protein [Arabidopsis
  misc_feature (549)..(828): Homolog of NCBI NO: 7486018 NR Description: hypothetical protein F23E12.170 - Arabidopsis >gi|3080423|emb|CAA18742.1| putative protein [Arabidopsis >gi|7270479|emb|CAB80244.1| putative protein [Arabidopsis

SEQ ID NO: 95591 - protein, 832 aa, Arabidopsis thaliana; identical to SEQ ID NO: 91835
  peptide (1)..(832): Ceres Seq. ID no. 12729705
  misc_feature (732)..(815): Pfam Name: PB1 domain Pfam Description: PB1 domain
  misc_feature (1)..(710): Homolog of NCBI NO: 15223014 NR Description: hypothetical protein; protein id: At1g76350.1
  misc_feature (651)..(826): Homolog of NCBI NO: 15223014 NR Description: hypothetical protein; protein id: At1g76350.1
  misc_feature (80)..(670): Homolog of NCBI NO: 33468530 NR Description: NIN-like protein 1 [Lotus corniculatus var.
  misc_feature (651)..(816): Homolog of NCBI NO: 33468530 NR Description: NIN-like protein 1 [Lotus corniculatus var.
  misc_feature (1)..(51): Homolog of NCBI NO: 33468530 NR Description: NIN-like protein 1 [Lotus corniculatus var.
  misc_feature (92)..(468): Homolog of NCBI NO: 20503001 NR Description: Putataive nodule inception protein [Oryza sativa
  misc_feature (508)..(707): Homolog of NCBI NO: 20503001 NR Description: Putataive nodule inception protein [Oryza sativa
  misc_feature (712)..(815): Homolog of NCBI NO: 20503001 NR Description: Putataive nodule inception protein [Oryza sativa
  misc_feature (69)..(487): Homolog of NCBI NO: 7486018 NR Description: hypothetical protein F23E12.170 - Arabidopsis >gi|3080423|emb|CAA18742.1| putative protein [Arabidopsis >gi|7270479|emb|CAB80244.1| putative protein [Arabidopsis
  misc_feature (537)..(816): Homolog of NCBI NO: 7486018 NR Description: hypothetical protein F23E12.170 - Arabidopsis >gi|3080423|emb|CAA18742.1| putative protein [Arabidopsis >gi|7270479|emb|CAB80244.1| putative protein [Arabidopsis

SEQ ID NO: 95592 - protein, 827 aa, Arabidopsis thaliana; identical to SEQ ID NO: 91836
  peptide (1)..(827): Ceres Seq. ID no. 12729706
  misc_feature (727)..(810): Pfam Name: PB1 domain Pfam Description: PB1 domain
  misc_feature (1)..(705): Homolog of NCBI NO: 15223014 NR Description: hypothetical protein; protein id: At1g76350.1
  misc_feature (646)..(821): Homolog of NCBI NO: 15223014 NR Description: hypothetical protein; protein id: At1g76350.1
  misc_feature (75)..(665): Homolog of NCBI NO: 33468530 NR Description: NIN-like protein 1 [Lotus corniculatus var.
  misc_feature (646)..(811): Homolog of NCBI NO: 33468530 NR Description: NIN-like protein 1 [Lotus corniculatus var.
  misc_feature (1)..(46): Homolog of NCBI NO: 33468530 NR Description: NIN-like protein 1 [Lotus corniculatus var.
  misc_feature (87)..(463): Homolog of NCBI NO: 20503001 NR Description: Putataive nodule inception protein [Oryza sativa
  misc_feature (503)..(702): Homolog of NCBI NO: 20503001 NR Description: Putataive nodule inception protein [Oryza sativa
  misc_feature (707)..(810): Homolog of NCBI NO: 20503001 NR Description: Putataive nodule inception protein [Oryza sativa
  misc_feature (64)..(482): Homolog of NCBI NO: 7486018 NR Description: hypothetical protein F23E12.170 - Arabidopsis >gi|3080423|emb|CAA18742.1| putative protein [Arabidopsis >gi|7270479|emb|CAB80244.1| putative protein [Arabidopsis
  misc_feature (532)..(811): Homolog of NCBI NO: 7486018 NR Description: hypothetical protein F23E12.170 - Arabidopsis >gi|3080423|emb|CAA18742.1| putative protein [Arabidopsis >gi|7270479|emb|CAB80244.1| putative protein [Arabidopsis

SEQ ID NO: 95593 - DNA, 636 bp, Arabidopsis thaliana; identical to SEQ ID NO: 91837
  misc_feature (1)..(636): Ceres Seq. ID no. 12729711
  misc_feature: MA Experiment ID: 20000185 Result: Up-regulated in Transcription
  misc_feature: MA Experiment 20000185 PARAMETER Experiment Name: At_Roots__P Parameter: Age (day) Value: 7 vs. 21
  misc_feature: MA Experiment 20000185 PARAMETER Experiment Name: At_Roots__P Parameter: Organism Value: A. thaliana
  misc_feature: MA Experiment 20000185 PARAMETER Experiment Name: At_Roots__P Parameter: Tissue Value: Roots vs. Whole Plant
  misc_feature: MA Experiment ID: 20000227 Result: Down-regulated in Transcription
  misc_feature: MA Experiment 20000227 PARAMETER Experiment Name: At_Root-Tips-vs-Tops_P Parameter: Tissue Value: Root Tips vs. Root Tops
  misc_feature: MA Experiment ID: 20000234 Result: Down-regulated in Transcription
  misc_feature: MA Experiment 20000234 PARAMETER Experiment Name: At_Siliques_P Parameter: Age (day) Value: 21
  misc_feature: MA Experiment 20000234 PARAMETER Experiment Name: At_Siliques_P Parameter: Organism Value: A. thaliana
  misc_feature: MA Experiment 20000234 PARAMETER Experiment Name: At_Siliques_P Parameter: Plant Line Value: WS
  misc_feature: MA Experiment 20000234 PARAMETER Experiment Name: At_Siliques_P Parameter: Tissue Value: Less Than 5mm Siliques vs. Whole Plant
  misc_feature: MA Experiment ID: 20000235 Result: Down-regulated in Transcription
  misc_feature: MA Experiment 20000235 PARAMETER Experiment Name: At_Siliques_P Parameter: Age (day) Value: 21
  misc_feature: MA Experiment 20000235 PARAMETER Experiment Name: At_Siliques_P Parameter: Organism Value: A. thaliana
  misc_feature: MA Experiment 20000235 PARAMETER Experiment Name: At_Siliques_P Parameter: Plant Line Value: WS
  misc_feature: MA Experiment 20000235 PARAMETER Experiment Name: At_Siliques_P Parameter: Tissue Value: 5-10mm Siliques vs. Whole Plant
  misc_feature: MA Experiment ID: 20000439 Result: Up-regulated in Transcription
  misc_feature: MA Experiment 20000439 PARAMETER Experiment Name: At_Roots__P Parameter: Age (day) Value: 14 vs. 21
  misc_feature: MA Experiment 20000439 PARAMETER Experiment Name: At_Roots__P Parameter: Organism Value: A. thaliana
  misc_feature: MA Experiment 20000439 PARAMETER Experiment Name: At_Roots__P Parameter: Tissue Value: Roots vs. Whole Plant
  misc_feature: MA Experiment ID: 20000496 Result: Up-regulated in Transcription
  misc_feature: MA Experiment 20000496 PARAMETER Experiment Name: At_Guard_Cells_P Parameter: Harvest Date Value: 7/19/2002
  misc_feature: MA Experiment 20000496 PARAMETER Experiment Name: At_Guard_Cells_P Parameter: Organism Value: Canola
  misc_feature: MA Experiment 20000496 PARAMETER Experiment Name: At_Guard_Cells_P Parameter: Tissue Value: Guard Cells vs. Leaves

SEQ ID NO: 95594 - protein, 211 aa, Arabidopsis thaliana; identical to SEQ ID NO: 91838
  peptide (1)..(211): Ceres Seq. ID no. 12729712
  misc_feature (92)..(153): Pfam Name: Homeobox domain Pfam Description: Homeobox domain
  misc_feature (1)..(211): Homolog of NCBI NO: 30686974 NR Description: homeodomain protein PALE-2, putative [Arabidopsis >gi|8886930|gb|AAF80616.1|AC069251_9 F2D10.19 [Arabidopsis
  misc_feature (17)..(210): Homolog of NCBI NO: 15218015 NR Description: homeodomain protein; protein id: At1g20710.1
  misc_feature (22)..(203): Homolog of NCBI NO: 3955019 NR Description: HB1 homeodomain protein [Populus tremula x
  misc_feature (22)..(203): Homolog of NCBI NO: 40233067 NR Description: homeodomain protein HB1 [Populus tomentosa]
  misc_feature (29)..(203): Homolog of NCBI NO: 3955021 NR Description: HB2 homeodomain protein [Populus tremula x
  misc_feature (29)..(166): Homolog of NCBI NO: 40233087 NR Description: homeodomain protein HB2 [Populus tomentosa]
  misc_feature (7)..(174): Homolog of NCBI NO: 34909272 NR Description: putative HB2 homeodomain protein [Oryza sativa
  misc_feature (11)..(173): Homolog of NCBI NO: 15237035 NR Description: homeodomain - like protein; protein id: supported by cDNA: gi_15081750 [Arabidopsis thaliana]
  misc_feature (80)..(186): Homolog of NCBI NO: 15228599 NR Description: homeodomain protein; protein id: At3g03660.1 thaliana] >gi|6091768|gb|AAF03478.1|AC009327_17 hypothetical
  misc_feature (80)..(157): Homolog of NCBI NO: 34908148 NR Description: P0408C03.16 [Oryza sativa (japonica

SEQ ID NO: 95595 - protein, 195 aa, Arabidopsis thaliana; identical to SEQ ID NO: 91839
  peptide (1)..(195): Ceres Seq. ID no. 12729713
  misc_feature (76)..(137): Pfam Name: Homeobox domain Pfam Description: Homeobox domain
  misc_feature (1)..(195): Homolog of NCBI NO: 30686974 NR Description: homeodomain protein PALE-2, putative [Arabidopsis >gi|8886930|gb|AAF80616.1|AC069251_9 F2D10.19 [Arabidopsis
  misc_feature (1)..(194): Homolog of NCBI NO: 15218015 NR Description: homeodomain protein; protein id: At1g20710.1
  misc_feature (6)..(187): Homolog of NCBI NO: 3955019 NR Description: HB1 homeodomain protein [Populus tremula x
  misc_feature (6)..(187): Homolog of NCBI NO: 40233067 NR Description: homeodomain protein HB1 [Populus tomentosa]
  misc_feature (13)..(187): Homolog of NCBI NO: 3955021 NR Description: HB2 homeodomain protein [Populus tremula x
  misc_feature (13)..(150): Homolog of NCBI NO: 40233087 NR Description: homeodomain protein HB2 [Populus tomentosa]
  misc_feature (1)..(158): Homolog of NCBI NO: 34909272 NR Description: putative HB2 homeodomain protein [Oryza sativa
  misc_feature (1)..(157): Homolog of NCBI NO: 15237035 NR Description: homeodomain - like protein; protein id: supported by cDNA: gi_15081750 [Arabidopsis thaliana]
  misc_feature (64)..(170): Homolog of NCBI NO: 15228599 NR Description: homeodomain protein; protein id: At3g03660.1 thaliana] >gi|6091768|gb|AAF03478.1|AC009327_17 hypothetical
  misc_feature (64)..(141): Homolog of NCBI NO: 34908148 NR Description: P0408C03.16 [Oryza sativa (japonica

SEQ ID NO: 95596 - protein, 181 aa, Arabidopsis thaliana; identical to SEQ ID NO: 91840
  peptide (1)..(181): Ceres Seq. ID no. 12729714
  misc_feature (62)..(123): Pfam Name: Homeobox domain Pfam Description: Homeobox domain
  misc_feature (1)..(181): Homolog of NCBI NO: 30686974 NR Description: homeodomain protein PALE-2, putative [Arabidopsis >gi|8886930|gb|AAF80616.1|AC069251_9 F2D10.19 [Arabidopsis
  misc_feature (1)..(180): Homolog of NCBI NO: 15218015 NR Description: homeodomain protein; protein id: At1g20710.1
  misc_feature (1)..(173): Homolog of NCBI NO: 3955019 NR Description: HB1 homeodomain protein [Populus tremula x
  misc_feature (1)..(173): Homolog of NCBI NO: 40233067 NR Description: homeodomain protein HB1 [Populus tomentosa]
  misc_feature (1)..(173): Homolog of NCBI NO: 3955021 NR Description: HB2 homeodomain protein [Populus tremula x
  misc_feature (1)..(136): Homolog of NCBI NO: 40233087 NR Description: homeodomain protein HB2 [Populus tomentosa]
  misc_feature (1)..(144): Homolog of NCBI NO: 34909272 NR Description: putative HB2 homeodomain protein [Oryza sativa
  misc_feature (1)..(143): Homolog of NCBI NO: 15237035 NR Description: homeodomain - like protein; protein id: supported by cDNA: gi_15081750 [Arabidopsis thaliana]
  misc_feature (50)..(156): Homolog of NCBI NO: 15228599 NR Description: homeodomain protein; protein id: At3g03660.1 thaliana] >gi|6091768|gb|AAF03478.1|AC009327_17 hypothetical
  misc_feature (50)..(127): Homolog of NCBI NO: 34908148 NR Description: P0408C03.16 [Oryza sativa (japonica

SEQ ID NO: 95597 - DNA, 594 bp, Arabidopsis thaliana; identical to SEQ ID NO: 91841
  misc_feature (1)..(594): Ceres Seq. ID no. 12729715
  misc_feature: MA Experiment ID: 20000314 Result: Up-regulated in Transcription
  misc_feature: MA Experiment 20000314 PARAMETER Experiment Name: At_14day_Shoots-Roots_Sub_P Parameter: Age (day) Value: 14
  misc_feature: MA Experiment 20000314 PARAMETER Experiment Name: At_14day_Shoots-Roots_Sub_P Parameter: Organism Value: A. thaliana
  misc_feature: MA Experiment 20000314 PARAMETER Experiment Name: At_14day_Shoots-Roots_Sub_P Parameter: Plant Line Value: WS
  misc_feature: MA Experiment 20000314 PARAMETER Experiment Name: At_14day_Shoots-Roots_Sub_P Parameter: Tissue Value: Roots vs. Whole Plant

SEQ ID NO: 95598 - protein, 197 aa, Arabidopsis thaliana; identical to SEQ ID NO: 91842
  peptide (1)..(197): Ceres Seq. ID no. 12729716
  misc_feature (76)..(137): Pfam Name: Homeobox domain Pfam Description: Homeobox domain
  misc_feature (1)..(197): Homolog of NCBI NO: 15218015 NR Description: homeodomain protein; protein id: At1g20710.1
  misc_feature (1)..(197): Homolog of NCBI NO: 30686974 NR Description: homeodomain protein PALE-2, putative [Arabidopsis >gi|8886930|gb|AAF80616.1|AC069251_9 F2D10.19 [Arabidopsis
  misc_feature (5)..(193): Homolog of NCBI NO: 3955021 NR Description: HB2 homeodomain protein [Populus tremula x
  misc_feature (8)..(192): Homolog of NCBI NO: 3955019 NR Description: HB1 homeodomain protein [Populus tremula x
  misc_feature (5)..(193): Homolog of NCBI NO: 40233087 NR Description: homeodomain protein HB2 [Populus tomentosa]
  misc_feature (8)..(192): Homolog of NCBI NO: 40233067 NR Description: homeodomain protein HB1 [Populus tomentosa]
  misc_feature (8)..(139): Homolog of NCBI NO: 15237035 NR Description: homeodomain - like protein; protein id: supported by cDNA: gi_15081750 [Arabidopsis thaliana]
  misc_feature (13)..(156): Homolog of NCBI NO: 34909272 NR Description: putative HB2 homeodomain protein [Oryza sativa
  misc_feature (64)..(139): Homolog of NCBI NO: 34908148 NR Description: P0408C03.16 [Oryza sativa (japonica
  misc_feature (72)..(158): Homolog of NCBI NO: 30693997 NR Description: expressed protein [Arabidopsis thaliana]

SEQ ID NO: 95599 - protein, 183 aa, Arabidopsis thaliana; identical to SEQ ID NO: 91843
  peptide (1)..(183): Ceres Seq. ID no. 12729717
  misc_feature (62)..(123): Pfam Name: Homeobox domain Pfam Description: Homeobox domain
  misc_feature (1)..(183): Homolog of NCBI NO: 15218015 NR Description: homeodomain protein; protein id: At1g20710.1
  misc_feature (1)..(183): Homolog of NCBI NO: 30686974 NR Description: homeodomain protein PALE-2, putative [Arabidopsis >gi|8886930|gb|AAF80616.1|AC069251_9 F2D10.19 [Arabidopsis
  misc_feature (1)..(179): Homolog of NCBI NO: 3955021 NR Description: HB2 homeodomain protein [Populus tremula x
  misc_feature (1)..(178): Homolog of NCBI NO: 3955019 NR Description: HB1 homeodomain protein [Populus tremula x
  misc_feature (1)..(179): Homolog of NCBI NO: 40233087 NR Description: homeodomain protein HB2 [Populus tomentosa]
  misc_feature (1)..(178): Homolog of NCBI NO: 40233067 NR Description: homeodomain protein HB1 [Populus tomentosa]
  misc_feature (1)..(125): Homolog of NCBI NO: 15237035 NR Description: homeodomain - like protein; protein id: supported by cDNA: gi_15081750 [Arabidopsis thaliana]
  misc_feature (1)..(142): Homolog of NCBI NO: 34909272 NR Description: putative HB2 homeodomain protein [Oryza sativa
  misc_feature (50)..(125): Homolog of NCBI NO: 34908148 NR Description: P0408C03.16 [Oryza sativa (japonica
  misc_feature (58)..(144): Homolog of NCBI NO: 30693997 NR Description: expressed protein [Arabidopsis thaliana]

SEQ ID NO: 95600 - protein, 178 aa, Arabidopsis thaliana; identical to SEQ ID NO: 91844
  peptide (1)..(178): Ceres Seq. ID no. 12729718
  misc_feature (57)..(118): Pfam Name: Homeobox domain Pfam Description: Homeobox domain
  misc_feature (1)..(178): Homolog of NCBI NO: 15218015 NR Description: homeodomain protein; protein id: At1g20710.1
  misc_feature (1)..(178): Homolog of NCBI NO: 30686974 NR Description: homeodomain protein PALE-2, putative [Arabidopsis >gi|8886930|gb|AAF80616.1|AC069251_9 F2D10.19 [Arabidopsis
  misc_feature (1)..(174): Homolog of NCBI NO: 3955021 NR Description: HB2 homeodomain protein [Populus tremula x
  misc_feature (1)..(173): Homolog of NCBI NO: 3955019 NR Description: HB1 homeodomain protein [Populus tremula x
  misc_feature (1)..(174): Homolog of NCBI NO: 40233087 NR Description: homeodomain protein HB2 [Populus tomentosa]
  misc_feature (1)..(173): Homolog of NCBI NO: 40233067 NR Description: homeodomain protein HB1 [Populus tomentosa]
  misc_feature (1)..(120): Homolog of NCBI NO: 15237035 NR Description: homeodomain - like protein; protein id: supported by cDNA: gi_15081750 [Arabidopsis thaliana]
  misc_feature (1)..(137): Homolog of NCBI NO: 34909272 NR Description: putative HB2 homeodomain protein [Oryza sativa
  misc_feature (45)..(120): Homolog of NCBI NO: 34908148 NR Description: P0408C03.16 [Oryza sativa (japonica
  misc_feature (53)..(139): Homolog of NCBI NO: 30693997 NR Description: expressed protein [Arabidopsis thaliana]

SEQ ID NO: 95601 - DNA, 862 bp, Arabidopsis thaliana; identical to SEQ ID NO: 91845
  misc_feature (1)..(862): Ceres Seq. ID no. 12729727
  misc_feature: MA Experiment ID: 20000234 Result: Down-regulated in Transcription
  misc_feature: MA Experiment 20000234 PARAMETER Experiment Name: At_Siliques_P Parameter: Age (day) Value: 21
  misc_feature: MA Experiment 20000234 PARAMETER Experiment Name: At_Siliques_P Parameter: Organism Value: A. thaliana
  misc_feature: MA Experiment 20000234 PARAMETER Experiment Name: At_Siliques_P Parameter: Plant Line Value: WS
  misc_feature: MA Experiment 20000234 PARAMETER Experiment Name: At_Siliques_P Parameter: Tissue Value: Less Than 5mm Siliques vs. Whole Plant
  misc_feature: MA Experiment ID: 20000264 Result: Down-regulated in Transcription
  misc_feature: MA Experiment 20000264 PARAMETER Experiment Name: At_Open_Flower_P Parameter: Age (day) Value: 21
  misc_feature: MA Experiment 20000264 PARAMETER Experiment Name: At_Open_Flower_P Parameter: Plant Line Value: WS
  misc_feature: MA Experiment 20000264 PARAMETER Experiment Name: At_Open_Flower_P Parameter: Tissue Value: Open Flower vs. Whole Plant
  misc_feature: MA Experiment ID: 20000438 Result: Down-regulated in Transcription
  misc_feature: MA Experiment 20000438 PARAMETER Experiment Name: At_Shoots__P Parameter: Age (day) Value: 14
  misc_feature: MA Experiment 20000438 PARAMETER Experiment Name: At_Shoots__P Parameter: Tissue Value: Shoots vs. Whole Plant
  misc_feature: MA Experiment ID: 20000495 Result: Down-regulated in Transcription
  misc_feature: MA Experiment 20000495 PARAMETER Experiment Name: At_Guard_Cells_P Parameter: Harvest Date Value: 8/2/2002
  misc_feature: MA Experiment 20000495 PARAMETER Experiment Name: At_Guard_Cells_P Parameter: Organism Value: A. thaliana
  misc_feature: MA Experiment 20000495 PARAMETER Experiment Name: At_Guard_Cells_P Parameter: Tissue Value: Guard Cells vs. Leaves
  misc_feature: MA Experiment ID: 20000573 Result: Down-regulated in Transcription
  misc_feature: MA Experiment 20000573 PARAMETER Experiment Name: At_100uM_ABA_Mutants__P Parameter: Organism Value: A. thaliana
  misc_feature: MA Experiment 20000573 PARAMETER Experiment Name: At_100uM_ABA_Mutants__P Parameter: Plant Line Value: CS22 vs. Ler wt
  misc_feature: MA Experiment 20000573 PARAMETER Experiment Name: At_100uM_ABA_Mutants__P Parameter: Timepoint (hr) Value: N/A
  misc_feature: MA Experiment 20000573 PARAMETER Experiment Name: At_100uM_ABA_Mutants__P Parameter: Tissue Value: Whole Plant
  misc_feature: MA Experiment 20000573 PARAMETER Experiment Name: At_100uM_ABA_Mutants__P Parameter: Treatment Value: None
  misc_feature: MA Experiment ID: 20001247 Result: Down-regulated in Transcription
  misc_feature: MA Experiment 20001247 PARAMETER Experiment Name: At_Far-red-induction_P Parameter: Age (day) Value: 7
  misc_feature: MA Experiment 20001247 PARAMETER Experiment Name: At_Far-red-induction_P Parameter: Light Value: Far-red vs. White
  misc_feature: MA Experiment 20001247 PARAMETER Experiment Name: At_Far-red-induction_P Parameter: Organism Value: A. thaliana
  misc_feature: MA Experiment 20001247 PARAMETER Experiment Name: At_Far-red-induction_P Parameter: Plant Line Value: Columbia
  misc_feature: MA Experiment 20001247 PARAMETER Experiment Name: At_Far-red-induction_P Parameter: Timepoint (hr) Value: 1
  misc_feature: MA Experiment 20001247 PARAMETER Experiment Name: At_Far-red-induction_P Parameter: Tissue Value: Whole Plant
  misc_feature: MA Experiment ID: 20001248 Result: Down-regulated in Transcription
  misc_feature: MA Experiment 20001248 PARAMETER Experiment Name: At_Far-red-induction_P Parameter: Age (day) Value: 7
  misc_feature: MA Experiment 20001248 PARAMETER Experiment Name: At_Far-red-induction_P Parameter: Light Value: Far-red vs. White
  misc_feature: MA Experiment 20001248 PARAMETER Experiment Name: At_Far-red-induction_P Parameter: Organism Value: A. thaliana
  misc_feature: MA Experiment 20001248 PARAMETER Experiment Name: At_Far-red-induction_P Parameter: Plant Line Value: Columbia
  misc_feature: MA Experiment 20001248 PARAMETER Experiment Name: At_Far-red-induction_P Parameter: Timepoint (hr) Value: 4
  misc_feature: MA Experiment 20001248 PARAMETER Experiment Name: At_Far-red-induction_P Parameter: Tissue Value: Whole Plant
  misc_feature: MA Experiment ID: 20001457 Result: Down-regulated in Transcription
  misc_feature: MA Experiment 20001457 PARAMETER Experiment Name: At_50mM_NH4NO3_L-to-H_P Parameter: Age (day) Value: Undefined
  misc_feature: MA Experiment 20001457 PARAMETER Experiment Name: At_50mM_NH4NO3_L-to-H_P Parameter: Organism Value: Undefined
  misc_feature: MA Experiment 20001457 PARAMETER Experiment Name: At_50mM_NH4NO3_L-to-H_P Parameter: Plant Line Value: Undefined
  misc_feature: MA Experiment 20001457 PARAMETER Experiment Name: At_50mM_NH4NO3_L-to-H_P Parameter: Timepoint (hr) Value: 0.5
  misc_feature: MA Experiment 20001457 PARAMETER Experiment Name: At_50mM_NH4NO3_L-to-H_P Parameter: Tissue Value: Siliques
  misc_feature: MA Experiment 20001457 PARAMETER Experiment Name: At_50mM_NH4NO3_L-to-H_P Parameter: Treatment Value: 50mM NH4NO3 vs. 100mM Manitol
  misc_feature: MA Experiment ID: 20001757 Result: Down-regulated in Transcription
  misc_feature: MA Experiment 20001757 PARAMETER Experiment Name: At_50mM_NH4NO3_L-to-H_P Parameter: Timepoint (hr) Value: 6
  misc_feature: MA Experiment 20001757 PARAMETER Experiment Name: At_50mM_NH4NO3_L-to-H_P Parameter: Tissue Value: Leaf
  misc_feature: MA Experiment 20001757 PARAMETER Experiment Name: At_50mM_NH4NO3_L-to-H_P Parameter: Treatment Value: 50mM NH4NO3 vs 100mM Mannitol
  misc_feature: MA Experiment ID: 20001904 Result: Down-regulated in Transcription
  misc_feature: MA Experiment 20001904 PARAMETER Experiment Name: At_Drought_Reproduction_P Parameter: Age (day) Value: 37
  misc_feature: MA Experiment 20001904 PARAMETER Experiment Name: At_Drought_Reproduction_P Parameter: Organism Value: A. thaliana
  misc_feature: MA Experiment 20001904 PARAMETER Experiment Name: At_Drought_Reproduction_P Parameter: Plant Line Value: WS
  misc_feature: MA Experiment 20001904 PARAMETER Experiment Name: At_Drought_Reproduction_P Parameter: Timepoint (day) Value: 7
  misc_feature: MA Experiment 20001904 PARAMETER Experiment Name: At_Drought_Reproduction_P Parameter: Tissue Value: Rosettes
  misc_feature: MA Experiment 20001904 PARAMETER Experiment Name: At_Drought_Reproduction_P Parameter: Treatment Value: Drought vs. No Drought

SEQ ID NO: 95602 - protein, 223 aa, Arabidopsis thaliana; identical to SEQ ID NO: 91846
  peptide (1)..(223): Ceres Seq. ID no. 12729728
  misc_feature (137)..(178): Pfam Name: Zinc finger, C3HC4 type (RING finger) Pfam Description: Zinc finger, C3HC4 type (RING finger)
  misc_feature (27)..(223): Homolog of NCBI NO: 15218042 NR Description: similar to putative RING zinc finger protein; id: At1g20823.1 [Arabidopsis thaliana] >gi|25402932|pir||F86340
  misc_feature (27)..(223): Homolog of NCBI NO: 21555237 NR Description: putative RING zinc finger protein [Arabidopsis
  misc_feature (27)..(223): Homolog of NCBI NO: 15223041 NR Description: putative RING zinc finger protein; protein id: supported by cDNA: 27464. [Arabidopsis thaliana]
  misc_feature (35)..(191): Homolog of NCBI NO: 15227839 NR Description: putative RING zinc finger protein; protein id: supported by cDNA: gi_13877952, supported by cDNA: gi_17065625,
  misc_feature (40)..(205): Homolog of NCBI NO: 15237013 NR Description: RING-H2 finger protein RHA3b; protein id: supported by cDNA: 31493., supported by cDNA: gi_3790574
  misc_feature (88)..(190): Homolog of NCBI NO: 37536508 NR Description: putative ring finger protein [Oryza sativa
  misc_feature (25)..(102): Homolog of NCBI NO: 37536508 NR Description: putative ring finger protein [Oryza sativa
  misc_feature (53)..(199): Homolog of NCBI NO: 7489432 NR Description: probable ring finger protein - barley
  misc_feature (11)..(222): Homolog of NCBI NO: 15222073 NR Description: RING-H2 finger protein RHA3a, putative; protein
  misc_feature (46)..(183): Homolog of NCBI NO: 15239062 NR Description: RING zinc finger protein-like; protein id:

SEQ ID NO: 95603 - protein, 197 aa, Arabidopsis thaliana; identical to SEQ ID NO: 91847
  peptide (1)..(197): Ceres Seq. ID no. 12729729
  misc_feature (111)..(152): Pfam Name: Zinc finger, C3HC4 type (RING finger) Pfam Description: Zinc finger, C3HC4 type (RING finger)
  misc_feature (1)..(197): Homolog of NCBI NO: 15218042 NR Description: similar to putative RING zinc finger protein; id: At1g20823.1 [Arabidopsis thaliana] >gi|25402932|pir||F86340
  misc_feature (1)..(197): Homolog of NCBI NO: 21555237 NR Description: putative RING zinc finger protein [Arabidopsis
  misc_feature (1)..(197): Homolog of NCBI NO: 15223041 NR Description: putative RING zinc finger protein; protein id: supported by cDNA: 27464. [Arabidopsis thaliana]
  misc_feature (9)..(165): Homolog of NCBI NO: 15227839 NR Description: putative RING zinc finger protein; protein id: supported by cDNA: gi_13877952, supported by cDNA: gi_17065625,
  misc_feature (14)..(179): Homolog of NCBI NO: 15237013 NR Description: RING-H2 finger protein RHA3b; protein id: supported by cDNA: 31493., supported by cDNA: gi_3790574
  misc_feature (62)..(164): Homolog of NCBI NO: 37536508 NR Description: putative ring finger protein [Oryza sativa
  misc_feature (1)..(76): Homolog of NCBI NO: 37536508 NR Description: putative ring finger protein [Oryza sativa
  misc_feature (27)..(173): Homolog of NCBI NO: 7489432 NR Description: probable ring finger protein - barley
  misc_feature (1)..(196): Homolog of NCBI NO: 15222073 NR Description: RING-H2 finger protein RHA3a, putative; protein
  misc_feature (20)..(157): Homolog of NCBI NO: 15239062 NR Description: RING zinc finger protein-like; protein id:

SEQ ID NO: 95604 - DNA, 1323 bp, Arabidopsis thaliana; identical to SEQ ID NO: 91848
  misc_feature (1)..(1323): Ceres Seq. ID no. 12729734
  misc_feature: MA Experiment ID: 20000171 Result: Up-regulated in Transcription
  misc_feature: MA Experiment 20000171 PARAMETER Experiment Name: At_42deg_Heat_P Parameter: Age (day) Value: 14
  misc_feature: MA Experiment 20000171 PARAMETER Experiment Name: At_42deg_Heat_P Parameter: Organism Value: A. thaliana
  misc_feature: MA Experiment 20000171 PARAMETER Experiment Name: At_42deg_Heat_P Parameter: Plant Line Value: WS
  misc_feature: MA Experiment 20000171 PARAMETER Experiment Name: At_42deg_Heat_P Parameter: Temperature (deg C) Value: 42 vs. 22
  misc_feature: MA Experiment 20000171 PARAMETER Experiment Name: At_42deg_Heat_P Parameter: Timepoint (hr) Value: 1
  misc_feature: MA Experiment 20000171 PARAMETER Experiment Name: At_42deg_Heat_P Parameter: Tissue Value: Aerial
  misc_feature: MA Experiment ID: 20000184 Result: Up-regulated in Transcription
  misc_feature: MA Experiment 20000184 PARAMETER Experiment Name: At_Shoots__P Parameter: Age (day) Value: 7
  misc_feature: MA Experiment 20000184 PARAMETER Experiment Name: At_Shoots__P Parameter: Tissue Value: Shoots vs. Whole Plant
  misc_feature: MA Experiment ID: 20000185 Result: Up-regulated in Transcription
  misc_feature: MA Experiment 20000185 PARAMETER Experiment Name: At_Roots__P Parameter: Age (day) Value: 7 vs. 21
  misc_feature: MA Experiment 20000185 PARAMETER Experiment Name: At_Roots__P Parameter: Organism Value: A. thaliana
  misc_feature: MA Experiment 20000185 PARAMETER Experiment Name: At_Roots__P Parameter: Tissue Value: Roots vs. Whole Plant
  misc_feature: MA Experiment ID: 20000439 Result: Up-regulated in Transcription
  misc_feature: MA Experiment 20000439 PARAMETER Experiment Name: At_Roots__P Parameter: Age (day) Value: 14 vs. 21
  misc_feature: MA Experiment 20000439 PARAMETER Experiment Name: At_Roots__P Parameter: Organism Value: A. thaliana
  misc_feature: MA Experiment 20000439 PARAMETER Experiment Name: At_Roots__P Parameter: Tissue Value: Roots vs. Whole Plant
  misc_feature: MA Experiment ID: 20001248 Result: Up-regulated in Transcription
  misc_feature: MA Experiment 20001248 PARAMETER Experiment Name: At_Far-red-induction_P Parameter: Age (day) Value: 7
  misc_feature: MA Experiment 20001248 PARAMETER Experiment Name: At_Far-red-induction_P Parameter: Light Value: Far-red vs. White
  misc_feature: MA Experiment 20001248 PARAMETER Experiment Name: At_Far-red-induction_P Parameter: Organism Value: A. thaliana
  misc_feature: MA Experiment 20001248 PARAMETER Experiment Name: At_Far-red-induction_P Parameter: Plant Line Value: Columbia
  misc_feature: MA Experiment 20001248 PARAMETER Experiment Name: At_Far-red-induction_P Parameter: Timepoint (hr) Value: 4
  misc_feature: MA Experiment 20001248 PARAMETER Experiment Name: At_Far-red-induction_P Parameter: Tissue Value: Whole Plant
  misc_feature: MA Experiment ID: 20001450 Result: Up-regulated in Transcription
  misc_feature: MA Experiment 20001450 PARAMETER Experiment Name: At_Far-red-induction_P Parameter: Age (day) Value: 7
  misc_feature: MA Experiment 20001450 PARAMETER Experiment Name: At_Far-red-induction_P Parameter: Light Value: Far-red vs. White
  misc_feature: MA Experiment 20001450 PARAMETER Experiment Name: At_Far-red-induction_P Parameter: Organism Value: A. thaliana
  misc_feature: MA Experiment 20001450 PARAMETER Experiment Name: At_Far-red-induction_P Parameter: Plant Line Value: Columbia
  misc_feature: MA Experiment 20001450 PARAMETER Experiment Name: At_Far-red-induction_P Parameter: Timepoint (hr) Value: 8
  misc_feature: MA Experiment 20001450 PARAMETER Experiment Name: At_Far-red-induction_P Parameter: Tissue Value: Whole Plant
  misc_feature: MA Experiment ID: 20001451 Result: Up-regulated in Transcription
  misc_feature: MA Experiment 20001451 PARAMETER Experiment Name: At_Far-red-induction_P Parameter: Age (day) Value: 7
  misc_feature: MA Experiment 20001451 PARAMETER Experiment Name: At_Far-red-induction_P Parameter: Light Value: Far-red vs. White
  misc_feature: MA Experiment 20001451 PARAMETER Experiment Name: At_Far-red-induction_P Parameter: Organism Value: A. thaliana
  misc_feature: MA Experiment 20001451 PARAMETER Experiment Name: At_Far-red-induction_P Parameter: Plant Line Value: Columbia
  misc_feature: MA Experiment 20001451 PARAMETER Experiment Name: At_Far-red-induction_P Parameter: Timepoint (hr) Value: 24
  misc_feature: MA Experiment 20001451 PARAMETER Experiment Name: At_Far-red-induction_P Parameter: Tissue Value: Whole Plant

SEQ ID NO: 95605 - protein, 311 aa, Arabidopsis thaliana; identical to SEQ ID NO: 91849
  peptide (1)..(311): Ceres Seq. ID no. 12729735
  misc_feature (1)..(311): Homolog of NCBI NO: 15218067 NR Description: putative DNA-binding protein; protein id:
  misc_feature (1)..(310): Homolog of NCBI NO: 15223074 NR Description: unknown protein; protein id: At1g76500.1
  misc_feature (37)..(288): Homolog of NCBI NO: 18396925 NR Description: expressed protein; protein id: At3g04570.1, by cDNA: 15781. [Arabidopsis thaliana] hypothetical protein [Arabidopsis thaliana]
  misc_feature (36)..(289): Homolog of NCBI NO: 30690333 NR Description: expressed protein [Arabidopsis thaliana]
  misc_feature (59)..(289): Homolog of NCBI NO: 7486025 NR Description: hypothetical protein F23E12.50 - Arabidopsis >gi|3080411|emb|CAA18730.1| putative protein [Arabidopsis >gi|7270491|emb|CAB80256.1| putative protein [Arabidopsis
  misc_feature (23)..(271): Homolog of NCBI NO: 15234404 NR Description: putative DNA-binding protein; protein id:
  misc_feature (4)..(311): Homolog of NCBI NO: 38346718 NR Description: OSJNBa0086O06.16 [Oryza sativa (japonica
  misc_feature (34)..(250): Homolog of NCBI NO: 15225475 NR Description: putative AT-hook DNA-binding protein; protein id:
  misc_feature (40)..(311): Homolog of NCBI NO: 34905212 NR Description: P0672D01.8 [Oryza sativa (japonica
  misc_feature (24)..(311): Homolog of NCBI NO: 15235815 NR Description: putative DNA binding protein; protein id:

SEQ ID NO: 95606 - DNA, 2202 bp, Arabidopsis thaliana; identical to SEQ ID NO: 91850
  misc_feature (1)..(2202): Ceres Seq. ID no. 12729755
  misc_feature: MA Experiment ID: 20000171 Result: Down-regulated in Transcription
  misc_feature: MA Experiment 20000171 PARAMETER Experiment Name: At_42deg_Heat_P Parameter: Age (day) Value: 14
  misc_feature: MA Experiment 20000171 PARAMETER Experiment Name: At_42deg_Heat_P Parameter: Organism Value: A. thaliana
  misc_feature: MA Experiment 20000171 PARAMETER Experiment Name: At_42deg_Heat_P Parameter: Plant Line Value: WS
  misc_feature: MA Experiment 20000171 PARAMETER Experiment Name: At_42deg_Heat_P Parameter: Temperature (deg C) Value: 42 vs. 22
  misc_feature: MA Experiment 20000171 PARAMETER Experiment Name: At_42deg_Heat_P Parameter: Timepoint (hr) Value: 1
  misc_feature: MA Experiment 20000171 PARAMETER Experiment Name: At_42deg_Heat_P Parameter: Tissue Value: Aerial
  misc_feature: MA Experiment ID: 20000173 Result: Down-regulated in Transcription
  misc_feature: MA Experiment 20000173 PARAMETER Experiment Name: At_42deg_Heat_P Parameter: Age (day) Value: 14
  misc_feature: MA Experiment 20000173 PARAMETER Experiment Name: At_42deg_Heat_P Parameter: Organism Value: A. thaliana
  misc_feature: MA Experiment 20000173 PARAMETER Experiment Name: At_42deg_Heat_P Parameter: Plant Line Value: WS
  misc_feature: MA Experiment 20000173 PARAMETER Experiment Name: At_42deg_Heat_P Parameter: Temperature (deg C) Value: 42 vs. 22
  misc_feature: MA Experiment 20000173 PARAMETER Experiment Name: At_42deg_Heat_P Parameter: Timepoint (hr) Value: 6
  misc_feature: MA Experiment 20000173 PARAMETER Experiment Name: At_42deg_Heat_P Parameter: Tissue Value: Aerial
  misc_feature: MA Experiment ID: 20000184 Result: Down-regulated in Transcription
  misc_feature: MA Experiment 20000184 PARAMETER Experiment Name: At_Shoots__P Parameter: Age (day) Value: 7
  misc_feature: MA Experiment 20000184 PARAMETER Experiment Name: At_Shoots__P Parameter: Tissue Value: Shoots vs. Whole Plant
  misc_feature: MA Experiment ID: 20000185 Result: Down-regulated in Transcription
  misc_feature: MA Experiment 20000185 PARAMETER Experiment Name: At_Roots__P Parameter: Age (day) Value: 7 vs. 21
  misc_feature: MA Experiment 20000185 PARAMETER Experiment Name: At_Roots__P Parameter: Organism Value: A. thaliana
  misc_feature: MA Experiment 20000185 PARAMETER Experiment Name: At_Roots__P Parameter: Tissue Value: Roots vs. Whole Plant
  misc_feature: MA Experiment ID: 20000234 Result: Down-regulated in Transcription
  misc_feature: MA Experiment 20000234 PARAMETER Experiment Name: At_Siliques_P Parameter: Age (day) Value: 21
  misc_feature: MA Experiment 20000234 PARAMETER Experiment Name: At_Siliques_P Parameter: Organism Value: A. thaliana
  misc_feature: MA Experiment 20000234 PARAMETER Experiment Name: At_Siliques_P Parameter: Plant Line Value: WS
  misc_feature: MA Experiment 20000234 PARAMETER Experiment Name: At_Siliques_P Parameter: Tissue Value: Less Than 5mm Siliques vs. Whole Plant
  misc_feature: MA Experiment ID: 20000235 Result: Down-regulated in Transcription
  misc_feature: MA Experiment 20000235 PARAMETER Experiment Name: At_Siliques_P Parameter: Age (day) Value: 21
  misc_feature: MA Experiment 20000235 PARAMETER Experiment Name: At_Siliques_P Parameter: Organism Value: A. thaliana
  misc_feature: MA Experiment 20000235 PARAMETER Experiment Name: At_Siliques_P Parameter: Plant Line Value: WS
  misc_feature: MA Experiment 20000235 PARAMETER Experiment Name: At_Siliques_P Parameter: Tissue Value: 5-10mm Siliques vs. Whole Plant
  misc_feature: MA Experiment ID: 20000264 Result: Down-regulated in Transcription
  misc_feature: MA Experiment 20000264 PARAMETER Experiment Name: At_Open_Flower_P Parameter: Age (day) Value: 21
  misc_feature: MA Experiment 20000264 PARAMETER Experiment Name: At_Open_Flower_P Parameter: Plant Line Value: WS
  misc_feature: MA Experiment 20000264 PARAMETER Experiment Name: At_Open_Flower_P Parameter: Tissue Value: Open Flower vs. Whole Plant
  misc_feature: MA Experiment ID: 20000265 Result: Down-regulated in Transcription
  misc_feature: MA Experiment 20000265 PARAMETER Experiment Name: At_Open_Flower_P Parameter: Age (day) Value: 21
  misc_feature: MA Experiment 20000265 PARAMETER Experiment Name: At_Open_Flower_P Parameter: Plant Line Value: WS
  misc_feature: MA Experiment 20000265 PARAMETER Experiment Name: At_Open_Flower_P Parameter: Tissue Value: Closed Flower vs. Whole Plant
  misc_feature: MA Experiment ID: 20000267 Result: Down-regulated in Transcription
  misc_feature: MA Experiment 20000267 PARAMETER Experiment Name: At_Drought_P Parameter: Age (day) Value: 7
  misc_feature: MA Experiment 20000267 PARAMETER Experiment Name: At_Drought_P Parameter: Organism Value: A. thaliana
  misc_feature: MA Experiment 20000267 PARAMETER Experiment Name: At_Drought_P Parameter: Plant Line Value: WS
  misc_feature: MA Experiment 20000267 PARAMETER Experiment Name: At_Drought_P Parameter: Timepoint (hr) Value: 6
  misc_feature: MA Experiment 20000267 PARAMETER Experiment Name: At_Drought_P Parameter: Tissue Value: Whole Plant
  misc_feature: MA Experiment 20000267 PARAMETER Experiment Name: At_Drought_P Parameter: Treatment Value: Drought vs. No Drought
  misc_feature: MA Experiment ID: 20000286 Result: Down-regulated in Transcription
  misc_feature: MA Experiment 20000286 PARAMETER Experiment Name: At_Open_Flower_P Parameter: Age (day) Value: 21
  misc_feature: MA Experiment 20000286 PARAMETER Experiment Name: At_Open_Flower_P Parameter: Plant Line Value: WS
  misc_feature: MA Experiment 20000286 PARAMETER Experiment Name: At_Open_Flower_P Parameter: Tissue Value: Half Open vs. Whole Plant
  misc_feature: MA Experiment ID: 20000437 Result: Down-regulated in Transcription
  misc_feature: MA Experiment 20000437 PARAMETER Experiment Name: At_Drought_P Parameter: Age (day) Value: 8
  misc_feature: MA Experiment 20000437 PARAMETER Experiment Name: At_Drought_P Parameter: Organism Value: A. thaliana
  misc_feature: MA Experiment 20000437 PARAMETER Experiment Name: At_Drought_P Parameter: Plant Line Value: WS
  misc_feature: MA Experiment 20000437 PARAMETER Experiment Name: At_Drought_P Parameter: Timepoint (hr) Value: 24
  misc_feature: MA Experiment 20000437 PARAMETER Experiment Name: At_Drought_P Parameter: Tissue Value: Whole Plant
  misc_feature: MA Experiment 20000437 PARAMETER Experiment Name: At_Drought_P Parameter: Treatment Value: Drought vs. No Drought
  misc_feature: MA Experiment ID: 20000438 Result: Down-regulated in Transcription
  misc_feature: MA Experiment 20000438 PARAMETER Experiment Name: At_Shoots__P Parameter: Age (day) Value: 14
  misc_feature: MA Experiment 20000438 PARAMETER Experiment Name: At_Shoots__P Parameter: Tissue Value: Shoots vs. Whole Plant
  misc_feature: MA Experiment ID: 20000439 Result: Down-regulated in Transcription
  misc_feature: MA Experiment 20000439 PARAMETER Experiment Name: At_Roots__P Parameter: Age (day) Value: 14 vs. 21
  misc_feature: MA Experiment 20000439 PARAMETER Experiment Name: At_Roots__P Parameter: Organism Value: A. thaliana
  misc_feature: MA Experiment 20000439 PARAMETER Experiment Name: At_Roots__P Parameter: Tissue Value: Roots vs. Whole Plant
  misc_feature: MA Experiment ID: 20000441 Result: Up-regulated in Transcription
  misc_feature: MA Experiment 20000441 PARAMETER Experiment Name: At_1uM_BR-BRZ__P Parameter: Tissue Value: Shoot Apices
  misc_feature: MA Experiment 20000441 PARAMETER Experiment Name: At_1uM_BR-BRZ__P Parameter: Treatment Value: 1uM BR vs. No Treatment
  misc_feature: MA Experiment ID: 20000443 Result: Up-regulated in Transcription
  misc_feature: MA Experiment 20000443 PARAMETER Experiment Name: At_1uM_BR-BRZ__P Parameter: Tissue Value: Shoot Apices
  misc_feature: MA Experiment 20000443 PARAMETER Experiment Name: At_1uM_BR-BRZ__P Parameter: Treatment Value: 1uM BRZ vs. No Treatment
  misc_feature: MA Experiment ID: 20000452 Result: Down-regulated in Transcription
  misc_feature: MA Experiment 20000452 PARAMETER Experiment Name: At_CS6879_Shoots-Roots_P Parameter: Age (day) Value: 14
  misc_feature: MA Experiment 20000452 PARAMETER Experiment Name: At_CS6879_Shoots-Roots_P Parameter: Organism Value: A. thaliana
  misc_feature: MA Experiment 20000452 PARAMETER Experiment Name: At_CS6879_Shoots-Roots_P Parameter: Plant Line Value: CS6879 vs. WS
  misc_feature: MA Experiment 20000452 PARAMETER Experiment Name: At_CS6879_Shoots-Roots_P Parameter: Tissue Value: Shoots
  misc_feature: MA Experiment ID: 20000527 Result: Down-regulated in Transcription
  misc_feature: MA Experiment 20000527 PARAMETER Experiment Name: At_10percent_PEG_P Parameter: Age (day) Value: 20
  misc_feature: MA Experiment 20000527 PARAMETER Experiment Name: At_10percent_PEG_P Parameter: Organism Value: A. thaliana
  misc_feature: MA Experiment 20000527 PARAMETER Experiment Name: At_10percent_PEG_P Parameter: Plant Line Value: WS
  misc_feature: MA Experiment 20000527 PARAMETER Experiment Name: At_10percent_PEG_P Parameter: Timepoint (day) Value: 20
  misc_feature: MA Experiment 20000527 PARAMETER Experiment Name: At_10percent_PEG_P Parameter: Tissue Value: Whole Plant
  misc_feature: MA Experiment 20000527 PARAMETER Experiment Name: At_10percent_PEG_P Parameter: Treatment Value: 10percent PEG vs. No Treatment
  misc_feature: MA Experiment ID: 20000575 Result: Down-regulated in Transcription
  misc_feature: MA Experiment 20000575 PARAMETER Experiment Name: At_100uM_ABA_Mutants__P Parameter: Organism Value: A. thaliana
  misc_feature: MA Experiment 20000575 PARAMETER Experiment Name: At_100uM_ABA_Mutants__P Parameter: Plant Line Value: CS22
  misc_feature: MA Experiment 20000575 PARAMETER Experiment Name: At_100uM_ABA_Mutants__P Parameter: Timepoint (hr) Value: 6
  misc_feature: MA Experiment 20000575 PARAMETER Experiment Name: At_100uM_ABA_Mutants__P Parameter: Tissue Value: Whole Plant
  misc_feature: MA Experiment 20000575 PARAMETER Experiment Name: At_100uM_ABA_Mutants__P Parameter: Treatment Value: 1uM ABA vs. No Treatment
  misc_feature: MA Experiment ID: 20000794 Result: Down-regulated in Transcription
  misc_feature: MA Experiment 20000794 PARAMETER Experiment Name: At_Petals_P Parameter: Age (day) Value: 23-25 days
  misc_feature: MA Experiment 20000794 PARAMETER Experiment Name: At_Petals_P Parameter: Plant Line Value: WS
  misc_feature: MA Experiment 20000794 PARAMETER Experiment Name: At_Petals_P Parameter: Tissue Value: Petals vs. Whole plant
  misc_feature: MA Experiment ID: 20001451 Result: Down-regulated in Transcription
  misc_feature: MA Experiment 20001451 PARAMETER Experiment Name: At_Far-red-induction_P Parameter: Age (day) Value: 7
  misc_feature: MA Experiment 20001451 PARAMETER Experiment Name: At_Far-red-induction_P Parameter: Light Value: Far-red vs. White
  misc_feature: MA Experiment 20001451 PARAMETER Experiment Name: At_Far-red-induction_P Parameter: Organism Value: A. thaliana
  misc_feature: MA Experiment 20001451 PARAMETER Experiment Name: At_Far-red-induction_P Parameter: Plant Line Value: Columbia
  misc_feature: MA Experiment 20001451 PARAMETER Experiment Name: At_Far-red-induction_P Parameter: Timepoint (hr) Value: 24
  misc_feature: MA Experiment 20001451 PARAMETER Experiment Name: At_Far-red-induction_P Parameter: Tissue Value: Whole Plant
  misc_feature: MA Experiment ID: 20001554 Result: Down-regulated in Transcription
  misc_feature: MA Experiment 20001554 PARAMETER Experiment Name: At_Drought_Soil_Dry_P Parameter: Age (day) Value: 21
  misc_feature: MA Experiment 20001554 PARAMETER Experiment Name: At_Drought_Soil_Dry_P Parameter: Organism Value: A. thaliana
  misc_feature: MA Experiment 20001554 PARAMETER Experiment Name: At_Drought_Soil_Dry_P Parameter: Plant Line Value: WS
  misc_feature: MA Experiment 20001554 PARAMETER Experiment Name: At_Drought_Soil_Dry_P Parameter: Post Timepoint (hr) Value: None
  misc_feature: MA Experiment 20001554 PARAMETER Experiment Name: At_Drought_Soil_Dry_P Parameter: Post-Treatment Value: None
  misc_feature: MA Experiment 20001554 PARAMETER Experiment Name: At_Drought_Soil_Dry_P Parameter: Timepoint (day) Value: 7
  misc_feature: MA Experiment 20001554 PARAMETER Experiment Name: At_Drought_Soil_Dry_P Parameter: Treatment Value: Drought vs. No Drought
  misc_feature: MA Experiment ID: 20001555 Result: Down-regulated in Transcription
  misc_feature: MA Experiment 20001555 PARAMETER Experiment Name: At_Drought_Soil_Dry_P Parameter: Age (day) Value: 24
  misc_feature: MA Experiment 20001555 PARAMETER Experiment Name: At_Drought_Soil_Dry_P Parameter: Organism Value: A. thaliana
  misc_feature: MA Experiment 20001555 PARAMETER Experiment Name: At_Drought_Soil_Dry_P Parameter: Plant Line Value: WS
  misc_feature: MA Experiment 20001555 PARAMETER Experiment Name: At_Drought_Soil_Dry_P Parameter: Post Timepoint (hr) Value: None
  misc_feature: MA Experiment 20001555 PARAMETER Experiment Name: At_Drought_Soil_Dry_P Parameter: Post-Treatment Value: None
  misc_feature: MA Experiment 20001555 PARAMETER Experiment Name: At_Drought_Soil_Dry_P Parameter: Timepoint (day) Value: 10
  misc_feature: MA Experiment 20001555 PARAMETER Experiment Name: At_Drought_Soil_Dry_P Parameter: Treatment Value: Drought vs. No Drought
  misc_feature: MA Experiment ID: 20001556 Result: Down-regulated in Transcription
  misc_feature: MA Experiment 20001556 PARAMETER Experiment Name: At_Drought_Soil_Dry_P Parameter: Age (day) Value: 26
  misc_feature: MA Experiment 20001556 PARAMETER Experiment Name: At_Drought_Soil_Dry_P Parameter: Organism Value: A. thaliana
  misc_feature: MA Experiment 20001556 PARAMETER Experiment Name: At_Drought_Soil_Dry_P Parameter: Plant Line Value: WS
  misc_feature: MA Experiment 20001556 PARAMETER Experiment Name: At_Drought_Soil_Dry_P Parameter: Post Timepoint (hr) Value: None
  misc_feature: MA Experiment 20001556 PARAMETER Experiment Name: At_Drought_Soil_Dry_P Parameter: Post-Treatment Value: None
  misc_feature: MA Experiment 20001556 PARAMETER Experiment Name: At_Drought_Soil_Dry_P Parameter: Timepoint (day) Value: 12
  misc_feature: MA Experiment 20001556 PARAMETER Experiment Name: At_Drought_Soil_Dry_P Parameter: Treatment Value: Drought vs. No Drought
  misc_feature: MA Experiment ID: 20001557 Result: Down-regulated in Transcription
  misc_feature: MA Experiment 20001557 PARAMETER Experiment Name: At_Drought_Soil_Dry_P Parameter: Age (day) Value: 27
  misc_feature: MA Experiment 20001557 PARAMETER Experiment Name: At_Drought_Soil_Dry_P Parameter: Organism Value: A. thaliana
  misc_feature: MA Experiment 20001557 PARAMETER Experiment Name: At_Drought_Soil_Dry_P Parameter: Plant Line Value: WS
  misc_feature: MA Experiment 20001557 PARAMETER Experiment Name: At_Drought_Soil_Dry_P Parameter: Post Timepoint (hr) Value: 3
  misc_feature: MA Experiment 20001557 PARAMETER Experiment Name: At_Drought_Soil_Dry_P Parameter: Post-Treatment Value: Re-Water vs. No Drought
  misc_feature: MA Experiment 20001557 PARAMETER Experiment Name: At_Drought_Soil_Dry_P Parameter: Timepoint (day) Value: 13
  misc_feature: MA Experiment 20001557 PARAMETER Experiment Name: At_Drought_Soil_Dry_P Parameter: Treatment Value: Drought vs. No Drought
  misc_feature: MA Experiment ID: 20001559 Result: Down-regulated in Transcription
  misc_feature: MA Experiment 20001559 PARAMETER Experiment Name: At_Drought_Soil_Dry_P Parameter: Age (day) Value: 28
  misc_feature: MA Experiment 20001559 PARAMETER Experiment Name: At_Drought_Soil_Dry_P Parameter: Organism Value: A. thaliana
  misc_feature: MA Experiment 20001559 PARAMETER Experiment Name: At_Drought_Soil_Dry_P Parameter: Plant Line Value: WS
  misc_feature: MA Experiment 20001559 PARAMETER Experiment Name: At_Drought_Soil_Dry_P Parameter: Post Timepoint (hr) Value: 29
  misc_feature: MA Experiment 20001559 PARAMETER Experiment Name: At_Drought_Soil_Dry_P Parameter: Post-Treatment Value: Re-Water vs. No Drought
  misc_feature: MA Experiment 20001559 PARAMETER Experiment Name: At_Drought_Soil_Dry_P Parameter: Timepoint (day) Value: 14
  misc_feature: MA Experiment 20001559 PARAMETER Experiment Name: At_Drought_Soil_Dry_P Parameter: Treatment Value: Drought vs. No Drought
  misc_feature: MA Experiment ID: 20001904 Result: Down-regulated in Transcription
  misc_feature: MA Experiment 20001904 PARAMETER Experiment Name: At_Drought_Reproduction_P Parameter: Age (day) Value: 37
  misc_feature: MA Experiment 20001904 PARAMETER Experiment Name: At_Drought_Reproduction_P Parameter: Organism Value: A. thaliana
  misc_feature: MA Experiment 20001904 PARAMETER Experiment Name: At_Drought_Reproduction_P Parameter: Plant Line Value: WS
  misc_feature: MA Experiment 20001904 PARAMETER Experiment Name: At_Drought_Reproduction_P Parameter: Timepoint (day) Value: 7
  misc_feature: MA Experiment 20001904 PARAMETER Experiment Name: At_Drought_Reproduction_P Parameter: Tissue Value: Rosettes
  misc_feature: MA Experiment 20001904 PARAMETER Experiment Name: At_Drought_Reproduction_P Parameter: Treatment Value: Drought vs. No Drought
  misc_feature: MA Experiment ID: 20001910 Result: Down-regulated in Transcription
  misc_feature: MA Experiment 20001910 PARAMETER Experiment Name: At_Drought_Reproduction_P Parameter: Age (day) Value: 37
  misc_feature: MA Experiment 20001910 PARAMETER Experiment Name: At_Drought_Reproduction_P Parameter: Organism Value: A. thaliana
  misc_feature: MA Experiment 20001910 PARAMETER Experiment Name: At_Drought_Reproduction_P Parameter: Plant Line Value: WS
  misc_feature: MA Experiment 20001910 PARAMETER Experiment Name: At_Drought_Reproduction_P Parameter: Timepoint (day) Value: 7
  misc_feature: MA Experiment 20001910 PARAMETER Experiment Name: At_Drought_Reproduction_P Parameter: Tissue Value: Flowers
  misc_feature: MA Experiment 20001910 PARAMETER Experiment Name: At_Drought_Reproduction_P Parameter: Treatment Value: Drought vs. No Drought

SEQ ID NO: 95607 - protein, 733 aa, Arabidopsis thaliana; identical to SEQ ID NO: 91851
  peptide (1)..(733): Ceres Seq. ID no. 12729756
  misc_feature (1)..(733): Homolog of NCBI NO: 18394970 NR Description: wall-associated kinase 1; protein id:
  misc_feature (1)..(733): Homolog of NCBI NO: 25751318 NR Description: probable serine/threonine-specific protein kinase
  misc_feature (1)..(733): Homolog of NCBI NO: 15218959 NR Description: wall-associated kinase 2; protein id: supported by cDNA: gi_17064909 [Arabidopsis thaliana]
  misc_feature (1)..(733): Homolog of NCBI NO: 25287666 NR Description: wall-associated serine/threonine kinase (EC
  misc_feature (6)..(733): Homolog of NCBI NO: 15218171 NR Description: wall-associated kinase 3; protein id: At1g21240.1
  misc_feature (284)..(733): Homolog of NCBI NO: 25287657 NR Description: F16F4.8 protein - Arabidopsis thaliana
  misc_feature (6)..(303): Homolog of NCBI NO: 25287657 NR Description: F16F4.8 protein - Arabidopsis thaliana
  misc_feature (1)..(733): Homolog of NCBI NO: 25287665 NR Description: hypothetical protein F16F4.10 [imported] -
  misc_feature (1)..(733): Homolog of NCBI NO: 15218167 NR Description: wall-associated kinase 4; protein id: At1g21210.1
  misc_feature (1)..(733): Homolog of NCBI NO: 3355308 NR Description: wall-associated kinase 4 [Arabidopsis thaliana]

SEQ ID NO: 95608 - protein, 725 aa, Arabidopsis thaliana; identical to SEQ ID NO: 91852
  peptide (1)..(725): Ceres Seq. ID no. 12729757
  misc_feature (1)..(725): Homolog of NCBI NO: 18394970 NR Description: wall-associated kinase 1; protein id:
  misc_feature (1)..(725): Homolog of NCBI NO: 25751318 NR Description: probable serine/threonine-specific protein kinase
  misc_feature (1)..(725): Homolog of NCBI NO: 15218959 NR Description: wall-associated kinase 2; protein id: supported by cDNA: gi_17064909 [Arabidopsis thaliana]
  misc_feature (1)..(725): Homolog of NCBI NO: 25287666 NR Description: wall-associated serine/threonine kinase (EC
  misc_feature (1)..(725): Homolog of NCBI NO: 15218171 NR Description: wall-associated kinase 3; protein id: At1g21240.1
  misc_feature (276)..(725): Homolog of NCBI NO: 25287657 NR Description: F16F4.8 protein - Arabidopsis thaliana
  misc_feature (1)..(295): Homolog of NCBI NO: 25287657 NR Description: F16F4.8 protein - Arabidopsis thaliana
  misc_feature (1)..(725): Homolog of NCBI NO: 25287665 NR Description: hypothetical protein F16F4.10 [imported] -
  misc_feature (1)..(725): Homolog of NCBI NO: 15218167 NR Description: wall-associated kinase 4; protein id: At1g21210.1
  misc_feature (1)..(725): Homolog of NCBI NO: 3355308 NR Description: wall-associated kinase 4 [Arabidopsis thaliana]

SEQ ID NO: 95609 - protein, 591 aa, Arabidopsis thaliana; identical to SEQ ID NO: 91853
  peptide (1)..(591): Ceres Seq. ID no. 12729758
  misc_feature (1)..(591): Homolog of NCBI NO: 18394970 NR Description: wall-associated kinase 1; protein id:
  misc_feature (1)..(591): Homolog of NCBI NO: 25751318 NR Description: probable serine/threonine-specific protein kinase
  misc_feature (1)..(591): Homolog of NCBI NO: 15218959 NR Description: wall-associated kinase 2; protein id: supported by cDNA: gi_17064909 [Arabidopsis thaliana]
  misc_feature (1)..(591): Homolog of NCBI NO: 25287666 NR Description: wall-associated serine/threonine kinase (EC
  misc_feature (1)..(591): Homolog of NCBI NO: 15218171 NR Description: wall-associated kinase 3; protein id: At1g21240.1
  misc_feature (142)..(591): Homolog of NCBI NO: 25287657 NR Description: F16F4.8 protein - Arabidopsis thaliana
  misc_feature (1)..(161): Homolog of NCBI NO: 25287657 NR Description: F16F4.8 protein - Arabidopsis thaliana
  misc_feature (1)..(591): Homolog of NCBI NO: 25287665 NR Description: hypothetical protein F16F4.10 [imported] -
  misc_feature (1)..(591): Homolog of NCBI NO: 15218167 NR Description: wall-associated kinase 4; protein id: At1g21210.1
  misc_feature (1)..(591): Homolog of NCBI NO: 3355308 NR Description: wall-associated kinase 4 [Arabidopsis thaliana]

SEQ ID NO: 95610 - DNA, 2226 bp, Arabidopsis thaliana; identical to SEQ ID NO: 91854
  misc_feature (1)..(2226): Ceres Seq. ID no. 12729759
  misc_feature: MA Experiment ID: 20000315 Result: Down-regulated in Transcription
  misc_feature: MA Experiment 20000315 PARAMETER Experiment Name: At_14day_Shoots-Roots_Sub_P Parameter: Age (day) Value: 14
  misc_feature: MA Experiment 20000315 PARAMETER Experiment Name: At_14day_Shoots-Roots_Sub_P Parameter: Organism Value: A. thaliana
  misc_feature: MA Experiment 20000315 PARAMETER Experiment Name: At_14day_Shoots-Roots_Sub_P Parameter: Plant Line Value: WS
  misc_feature: MA Experiment 20000315 PARAMETER Experiment Name: At_14day_Shoots-Roots_Sub_P Parameter: Tissue Value: Shoots vs. Whole Plant
  misc_feature: MA Experiment ID: 20000327 Result: Down-regulated in Transcription
  misc_feature: MA Experiment 20000327 PARAMETER Experiment Name: At_42deg_Heat_Sub_P Parameter: Age (day) Value: 14
  misc_feature: MA Experiment 20000327 PARAMETER Experiment Name: At_42deg_Heat_Sub_P Parameter: Organism Value: A. thaliana
  misc_feature: MA Experiment 20000327 PARAMETER Experiment Name: At_42deg_Heat_Sub_P Parameter: Plant Line Value: WS
  misc_feature: MA Experiment 20000327 PARAMETER Experiment Name: At_42deg_Heat_Sub_P Parameter: Temperature (deg C) Value: 42 vs. 22
  misc_feature: MA Experiment 20000327 PARAMETER Experiment Name: At_42deg_Heat_Sub_P Parameter: Timepoint (hr) Value: 1
  misc_feature: MA Experiment 20000327 PARAMETER Experiment Name: At_42deg_Heat_Sub_P Parameter: Tissue Value: Aerial
  misc_feature: MA Experiment ID: 20000328 Result: Down-regulated in Transcription
  misc_feature: MA Experiment 20000328 PARAMETER Experiment Name: At_42deg_Heat_Sub_P Parameter: Age (day) Value: 14
  misc_feature: MA Experiment 20000328 PARAMETER Experiment Name: At_42deg_Heat_Sub_P Parameter: Organism Value: A. thaliana
  misc_feature: MA Experiment 20000328 PARAMETER Experiment Name: At_42deg_Heat_Sub_P Parameter: Plant Line Value: WS
  misc_feature: MA Experiment 20000328 PARAMETER Experiment Name: At_42deg_Heat_Sub_P Parameter: Temperature (deg C) Value: 42 vs. 22
  misc_feature: MA Experiment 20000328 PARAMETER Experiment Name: At_42deg_Heat_Sub_P Parameter: Timepoint (hr) Value: 6
  misc_feature: MA Experiment 20000328 PARAMETER Experiment Name: At_42deg_Heat_Sub_P Parameter: Tissue Value: Aerial
  misc_feature: MA Experiment ID: 20000329 Result: Up-regulated in Transcription
  misc_feature: MA Experiment 20000329 PARAMETER Experiment Name: At_4deg_Cold_Sub_P Parameter: Age (day) Value: 14
  misc_feature: MA Experiment 20000329 PARAMETER Experiment Name: At_4deg_Cold_Sub_P Parameter: Organism Value: A. thaliana
  misc_feature: MA Experiment 20000329 PARAMETER Experiment Name: At_4deg_Cold_Sub_P Parameter: Plant Line Value: WS
  misc_feature: MA Experiment 20000329 PARAMETER Experiment Name: At_4deg_Cold_Sub_P Parameter: Temperature (deg C) Value: 4 vs. 22
  misc_feature: MA Experiment 20000329 PARAMETER Experiment Name: At_4deg_Cold_Sub_P Parameter: Timepoint (hr) Value: 6
  misc_feature: MA Experiment 20000329 PARAMETER Experiment Name: At_4deg_Cold_Sub_P Parameter: Tissue Value: Aerial
  misc_feature: MA Experiment ID: 20000347 Result: Up-regulated in Transcription
  misc_feature: MA Experiment 20000347 PARAMETER Experiment Name: At_2mM_SA_Sub_P Parameter: Age (day) Value: 14
  misc_feature: MA Experiment 20000347 PARAMETER Experiment Name: At_2mM_SA_Sub_P Parameter: Organism Value: A. thaliana
  misc_feature: MA Experiment 20000347 PARAMETER Experiment Name: At_2mM_SA_Sub_P Parameter: Plant Line Value: WS
  misc_feature: MA Experiment 20000347 PARAMETER Experiment Name: At_2mM_SA_Sub_P Parameter: Timepoint (hr) Value: 6
  misc_feature: MA Experiment 20000347 PARAMETER Experiment Name: At_2mM_SA_Sub_P Parameter: Tissue Value: Aerial
  misc_feature: MA Experiment 20000347 PARAMETER Experiment Name: At_2mM_SA_Sub_P Parameter: Treatment Value: 2mM SA vs. No Treatment
  misc_feature: MA Experiment ID: 20000355 Result: Down-regulated in Transcription
  misc_feature: MA Experiment 20000355 PARAMETER Experiment Name: At_Siliques_Sub_P Parameter: Age (day) Value: 21
  misc_feature: MA Experiment 20000355 PARAMETER Experiment Name: At_Siliques_Sub_P Parameter: Organism Value: A. thaliana
  misc_feature: MA Experiment 20000355 PARAMETER Experiment Name: At_Siliques_Sub_P Parameter: Plant Line Value: WS
  misc_feature: MA Experiment 20000355 PARAMETER Experiment Name: At_Siliques_Sub_P Parameter: Tissue Value: Less Than 5mm Siliques vs. Whole Plant
  misc_feature: MA Experiment ID: 20000634 Result: Down-regulated in Transcription
  misc_feature: MA Experiment 20000634 PARAMETER Experiment Name: At_10percent_PEG_Sub_P Parameter: Age (day) Value: 12
  misc_feature: MA Experiment 20000634 PARAMETER Experiment Name: At_10percent_PEG_Sub_P Parameter: Organism Value: A. thaliana
  misc_feature: MA Experiment 20000634 PARAMETER Experiment Name: At_10percent_PEG_Sub_P Parameter: Plant Line Value: WS
  misc_feature: MA Experiment 20000634 PARAMETER Experiment Name: At_10percent_PEG_Sub_P Parameter: Timepoint (day) Value: 12
  misc_feature: MA Experiment 20000634 PARAMETER Experiment Name: At_10percent_PEG_Sub_P Parameter: Tissue Value: Whole Plant
  misc_feature: MA Experiment 20000634 PARAMETER Experiment Name: At_10percent_PEG_Sub_P Parameter: Treatment Value: 10% PEG vs. No Treatment

SEQ ID NO: 95611 - protein, 741 aa, Arabidopsis thaliana; identical to SEQ ID NO: 91855
  peptide (1)..(741): Ceres Seq. ID no. 12729760
  misc_feature (1)..(741): Homolog of NCBI NO: 18394970 NR Description: wall-associated kinase 1; protein id:
  misc_feature (1)..(741): Homolog of NCBI NO: 25751318 NR Description: probable serine/threonine-specific protein kinase
  misc_feature (7)..(741): Homolog of NCBI NO: 15218170 NR Description: wall-associated kinase 5; protein id: At1g21230.1
  misc_feature (1)..(741): Homolog of NCBI NO: 15218959 NR Description: wall-associated kinase 2; protein id: supported by cDNA: gi_17064909 [Arabidopsis thaliana]
  misc_feature (1)..(741): Homolog of NCBI NO: 25287666 NR Description: wall-associated serine/threonine kinase (EC
  misc_feature (140)..(741): Homolog of NCBI NO: 166813 NR Description: serine threonine kinase
  misc_feature (1)..(741): Homolog of NCBI NO: 25287665 NR Description: hypothetical protein F16F4.10 [imported] -
  misc_feature (1)..(741): Homolog of NCBI NO: 15218167 NR Description: wall-associated kinase 4; protein id: At1g21210.1
  misc_feature (10)..(710): Homolog of NCBI NO: 34915126 NR Description: putative wall-associated kinase 2 [Oryza sativa
  misc_feature (291)..(695): Homolog of NCBI NO: 38567980 NR Description: OSJNBa0093F12.21 [Oryza sativa (japonica

SEQ ID NO: 95612 - protein, 411 aa, Arabidopsis thaliana; identical to SEQ ID NO: 91856
  peptide (1)..(411): Ceres Seq. ID no. 12729761
  misc_feature (1)..(411): Homolog of NCBI NO: 18394970 NR Description: wall-associated kinase 1; protein id:
  misc_feature (1)..(411): Homolog of NCBI NO: 25751318 NR Description: probable serine/threonine-specific protein kinase
  misc_feature (1)..(411): Homolog of NCBI NO: 15218170 NR Description: wall-associated kinase 5; protein id: At1g21230.1
  misc_feature (1)..(411): Homolog of NCBI NO: 15218959 NR Description: wall-associated kinase 2; protein id: supported by cDNA: gi_17064909 [Arabidopsis thaliana]
  misc_feature (1)..(411): Homolog of NCBI NO: 25287666 NR Description: wall-associated serine/threonine kinase (EC
  misc_feature (1)..(411): Homolog of NCBI NO: 166813 NR Description: serine threonine kinase
  misc_feature (1)..(411): Homolog of NCBI NO: 25287665 NR Description: hypothetical protein F16F4.10 [imported] -
  misc_feature (1)..(411): Homolog of NCBI NO: 15218167 NR Description: wall-associated kinase 4; protein id: At1g21210.1
  misc_feature (1)..(380): Homolog of NCBI NO: 34915126 NR Description: putative wall-associated kinase 2 [Oryza sativa
  misc_feature (1)..(365): Homolog of NCBI NO: 38567980 NR Description: OSJNBa0093F12.21 [Oryza sativa (japonica

SEQ ID NO: 95613 - DNA, 2552 bp, Arabidopsis thaliana; identical to SEQ ID NO: 91857
  misc_feature (1)..(2552): Ceres Seq. ID no. 12729762
  misc_feature: MA Experiment ID: 20000315 Result: Down-regulated in Transcription
  misc_feature: MA Experiment 20000315 PARAMETER Experiment Name: At_14day_Shoots-Roots_Sub_P Parameter: Age (day) Value: 14
  misc_feature: MA Experiment 20000315 PARAMETER Experiment Name: At_14day_Shoots-Roots_Sub_P Parameter: Organism Value: A. thaliana
  misc_feature: MA Experiment 20000315 PARAMETER Experiment Name: At_14day_Shoots-Roots_Sub_P Parameter: Plant Line Value: WS
  misc_feature: MA Experiment 20000315 PARAMETER Experiment Name: At_14day_Shoots-Roots_Sub_P Parameter: Tissue Value: Shoots vs. Whole Plant
  misc_feature: MA Experiment ID: 20000327 Result: Down-regulated in Transcription
  misc_feature: MA Experiment 20000327 PARAMETER Experiment Name: At_42deg_Heat_Sub_P Parameter: Age (day) Value: 14
  misc_feature: MA Experiment 20000327 PARAMETER Experiment Name: At_42deg_Heat_Sub_P Parameter: Organism Value: A. thaliana
  misc_feature: MA Experiment 20000327 PARAMETER Experiment Name: At_42deg_Heat_Sub_P Parameter: Plant Line Value: WS
  misc_feature: MA Experiment 20000327 PARAMETER Experiment Name: At_42deg_Heat_Sub_P Parameter: Temperature (deg C) Value: 42 vs. 22
  misc_feature: MA Experiment 20000327 PARAMETER Experiment Name: At_42deg_Heat_Sub_P Parameter: Timepoint (hr) Value: 1
  misc_feature: MA Experiment 20000327 PARAMETER Experiment Name: At_42deg_Heat_Sub_P Parameter: Tissue Value: Aerial
  misc_feature: MA Experiment ID: 20000328 Result: Down-regulated in Transcription
  misc_feature: MA Experiment 20000328 PARAMETER Experiment Name: At_42deg_Heat_Sub_P Parameter: Age (day) Value: 14
  misc_feature: MA Experiment 20000328 PARAMETER Experiment Name: At_42deg_Heat_Sub_P Parameter: Organism Value: A. thaliana
  misc_feature: MA Experiment 20000328 PARAMETER Experiment Name: At_42deg_Heat_Sub_P Parameter: Plant Line Value: WS
  misc_feature: MA Experiment 20000328 PARAMETER Experiment Name: At_42deg_Heat_Sub_P Parameter: Temperature (deg C) Value: 42 vs. 22
  misc_feature: MA Experiment 20000328 PARAMETER Experiment Name: At_42deg_Heat_Sub_P Parameter: Timepoint (hr) Value: 6
  misc_feature: MA Experiment 20000328 PARAMETER Experiment Name: At_42deg_Heat_Sub_P Parameter: Tissue Value: Aerial
  misc_feature: MA Experiment ID: 20000329 Result: Up-regulated in Transcription
  misc_feature: MA Experiment 20000329 PARAMETER Experiment Name: At_4deg_Cold_Sub_P Parameter: Age (day) Value: 14
  misc_feature: MA Experiment 20000329 PARAMETER Experiment Name: At_4deg_Cold_Sub_P Parameter: Organism Value: A. thaliana
  misc_feature: MA Experiment 20000329 PARAMETER Experiment Name: At_4deg_Cold_Sub_P Parameter: Plant Line Value: WS
  misc_feature: MA Experiment 20000329 PARAMETER Experiment Name: At_4deg_Cold_Sub_P Parameter: Temperature (deg C) Value: 4 vs. 22
  misc_feature: MA Experiment 20000329 PARAMETER Experiment Name: At_4deg_Cold_Sub_P Parameter: Timepoint (hr) Value: 6
  misc_feature: MA Experiment 20000329 PARAMETER Experiment Name: At_4deg_Cold_Sub_P Parameter: Tissue Value: Aerial
  misc_feature: MA Experiment ID: 20000347 Result: Up-regulated in Transcription
  misc_feature: MA Experiment 20000347 PARAMETER Experiment Name: At_2mM_SA_Sub_P Parameter: Age (day) Value: 14
  misc_feature: MA Experiment 20000347 PARAMETER Experiment Name: At_2mM_SA_Sub_P Parameter: Organism Value: A. thaliana
  misc_feature: MA Experiment 20000347 PARAMETER Experiment Name: At_2mM_SA_Sub_P Parameter: Plant Line Value: WS
  misc_feature: MA Experiment 20000347 PARAMETER Experiment Name: At_2mM_SA_Sub_P Parameter: Timepoint (hr) Value: 6
  misc_feature: MA Experiment 20000347 PARAMETER Experiment Name: At_2mM_SA_Sub_P Parameter: Tissue Value: Aerial
  misc_feature: MA Experiment 20000347 PARAMETER Experiment Name: At_2mM_SA_Sub_P Parameter: Treatment Value: 2mM SA vs. No Treatment
  misc_feature: MA Experiment ID: 20000355 Result: Down-regulated in Transcription
  misc_feature: MA Experiment 20000355 PARAMETER Experiment Name: At_Siliques_Sub_P Parameter: Age (day) Value: 21
  misc_feature: MA Experiment 20000355 PARAMETER Experiment Name: At_Siliques_Sub_P Parameter: Organism Value: A. thaliana
  misc_feature: MA Experiment 20000355 PARAMETER Experiment Name: At_Siliques_Sub_P Parameter: Plant Line Value: WS
  misc_feature: MA Experiment 20000355 PARAMETER Experiment Name: At_Siliques_Sub_P Parameter: Tissue Value: Less Than 5mm Siliques vs. Whole Plant
  misc_feature: MA Experiment ID: 20000634 Result: Down-regulated in Transcription
  misc_feature: MA Experiment 20000634 PARAMETER Experiment Name: At_10percent_PEG_Sub_P Parameter: Age (day) Value: 12
  misc_feature: MA Experiment 20000634 PARAMETER Experiment Name: At_10percent_PEG_Sub_P Parameter: Organism Value: A. thaliana
  misc_feature: MA Experiment 20000634 PARAMETER Experiment Name: At_10percent_PEG_Sub_P Parameter: Plant Line Value: WS
  misc_feature: MA Experiment 20000634 PARAMETER Experiment Name: At_10percent_PEG_Sub_P Parameter: Timepoint (day) Value: 12
  misc_feature: MA Experiment 20000634 PARAMETER Experiment Name: At_10percent_PEG_Sub_P Parameter: Tissue Value: Whole Plant
  misc_feature: MA Experiment 20000634 PARAMETER Experiment Name: At_10percent_PEG_Sub_P Parameter: Treatment Value: 10% PEG vs. No Treatment

SEQ ID NO: 95614 - protein, 735 aa, Arabidopsis thaliana; identical to SEQ ID NO: 91858
  peptide (1)..(735): Ceres Seq. ID no. 12729763
  misc_feature (1)..(735): Homolog of NCBI NO: 15218171 NR Description: wall-associated kinase 3; protein id: At1g21240.1
  misc_feature (1)..(735): Homolog of NCBI NO: 15218170 NR Description: wall-associated kinase 5; protein id: At1g21230.1
  misc_feature (277)..(735): Homolog of NCBI NO: 25287657 NR Description: F16F4.8 protein - Arabidopsis thaliana
  misc_feature (1)..(310): Homolog of NCBI NO: 25287657 NR Description: F16F4.8 protein - Arabidopsis thaliana
  misc_feature (1)..(735): Homolog of NCBI NO: 15218959 NR Description: wall-associated kinase 2; protein id: supported by cDNA: gi_17064909 [Arabidopsis thaliana]
  misc_feature (1)..(735): Homolog of NCBI NO: 25287666 NR Description: wall-associated serine/threonine kinase (EC
  misc_feature (1)..(735): Homolog of NCBI NO: 25287665 NR Description: hypothetical protein F16F4.10 [imported] -
  misc_feature (1)..(735): Homolog of NCBI NO: 15218167 NR Description: wall-associated kinase 4; protein id: At1g21210.1
  misc_feature (229)..(686): Homolog of NCBI NO: 38347179 NR Description: OSJNBa0024J22.5 [Oryza sativa (japonica
  misc_feature (32)..(280): Homolog of NCBI NO: 38347179 NR Description: OSJNBa0024J22.5 [Oryza sativa (japonica

SEQ ID NO: 95615 - protein, 598 aa, Arabidopsis thaliana; identical to SEQ ID NO: 91859
  peptide (1)..(598): Ceres Seq. ID no. 12729764
  misc_feature (1)..(598): Homolog of NCBI NO: 15218171 NR Description: wall-associated kinase 3; protein id: At1g21240.1
  misc_feature (1)..(598): Homolog of NCBI NO: 15218170 NR Description: wall-associated kinase 5; protein id: At1g21230.1
  misc_feature (140)..(598): Homolog of NCBI NO: 25287657 NR Description: F16F4.8 protein - Arabidopsis thaliana
  misc_feature (1)..(173): Homolog of NCBI NO: 25287657 NR Description: F16F4.8 protein - Arabidopsis thaliana
  misc_feature (1)..(598): Homolog of NCBI NO: 15218959 NR Description: wall-associated kinase 2; protein id: supported by cDNA: gi_17064909 [Arabidopsis thaliana]
  misc_feature (1)..(598): Homolog of NCBI NO: 25287666 NR Description: wall-associated serine/threonine kinase (EC
  misc_feature (1)..(598): Homolog of NCBI NO: 25287665 NR Description: hypothetical protein F16F4.10 [imported] -
  misc_feature (1)..(598): Homolog of NCBI NO: 15218167 NR Description: wall-associated kinase 4; protein id: At1g21210.1
  misc_feature (92)..(549): Homolog of NCBI NO: 38347179 NR Description: OSJNBa0024J22.5 [Oryza sativa (japonica
  misc_feature (1)..(143): Homolog of NCBI NO: 38347179 NR Description: OSJNBa0024J22.5 [Oryza sativa (japonica
